United States Patent Application Publication US 2007/0192889 A1 - sequence listing, part 12

SEQ ID NO: 23490 - DNA, 2824 bp, Oryza sativa
  Clone ID: TF_OsC1713_4588
atgcaatgcttctatgtttcacagggcaaacgaagtgaaccgcctctctctcctaaggaggaggctaagtttgaggcttcggattgcctgttccgtggagcattgatcagtgtactcactgacaatatagtggacgtgtacatgcacatgccttcagggaaggacatgtgggatgcacttgaggccaagttcggagtttccgacgccgtcagcgagctgtatgtcatggagcagttctatgactacaagatgatgctggcaaaggaatttgagaacaacaactgtgagttgccggacaagtttgtggcgggtggcattattgccaaattgccaccttcttggtcggactttgctacttctctaaaacacaagaggcaagagttcagcgttactgatctcattggctctttgggtgttgaggagaaggcgagagtaaaggacaaccggggcaaaaatatcgagggaggttctagtgccaatttggtgcaaaagaagaaccctcatgcatcccacaacaacaacaacaagaaagtcaagcctgatgtcaaaccaaaggctacaaccaattttaagaagaaaggcaagggaaaggccaagggcgactgctttgtgtgcggtaagcctgggcattgggcgaagaattgtcctgatcgcaaggacaagaagtctgccaacatggttattagcgagggcggaggaacatcggggtatggtcgggagaggttcctccttgttgatgggaaacgggtcgcttgcggctgttcatggtgttggtacggtcgatctgaagtttacttcgggaaagaacgtgcagcatgtcccttcaataaagaagaatctagttagcggctctctattgtgtagagatggttttagacttgtgtttgaatccaataaatgtgtcgtatctaaatatgaaacttttattggaaaaggttatgacagcggaggttccaagtgccatacttgtgttcaatcgaaacatcctcgcaaacctcacaaggcatctgaggcgagaaatttggcaccactagaactagttcattccgatctgtgcgaaatgaacagtgtgttgactaaagggggaaagaaatatttcatgacactgatagatgattgcactagatattgctatgtgtacctattgaaaacaaaggatgaggcattgcattactttaagatctataaagctgaggtagaaaaccaacttgaaaggaaaatcaaacggttgaggtcagataggggtggagagtatttttccaatgagtttacgtccttttgcgaagagtttggaattattcatgagaggacgcctccctattcaccccaatcaaatggggtagccgaaagaaagaatcgcactctaactgagatggtgaatgccatgttagatactgcgggactttccaaggaatggtggggtgaggcaattttgactgcttgtcatgtcctgaataaaattccagtgaagcataaggaagtaataccattcgaagaatgggaaaggaagaaattaaatttctcatacctacgcacatggggctgcttggccaaggtaaatgtacctatagccaaaaagcgtaaacttggaccaaagaccgtagactgtgtgttccttggttatgctatccacagcgtgggctataggttcctaatagtaaactctggagtacccgacatgcgtgttggtacaattactgagtccagagatgccacattttttgagaatgaatttcccatgaaaaatacacctagcacgtctagtcaagaacctgttttaccccatgagcactttgcaccgatagaacacaatgatcaaacgcctgaggaaaatcctgaggaggataacattgtagcaactcgaaagagtaagagagaaaggactgcaaagtcttttggagataactacattgtataccttgtggatgacactccaagaaccatagaagaggcatattcatctactgacgctgactattggaaggaagtggtacgcagtgagatggactcaattatgtctaatggtacttgggaagtcgttgagcgtccatatgggtgcaagcctgtagaatgcaaatgggttttcaagaaaaagcttaggcctggtggtacaattgaaaacctcaatgtgattgaggaggttaaggactttttgtccaaaagctttgaaatgaaggatttgggagtgactgatgttattcttaacattaagctactgagaggagatgagggtgggattacactcgtgcaatctcactatgtggacaaggttttgagtcgctttggttatagtgactgcaagccagctccaactccttatgactccagtgtgctattaaggaaaaaccgaagaatagcaagggatcaattgagatactcccaaatcattggttcattgatgtacttggctagtgcaacgaggcctgacatctcatttgctgtgagcaagctgagccggtttgtttcaaatccgggagatgatcattggcaagctctggaaagggtcatgcgctatctaaagggtacaatgagctatggaattcactatactggttacccaaaagtactggaagggtatagtgactcaaactggatatctgatgctgatgagataaaggccacaagtggatatgtgttcacacttggaggtggcgctgtttcctggaagtcttgcaagcagaccatcttaacgaggtcaacaatggaagcagaactcacagcactagatactgccacaattgaggccgagtggcttcgtgaactcctgatggatttgccggtggttgaaaaaaaaaccagtgccagctatcctaatgaactgtga

SEQ ID NO: 23491 - DNA, 2544 bp, Oryza sativa
  Clone ID: TF_OsC1713_5062
atggcgacagtgtgcccatgtgcgcggctaccgacgggcatgtcttctgtctacctggtcgtgtccgagtgcgtggccctcgcacctgcctccgaaaccacgcgctgctgcgacgtttgcacggacgggcgggcgatcaggtttttggagagcgtaaggcgcgactactcactgttcgtcaacatctacttcaccttcaccaatatgtcgaacactggagacaacggcaacactggatacaaggagaaggaggctcccgtcaacatcaacggaggcaatactgcctcaaactccaacggaggaccattcttgggtgtactcgctgacaatatagtggacgtgtacatgcacatgccttcagggaagaacatgtgggatgcacttgaggccaagttcggagtttccgacgccggcagcgagctgtatgtcatggagcagttctatgactacaagatggttgatgaccgttctgtagtggaacaagctcatgagattcagatgctagcaaaggaacttgagaacaacaactgtgagttgccggacaagtttgtggcgggtggcattattgccaaattcccaccttcttggtcagactttgctacttctctaaaacacaagaggcaagagttcagtgttactgatctcattggctctttgggtgttgaggagaaggcgagagcaaaggacaaccggggcaaaaatatcgagggaggttctagcgccaatttggtgcaaaataagaaccctcacgcatcccataacaacaacaagaagaaagtcaagcctgatgtcaaaccaaaggctacaaccaattttaagaagaaaggcaagggaaaggccaagggcgactgctttgtgtgcggtaagcctgggcattgggcgaagaattgtcctgatcgcaaggacaagaagtctgccaacatggttattagcgagggcggaggaacatcggggtacggttattttttacctacagttctctctgtttttcattcacctgattggtgggttgatactggtgctaatattcatgtcgggagaggttcctccttgttgatgggaaacaggtcgcttgcggctattcatgtttttgatattgctgtgtacctattgaaaacaaaagatgaggcattgcattactttaagatctataaagctgaggtagaaaaccaacttgaaaggaaaatcaaacggttgaggtctgataagggtggagagtatttttccaatgagtttacgtccttttgcgaagagtttggaattattcatgagagaacgcctccctattcaccccaatcaaatggggtagccgaaagaatgaaccgcactctaactaagatggtgaatgccatgttagacactgcgggactttccaatgaatggtggggtgaggcaatttttactgcttgtcatgtcctgaataaaattccagtgaagcataaggaagtaacaccattcgaagaatgggaaaggaagaaattaaatctctcatacctacgcacatggggctgcttggccaaggtaaatgtacctatagccaaaaagcgtaaacttggaccaaagaccatagactgtgtgttccttggttatgctatccacagtgtgggctataggttcttaatagtaaactctggagtacccgacatgcgtgttggtacaattactgagtccagagatgccatattttttgagaatgaatttcccatgaaaaatacacctagcacgtctagtctagaacctgttttaccccatgagcactttgcaccgataaaacacaatgagcaaacgcttgagggaaatcctgaggaggatagcattgtagatactcgtaagagtaagagacaaagggttgcaaaatcctttggagatgactacattgtatacctcgtggatgacactccaagaaccatagaagaggcatattcatctcctgacgctgactactggaaggaggcagtacgcatcgttgagcgtccatatgggtgcaagcctgtaggatgcaaatgggttttcaagaaaaagcttaggcctgatggtacaattgaaaagtacaaggcaaggcttgtggccaagggttatacccaaaaagaaggcgaggattttttcgacacctactcaccagttgcccgcttgaccacgattcgagtactacttgctctggcagcctctcatggtcttctcgtccatcagatggacgttaagacagttttcctaaacggagagctggaggaggagatctatatggatcaaccagacaggtatgtactaaaaggtcaggagggaatggtgtgtaaactgttgaaatccttgtatggccttaagcaagcacctaagcaatggcatgagaagtttgaccccacacttacatctgctggctttgttgtgaacgaagctgataaatgtgcgtactatcgctatggtaggggagaaggagtgatcttgtgcttatatgtcgatgacatattgatctttgggaccagcttcaatgtgattgaggaggtcaaggactttctgtccaagagttttgaaatgaaggatttttga

SEQ ID NO: 23492 - DNA, 654 bp, Oryza sativa
  Clone ID: TF_LIB4833-033-R1-N1-B4
ccggccgggctcttcttcctcctcctcgagacctcggcacctcgcacgccacgcttctcctcctcttcctatcccaatccactcggcgacccccctcgccgtcgccgcgctgcgccggcgagcgccacgggagcagcagccctcgccgctccgcggctagctagctcgtctcctcgtccgcctcgcgcctgctggagatccgccccccgacccccgtgatttcctaatgatttgtgcaacaattgtaagcgtccaggacattttgctagagattgtccaaatgtggctctttgccatgcatgtgggcttccagggcacattgcagcagagtgttcttccaaagatctctgctggaactgcaaagaacctggccacatggctaacagctgcccaaatgaagggatatgccgcaactgtggcaagtcgggtcacattgcaagagaatgcagtgctccaccaatgctgccaggtgaaatgaggctttgcagcaactgctacaaaccagggcaccttgctgcggaatgcaccaatgagaaggcctgcaacaactggtaggaagagtggccatcttgctcgtaactgccctaacgagcccgtctgcacctatgcaacgtgtcaggacatttggcccgagagtgccccaaatctgatgct

SEQ ID NO: 23493 - DNA, 2535 bp, Oryza sativa
  Clone ID: TF_OsC1232_8
ctagcgcgcggagtggcgggggccggcgatgacgacggcgggcggtttggagcggagcggcgacagcggcgactggcgcgggcagagctcgccccctgttgccagcacatccttccccgtcgccagaacgccattctccgtcgccagcacatctttccccgtcgccagaacgtctctccccgccaccagcgccgtgctcgtggcaagcacacgcggcacgacattacacgcagcatcatctcccctccccgccatcctattcccaggctcgccacttgagtgttcctctatcgtatccctgtccgaagcatgcaggcccgagccggcgtgttcagtgtgctcgtcgtcgcgggcggtatccctcagcgcgccggggttggtagggatcatctcggacacccgctgaactgaagatgtcgaccaggtgcgccccggtagcccaccagcaaagccagatgctccgccaaaaggccgacctccgccttgtttcgacgtccacggccctgtgccgtcgattcggccagcccagcaggagaacgtaacctggcgcgggacgtcatcatcatcttcgtcgttggaggccgtggagaggggaacatggaggggcgtcgggtcaatgatctcctcaatgtgcacaatgatattgtacgtcagcgtgcacttgtgcagaggcgcccttggaatcctgattgatcccgccatacgttcccagcacggcgggccgccccccgcgcgctctgggatctccacctccagcgttgttggcaccgcagacgggttcttgagccaggcgaacatggtgagaaccctcgcgtccgccggcggaacaagctccaccaactctccacccagctcacggatcagctgggccatcgcctcctcatcccaggcgtgctggggaagcccttctaatgacagcttggtgaagaattggaacctcgtgctgctggccagcaggcgcctgttccagctcttgaaggcgattggcgccccttggaagaagacttgtttggatttgccgaggacccaatccttttctctggcagaacgaaacacaattaggtagtcctcaggggtcgttacctccacccggaagtgcgcggggaggatgccacagtcgacgatcaccgcaaccagatctctaggtgagagcgctggctggttgccaagcactgtggccaggagcaccttctgctcgaagatggcctccgtctccaccatgcgcggcgtccaggagatggtgcaccgccccgactccggccggatgttggcgtccccggtccgccactccttcatgacccgagagggctgctgagcgcagatctgaaagctagccatgccatcaccagcagccactccctcttctcgccccttctttctgggaggcaaagcttctagcacttctttccgcggtttttcacctcccgctggcttcgttgccacttcttttgaaccagtggccggctgcgccctagccgcacgggaggtagggcaattcctagcgatgtgccctgagtaccagcagttgtagcatcgcgtgcttcctgggcaggcggatttctggtgtcctagccccaggcagttaaagcagcatccttggagccagcgggggactgttcttgccttcttgaatgcctggtcttcttcgccccgttgatccaccgcattaactgcgggacgcgacaggacgatatcacgccaggacgtccttcctagctgcgacatgagagaggatgttgggaggtggtcgccggcgtcggagtgcccaccggcgattagatggtggtcaccgtcgccggagtgacgactggcgatgagtctacggacctctctatccaccaagccacaaccacttttctgccatcttcctgaaaaggggaacatgtccacattgcagctggagccgcagctgcagccatggccggcctcaccggagccggcagccaactcgaaacccggttcgctgtgccccttttcaggtgcaacaccgaggaccatggtcactgaggtggtggtggtgttcttctctgccaggtcagggtacatcttttgtacaagatgtggcaggagctcacgcaaccttctagcgccggccagcatccagagcttggcctcctctatgattttggtaagcagatacgtcgttgtggactccttgtgctcaaaaatccgctgattctgctccttccatatctcccacaccacccatctggccacggtggtgggcttgacggcgtcgcggatgcagcgcctgcgtgaacctactcttgtccaactccggaggtcgccgtccgccggcgtgaactcctccgacgtcttgcagctggagccacagctgcagccatgggcagcctcaccagattcagctgccttgccaaccatcacctcaaagtgccccttctcaggtgcaacgccgaggacagtggttgcagtagtggtggtggtggtgatcttctcagccaggtcagggtacatctttccgcagccaccgccgcatccgcaggaaccgcagttacaacttccaccgcacgacat

SEQ ID NO: 23494 - DNA, 2190 bp, Oryza sativa
  Clone ID: TF_OsC359_6616
aaagaaagtgaatccgagttgcttccgcctcgcccgtgccctagcgccgccgccgccgcgaatcccgccgcttacgtccgtcccgcgtgcaatcaagaggggggaaatattccccgtgattccctccctctttccccccccccccatttttccctccctctctccctcggattcgtttggaaactcctcccctaacctcgccggcgcatcaatggcggccggatcttccgcgcccgtttccccctcatccggccgctctctccccctcccaaccctatataaacactccccgtgcctccctccgccgtttccgccactcgccgcactctctctccgccggaatcgagctcgcgccgtcgctctctctctccgccgtcgccgccgagctccggtccgccgctgtcctcgccccggaccatctcccgcctcggcgccgcctccttcggcttcgccgcaacctcgccgacctcgtccacctctccgtttcggtcgccgaccgccggaacgccgccgtcccggtcaacccgagccacgcagccgcccctctccgctccagtcgccgttcccgtcgtcgccgtcgacccggggtgagccgtggaccgccgattcgtttcccccttccctcccctctctcgggcgccgctccgccgcgccggtggtcgccggcgggcgaccatcggggcgcgggcgcgccgcctcccgtcggctgtgccggcgtggccgccttcgggcgcgtcccgcggctgccatgtggggcccggccgtcagccgcccgcaccctcgggtgcggctgacgcattggacccacggcgctggccggtgtgagccgggtgcacccggtccaccgtggaccgtgagactgccgcgtgggccccactcccatggacccggacaaatgaaggctacacgagctgcggcccgatggctgacaatgagaaaggcaataaggtcagaagtcaggacattggtacctcgagctcccgagtgaatgaagcaccagacaccagttgtgtgacactggtccaacacctgattaaccagaaccgattgcttatagagatactacagcagcatcagacgccaattctgaacctgagtcagatacaacctcaagtgcagttggaggcagtccaagcactcacaccacaagtcagcatgccgccagcatcccgaaggacccatggtgacgtgccacatgttgactcaaaagaagcaagtatcatttgttttatgtgtgatgagcaagggcactatgcaagggagtgtcctcagcagaaaagaaaaacaccaatgcgaaccgaagatgaagtccgtaagatgatcattaccagcacaaaatggcctccactaggaatgacaaaacgtcagagaagaaataccttccgaggtgcaccacagttgacagagcaccttttagctaatggaggtagagtgtctgatagtgaagattcagatcaagtctcctcagatgatgaagatgaaatggaacgtaaggcatgctctcgttgtggagaaatcggtcatgttgccagctcgtgtgccactacatgcgttcattgtgaggaagaccatccacccgacaggtgtccaacgagcaggatcacttgtttcttttgtgaaggaactgatcatgtaccaaaagattgtcaattcagttttctgctgacgaagaagatggctaaccaacccgccagttccaacggagagaagcatcaaggcaacaccaatcctcgccaagattacagtttcagcctaaatccagtgccaggacagaggaatcaaaatgagaaaagaaaatgccgagtccgggaagatatctgttgcttcaattgtcaaggaatgggtcatttcgccgacaagtgcccaaaaccgagaaacgtagctgccagcacgtcagtccacgcaactccctgcaatcagaagcttgctcctcagcgaattgtcatccatgcatcccgaagcagtcctatagcccgcgttgcaacagctccaactccagcgagtgcattaccacaaggtgtcaatgctcaatttcagccccagcaaagaattgtcgtcgatggaagaagttgtgtctctccccgacctactccaggccgagcaaagggcaatcaacctccggagggcgataccaagcagaagaccgccatccgcttcaaacagcaatcagaagaaaggttctcctgtgaa

SEQ ID NO: 23495 - DNA, 1593 bp, Oryza sativa; identical to SEQ ID NO: 14864
  Clone ID: TF_OsC359_6910

SEQ ID NO: 23496 - DNA, 2395 bp, Oryza sativa
  Clone ID: TF_OsC359_7459
atggctgacaatgagaaaggcaataaggtcagaagtcaggacatcggtacctcaagctcccgagtgaatgaagcaccagacaccagttgtgtgacactggtccaacacctgattaaccataaccgattgcttatagagatactacagcagcatcagacgccaattctgaacctgagtcagatacaacctcaagtgcagttggaggcagtccaagcactcacaccacgagtcagcatgccgccagcatcccgaaggacccatggtgacgtgccacatgttgactcaaaagaagcaagtatcatttgttttatgtgtgatgagcaagggcactatgcaagggagtgtcctcagcagaaaagaaaaacaccaatgcgaaccaaagatgaagtccgtaagatgatcattaccagcacagaatggcctccaccaggaatgacaaaacgtcagagaagaaataccttccgaggtgcaccacagttgacagagcatcttttagctaatggaggtagagtgtctgatagtgaagattcagatcaagtctcctcagatgatgaagatgagaagtctccccaaggtttcaaccagaataaaatggaacgtaaggcatgctctcgttgtggagaaatcggtcatgttgccagctcgtgtgccactacatgcgttcattgtgaggaagaccatccacccgacaggtgtccaacgagcaggatcacttgtttcttttgtgaaggaactgatcatgtaccaaaagattgtcaattcagtttgctgctgacgaagaagatggccaaccaacccgccagttccaacggagagaagcatcaaggcaacacaaatcctcgccaagattacagtttcagcctaactccagtgccaggacagaggaatcaaaatgagaaaagaaaatgccgagtccgggaagatatctgttgcttcaattgtcaaggaatgggtcatttcgccgacaagtgcccaaaaccgagagacatagctgccagcacgtcagtccacgcaactccctgcaatcagaagcttgctcctcagcgaattgtcatccatgcatcccgaagcagtcctatagcccgcgttgcaacagctccaactccagcgagtgcattaccacaaggtgtcaatgctcaatttcagccccagccaccagttgacaagacagaggccacctttcaactattacagaattggaactacccagcaggggcaaccaacgttcaagtacctacagtccagcaacagtgcaagttatcagaatttctcaaaactgagactccaacctttgccattgtcgtcgaacctatggaagccagtgattggttgcgcacagtcgagaagaagctggggttgattcagtgcacagaccaggagcgggttgtcttcgcaactcatcagttggttggactggcttcagaatggtgggatagctacgaagcatcacggccagaaggacataccatcacctgggacgagttttcatctgtattcaagagatcccatgttcccgcaggaatgatcacactgagaaaacgagagttccgctacctgaagcaagaagatttgaccgtcacagagtacctgcacgagttccatcgtttggctcactatgcaccagaagatgtggaaaatgatgaagacaaacaagagaagtatctccaggggttaaaagatgagatcgcagtgcaactactcctagaggaatatgaagattttgagaaacttgtggacaaagccatacaactcgaaagtgagcataatcggatgaagaactgtaagagaaggattgtcagcatcccagtattcccatgtggtaaccaaagacagcgcacggagccacttcagatcaccggatcttctgttgcgcatcaagagtttccgccccaagaagatggacacaatgcagacaacaacattagcaatactaatgatgatgataccaccaacaaccatgcttcttgccccattagtgaccactcaaatcaagcgtgcaatgtcaacatcattcaccaaggtgtcgacgatagtatcaatgatggcacccaaaatgacaaccctagcaattgtgactctgagaaagactccaatggtgatagcaactatggtttctctgaaagacagcacgcccaaggacctcattgccccagaagcatcctcaacacccggagcgaagagtacctggttgagaaaggtcgaaagtggtaacttgtatgaggttgactccgaagatatgaatcatgagaagttctggaacggaagcatcattaaactaccgcaacctagtctgagtcagctaaaaggtgcaccctggttcaagtcaggtgaagagaagattccatccgcaacagaaggtcaagccaagcagttccgagtggtgaagttttgctga

SEQ ID NO: 23497 - DNA, 5158 bp, Oryza sativa; identical to SEQ ID NO: 14843
  Clone ID: TF_OsC359_5506

SEQ ID NO: 23498 - DNA, 4791 bp, Oryza sativa; identical to SEQ ID NO: 14847
  Clone ID: TF_OsC359_6712

SEQ ID NO: 23499 - DNA, 5437 bp, Oryza sativa
  Clone ID: TF_OsC359_8039
cccgccgccaccttcgccttcgcctctcgtcgcccgtagcgccctagcgccgtgtgccctagcgccgccgtcgccgccgtcgctccagccgtgcgccgccgccgtctaggtcgtcgtcgtcgctcgggaagaccgccgtcgtggtcgccaagtcgtcgccgtcctcgtccgccacttcgccaccgtcggagaccgccggagcatcgtcgccgtcgtcaagccgaagagcgccgccgtttcaacctcgtcgccgtcgccgtccgttggtcttccgccgtcgctttggtcgccggtgagttcgccgtgccgtccgctacccgttggtgccttccgttcgcgccgccgcgccgccgttcgccggtgagcgtgtgccgttcgagccgtccgagccgccgagccgccgccgccggtggtgacgtcatcgccgacgtcatcgtcgccctctcccattccgtcgtttccggagagtccgttttcgcaggagaagagtttgaagagttccaaggccagcaaggcaactcctggtttggaatggtatattcctggtttggagataggactgtgcagccgggatggttgttcagaatggttgggcctatacaacaggatgccgcgctacaagcctgagtacttgtttggtgttgagggatttgtccaggagttgcgtacgatgtcctttgccataggatttgggactgcccctttttatgcccaaattcctcatgatcgtcacgaagaaaagtgccgagtcaaagtcaccttgaacagtaatagtgaagatatcccctcagtgatgttcgaagccggaggaagaaactacatccatacatgtcaggaggtggcaaggatcgccataggagagctccgcgatcgctacagtgatcagttggccgacactgagtatcgctaccatcctcgccaaccccagggaagtgaccgtggcagctaccttgagactgagggaattgagaatgatgctaccacaaggcatttggttgagatgctgtgggctatggatgaaacccgtgcggagactgtgttagcggctcaagatcgtgaagatcggaatcgtggtaagatttgcaagttagaggacaaggtggatcgtttggagaaggaactagccgtattgaagggagaagcaccaccgcagaaggccagggttcgtctcaccgcgaggaagagagctctatttgtccctcgctaccaattggtgccaaaggtccgtgtggtggagaaagaagttaccccagccctagcagatcctccggtcgtcaatatggtgctcactcgcagcaacgggaatggccccaatagtaacaataacaataacaatgaagggaacccaactcttgcccaagttcttgctcaacagacacagcttatgaacatgatgatgcagcaactccagaaccagcagaaccagggaaataaccatgcacctccccagaacaagttagcagaatttcttcgtgtgaggccgcctattttctctagtaccgctaatcctgttgaagctggtgattggctgcatgccatagagaagaagttggatttgcttcagtgcaccgatcaggagaaggtctcatttgcatcacaccagctgcatggccctgcctctgaatggtgggatcacttccgccttaataggattactgctgaacctatcacttggcttgagttcaccgctgctttccggaagacgcatataccatcgggagtggtgtctctcaagaagaaggaattcaggtcgcttacccagggatctcgctctgttaccgagtatctgcacgagttcaatcgtctggctcgttatgctccggaagataagttagtggataaggctattcgtcaggaggacaaatacaatcgcatggagcagaagaaacgccggattgctcatttcatgacgcaacaggggaataatcagaggccgcgtcttactttaggaccccagtccatgccacagggaggttcttcgtctgttgttcgtccgcagcgtcagttcttcaacaacaatgctggcaacaacatccgcaatcaagctccacgccctgttgcagctttgacacagcaacaacctgccaagaaggagcaaggcagcaagcccgtggtgtgtttcaactgtggagaaccaggacattacgctgacaagtgtccgaagccccgacgcgcgaaggttgtccctgcccagagcaactctaccgcaccagcatcaaaggcccgtgtcaatcatgttgctgctgcagaaactcaaggtgctccagatgtgattttggccccttctatcagaatagaaattcaaggagtaccatttctggccaatcttatcctgttagaatccaaagaccttgatgtcatcctagggatggactggttagccagacataaaggtgtgatagactgtgctaacagaaaaataactctcaccagcaatgatggtcgagttgtaactgtgcatgcattgtctcctgagtttttaaggtcaagactgaaccaaataactttggaagagattcctatagttcgggagtatcccgatgtgttcccagatgatttacctggtatgccgcctaaaagggatatagagttcagaatagatttggtaccaggaacaactccgatccataagagaccttatagaatggcagccaatgaattagcagaagtcaagaggcaagtagacgatttgcttcagaaaggatacatcagaccgagttcatccccatggggagctccagtaatttttgtggaaaagaaagaccatacccagaggatgtgtgtggactatcgtgcactaaatgatatgactatcaagaataagtatccgctgcccagaattgatgatttgttcgatcagcttaaaggtgccaccgttttctccaagatagatcttcgatcagggtatcatcagttgagaatcaaagaggaagatatacctaagacagcttttaccactaggtatggattgtttgaatgtactgttatgtcttttggacttaccaatgcccccactttcttcatgaacttgatgaataaggtgtttatggaatacctagacaagttcgtggtagtctttattgatgacattcttatctactcccgaaccaaagaagagcatatagaacatcttcgccttgcactagaaaagctacgagaacatcaactgtatgctaagtttagtaagtgtgaattttggttgtctgaagtgaagttccttggtcacgtcatctcagcaggaggagttgccgtcgatcctagtaatgtggaatccgtaaccaactggaaacaaccaaagacagtttcagagattcgcagtttcctaggcctcgcgggatattatcggaggtttatagaaaatttttccaagattgctaagcccatgacacgattgcttcagaaagatgtgaagtacaagtggtcagaagaatgtgagcagagttttcaagagttgaagaatcgcttaatatcagctcctattttgattttacctgatccaaagaagggtttccaagtgtattgcgatgcatccaaactggggttaggttgtgttctgatgcaagatgggaaggtggttgcctatgcatctcgtcagttacgtccgcatgagaagaactaccctactcatgatcttgaattagctgcagtagttcatgcgttgaaaatttggcgtcattatctttttggtactcgtacagaggtgtataccgatcacaagagtttaaagtatatctttactcagccggatttgaacatgagacaacggagatggttggaattaattaaggactatgacatgggaattcattatcacccgggaaaggctaatgttgtagcagacgctcttagcaggaaaggctattgcaatgctacggaaggacgacagttgccattggaattatgcaaggaatttgaaagattaaatttgggaattgtcagtacaggtttcgttgcagccttagaagcgaagcccactctaattgatcaagttagagaagcccaaattaataatcctgatattcaagaaattaagaagaatatgagaagaggaaaagctatcggtttcttggaagatgagcaaggaactgtatggttgggtgagagaatctgcgtccccgacaacaaagatttaaaagatgcaattctgaaagaagcccatgatactttatactccattcaccctggtagtaccaaaatgtaccaggatctcaaggaaagattttggtgggcaagtatgaagcgtgaaattgcagaatacgtagcagtatgtgatgtttgtcagcgagtcaaggcagaacatcaaaaacccgccggtttgttgcagcctttgaagattcctgaatggaaatgggaggaaatcggtatggatttcatcactggtttacccagaacgtcatcaggtcatgactctatttgggtgatagtcgacagacttaccaaagtggctcatttcatcccagtaaagacaacatattctggaagtcggttggcggaattgtatatggcaaggattgtgtgtttgcatggcgtccctaagaaaatagtgtctgatcgaggcagtcagtttacttcaaaattttggaagaagcttcaggaagagatgggttctaagctgaactttagtactgcttatcatccacagacagacggacaaaccgaaagggtgaatcagattttggaagatatgttgagagcttgtgctttagacttcggtggaagttgggataagaatctaccttatgcggaattttcgtacaacaacagttatcaagctagtcttcagatggctccttacgaagcactgtatggtcggaagtgccgcactccgcttttgtgggatcaaacgggagaacgtcaggttttcgggacggatatcttgagggaagcagaagaaaaggtgaaaatcattcaagaaagattgcgtgtggcccagtctcgccataagagttatgccgacaatcgtcgtagagatctaagttttgacgcaggagattatgtgtaccttcgtgtcacgcctcttcgaggggttcatcgttttcataccaaaggaaaattggcaccgcgttttgtgggaccttataagattatcagtagaagaggagaggttgcttatcagttggagttacctcaatctttggcaggagtccataatgtgttccatgtgtcgcagttgaaaaagtgtttaagggtacctaccgaagaagctaatcttgaacatatagaagtccaagaggatctgacctatgttgagagaccaatccatatcttggaaatagatgagagaagaaccagaaatcgagttatccgtttttgcaaagtccaatggagtaatcactcggaagaagaatcaacttgggaacgagaagatgaattgaagtcagctcatccgcatctgatcgccagtgcttccgaatctcgaggacgagattctgtttaa

SEQ ID NO: 23500 - DNA, 9114 bp, Oryza sativa
  Clone ID: TF_OsC1713_5497
tcaagccacattagagaagtctatgacatttaactcattcctcaacttgcaaaagcgggtttcatcaagaggcttggtaaagatgtcggctagttgatcctcggttcttatgtggctaatgactatgtcacacttggcaacatggtctcttaggaagtgatggcgtatgtcaatatgcttggttctagaatgttggaccgggttattggctatctttatggcactatcattgtcacataggagtggggttttggtgaaggatatgccatagtccaacaatgtttgtttcatccaaagcaattgggcacaacaactacacaccgaaacatattccgcctcggcggtagagagggctacggagttttgtttcttggatgaccatgacacaagggatctaccaagcatttggcaactaccagatgtgctctttctatccactttgcaaccggcataatccgaatcggaatagccaacaagcttaaacttagcaccttttgggtaccacaagccaatagtagaggaatgctttaaatatcttagaatccttttcatggccactaagtgacactccttaggagcggcttgaaatcgtgcacacatgcaaacactaaacatgatatccggcctagatgcggtaaggtaaagcaagctaccaatcatagaacgataaagctttaaatctaccggtttacctccctcatcaaggtcaagatacccgttggttgccataggtgtcttgatgggcttcgcatcctccaagccaaacctcttgagtagatccttgatgtacttggttttgctcacgaacgtcccatccttgagttgcttaatttgaagtccaaggaagaagctcaactctccaatcatggacatctcaaattccctagacatcatatcaccaaattccttgcaaaatacctcattagtagaaccgaatatgatgtcatcaacataaatttgacacacaaagaaatcatcaccaatgatttttgtgaaaagggtggtgtcaacttttccaattttgaaatcctttgacaaaagaaaatctctcaatctttcataccaagccctaggagcttgttttaaaccataaagagcttttgagagtttgtaaacatgtttaggatttttaggatcttcaacttgtgtgaaaccttgtgccaccaaccttgccttgtttctcaccaccaacccgttctcatcgtgtttgttcctaaagacccactttgtccctatgacattgtggtctctaggtctttcaaccaaagtccacaccttgtttcttgcaaagttgttgagctcttcatgcatagcattcatccaatccggatcacaaagagcttcatctacatgttttggctcaagacaagaaacaaacgagtaatgttcacaaatcgaagcgacacgagatcgagtttgaacacccttactaatgtcacccaacacttggtcaattgggtgatccttggaaagagcggtgtgtatccttggaggcataggtggatcttgtgccttctcctcctccacttcaacttgagcttgacttggcgtagcggaagtagatggctcatcttgagtggaggtggatggcttgtcttccacttcaataggcttgacatctccaatagacatgttcttcatagctctcatcaagccttcatcacatacatcatccaaattctcgtacccttcttgggagccattagtctcatcaaattgaacatcggcggtttcttccacaatacctttgttcttgttgtagacccggtatgccttgctttttgaggcataacctagaagaaacccttcatcacaccgactttcaaatttggttagtctaacaccctttcggtaaatataacatttgcaaccaaaaactcgaaaataggcaacatttggcttcctcccaacaattagctcataggaagtctttttcaagagacgatgcaaataaagcctattggttgcatggcaagcggtgtttatggcttccacccaaaagaaatcggaaacaccatattcatcaagcatagtccatgccatctcaatcaatgtacgatttttcctctccattacaccattttgttggggtgagtaggtagcggaaagttcgtgtttgataccaagatcatcacaatagtcctcgatattggtattcttaaactcggaaccattgtcacttataattttcacaatagtgcaattaaattcattttggaccctttttgcaaactttttgaaaagctcggcaacaatagacttgtcatgcaaaaagaacacccaagtatagcgagaataatcatcaacaatcacaagacaatgactattaccaccaatgctcttataggttgttgggccaaacaaatccatatgcaagagctccaatggtctagatgtggacatgatacttttagtaggatgagaacatgcaacttgcttgccggcttgacaagcactacaaagcttatctttctcaaacttcacattttttaagcccacaactagatcacgttttgaaagtttactcaattgattcatgccaacatgggctagcctcctatgccaaagccaacccaacgaagtttttgcaactaaacaagttttcaaatttgcttcactagaattaaaatcaaccaaataaagatttccatatctaaaacctttgaacacacaagacttgtcaagaaggctagaaacaataacttcttgcgggaagaaagcacatgacaagccaagatcacaaatttgagcgaccgaaagcaaattgaaatttagggatttaacaagagagacattatcaattgacaaatcattggagatagcaattttacctaacccaattacctttcctttgctattgtctccaaatgtcactttctcttgttcattccctcctacttcaaatgtggtgaacatagccctatcaccggtcatgtgttgagtgcatccactatcaagcacccaatggctcccaccggtgtggtagttcacttggaggttagagaccaaagctttgggcacccaaatggcattcttttttccaccgagtatagggtaatccacatatctagcaacaatgcttgcatcataagccttcctaagcatataatgagaatcaaacatgcaagtcttaggaggcttaccaccggggcaatcattcaccaaatgtccaacctcacgacacttggagcaatacttaccattgctcttaacaaaacgagtggcacggtgagaaggtttcttacccttctttggaatgaatccaagtccctccttgttaaggatgcaccgttgctcactcaaaatcttgtcaagagtgttcttacccttgaagcacctctccaagctcttgttgagcttagccatttgctccttaagctcattcttctcaacaacaagtgaggcatcacaaatagaaacacaagagctagagctagagctagacatatccacaagatcatcacaagaggtagaaatgctagatgatgcaacatgagcaatatggcgagtagcactatcatcaagcaaatcacaagatatgccaacatcaatgagagctccaagttgagtagtggaaatgaggttgtcatgagcttccttaagcttctcatgagaaatggtgagtctctcatgagaagtctttagctcctcatacaagacaagctcatcataggaaacatcatcacaatcatcatcactctcactatcactaagagatgttaccttagaggagccctttgccatgagacaaagtggagcgaagagtgatggagccttcttgatggcaacaacggccatcttcttcttcttggagcttgcatcatcaccaccttcttcctcggacccggatgaggcggagctctcctcatttgagtcgcaatcctagggtgatatgatctcaagtgtgtctctagaaatgtaaattgcacaaatgtaaatgcgacaatcaaatgagacaatgagacaagagatttttcaccgaggttcggaaactcgccggtttcctactccccgttgaggcgagcccaactccaccgctcaaccacgaagccaccgcacgcccccttcgtcaaggggtgggcaaggcgggagccggcccacggagaggactacccaagcctcgatcactcggggtagttcttccttcactccgaaggtggtgaactccaaaccactcacaaaccggtgccgggcctcctccacaatcttctcggagaggtcaccgggcaactcctccacaagccgtctaggaggcggcaacctcattatgtagggagcataatagattccttgtccaatagtcccctttgagatggtaatctccttcatcataaagttgataacatcaaaccgacgaccatccataatggcatcaataacatgccaagcaactccgcgtatgtcatcattgttgccgcatcttgggaggatggtggcccttactatgcggttgatcacacttgggagagcccttaaacccgccacctttccatatgtgtgccttcccccttcttcataaaactgagaaaagtgatcaatggggaagggattgtgggtgtgctcatcatgaaggtcatccccgttgttgaagcgaatgtgcaagagctccttgaattcacggcggttgatagagcatcggagggtccccgacatccacttcattgcatcacaatcgccggacacccatacggtggcatagaattgccggatgagatcttcatcaaaaggttgcttcatggtgacaattctatcaatcccaacggtccggaacatctcttgcacattctcaaactccggtgtctcaccaatgtgcctccaagagatccatttgtgttcggtgaaggctttcttggcatacacttgtacatacacggacttttggaaccgtgtatgaaatcttggatcattacaatcgttaggcctccgaaattgatcatgatgatggaggatagcgtattgttgagcattcctcaaattaagcacaaattggatggaggaatcgaaaggactcccatcatcacttgcctcatcatcttcaccatttccactctcattgtcatcaccatcatcacttacttccatctcatcaccctcaacattttccatattgtcctcatcactttgaacatactcatctccgcttgattcctcattctcactaacgggatcgggcgtgggcgcacgacgaccatgccgagtgcggggaggcatagcaagcatttggcaactaccggatgtgctctttctatccactttgcaaccgacataattcgaatcggaatagccaacaagcttaaatttagcaccttttgggtaggccactaagtgacactccttaggaacggcttgaaaccgtgcacacatgcaaacactaaacatgatatccggcctagatgcggtaaggtaaagcaagctaccaatcatggaacgataaagctttaaatctaccggtttacctccctcatcaaggtcgagatgcccgttggttgccataggtgtcttgatgggcctcgcatcctccaagccaaacctcttgagtagatccttgatgtacttggtttggctcacgaacgtcccatccttgagttgcttgatttgaagtccaaggaagaagctcaactctccaatcatggacatctcaaattccctagacatcatatcaccaaattccttgcaaaatacctcattagtaaaaccgaatatgatgtcatcaacataaatttgacacacaaagaaatcatcaccaatgatttttgtgaaaagagtggtgtcaacttttccaattttgaaatcctttgacaaaagaaaatctctcaatctttcataccaagcctaggagcttgttttaaaccataaagagcttttgagagtttgtaaacatggttaggatttttaggatcttcaaaaccgggaggttgttcaacaaagacaagttaggcaatttcaccatttagaaaagcacttttcacatccatttgaaatagttttatatcaaagcatgatgcaaatgcaagaaggatgcgaatagcctcaagtcttgccacgggggcaaaagtttcaccaaagtccaaaccttcaacttgtgtgaaaccttgcgccaccaaccttgccttgtttctcaccaccaatccgttctcatcttgtttgttcctaaagatccattttgtccctatgacattgtggtctctaggtctttcaaccaaagtcaacaccttgtttcttgcaaagttgttgagctcttcatgcatagcattcatccaatccggatcacaaagagcttcatctacatgttttggctcaagacaagaaacaaacgagtaatgttcacaaattgaagcgacatgagatcgagtttgaacacccttactaatgtcacccaacacttggtcaattgggtgatccttggaaagagcggtgtgtattcttggaggcataggtggatcttgtgccttctcctcttccacttcaacttgagcttgacttgacgaggcggaagtagatggctcatcatccacttcaataggcttgacatctccaatagacatgttcttcatagctctcatcaagccttcatcacctttgttcttgttgtagacctggtatgccttgctatttgaggcataacctagaagaaacccttcatcacaccgactttcaaatttggttagtctaacaccctttcggtaaatataacacttgcaaccaaaaactcgaaaataggcgacatttggcttcctcacaacaattagctcataggaagtctttttcaagagacgatgcaaataaagcctattggttgcatggcaagcggtgtttatggcttccgcccaaaaggaatcggaaacaccatattcatctagcatagtccttgccatctcaatcaatgtacgatttttcctttccactacaccattttgttgaggtgagtaggtagcggaaagttcgtgtttgataccaagatcatcacaatagtcctcgatattggtattcttaaattcggaaccattgtcacttctaattttcacaagagtgcaactaaattcattttgggccctttttgcaaactttttgaaaagctcggcaacaatagacttatcatgcaaaaaaaacacccaagtatagcgagaataatccaaacttgtttgagtccttggaggttagagaccaaagctttgggcacccaaatggcattctttttaccaccgagtataggggaacccacatatctagcaacaatgctaccatcatgagccttactaagcatataatgagaatcaaacatacatgtcttaggaggcttaccttcggggcaatcactcaccaaatgcccaacctcacgacacttgtagcaatacttaccatttctcttgacaaaacgagtggcatggtgagaaggtttcttacccttctttggaatgaatccaagtccctccttgttaaggatgcaccgttgctcactcaaaattttgtcaagagtgttcttacccttgaagcatctctccaaactcttgttgagcttagccacttgctccttaagctcattgttctcaacaacaagtgaggcatcacaaatagaaacacacgagctagaactagagcaagggctaggcatatacataagatcatcacaagaggtagaaatactagatgatgcaacatgagcaatatggcaagtagcactatcatcaagcaaatcacaagatatgccaacatcaatgtgagctccatgttgagtagtggaaaggagattgtcatgagcttccttaagcttctcatgagaaatggtgagtctctcatgagagatctttagctactcatacaagacctccaaagaagcatgatccttctttagggccttgaacttgacaatatccttctcactataagcatagagctcctcaaacatactcacaagctcatcataggaaacatcatcacaatcatcatcactctcactatcactaagagatgttaccttagaggaaccctttgccatgagacaaattggagcgaagagtgatggagcctccttgatggcaacaacgaccatcttcttcttcttggagcttgcatcatcaccaccttcttcctcggacccggatgaggcggagctctcctcatttgagtcccattccccgatgaaagcctcaatcttcttcccttccttcttaagtttcttcatgagcttgtagcctccactcttcttcttggatgacttgtctccatcatcatccttggaagggcacttggaagcaaagtgtcccttctcactacactcaaaacacctcaagttggagagagtcttattgggtcttctatttcttctcctattggagttggagccccttcctctctcctttctccttcccaagagatcattgaaccttctagcaagaaggatcatctcttcctccaagtcctcattgacttcattcaccttgctcttgctcttgtcttcaacttcggcttggagagcaatgcacttcttggagggtgaggcttcctccatctccttcttcttcaacttgtacatgtcattggtgttgatcttccccaagaggcttgcgggtgtcattcttgacatgtcggagttgatgagcatggtgacaagggtctcatacttctccggtagggctctaagcatcttttgggcaacctcaagatcggtgtagtttgccccaagccccttgagatcattcacaatgacattgagcctcccatacatgtcattcacattctcatgaggcaacatggagaatgtctcatattggatcttgaggaagtgaagcttggcatccttgtactcacttgtaccctcatggatctccgccaacttgttccaaatctcatatgcggtctcaaggttgctcactctatcgaactcctcttggctcaaagagttgaacaaggcattcatggcttgggcattgagttggaggttgcggtgatcaatctccgtcaagggtgtgccagtgatggcaaagcctacatccacaatactccaaatatggaagctcatagctttgaggtgagtagatattttaattttccagtggagtagtttgtgccattaaacatgggagccttccctacatggttcaccttgttcgacat

SEQ ID NO: 23501 - DNA, 586 bp, Oryza sativa
  Clone ID: TF_LIB4309-037-R1-K1-D4
tccgaatctgcgagagcggaagccaccgaggcggaggcgaggaggagggcgcaatggcggggaaggaggagggccggatcttcgtgggcggcctgtcgttccacaccgacgagcgcaagctggccgacgcgttccgccgcttcggcaaggtcgtcgacgcccagatcatgctggagagacacacccaacgccatcgtggtttttttttcgtgacattttcagatccagaggcagttgatagcgctattaaagaaatgcactgtcaagaattagatggcaggactatatcagtgaacaaggctgagcctaagatgaatacagatgacacaaggtatgaaagtggtggtggacgaggagagtatcgtggtggtagaggtgatggaccacccccaggcaattgctttgagtgtggccgtgctggtcattgggctcgtgattgccctaatcctggtggtggtcgttctgcgcgatactcttcttctagttcagcgctggtggcagaggagaccgtttttctggatcagataggtttggagaccgttacatggatgatcggtatgatggtgggtaccgggaaccctgtgat

SEQ ID NO: 23502 - DNA, 1320 bp, Oryza sativa
  Clone ID: TF_OsC7718_1
atggcggggaaggaggagggccggatcttcgtgggcggcctgtcgttccacaccgacgagcgcaagctggccgacgcgttccgccgcttcggcaaggtcgtcgacgcccagtggttcggtagcttttgtggctcttttgtgaaccaggtgatactgatcatgctggagagacacacccaacgccatcgtggttttggcttcgtgacattttcagatccagaggcagttgatagcgctattaaagaaatgcactgtcaagaattagatggcaggactatatcagtgaacaaggctgagcctaagatgaatacagatgacacaaggtatgaaagtggtggtggacgaggagagtatcgtggtggtagaggtgatggaccacccccaggcaattgctttgagtgtggccgtgctggtcattgggctcgtgattgccctaatcctggtggtggtcgttctgcgcgatactcttcttctaagttcagcgctggtggcagaggagaccgtttttctggatcagataggtttggagaccgttacatggatgatcgttatgatggtgggtaccgtgaacctgttgatgtcagagacaggtatggtggaggccgtgaccgatatgctaatgatcgatacccatcaggtggtgaccgctatgttccagacagatatggaggtcccgatcgctatcagcctagtagttatggccgggaacgagaaagaagctacgagagggatggagtgcgtggcaatggcggctatgataggagtggcccaaggggtggtggaagctatgacagggatggcccaaggggtggtataagtggtggctatgacagggatggcccacgtggcggtggtgttgaccgttacggtggtggagggcctgctcgttatgatggaggaagctacagggacagatctgggccgtatgaccgccctagcagaggaggacgctttgatgatcgcttccagtgaagcctttcgcagaatcaagttatgtatttgcggtttaatgcttgcagtttcgcatggctgaatgtttagtgaatgctctggcacagttatatctattatgtattagaacctccagcactgttttgattctggcaaaaagtttatctatcagactgttttggattctgaaaaaaaaaaaaatgcactgaaaggttgtctgcctgatccccgtgccgctgaatgctttctgtggtttgtacatggtgattaaggcttgcatggtatcatcaatctaatctgcaaggattactacagaaacagtggctaaattatgccggcccagcacatttgtgagaaaccttagtatgc

SEQ ID NO: 23503 - DNA, 5151 bp, Oryza sativa; identical to SEQ ID NO: 14860
  Clone ID: TF_OsC359_5804

SEQ ID NO: 23504 - DNA, 1167 bp, Oryza sativa
  Clone ID: TF_OsC20523_1
cacgactcaaaacattgaacagtagatcatattaaattcccgttgtacgttacaaaaccgtgatcccccaatagacaaaattgttcggaaggatcttcttctgtatcattactggtaagctacaaaggttacatagtttaaccaaagaattttacaactttcggagcttgttttacttttgccttagtgttggtattcttgtcaccatcgcctgtctctgtggtagattttgaactagattgtttagccttctttgccttggtgtgtcttgtttcttcttcttcaataaaatcgtcatcaaggtcatctccaccccggagaacagcattgtcttccaggtgatgctcctccgtattgaaagcatcatccccagaagatatcaagtcttgcctccctctgtttggacaatgcttggccaggtgtgtaacttcaccacatatcttacagcaacctccctttggataaatgccgtgtttgttttcaggacaattcttgctcaaatgtccctgctgtttgcagacaaaacagcttgcgaactttgtacccccattttcaatgggtttggggcacttggaaagtgagtgcccagattcaccacaattataacagaatttcttcaaattttcatcatttttgtcagggcaattcttcaggctatgacctcgttgcctgcagagcaagcaaatcttgttcttctcccagagggacttctcggggcagaccttggcgacgtggtccgcggccttgcagatgaagcaccgctccccgggccgcatcccggggacccggagcgggtgcttcgacctccccgcgcctcccccacccgccttactcgtcttcttgaacatgctcttcttgttgttcttcttcttcttggtgccgtcggcgggaggggtcgggttggcggggaagaggcccgggttcgcctcgcggaagcgcttccgcgcttcccgctgccgcttgttcgccatcgccttgggctacggacgctctctcgccgtcgcgcgtggtgctgtcctcgagcttggtatctcactctctctctctctctctctgggcggcggcgcgcggcggcgggggacgggagtcgggaggggagcaagggaacagccgagcaaggagggcttcgttttgggaggcgctgacgctttgagattccccggccgg

SEQ ID NO: 23505 - DNA, 1774 bp, Oryza sativa
  Clone ID: TF_OsC359_8329
ctaagcatattttggtacccaaatcacgttgggtccatggatgttagtcacaagagatttagggacccaaatggcctttgtgctagcatgtagcgaactaatcaccctagtagcacaagtgccatttttggccttcctaagcaaattgtgatgaaatgagaggtttggcttaggaattttaccaatgggacaatttttaccaatatgtccctttgcccggcaattgtagcaaagttgagttttgcttttatcttgcttcttgacttgcttgttgccggtttgcctcttgcttgatcgattgctatgatcatccttcttgtgcggacaaaatccaatttcatgccccttctcaatgcaaccgtagcacttccttctgttgattcttgatgtctttcttggaagtgtggcttcatcatcaatcttgcaaggacaacttgaggcaaagtgtccctctttggtggatttgaagaacttgtgagcaagatcctcattcttgctcaacttcttctgtttcttccaagggcaatctctcacatgatgtcccattttcttgcacttgaagcaagtaatggaagctttgttcttgctttgatcttgccccttgctcttgttgttggacttgttatcttcttgatagaacttggtgcaagctacggttgatcccttctcaagcttcttcagcatgctttcacggttatcttgagaaggttgagcattgcaaacaaatccatgatcgatgtatttatcctttttccctacataatccaagtcacatgtagtgcgcagaaaaatatttgcttgagagcaacaagagttagcacatgtaaagtcaacttgaacatgaggcacataggattttaccgttattatgatcacctcatgagttacttctagcatggcatgtgaatccacaagatttccatgagagcacaaaagctcatcatatttttcttgtaggtccacatgcttgctagtgagctccacaagttgagctttaagctctagattttctttctccaaatatgatttctccatgatgcaagaatattcatccaagtgtgaagatgagcatcttggagatgtaaattcttcacttggccattttttcccacatacttctaccatttcattacctttaatggagacatgtgttggtgaggaggtgaatgtggcaagactatcttgctcattggatagaatcacttgaggctctttacaaattgtcgatgaatttgagcactccacaagtggttcttctatagcgagctttgcctcatcacactcggacttgtcatatctctcctcgagtgtgttccaaatgagatgagcatcaagtttgaactggaaacctgccaggagcttccgggtaaaagtgccaggaacttctgggcagcacttatgaaatttttcaacctcaccttggtgccaggaagttccggacagaacctccaggtgggactctctgtcccgacttcaaatggcctcgcacggtccaccacgaccatcatgacaaagccttcactcgcccttcaccaccggattcggtccatcggcgccaagcctcttgcttgcccttcaccccccacatggtccattgtagccgagccttgcttgcccttcaccgttttgccataaatagccacttcataccccgcatcatcaatgtcttcacttgctcctcatcaaggtataatgtccatcttctagccgagccttgctttctcttcaccggtttgccatagatagccatttcataccccgccggacgcgtggg

SEQ ID NO: 23506 - DNA, 1354 bp, Oryza sativa
  Clone ID: TF_OsC6521_1
cggacacgtgggctcgacggctcgagcttaaaaccctagagccgctcctcctcctcctcctcgcctaccccgaaacccaaatcccccccaaggcggacgcgcccgcaaagggtcgagcgcgctcatggctcgcgtgtacgtggggaacctggatccgcgcgtgacggcgcgggagatcgaggacgagttccgcgtgtttggggttctgaggagtgtatgggttgctagaaaaccaccaggttttgcctttattgactttgatgaccgcagggatgcagaagatgcaattcgtgatttagatggcaagaatggatggagggttgagctgtcaaccaaagctggtagtggtcgtggccgagatcgttccggtggttctgacatgaagtgctatgaatgtggcgaacctggtcattttgcacgtgaatgccgcttacggattggttctggaggccttggcagtggaagacgccgcagccgcagccgtagccggagtccaaggtaccgcggtcgtagtcgcagccgcagcccaagataccggaggagcccaagctatggtagaaggcccacgggatcgttctccaaagaggcgcagctacagcaggtcgccaccaccagctcgtgcacgaagctacagccgatcacctccacctcctcgtgagcgaagctacagcagatcaccagcacagccagccaaccgcgaggagtccccctacgcaaataacgcgtaacccgcctagttccaatttgctggaaatgttaggggggctcggtgtgtttttgtaagcgcttgtgttatggagtcttgaaaagctatagggattgagtatgttcttcggaagcatttgtgtacccttcgggaaaaaccccgccgctgctgatacaattgttgaagcaggagcctagcgttttggtcgactgtatgactttgagaccccatgtagtccgtaagactaagttttgtaccattagatttttcacattgctggaatatttgtgctaaatactagtattattaattaatgtcttttgtaggtgcaaaaaaaaaaaaaacccagcaggttcacagctcttctggagcagctcacatatactcctacaacattcactgtatcatgcatcgcgtcaccattgccatgatcacatgcgctacatgtgtaccacccccacacccggcacgggcacaccgatacggcgcttcacatggctttgtgccaaagcggtgtacgctagtaccgaggtcacatggttgcactacgcggctgcagccatcaaacttccatggcatctgcaacagaaaaggcttcaatgattccaaccctttttacgtggttcaaaaaaaaaaaaaaaaaaaaaa

SEQ ID NO: 23507 - DNA, 4944 bp, Oryza sativa; identical to SEQ ID NO: 14886
  Clone ID: TF_OsC91_2317

SEQ ID NO: 23508 - DNA, 4665 bp, Oryza sativa; identical to SEQ ID NO: 14885
  Clone ID: TF_OsC91_2600

SEQ ID NO: 23509 - DNA, 4515 bp, Oryza sativa
  Clone ID: TF_OsC91_2629
agaggagagaaggagaagaaagaaatgtcttcagtggttggaaaggaggttgtagatgcttcctcacttatcactaagggtgatatgaaggatttgctagaggatttgttgaagatgggcatgataggtcagaggaatgtagcaggagggtctaaactgaaactagaagtgatgccaagtgagttgaggttggaagggagcaaaaattatttgagttggtgtaggagagctcaactaatgttgagagcaaaaggggtggatcattttttgcaagagggttgtgaagagccctctgataaggagagccaagcatggaggacatggaatacaacaaatttaacagttatgctattgaagcatgaggaggacattgtgattggaaataaatggatgcagaggcgaagagtcattcatttcttgaaggggctgaacaaggagtttgaggatagaagagcggctatgttccaccaggctacattgcctactatggaagaggttatttttgctatggtgcaggagatgaggttgaaactgatgagaggcacaaatcttacaagatcagcatacactgtggctgataatagggaatgctacaactgtggacaagtgggtcatgtgagctacaattgtcccactcctcggaacattggcggcagggggttaattcgaggagggcatggtggatttggtggaacccgtggtggatttggaggagaccgtggtggctttgggggaaaccgcggtggtagaggaggtgactggagaggtcgcggtggaggtcgtggtaggacagaggttctcctcaggccaatgcagccattgaggagggagaagggactgggaggaggattgggactggagtcaggcgtgatgggttgtggtacatcaatcatgaggaactggataggttggcatttttgggacggagtagtggtgatggtaaatctatcatcatttttactattaccacctaataactacttaaattatccgcattggctccacctctctcctcccctctccgcgtgggacggtgtccgtggcgtcgcggcatcggccacgggcgggacaactgttcctgtgattaatccggccgtttccgcggcggatccagcatcagtggtgggcgagaaactgaaggcggccgttcttgcagcgaacccagtgttggcggcatcggcaatgggcgggggtagtatcggtcatgttggcggcaggcgaggcggtcgttcttgtgtcagatccggtgtcgacagtgggtggggcggcctatttaatgctatagatactattctaattattgggagaggagctttctcgatcgcaatcatggagctggtgatgggggcaatggaaaacctgatccccaagttgggtgagctgctcaaggaagagtacgtcatgcagtcgggcgtgagagagaagatccagtctgtctcacgggagctcgagagcatccacgctgctctccgcaagatcggcaaggtgccatgggagcatcttgacgatgagttgaggctttgggcgcacgaccttagggaggcgtcgtatgacatggaggacatcatcgactccttccttgtgcgcgtcgacggccatgaggcaagtgaagttcactggttcaaatggttcttggagaagatgaccaaccagttcaacaagatcaaggctagccatgaaatcggtgtcgcaatgaaagaaatcgatgagaagctccaggaggtggctaccaggcatgcgaggtacacaatcgacaatattgccatcaatcctgcaggcccagcaactgtcgatcctcgtctcttgagtatgtacaaaacattggcagagcttgttggaattgaggggcccatggatgagctcatgaagatgttggatattgatttgccgaccaagaagaggaagatcgaaatcgatgtgtccgttagaaaaccgaagatggtatccatctttgggtttggaggacttggcaagaccactcttgccaaagcagtctacgacaagcttaaaccaagttttgattctggggctttcattccggtcggtcagaatcctaatattaggaaagtttttagggatattctcatggatcttgacaagcagtcatacaatgacttaaatctaaagctgctggacgaaaggcaactcatcaacaaactccaggaattcctccaaaaaaagaggtgttttgtagtcattgatgacatatgggataaggattcatggaggttaattagatgtgcactacaagacagtaaccatgaaagcagagtagtcacaactactcgtatttatgaagttgccacacaagtgggcgaagtttacaaaatgcatccactttctcatgatgaatcaaaaaaattattgtacacaagaattattagcggtgaaggtgagtctctccgtagtacatcggttgaggcatgtgacaaaatactaaagaaatgtggcggtgtgcctttagctatcatcataatagctagtctgttggccaataaaccaagggaatactggtccgaagtgtataactctattggtttagaacatggatacaatgatgacgtagataatacaagaaggatattgtctttgagctactatgatttgccgttgcatctgaagccgtgcttattgtacctaagcatatttccggaagattattatattgagaaaaatttgttaatatggaagtggatagcagagggttttgtacatgagaaacaagcagcaaagttagggttatttgaaaccggggagggatatttcaatgagttgataaacagaagcatgatccagccagttgagcatgaatactcagggtacatgtgtggttgccgtgttcatgacatggtacttgatctgatcctcttattgtcaggtgaagaaaactttgtcactgtagtagatggcagtaaggaacatgaactttcatggaaaaatgcccgtagattagctctacaacattggagttttgaagagaacaggaatcagttggctaatatgggtgtgaagcaaacaaggtcccttattatgactgagtgctttgataagaacatgcaattaccgagcttccaagttttacgtgtactagaaatacaaaagcaaggccgttggtggaacattgatggtaaaattaacctgcagcatgttagaaatttacttcaccttaggttcctccatctagattgtattgattctattcctctcatagagcaattcagaaatttgaggtttctacaagtacttcatctgaaggaatctaacatacaagagctgccagagtcagtgggcctgctaacaaaattgctgtccctacgtgttgatattgatgtaagggtgtcgcctggtgtgatcgagaagctgacgtccttacaggagctgtatttgtggccttatagtgatgatacgttccagttcgtgaaggtcctaggcaagctgagggaactgagggtgctgcatgctaaaaaccttaagcttgatggacagggcgagacatcagcactgctggagtccctatgcaatctgcacaagatccaaactttggacattgacctaaatcttaatccaaatgagggtgtcacgtgggatgcaggattcacttcccctcaatgcctccgatacctctgcttggtgtctttgaggtttcatagaatgccagagtggattaattggtcgcttcttccaaacctctcttatcttgaattgagagtgaattttttggaagagctagaccttgaaacccttgggaggttaccaaaactacgatacctccatctgtttatacactgcgacaggatagtaagcatcgggaagattgccggtgctggtgatgcctgcttccaagagttgagatttttgaacacaccctacttgtatgtccggtttgatcagcatggcatcatgtgcagcaaagacgaaaaagctgtcatgccaaacgtcaaaactctcagtttttgtgtttatgtgcggatcctaaaagataccgacatacttggatttgacaagctgtttagcttcgctcatcttggaagaagttcgctccaacaagtccaagttaacatccaatgtcgtggtgctcgtgccatggaagtcgaggaagcggaggcggcgttggcacacgcagccgccatccatcccaaccgtccaacccttcaaatccataagttttcggagggagaaatgcttccccctcacgaggagcctagcagcttctttcctaaagttgttgtcgaaaatctcaatgcgcatgagagaaaggacgacgatcttcgttttgtcctcggacagatgctccagcgtaatccatgcgtaaagaaattcagtgtctccatcaactgtgaaaatgcatgtcttgaggaggtggagaaagcagaggcggctgcgagatatgcagtcgacttccacgcaaaccgcccgacacttgaactggtaaaatatggtgaagataagatggtgttgtctggccaacaccaacaggtatgcaccccaggttgcctatctgattctaatccctag

SEQ ID NO: 23510 - DNA, 329 bp, Oryza sativa
  Clone ID: TF_uC-osflM202067e09b1
tcgcttcgccacgccacgccacgccgagttgtggagctgagccatgatggagttgcgcaagcactggggcgtcggcgggcggcggtgcggtgcgtgcgaggcgtcgccggcggccgtgcactgccgcggctgcggcggggtgtacctgtgcacggtgtgcgacgcgcgcccgggccacgcgcgggcggcgcacgagcgggtgtgggtgtgcgaggtctgcgaggtggcgcccgtcgccgacacctgcaaggccgacgtcggggtgctctgtgccgcctgcgacgccgaccatccaaaaggcaacccggtggcccgtcgacacgcgcgcg

SEQ ID NO: 23511 - DNA, 2114 bp, Oryza sativa
  Clone ID: TF_OsC1274_1
cccacgcctcccgctcgctctccctttcgcgcaccagaaaagtcgttttttaattttcgagtttccgtggaagattctcgatacctgtccctcgtcgtcgtcctcctccgccggccgccgccgacgaccgcagcaggggtggatccggggcggcgccgattcgtatcctggtaggatcccactgaattcaactgttgaacaaaaagccaggaaggtggctgttcttgtggcactcagtgctagtggaagtgctccagtactgtataggaccatggatgctctttgtgatttctgcaggggagctatggtcattggtctattcccgatcagatgcaccagccttgtgcgtgtcttgtgatcgtaatttgcattctgtcaatcccctttcccgacggcaaacttgcgtccttctttcatgaccgtgggttatagaccctgcacctgatcgctgtcttgaagagaccacctgcctttgtccacacactgaacggaccgggcgtggtggaggatgctcagttgtttttcatcaaagggagagaagaagatgttaatcgtggtgctcaacttcgacacaactttcgagaatctggtcctcgagtatggatatcccgactgaatctacggagacaaactgtgaggaaggaataaacatgatgagcattaatgacaatgacgtcaataaccattgtggtgctccagaagatggccgcttgttggatatagctagcacagcactcatgagtgatttacctacaggagacaagttcaaacctttaataggttcttcttcaggagatgggatgaatcttctgccacttaattcagatcagccagctgagccagtttcaacgacgcctaaggcaccctgtgtcacagacaaagatatgttcaatgatgggagcgtatatggagacttctgtgtggatgatgctgacctaacatttgagaattatgaagaattattcggtacctctcacgttcaaacagaacaactctttgatgatgctggaattgacagttattttgaaatgaaggatgtgccagcagatgaatctaatgagcagcccaaacctgtgcagccagaatgtagcaatgtcgcatctgttgattctgggatgtcaaacccagctgcaagggctgattccagccattgtattcctggtaggcaggctatatccaacatatccctttccttctctggtttgactggtgaaagcagtgctggatattttcaagattgtggggtatcgtcaatgatccttatgggtgagccaccctggcatcctcctggtcctgaaagttcatctgctggaggcagcagagataatgctcttacacggtacaaggagaagaagaagagaagaaaatttgacaagaagataaggtatgcttctcgtaaggctagggcagatgtgagaaaaagggtcaaaggacggtttgtaaaggctggcgaagcatatgactacgatccgctgagccaaacaagaagctactaaagcctttcactcgattggtttcgtccagtgttcaagtagcaattttcagcagctgatttgatgttggttgcacggcaagcatgatcactggagaacacaagcaattgcggcagaccttgcaattgaaaacggggaaaggaaaccaaacgctgtgatcaaatcaaattaatgaaataaaaaaggaaaaaataggatgcaaacatgcgagaagctcatggatggtaatgctccattttctcctgtacagttcatgcatcttcagttgcttctggttgagatgtctgaatcactctctaccatctgtgcattaatcaaatacaaatacatgggcctaccgcacgacgacgaacgcacctgcttctgttgtgatgttttgtgttgcggctgtcaggctggatctctaggtaacatgattaattatactactgatggaatttgcaccgctgtaatattatttacgaatcacaatctgccgtgggattgttcttctgtcgtgtatgtatgtgtatatagatggatggctgttaagaaaatattgtgacgattataaagtttacctttgtaaaaaaaaaaaaaaaaaaaaattgatctgtaaaaaaaaaaaaacctgcagcccgg

SEQ ID NO: 23512 - DNA, 332 bp, Oryza sativa
  Clone ID: TF_rsiceb_8130.y1.abd
gcacgagggttagctttgcttcgtggcgactcgtcagctcgctgcttggttggtgatggagatggagctagggttgggaaggtactggggggttgggaggaggcggtgcggcgcgtgcgcggtggcgccggcggcggtgtactgccggacgtgcgacggcgacggcggcggaggtgggtatctgtgcgcggggtgcgacgcggagcatgggagggcggggcacgagagggtgtgggtgtgcgaggtgtgcgagctcgcgccggcggcggtcacctgcaaggccgacgcggcggcgctgtgcgccgcctgcgactccgacatccacgacgcca

SEQ ID NO: 23513 - DNA, 1775 bp, Oryza sativa
  Clone ID: TF_OsC79690_1
cgggctgcaggtttttaattaagtatgtactgattactcaatgtacatgggtgtggcgcaggcacaacccagtttacatacacaagtcatttgtttcctttatggagtgtttctacaaaaccatgaacaccaatgtttacacaagtacaatcgcctactttctctccggtcgatggaacagagataaaagagatccaaaagcaccgagccaaacaccaacaaaaccgaaaaaaaaaaggaagagaaaaacttttgaattgaacaacgttatactacttgaatcgtgcagcttcgacaaattttgcgtgaacttttgtgccaatcgagtccatgaggcatacgatcgaacgcaggcaagtctcgacaccggacacgtacgcatggtgccgcgcgccgggccgtgcgcgatcgtacgtctaggtgacggcgcacggggcggcggcggcggaggggcgcttgacgaaccggcccttcatccgcggccgtttctcggcgttcagcttccgcacctcgtaccgtatcttcttggagaacagccgcgtacgccgcttctccctgtacctcgtcacccgcgcctcccgccccgggccgtccatccgcggcctcaccgtcatcatccccacctccgcgccatgcccgccccctcccgcagcccacaaccccgagtaatggtggtcgttgggccagaagtcgtcgagctggccgtgcggcggccggccgtcggtccacggcgagttgccccagctctcgatgatcgcctcgtagttgagcctgagatccaggctcctgtggaagaactgcgaatcggctgcggcgccgttgctcgccgacgacttctgttcgtccggcgaggtgcagttgaaatcgatgtccagcacgtcggcggattcgacgtcctccggcttcggatgagcgcggcatgatgggagagataccctgctgttggaggcaacaccgccgtcgagctccatcttcacccggccggattcttctaccggcggcgttattagccctagggtctccatgtagaacgagtcctgcagctcgttgctgtcgtccaggccttgtccgagtagggcttccatgtcggcggcgaactccctcagctcggcgtccgtcggttcgaagttgacaaagctatccgggagctgctgcacgggcgacgacgccgcagctgccggatactttgcgtcttccacggcgccgtcggcggcgtcctccttgaagcacgatgaggatgcggccgccgcgtcatcgatcgggggcggcgagcagaactcggcgagggaggggtcaaagaccggaacgcggtacagcaactgcccctcgagctcctcgtgagctccgtcttcgtcggccttccgttcgtccgacgactccaccgccatctccggcacgacgagccgcctcgagagcagctgcccgacgctcttgacctgcgggcgccgggtgcgcgccttgcgcttcgaccatgccggcgtgacgccgccctctctcttcgacgtcgtcgtcgtcgtcgtccccaccgccgccgccgcctcctcctccaccgacgcccgcgccgtcagcggcgggggcgacgagacgcgcaggcgcaggcgctcgtgccgcctggcgagcgggttggccgagtgcaccgacgtgtcgcacccctggcacaggaaggcgtcatccgccgcgcagtaccaccgcgcccgccgccgcaggcagctgtcgcacgcgcgcgccgccttgccgcccacggccccggccgccttctccgagctgcagctcat

SEQ ID NO: 23514 - DNA, 1219 bp, Oryza sativa
  Clone ID: TF_OsC69289_1
atgtcggtggcggcggaggggaaggagaagggggttggtggtgggggtggtggtgcgggtgcgggggcgtgcgagctgtgcggggcggcggcgagggtgtactgcggggcggacgaggcgacgctgtgctgggggtgcgacgcgcaggtgcacggggccaacttcctggtggcgcggcacgcgcgggcgctgctgtgccgcgggtgcgcgaggcccacgccgtggcgcgccgcggggcccaggctgggccccaccgcgtcgctctgcgagcgctgcgtccgccgcggcggtggtggccgtggtggtggaggaggtggaggcgctgctggtggtggaggccgtggtggtgggggagacgaggagatgggcggcgagggcgatgaggaggaggaggacgaggacgaggaggtggtcgtcgtggaggaggaggacgaggatgatgaagacgaggagggggagggggagggggagaaccaggtggtgccgtgggcggaggaggcggaggccacgccgccgcccgtcgcgagctccacgtcgagcagcagccgggaggccgccgccaacggcgcgaacgccgccgaccgcgtcaaggaggaccagccgtgctcgacgtcgcagccgagcttgtgccggtacgcgtcctcggctcaccatggcggtggtggccggagcgacgaggccacctcctcccggaacggcggtggcgtcggcggccgattccttgcctcccggcataggaagagatcgccctcggatttccgccggtcggggttggcgcagtcggtgagcggtgtgcagggaagtaataggctccaaggcggtcgttggtcgaaatgacttttcctgaggcaactgaaacaatgatgtagatgctgatgctaactacattagaaggtcacttttggtgtatccaggcatttggggggagatgtggatcactgcaaagatcaaacctccaccgagcacacacatcttcacatcttttccgtcgacaacttgcagagtcgacttatcacgcggccatcccagaactcggtagtattcataatcgcgacggcttgctggagcttgtatatgtgcccccactactttcatgtgtttaaatccctttttgtccttttggatgaggcgttctggctaacttaagaaatgatataggtttgcatttgcagggccattcttccatggtttccctgtttgaatgcttccattgtgccct

SEQ ID NO: 23515 - DNA, 439 bp, Oryza sativa
  Clone ID: TF_jC-osroLIB3475022g09b1
cccacgcgttcgcccacgcgtccgagcacccacccaccgcgccggcggtgaggccatcacctcctcctactgcacgtgcgccgagggcgtggtcgccggagccggaagggtggatgacgtggcggagctgcgactactgcggggaggcggcggcagcgctgcactgcaaggcggacacagcgaggctgtgcgtggcgtgcgaccgccacgtgcacggtgcgaacgcgctgtcgcggcgccacgtgcgggcgccgttctgcgcccggtgcgaggcgcgccccgcggcggcgcgtgtcgccgccgtcgctggagctggaggatgcggcggcggcggggaggccaggttactttgcgccgggtgcgccgacgacgacagtgcggatgcggcgagggtgcccgcggtggggttttccagatgccccagggcccgccgagctcg

SEQ ID NO: 23516 - DNA, 644 bp, Oryza sativa
  Clone ID: TF_OsC34358_2
ccggccgggaaaaaaaaaaaaaaaaaaccattgccgccgcgccgcgccacgccacgccacgccgagttgccgagctgagccatgatggagttgcgcaagtactggggcgtcggcgggcggcggtgcggtgcgtgcgaggcgtcgccggcggccgtgcactgccgcggctgcggcggggtgtacctgtgcacggcgtgcgacgcgcgcccgggccacgcgcgggcggcgcacgagcgggtgtgggtgtgcgaggtctgcgaggtggcgcccgccgccgtcacctgcaaggccgacgccgcggtgctctgcgccgcctgcgacgccgacatccacgacgccaacccgctggcccgccgccacgcgcgcgtccccgtcgcgcccatcggctccgccgccgccgccgccgtgattcccgaggctctgctgatccggataaatcccgccggggcccagcccgaggcgttggagaataagctgcttcacagagcaccaaagctacaaacaggcaacagaaaaaacgtgccacagccctacactgattgtcgctcatcacaatcttattgatacgcttctgggattatttttgtttttaatcttaatgcttacgcagggccgaaattctgttaagatgattccatccaaaa

SEQ ID NO: 23517 - DNA, 1478 bp, Oryza sativa
  Clone ID: TF_OsC80961_1
atgaaggtgctgtgctccgcgtgcgaggcggcggaggcgcgggtgctctgctgcgccgacgacgccgccctctgcgcgcgctgcgacctccacgtccacgccgccaaccgcctcgccggcaagcaccaccgcctccccctcctctcctcctcctcttcttcctcctctccctcccccccgacctgcgacatctgccaggacgcccacgcctacttcttctgcgtcgaggaccgcgccctcctctgccgcgcctgcgacgtcgccgtccacaccgccaacgccctcgtctccgcccaccgccgcttcctcctcaccggcgtccacgtcggccttgacgccgccgccgacgacgacgacaaacaccccccacaccccttgtcgtcgtcgctgccgcgcaacacggcaccgcccccgcagccgccgccgaagcgcagcccctcgccgatctacagcgatgacgacgtcatcgactgggccaccggtggccacgacatcggcatcaccggcaacctgcccgactggtcgctcgtcgacgagcagttcaacacccctgcgctgccgccggtggtgaccaagaccccgccgaagcgggcctcccgtggccccgtcacggccggcaccgccgcggcggtgttcggcaacctcgccggcggatcgccggactggccgctcaacgagttcttcggcttcgccgacttcagctccggcttcggcttcgccgagaacggcacgtccaaggcggacagcggcaagatcgggagcatggacggctcgccgaacggcggcaggtcgtcgtcgtcgtcctcctcctcctccgccgccgccgccggcggcggcggcggcggccaggacttcttcggccaggtgccggaagttcactgggccgtgccggagctcccctcgccgcccacggcgtcagggctccactggcaacgggacccgcgctacggtggcggcgccaccgacgccagcgcggtgttcgtgccggacatctcctcgccggagaaccccttccgttgcttcgccgccgccgccgccggtgaccataccatgaaacgccggaggagatgctaattaagaagcgcggcaacaaaatgagagaaaaaaaatgaaagagagagaaaatgttcgagttggtacatgtagtaggagtatttgagtgtgagattaattagtggtaatccgttgaagtaaattgatgtacttggctagctagcctgctactaggtgatcgcttactctgtattagtggatataatagctttggatctgattaattaggggctgcaatgctgcatttgtgtaacgttttgtgttagttactactctcccccgtccctaaatataagtgattttggctgtctaattaaaatcccttatatttagagacggagggaatagaaattaaggacagtgaaaagaaaacgaaataaagtggagaaaattgcaagtcaatttgtttcaaaaaaaaaaaaaaa

SEQ ID NO: 23518 - DNA, 672 bp, Oryza sativa; identical to SEQ ID NO: 15768
  Clone ID: TF_OsC378772_1

SEQ ID NO: 23519 - DNA, 1385 bp, Oryza sativa
  unsure (1)..(1385): unsure at all n locations
  Clone ID: TF_OsC1269_1
cccggtgccacacctcccccccgccgcgcccgcgctgcgtcggcttctggggtgccgtcgcccccgacgctgccggcctccggcgcgccccgggttcacaccgcgccgctcgccgggccgctcgtccgccgctgagctctatctatctactagttagtttagtcgtctcgagggtaaattgagctttgtgtgcggttttgaggggagtacatcggcatgaggatccagtgcgacgcgtgcgaggccgcggcggccacggtggtgtgctgcgcggacgaggcggcgctgtgcgcgcgctgcgacgtcgagatccacgccgccaacaagctcgccagcaagcaccagcgcctcccgctcgacgccgcgctccccgccgccctcccgcgctgcgacgtctgccaggagaaggcggcgttcatcttctgcgtggaggacagggcgctcttctgccgggactgcgacgagcccatccacgtcccggggacgctctccggcaaccaccagcgctacctcaccaccggcatccgcgtcgggttcagctccgtctgtagcgccaacgccgaccacctcccgccgccagcgcccaaggggaactccaagccgccggcaagcggcatcgctgctgctgctgctcccaagccggccgtgtccgcggcggcgcaggaggtgccgtcgtcaccgttcttgccgccgtcgggctgggccgtcgaggatctcctgcagctctccgactacgagtccagcgacaagaagggctctcctattgggttcaaggatctggagtggctcgatgacatcgacctgttccatgtccagtcgccggccaagggaggcagcacggcggcggaggtgcctgagctcttcgcctcgccgcagccagcgagcaacatggggctctacaaggcgagcggtgcacgccaaagcaagaagccacgggtggagatacccgatgacgacgaggacttcttcatcgttcctgatcttggatgagatgttgttatgtaacagtaatgctatgcaagtgatgtaattttgtatgtatgcaaagaacactgccatctcggttgtactaagtgtgctaagtacatcttactgtgggcgtatgtaattgtaagacaatttgggcccaatacttatcagcatggtgttgggcatgaactatgatgtactatgacatgacgaaagtttgcttgcagcgtgtgttctgttcgtagatcaactgtgaaaaatttgagccaactctgcttccgtcccatgccatcagtgatcaatctgatataagtttttctgaaaaaaaaaaaaaaaaaaaactcttatgtttaatcttccgagattaccagtacagaaagagattaccngtacaaaaaaaaaaaaaaaaanaaaaa

SEQ ID NO: 23520 - DNA, 528 bp, Oryza sativa
  unsure (1)..(528): unsure at all n locations
  Clone ID: TF_8956058
gattcggtcgagtggaggaggagtcgggttcttgccgcggcggaatcgcacgcatgaagctgctgtgcagcgcgtgcgaagcggcggaagccagcgtcctctgctgcgccgacgangccgccctgtgcgcgcgctgcgaccgcgacatccacgccgccaaccgcctcgccgggaagcacctccgcctccctctcctctcccccgcctcctcctcctcccctccgccgccgccctcgcgccgccgccgccgtcgccgcccaagtgcgacatatgccaggagagccacgcgtncttcttctgcctcgaggaccgcgcgctgctgtgccggagctgcgacgtggcggtgcncncggccnacgccttcgtctccgcgcaccgccgtttcctcctcnccggcgtgcnngtcgggcaaggaacangacgagcactcccctgacccgcctgaccgtctcctcctccgccgccgccgccgcctgcatccaagagcgacacccggcgccgctctacggcgaaggcggaagaaggttc

SEQ ID NO: 23521 - DNA, 369 bp, Oryza sativa
  Clone ID: TF_jC-osleLIB3474042h04b1
ctcacgcgtccgggtgttgaggttttgcgacgcgtgcggtggggaggcggtgcggctgttttgccgagccgacccggtgatcctctgcgccgggagcgacgcacggccgcacgggcctgggtcgcagccacgcgcgggtgtggctctgcgaggtctgcgagcacgcgcccgtgggggtcacgtgctgggccgacgccgccgcgtcttgcgtcggcttgcgacgcgacatccactccgccaaccccgtcgcgcgccgccacgagcggctccccggcgcgcccttcttcggcgcgcttgcctacacgcccaagcagggttctggtgcccacggcggcgacgcggtggcggtcgacgatgacgggagcaacg

SEQ ID NO: 23522 - DNA, 1459 bp, Oryza sativa
  Clone ID: TF_OsC1272_1
gcacgagggagagagggagcgatccaatcgcgtcgctaaaaccctagcggctggctgatttgggggattgctcgtcggagagatgaagatccagtgcaacgcgtgcggcgcggcggaggcgcgggtgctgtgctgcgccgacgaggcagcgctctgcacggcgtgcgacgaggaggtgcacgccgccaacaagctcgccgggaagcaccagcgggtgccgctgctctccgacgacggcggcgccgcgcccgccgccgccgccccggccgtgcccaagtgcgacatctgccaggaggcttctggatacttcttctgcctggaggaccgtgcacttctttgcagagattgtgatgtttctatacacacagtaaactcctttgtttcagtacaccaaagattcctactaacaggtgttcaagttggccttgatcctgctgatccagttccacctgttgctgacaagcatgttaagagtgctggtggttcagtggattcagcaactaaacatttgcaaaggaatcctacagacttatctggtgaaaacagtgcatctttgcccagccaaaatgtaatcaatggtaattattctaggcagagttctgttacaatggccaagacaggacaggtcaattggactatgagcaacaacacaattagatcaatagaccctccacccaagtattcatcagaggaaagtccagcacttctgctagctagccacactagcaccatggcagcgtactccagtcaaatcagtaaggatagtgatcggatctacaacttaccattcacaggtggtaatgggtcagatagtctacatgattggcatgttgatgagttctttagtaactcagaatttggctttgctgagcatggttcttctaagggtgacaacgctaagccagggagtgctggtggatctccgcagtgccgtctggctgaaggcctgtttgtcgaaggacttctaggtcaagtgcctgacaatccatggacagtgcctgaggtcccctcgccaccgacagcctctggtctctattggcaaaataatttgctttgcccttcgtacgacagcaccatgttcgtccctgagatttcctccttggagaactctcagaacaacttcactgtatctgctggtttgaagcgccgaaggaggcagttttgatctgccgatagcatcagacaccattcggtttagttggcaggtcacgttgagaggagggcttcttgcctgcctgaccaaagccacaaaacacagggatggatgatcatccagtggtcagtctaaaaatatgttgtaatgtttgtgtttcgactatacgtttgttgctgaagtttaaaggcgagggaattgttgtgagatctgggatgacagatttgttgttaccaattttgtgaatagtgaaaataaaaagagcatggataagatcatgaattcatgaaaaaaaaaaaaaaaaaa

SEQ ID NO: 23523 - DNA, 1809 bp, Oryza sativa
  Clone ID: TF_OsC770_1
tagtggatccccgggctgcaggctcaaagtcgtcgtagaccccgcctccttcctcctcctcctcgcgcttcgatttggtttggtttgattcggtttgcgagatgaaggatggtggtggaggaggagggagggggcagcagcagcagtggccttgcgactactgcggggaggcggcggcggcgctgcactgcagggcggacgccgcgaggctgtgcgtcgcctgcgaccgccacgtgcacgccgccaacgcgctctcgcggaagcacgtccgcgccccgctctgcgccgcctgcgccgccaggccggccgccgcgcgcgtcgcctccgcctcggcgccggcgttcctgtgcgcggactgcgacaccgggtgcggcggcgacgacggcgcggccttgcgggtgcccgtcgaggggttctccgggtgccccgccgccgccgagctcgccgcgtcgtgggggctcgacctccccggcggctgcggcggcgaggaggaggaggccgacgacgcgttcttctcggcgctcgactactccatgctcgccgtcgaccccgtgctgcgcgacctctacgtgccatgcgacccgcccgaggtggtggtggccggcggcgggcggcgactcaagggggaggcgctcggccaccagctcgccgagatggcgcgccgggaggccgagacggcgcacccgcacacgcagccgcactcggatctgagcccccgcacgcctcgccggacctccgccgcggcgagcggccgcctgcaggaaaagcaagctcccccgccgttgcctcatgctgctgcgacggcggcgccgctgccgtacacttcactgctcatgatggcgccggccaactgcaccgagctcatggaaaacaaccgtgttggagacgaagatgaaaatgttctgtgggagagcaccgcgccatcagtgccaccaacccagatatgggattttaatttgggaaaatcaagggatcacaatgagaactctgcacttgaagttggatttggctcaaacaatggaggctttatgattaagagttataatgacatgctcaaggagatttcttctgggacaacgaaggatctggaagatatttatgactcaagatattttgcagctgccgaagatatcatgtcgactaatgtctgtcagctgtcatcgaaaaatccaagcaccaggagcaacaaacggaaggcgagctcatgcgcttcgacgatcgatggaccgacaacttccacaagccatgtacctgctgcttcaggggcattggggggctcttcgaacgacagaggatcggctctccccaaggagatttccttctgtgatcagaccgtcgtccctaccggagccgatcagaggccatgtaccatcaagatcgacagcgagacgctcgcgcagaacagggacagcgcgatgcagcggtatgagaagcacatcaggtacgagtcgaggaagctgagagcggacacgaggaagagggtgaaaggccggtttgtgaagtcgaacggagcacctgatgatgtcagcaatggcgggtgatctcatccctgcaatccctgatagctagctgcaatgtacgtagcctggctttttgacgttgcagagatcgatgtggccatatatatgctgagagctaagtctgaaatatgttgcgtatgttgttacaacctatgcacgctctgcttaagtctgtctgctgctgcatgtattgttcagctaaaattttgcgtccaagagtcgatcttgataattaagtacccctactacaaatctacactacatactgtaatagaccttagtttttttt

SEQ ID NO: 23524 - DNA, 247 bp, Oryza sativa
  Clone ID: TF_uC-osflM202027f08b1
tgtactctctgagctctatctatctactagatagattaggtcgctcgagggtaaatagagctttgagcgcggctttgaggggaggacatcggcatgaggatccagtgcgacacgtgcgaggccgcggcggtcacagtggtgtgcttagcagacgaagcggtgctgcgcgcgcgctgcgacataaagatccacgcggccgacaagcttgctaggaagcaccagctcctaccgttggacgccacactgc

SEQ ID NO: 23525 - DNA, 1024 bp, Oryza sativa
  Clone ID: TF_OsC280_2
atgaaggtgcagtgcgacgtgtgcgcggccgaggcggcgtcggtgttctgctgcgccgacgaggccgcgctgtgcgacgcgtgcgaccaccgggtgcaccgggccaacaagctcgccgggaagcaccgccggttctcgctgctcaacccctcggcgtccggccgctcgccgacatcgacgacggcgccgctctgcgacatctgccaggagaagaggggtttcctgttctgcaaggaggaccgggcgatcctgtgccgcgagtgcgacgtgccggtgcacacggcgagcgagctcaccatgcgccacagccggtacctcctcaccggcgtgcggctctcctcggagcctgccgcgtccccggcgccgccgtcggaggaggagaacagcagcagcttctgctgcagcgccgacgacgccgtgccggccccggcggcgcccgccacgagccacggcgggagcagcggcagcagcagcatctccgagtacctcaccacgctgcccgggtggcacgtcgaggacttcctcgtcgacgacgccactgccgaggccgccgccgccgccgccgccacctcttccggcatctccgcgaacgggccgtgtcagggggtaacacggatcggagggctgcaagaatccgccggctaccctgcgtggatggcgcagcagcagctgtgctgcgacggcctcgtcgccggcgacgcgtcgccggctagccgggagcggtgggtgccgcagatgtacgcggatcagcttgccgccggcagcaagagatccaggacgtccactgcttcttcctactcctactggtgaaactaaagcaattgaggccatggtttgtacgtagtagatgttgtttcgggcttaattaatgactgcattttgcgcttccggacgggagtgtttgtgcgttatttttgaggcgcagaggaaaatctgagccttttgtatcccttcctttttgctcgtcacgactagtactgtatgtttttcttctacgcaataacgagaatttttcctcttttcc

SEQ ID NO: 23526 - DNA, 1197 bp, Oryza sativa
  Clone ID: TF_3618313
ccttcttctgccgctcgttttccattgccgacgcgcacacgcagctgcgcagccacacctttgcggctgtcttatcttgttcttgagttgtgttcttggttggggaggaggaggaggagatgaagatccagtgcgacgcgtgcgagagcgcggcggcggcggtggtgtgctgcgcggacgaggcggcgctgtgcgcggcgtgcgacgtggaggtgcacgcggcgaacaagctggccgggaagcaccagcggctgccgctggaggcgctctcggcgaggctcccgcgctgcgacgtgtgccaggagaaggcggcgttcatcttctgcgtggaggaccgcgcgctcttctgccgcgactgcgacgagcccatccacgtccccggcacgctctccggcaaccaccagcgctacctcgccaccggcatccgcgtcggcttcgcctccgcctcgccctgcgacggcggcagcgacgcccatgactccgaccaccacgccccgcccatgggctcctccgagcatcatcaccatcatcagcagccggccccgaccgtcgccgtcgacacgccctcgccgcagttcctgccgcagggctgggccgtcgacgagctcctccagttctccgactacgagaccggcgacaagctgcagaaggagtcgtcgccgccgctcgggttccaggagctggagtggttcgccgacatcgacctgttccacaaccaggcgcccaagggcggcgccgccgccggccggacgacggcggaggtccccgagctcttcgcttcgcaggcggccaacgacgtggcgtactacaggccgccgaccaggaccgccgccgccgccttcaccgcggccaccggcttccgccagagcaagaaggcccgcgtcgagctccccgacgacgaggaggattacctcatcgtccctgatcttggttgaatcttgaagaggagttcgttccagaggagaagatcctcctcctgtgttcttgggttttgccatgtccttgtgttttctgcttgtatgctagcttttgtgtttaacgttagtcctgctcaactgtgacatatttgagccactctgcttccgtcccatgccatcagtgatcaatctgatataagtttttctgaaaatgagctccaggctctgctcttatgtttaatcttccgagattaccagtacagaaagagattaccagtac

SEQ ID NO: 23527 - DNA, 1654 bp, Oryza sativa
  unsure (1)..(1654): unsure at all n locations
  Clone ID: TF_OsC1268_1
aattttttnactcctctttccccctcccttcttcttgcttctaatcccccaagcaataacgaggcgtcatctgactagttctcttctactctccctcctctagtcctcttcttcttctactttgtacgcgccactcactctccgagcttgacggcggcggcggcggcggaggtcgtcgagtggtggtcggggagatgggtcaagatgaggtggaggtaggtgcggagaagaaggatcaagaactaccggaggtggaggtggtcgaggaggaggaggaggagggatccaagaaggcggcggcgggctgcgactactgcggcgacgcggcggcggtggtgtattgcagggccgacgcggcgaggctctgcctgccatgcgaccgccacgtgcacggcgccaacggggtgtgctcccgccacgcgcgcgcgccgctctgcgccgcgtgcgccgccgcgggggccgtcttccgccggggcgcgggcggcttcctctgctccaactgcgacttctccaggcaccgccacggcggggagcgcgacccggcggcgccgctccacgaccgctccacggtgcacccgtacaccgggtgcccctccgcgctcgacctcgccgcgctcctcgggatctcctactccgacaaggcggcggcggcgaccgcggcggcggggggcgacgacggtgggtggtgggccatctgggaggagccccaggtgctcagcctcgaggatctcatcgtcccgaccacctcctgccatggattcgagcctctcctcacgccatcttcccccaagattcagaactcgccggatgggaaggtgaatgaggaggtcatacgacagctaaccgagctcgccaattcagacggcggcggcgcgcagatttgggctcatcgcgaggcggcgcaggccggcgatcatcagttaccttcatggggaacaacaacacaacacaacactggacatggcaatttcggtactgcaaacagcaatgaggttgcaaccatgccgacgcctggttatgagaatggtggatgggataacagcgattaccctgcgctaaatgatccgtgcaaggtcgagttcacatatgagcaacctccagccagctcagctgaagcatgtatttcatcatttgttcagatgtctgaactttgccccagcatgagcaatggtagcagcatggaggaaacccaccagacaaaccctggaaatggcacgccaatgcaagttctacccaaaatgccagaatttgttccttgccccgacaggaacttggtcatttctcgctataaagagaagaggaagacaagaagattcgacaggcaggtccggtatgagtcccgcaaagctcgtgctgatagcaggctgaggattaagggccgttttgctaaagtcaatcagatttgagccttcatttctgtaatatattttgcatcttggacatgagtaatactaattaggaccaagcagatatagtacaagaaaaaatatcagcattttgtatgtaactatgtacccacccagtggctacgccacgctgaggagaatttagtttcatcgaatctctgtatatagtgttgcatcgaactcagtgatactatttacatgcaaaggatattgtcattaaaaaaaaaaaaaaaaaaaaaaaatccaaa

SEQ ID NO: 23528 - DNA, 1198 bp, Oryza sativa
  Clone ID: TF_OsC62991_1
ctcctttcgatcgagctgtagtacacgtgaagcttttcttgattcgggtgtatccatggcgcgggatgacgacccggccaagaaattagctgtggatggcggcgtcgcggcggcggcgcggtgctgtgacttctgcggcggcttgccggcggtggtgtactgccgcgccgactcggcgaggctgtgcctgccgtgcgaccgccacgtccacgccgccaacacggtgtccacgcgccacgcccgtgcgccgctctgctccgcctgccgcgccgcgcccgccgccgccttccaccgcggcgacggcttcctctgctccagctgcgacttcgacgagaggctccgccgcggcagcatcggcggcggcggtgacgagctgccgctcgacgaccgcgccgccgtggaagggtacacgggttgcccgtcgatcggggagctcgcggcgatcctcggtgtcgtcggcggcgattccgacaagccggccgacgacggctggtggtccgcgagctgggaggaggaggcgccacaggtgctgagcctggatgacatcatcgtgccgaccacctcctgccatggcctccgacctctcctcacaccaccctcccctgagaatcagagttcgccggacaacggggagctggacggcgaggttgtccggcagctaggggagcttgccaggtcagaggcggcggcgcaggccacctttgtagccggcgatcagctggcttcatgggcatcaccggagttcacttctgggcatggtgattttggcattgaggcagcaagcactacagtaccttcttgtgagaatgaaacatggatcatgtcaaccgattgcactgaccctaccgatgcaagcaagacggacatcgcacgcgaggaggctccagcaagctcatctgccgagccatgcctctcttcgctcgtcgagatttcagagatttgccgcagcatgagctacagcggcagtggcatcgacaatggcggccatgatccatcaaccctggcaataatgccaacgcaagctctgcccaagaagggagtctatgacatcgcctaccctgacaggggcacggtgatttcgcgctacaaggagaagaggaagaacagaagattcgacaagcagatccggtacgaatcgcgcaaggctcgtgccgatggcagattgaggatcaagggacgcttcgcgaagtcgaactag

SEQ ID NO: 23529 - DNA, 1577 bp, Oryza sativa
  Clone ID: TF_OsC385_1
caaaattccacaagagccatgcgaggtagaggaacaggagaagacgcatacacacacgacacatagagagagaggacaaacacaatagcttggatcgatagacttgtccatgtggtgcaagctaaagctactactaccacaagcaaggctacttcgttcatgaattataattttggtggcaacgtgttcgaccaggaggttggagttggaggcgaaggaggaggaggaggagaggggagcggctgcccatgggcgcggccgtgcgacgggtgccgcgcggcgccgagcgtggtgtactgccgcgcggacgcggcgtacctgtgcgcgtcgtgcgacgcgcgggtgcacgcggccaaccgcgtggcgtcccgccacgagcgcgtgcgggtgtgcgaggcctgcgagcgcgccccggccgcgctcgcgtgccgcgccgacgccgccgcgctgtgcgtggcgtgcgacgtgcaggtgcactccgcgaacccgctcccggccatcaccatcccggccacctccgtcctcgctgaggcggtggtggccaccgccaccgtcctcggcgacaaggacgaggaggtggactcttggcttctcctctccaaagattccgacaacaacaacaacaataacaacaacaacgacaacgacaataacgacaacaacaacagcaacagcagcaacaacggcatgtattttggtgaagtcgatgagtactttgatcttgtcgggtacaattcgtactacgacaaccgcatcgaaaacaaccaagatcggcagtatgggatgcatgaacagcaagagcagcagcagcagcagcaggagatgcaaaaggagtttgcagagaaggaagggagcgagtgtgtggtaccttcacagatcacaatgctgagtgagcagcagcatagtggttatggagttgtgggagcagaccaggccgcctccatgaccgccggcgtcagtgcttacacagattccatcagcaacagcatatctttctcatcaatggaggcgggtatagtaccagacagcacggtgatagatatgccaaattccagaatcctgacacctgctggagcaatcaatctcttctcaggtccctcgcttcagatgtcccttcacttcagctccatggacagggaggccagggtgctcaggtacagggagaagaagaaggccaggaagtttgagaagacaatacgttatgaaacaagaaaggcgtatgcagaggcacgaccccggatcaagggccgtttcgccaagagatcagatgtgcagatcgaagtggaccagatgttctccactgcagctctatctgacggtagctatggtactgttccatggttctgatgggactcatgagacgctatcttataggcatatatatggggacttactgagtagcaataacatcgatccagtgggagtagttctagacaatctgtgttatgaataatagtgtgttgtttgcgacttaaaattgatcaagtaccttagctttttaaagttttgctttgtaatttccggatagcagatatatattgttggtacttgctcagtaaaaaaaaaaaaaaaaaaaa

SEQ ID NO: 23530 - DNA, 1347 bp, Oryza sativa; identical to SEQ ID NO: 13170
  Clone ID: TF_OsC84660_2

SEQ ID NO: 23531 - DNA, 1180 bp, Oryza sativa
  unsure (1)..(1180): unsure at all n locations
  Clone ID: TF_OsC174263_1
gctcgcggccccgccccgcgctcgcgcccccccgagcgtctcgctcccaccccaggcctcccccctcgccgtccgcgcgcgcgcccgcggtttcccccgctcgccgccggtttcccccgctcgccgccggtttccccgaagcgcgccgcgcccgcgcctgcgcccgccggtcgccatcgccatctcgccctcgcgcggagactggtgtccctgttttgctctgtagtatagagccacgcaaacccccgccaggtgttcgaccgagcgacacaagagtccagcctcttgcaacctgtaatggaggtcggcaacggcaagtgcggcggtggtggcgccgggtgcgagctgtgcgggggcgtggccgcggtgcactgcgccgctgactccgcgtttctttgcttggtatgtgacgacaaggtgcacggcgccaacttcctcgcgtccaggcccccatcaggaccctaaaatcttgtggtttaggaagcctctcttgtggttaacatcaaatcacaagtctaaatccaatggatgggactctaatttttctgtgtagtattagtatacatgatgatagtacatttgatttgttattaattggttattaattaaaggtgatttgatcactagactttatgtggtccaaaaagtaaccaaataaagcaccgcccgccgccggttgggggttgaggtggtggatgaggaggatgacgcccggtccacggcgtcgagctcgtgcgtgtcgacggcggactccgcgtcgtccacggcggcggcggcgncggcggtggagagcgaggacgtcagaaggaggggcgggcgcgggcggcgtgccccgcgcgcggaggcggttctgnaggggtgggcgaagcggatggggttgtcgtcgggcgcggcgcgcaggcgcgccgccgcggccggggcggcgctccgcgcggtgggccgtggcgtcgccgcctcccgcgtcccgatccgcgtcgcgatggccgccgcgctctggtcggaggtcgcctcctcctcctcccgtcgccgccgccgccccggcgccggacaggccgcgctgctccggcggctggaggccagcgcgcacgtgccggcgaggctgctcctgacggtggcgtcgtggatggcgcgcgcgtcgacgccgcccgccgccgaggagggctgggccgagtgctcctga

SEQ ID NO: 23532 - DNA, 1320 bp, Oryza sativa
  Clone ID: TF_OsC1713_5565
tcccatggtaatgtacaagccttggttaggcagaagaggagtagtaggagtacaaggagtacaatagaatactacgtccatggatgaaaaactactgtacatattattcatgtcacacggggccatgcgtcgcacacacgcacgcatgcacgcgcgcacggggcgcgccaaaattacgacggcgcacgtcgccgactcgccgtaccgtgcgtacgtccttcctcagaacgacggcacgacgccgtccgacgcggcgagggcggagaacgccggcgagcatggcgcctcgtcgtcgtcgtcggcgtcggcggtgcgcttggcgaaccggcccttgatgcgcggccgcgtctcggcgtacgccttgcgggacgcgtaccggatggtcttgtcgaaccgccggttcttgcgcttctccctgtaccgcatcagccgcgcctccctctccttccccttgctcgccaccaccaccaccatgggcggcgccgccgagcccgccgacagcgcgtccggtacgatcgcgacctccgacgacgacaagctgtgggccatggagtgttcggggtagaaaaggctgccggcggtgaggtccagctcgggcggcgcgaccggtaccccgatggccttgattccgtccatggaccgggcgaagtccaggtcgacgccgaggtacgcgccggtgtcggcgaagaacgcgtcggcggctgcggcgctatcctcgtggctattgtcgtcgggctcggggagaagccacgacgccgcctcggcctcgttgctccggtcatcatccgcatcctcctcccgcgccgcggcggcatccgcggcggcctgggagaaggggaagggctgcggcgcgtcggcgagcgggccgaagaagggcgcgacggggaggcgctcgtgcctgcgcgcgagcgggttcgccgagtggatgtcggcgtcgcaggcggcgcacagcgccgcggcgtccgcccggcacgtgacggcggcgggcgcgtgctcgcacacctcgcacagccacacccgcgcgtggcgcgacccggcgccgtgcgcccgcgcgtcgcaccgggcgcacaggaacgccccgtccgcgcggcagtagagccgcgccgcctccccgccgcacgagtcgcacgcccgcgtccccaacccccacgacgacgaggagtaccccgccgccaccgctcctcccactcccaccatcgccttgtcctccaccgcctccatatattcttcgcttcgctttgccgctcggcgcgtggtgcgtttcactcgctcgcagctcggtttctcgcggagtttggctgtgttttttgggcctcgtgc

SEQ ID NO: 23533 - DNA, 1397 bp, Oryza sativa
  Clone ID: TF_OsC281_1
tttagcttagcttaagccacttgatctcaagctcaagcttaaaattagcttaagattaagccattaattagccaagctaactaagcaagcaagatcttgttgaggagatgatggcaagcgacggcagcgcgagcccggccagctgcggcggcgcggcgtgcggggtgtgcggcggcgcggcgacggtgtactgcgcggcggacgcggcggcgctctgcgtgccgtgcgacgccgcggtgcacgcggccaacccgctggcgtcgcgccacgaccgcgtgccgctcgcggtcgccatggcggcggcgagctccggggtgtacgaccacctgttcgcgcccgacgacgacgccgcctcgtcatgggctgccgccgcggcggcgggggcggcggtgcaggggcaggggcaggggagccccaacgacagctcgtcgagcttcaccaacgacagcgccggcggcggcggcggcggcggcgccgagaggagcctctttgacctgctctccgacgtcgacatcatgtcctgcggcggcggcggcctcgcgtcgtcgttcgacggcgccgccgcgccgccgctgtggctgcacccaggccagctcgccgcgttgacgccgtggtcaccggccgactccgtcgtcgtcccgacctcggcggccggcgcggtcgccgcggcggcggcggcgagggaggagagggtgaggcgctaccgggagaagcgcaagaaccgcaagttccagaagaccatccgctacgcctcacgcaaggcctacgccgaggcgcggccgaggatcaagggccgcttcgtcaagcgcgccaccaccgccgccgcctcctcgtcatcggacgacgacagcacggccgccgccggagtcagcggcgccggcggcgccggcgccgccgccacgaaggaggccaagttctggctctccttctccgacgacggccgcgccgacggcgtagggttctacatggacagcaccaccgctgccaccgcggcctacggcgtcgtgccaaccttctagaaagttccagaaacccctctcccaatgggcgccaacgcggcaacggcaatggcgtttgcccgtcttaagacaaacattaagaaaagggcaacatgtcataatctcgccgtcatgctaatggtggcgcatggtgttcatgtcgtcgtcttcttcgccgtcgctttctgattccgtggtggaaacccgcatcactatttttaactgctgatgcgggttttcggtgggtggaattccaaattccatcggttaaaattagggggattattattaatgcattgtgacttttgtaagataactcatgtagttaatttctatggttcagtgctgaaataataaaaaaaatccaatgtgatttttctctaaaaaaaaaaaaaaaaa

SEQ ID NO: 23534 - DNA, 1861 bp, Oryza sativa
  Clone ID: TF_OsC106088_1
atggcagtttccgttttcaacacaaggaggcgtacttcccttgtttccgccttcatagatcgaacacgtatgttcatatccacacctctcccccaagtacgagacaaggtctcgagaacaaaaccccccaaaccccacggcggcggcggcgagcggcggcggaagaagcagccgcaagaggcagcagctcgcgccggcggcggcatgggtgggagcagcgcaagcccgtgtgacctggacagggagttcgcgccccaaatcgcccagctcctcgccacccctcctctccaacccgcgcaggaatactacaatgggctcatacagtccaggaaacatgatggtataagagtgaacttcagcagcaagcatgggaaaggtgtttgtgcgaacaaggagtttgcagaaggggaccttattctgaaggatcaaatattggttggtgctcagcacagtcttaacaagattgattgcgctgtgtgcagttattgctttcgcttcattggttctatagagttccagattggacgaagattgtattggcaaagcgttggttcaagcagtgactgcactaataggaggcattgccatgagagtgatttgggatcgagtgccagttcttctggtgcaacaaaggaaaacagtagtactttgccagaagaggtcttaggatcacttattactggtgacatgtcactgcctttcacagaccattttagtttgcctcaagttgttccttgtcgtggatgtgaggaagaacgctactgcagccaatcatgtgctgattccgactgggaaacttatcactctttgctgtgtactggatctaagactgaaccatcccagagatctgctcttcagaaattcatagaacatgcaaatgggtccaatgatatttttcttgttgctgccaaggctatcactttcactctgctgaggtacaagaaactcaaaacgcagcctgaatttcaaaataacacagatgaatcaaacttttctttgcttatggaagcatggaaaccactttcgatgggctacaaaaagaggtggtgggactctgttgctttgcctgaggatgttgattcctgtgatgaagatacatttaggcagcaaattagggatctagcacttacgatcattatcttctgtgtttcgcagtcattgcagcttctcaaggatgctatttttgattctgatggtttggttgttccgtctccagtggaagactatttcatacatattgatgatcttccagatgatgagaagtgcaacatatcccaggaggaagctgaaaaggttacaaggccatttctagatgctttaggtgaagactatgcagctccttgtgaggggacggcattctttcctttgcaaagctgtatgaatcattcatgttgtccaaatgctaaagcatataaaagggatgaggatactgatggtaatgcagtgataattgctctggagcctatcaagaaggacgatgagattaccatatcctacatcgatgaggatgtctcctacgaggagaggcaggcggagcttgcagattatggattcatctgtacgtgccctaggtgccaagaagaaaagcccaactgaacaagatccacagtttggaggttcctgaaatttatttttttggtgtggaatatgcaattgaagttttgacgactccatttattttattttttttgtctaggatatgcaattgagattttgacaactccaaaaatgttaggataggatatgcggaaagaatgatatgatacgtacttatttgagtggatgctggattttgctgtgctaatgttggatgctgcagaaagtttttattccttctgttcaaaaaaaaaaaaaaaaaaaa

SEQ ID NO: 23535 - DNA, 1416 bp, Oryza sativa
  Clone ID: TF_OsC63363_1
gcccggcccgaagcggctcgggacgcggggggaatggcgtcgtgggaggagatggcgtcgtgggaggagcagctgcgggacgagctcgccgcccgagacctcgccgtcgcctccgtccccggcaagggccgcggcctcttcgccgcacgcagcttcttcccaggagaagtcgttatttcgcaagagccttacgcttctacaccaaacaagatttctgtgggctccaactgcgacaattgtttcgcctccagaaacctgaggaagtgctccgtttgtcgagttgcttggtactgtgggagtgcgtgtcagagagaagaatggaagcttcatcaacttgaatgtcgagcaatcgccgcgcttacagaggatagaaagaagatgcttactcccacaattcgtttgatggtgcggcttgtacttagaagaaaactgcaggatgacaagatggccaatcttgtccaactgattcttccttcattcgagcttgatcttaaggaaattacacataccttttccaagtttgcctgcaacgctcataccatatgtgatcctgaactgaggccccttgggactggactataccctgttttatctattattaaccacagttgtgtaccaaatgcagttttgatatttgaaggtcggacagcatatgttcgtgcattgcaacctataagtaaaaatgaggaggattctgaggaagatgcgctccttgagggatacagatgcaatgaccaaaagtgtgatggatttcttctgcctaatgcagtagataacagtgaggtaggttctatgtacaagaccattgaagagctagagcggaagctttaccatcctttgtcaatcactttgcttcacacacgggaaacactcttgaagatatatatggagttacaagattggcagactgcattgatgtattgcagattgacaattccagtttatgaaagaatttacccaccttttcacccaatgattggattacagttctatacttgcggaaagcttgaatggttgcttgagtacacagaggatgctctgatgtctttaaccagggcagcagatatacttcgcataacgcatgggactaaatccgagttcatgaaggaacttttgggcaagctagaagaagtaagggctgaagcttcttttaggctctcggctggagatgaacaataattgagtaaccattttattgtgaagctccaggtcatcgtgatggcaaatagaatgtaacaatgttgcaacaatgttcaaataggatagtactaagtagacaatctctaaatttagaatagctttgttaattcaacattgggatataagctgccctgaagggctcgcatcgggacaagaactgtgaactggtgatatggaaaattcattgttcacctataaagtgtgggttttaacttc

SEQ ID NO: 23536 - DNA, 991 bp, Oryza sativa
  Clone ID: TF_OsC22960_1
ggtccggattcccgggtcgaccacgcgtccgccgccctcccccacgcgacggcggcggcgacgacgaggaggtggccgggatccggcagcgcggcgtctctcggccgcccgtatccggcggcggcgcggcgcctctccgctgctcggatttttatttttgtgtgtgggcaacataaccaccccggacgctaaaatgtgattttcgtgtgcggggaacgccgagactgagaacgccccctttcctttccccctcctctcgttggaggcggccggggaagctggtgggcatatggagtgcgcggcgaaggggctggtggcggagccgtgtgccggcgaggcccgccggcgctgcggcggttgcggcgccgtcgcctactgctcgcgcgcccaccagactgtgcattggggatttcataaagaagaatgcgcaaggctcgcagagcagatgagccgcatcgatatgctgaaacaatttccattcacgttctctgtggaatctcctgctccgaatcatacattccctagtctaagatgtttccttttggaatcattcaaacttcaccaaaaaggactctggaaatcagaatgcatatgtgatccagaggttacttcagtcaaggacttaagcaaaacaactgactggagtatgggaagcgccctctgcccatgcacagagcctgaacataatgtatccacacccctgacaagctggaaagactactataggtggagatcgcttcctttgcaatcacctgttgctgttttacttcactggcaacttactttatatctcattgttgccccaaatgctggtatagctgcatatcctagttggattccaactattgaaataattaggaaagttgggattcctgcaattttcacggacttctgtgaagaagctgcacatctagcttcgtcctgcattacctccataactggtcaacccctcagagtcccaattcagaattgcaagtttgtatcaccatga

SEQ ID NO: 23537 - DNA, 3267 bp, Oryza sativa
  unsure (1)..(3267): unsure at all n locations
  Clone ID: TF_OsC64741_1
ttttttttttttttttttttttttttttacaaactgagccattttttcctttttcattgcagtggggtaataatacatcccccattattatacctgtacaacccaaaccctccacatgtcaataaaatgtttgggccgtcctttccctagccgatctcctcaataaaacactattggcttctccaggatcatgctcagtcccatctaacctcctcctatattgttctgttaacttactactaaattgatgtttactttggttagtatacaaggaagaactttcatcgccctgattccaaccctccctggcaccctgaagcctgtgctcgtcaggcctatactgatccacctcttgacccgatgaactggtacccaagctagactttgatcgggaataagtcatacggccgttttccccatgtccgaacatagagccatcaaagtatgaaacttgatcaccaaatatgaggcgttccatatcctcactggtagagtttctagtgctttcactgctgtcggtgctatgtgaccctgtgtcggaactggtgaaaattgatgaactctcacttggactaggagattctgctggcgaatatggtccatgtccaaactcgtcatatgtatggggcaaatcatctgtcatgtgatctgcgtacatctgaccaccttggtgtatgggacctcctccatgccaccgtcctgaatttacccttgccttgtccttctttacacgtgctggatcttgagccatcagcgctggccttacagagcttggagctcttggtgaacaccttgcatagagcagcatgtatgcgcacttcgacatgacattttccagagatacaggtttgacctgactgtcatctgttttgtaccacttcccatgcgtgtccttcacatagcatacataatgaccagaaaaggcggcattcataatatcatgatggacaaccactgcatacaggctgtaaacaggggaagtgtcatcagcttttgggctcatatagcgctgcaagttcaaggtctctggaaatctgatggctttgttgatctttccaaactttccagactgatatcttttcagcgcaatagtcaggacatttggtgcttccgatattgtcagcttctttttagcgcgctcatgcgatttgcatctgctgcatttatatttattatctccatccaagacttctgtagatgtaaatcgctcaagtgctccttccagtgaactgatgtcgccatctatttcaacagtaagatccaaaatacgctcatgttgctcggaagtagcatcacatcttgtgcatcttatcttagatcgcagatagcccccaaatattaattgcataagtgttgtttcttcgtgtaaccgatgagtgccgcttttcctggcttccttcatgcatacagattgcatagcatcaatggcgtacctaaggaattcatgagcatcttcttgtttaccaggaccaaagctacttccaatgtcaggcaaatgagagagtatcccagttggtgacaaagcaatcttgccttgtctgccctccccaacgagtttttcaaattcacacatgaagcaccattcctttttggaacaattttttgaatgaagccctcccaaaagatatgatgtaagtggtcgggtaaacattaagcactgaagaacagcatttgcatagcaactattgccaaggttatgaagaccaaacggttgcaattcaaccttttcatagagcttaatgaaaagctcatatggaaaatgtgttggctctgatggataatgcctcacaacttttggtgctgtttgctgcctgacaatttttttcagagatgttgccaggctatttgctgttgaaattgatttctctgatggtttagaattcctttcagcaatattatcagccctttttgatgaattaggtgtaacagaacgtccaccgggaacaggagaaactttatcaacagtcaaaacagatggcaccatttttgacacaccaatgttgtctgagccagcagcttttgtcttggagtgtccaacttccacatgaagagcagtcctggaagttttaggttctactgcaacaggtagagcagcttgagcattgttgttatctgcatattttttgctgttactagtttgagagcaatcctggtgcttcttggaatcaattaaggactctttgttgataagacttccagagccactaatctttggtggagaaggttgaaatctacacaccaacgcctcatctaagtcctttgtgtaagaaccattttcaacaggagttgtaggtttcatatttgattctgtctttctactgccaagagaagctacttgtgaagaactttgagggagtttgaccgcactgacagaatggtcatcatcaggaacctccaccgaagcaagtacttctgagggcatatcttttgttttatcatttaaattcttcacggtggctgccgtgttggtttcagctatgttttcttcagaagcacttgtctgctcaattttcctttcctttgcaacagaaagttcagccacatcatcatgattagcatcagtgcttggtgggcggcattcatttttatgaccctgtctccagtgggctatctggcatttgaaggaacagtacttgacagccttgcactgcttgcacctgaacgtcgtcggccggaagcacaccgcgcagacccccttggcacccaccggcggctgcggctgcggctgggcccgggcctccatctccgcctctgcctccgcctgagccggaaccacggccggcggcgccccccacgccgcctcatccaccatctccgtcgcgtgcacgacgctcgggaacagctccgagtagtaggcgcgcgcgcactccacctccgccatctccgactcctcctgcgccagccgcgtgagccgcagcacctcctccctccgcgccgcggcgcgcctcaccttccgtcggaccacaacccacaccaccaccaccaccgcaatcaccacagccaccaccaccgccgacgccgacgacgacgacgacgaacccgccgcctccgccatccaccacctcctcctcccctttgaccccggtaccctgctcctccttctgccctgccctacccatcgnatagatctagccgaccaacctcctgcacccatcggatgcgcccggcgatcccgaacccgaacctcccccggacctagccgtagccaacccgcccaaatttaggctttcaaatttttcccggatattaaaaaaaaattttcccgct

SEQ ID NO: 23538 - DNA, 3062 bp, Oryza sativa
  Clone ID: TF_OsC49686_1
atggcgactccagacgttatattgccaggaccttctttaagacccatgccttatatgagatctgcaccttctgcaagacccgaataccatgagtgtgctacttgccacgggcctgctaagactcgctgctccagatgcaagtctgttagatactgctctggaaagtgtcaaataattcactggaggcaaggtcataagcaaacatgtcagcaatggaatggttttggtactagcagctctggtggactacctcctactgagaatactgaacagatgccattcttaagtaacctgaactcacctcttcgagggagcgatgttcatctgcatgacatggatttcgataccatgtcagagccatcctttgtgacaacagatagctataatcttgataccagcccatttctgtcagaccgaagcaacatgaataaaccaaaccaatttctacatacaagtgaaaatggtgctgccattggatcttatgagaagaacgactatagtattgatggagaagtcccttcttctgagattctgtcaggaaataagggtttaaataacagttctggttcaggtgaaaactgcggaaaccgtgatgtaatttatcctctcaatagtgtggtacatcaacccaataattatgcccctgaaataagaaagcggcccaaagcaagcatcacggtttatgaatctgataaaggcgtgtatttaacttctgatatgatcagttctggtgaggggccatatgcttctgctgcagagtcactacaaagaagtaactcgtctggaaatgttaccggaaaaggaaacatgatacataagaaaccaccatacccatctggatctaccaaaacagctgtttcaacaaacagcagtttgcaaggatgcaatggcatctcaaaagcaggagcatcaaaggttgaagccctgaagaagccttcaaaatttctcaaaaccagtctggtgggtttgatcaatgataacaagaggagtaaggtactgttcccatatgaagatcttgttaagttttttcagtatgaagtacggggcatctcacctagaggtcttttcaattgtggaaatagttgctatgcaaatgctgttctacaatgtctcatgtgcacaaaacccctgatgatctatctgcttctgagactgcattccaaagactgtaataccaaaactcaagcccccaccctccttggtgtagttgtgaaatctctcaccatctctgatttctttgacattgattgctttattcttttaggttgctcaaagaattggtgcctcatgtgtgaacttgagcaatatgcttcaactttgcgtgaaagtggtggccctgtttctccaagtagaatcctttctaatctgaggaatattggatgtcgcttgggtggtggaagtcaagaagatgctcatgaatttttaaggcatcttgtgatgtctatgcaaggggcatgcctggatggacttggtggtgagaagcaggtagaagcaagcttgcaggaaactacactgatacagcagatgtttggtggccgtcttaaatcgaaggttaagtgcctcagatgctaccatgaatctgaaagatacgagaatataatggatcttactttggagattcatggttgggtcgagtccttgcaagatgctttgacacaattcactgctcctgaagatttggatggagaaaatatgtataaatgtggaaggtgttctgcctatgtcaaagctaggaaacaattaagcgtgcatgaggtgccaaatatattaactgtagttcttaaaagattccagacagggaaatatgggaagatcaacaaatgtgttacttttcctgatatgttggacatggttccgtttgtgactggagctggtgataatcctcctctttacttcttgtatgccgtggttgtacacgtggatacagaaaatgcatcattctctggacattacatatcatatgtcaaagatatgcagggcacatggttgagaattgatgattcagaggtccaggctgtttcactgaatcaagttatgtcagaaggtgcatatatgctgttctacatgagatcttttcctcgcccaccgaagatttacattgagaagggcctatcatcagttcctacatgttcaaagcgccattcatcaaaatcctccaagggttctaagcaagacctgaatcatactgagtcactctttgcttccagtgatcaaacctatggaatatacgatttcagaccagacaacggctatatacaagatcagcatgctgctttgagaaccagaaatttctatcataccgatgatgcttttgcagattcaattagcacagacttctcagatgctacatcaagcgaatggtcactgtttaccagctctgatgaatcctcatttacgactgaaagcactagagattcattcagtgttgtggactatggtgacaatgctggccttgatccaatttcctctatatttgggccttattatgctcaagaccatcctcctggcagttttgcctcgtgtacaaggttgtcaccttccaatccacaaacaaggtacttccaagagaacacaggctttgtctcagattcttccatgccggctcacctgcccggcaatgtacatagaggaagatatccagacagggcctgttcttcttcagctgaacctcctgcttcagcaaatccgcgaagcgtatatggtaggtatggccttagtagagaaggttttgttcaaacatctggattttgtcaaatgtaattgtctacatttcatagttttagctggagtttggcagttgtggttaccactgccattaaataccgcctcatgttcttttatttcagatgaggcatatttaattttagctgcatatcctaggttagttgagtgagtgactcaatgtagcaggccagcagggtaattagatttgtctaggtgcctagcatttcaggagatatatgttagaacacagtgacaggctttgtgccatccattgttcaaccaaaagccagtcatatcatttatctagttgcacaaattgtaccaaaaaaaaaaaaaaa

SEQ ID NO: 23539 - DNA, 1586 bp, Oryza sativa
  Clone ID: TF_OsC8143_1
gcggcaaccactctcccctcgccaacaccaacgccaccgccaacgccaacgccgccccgcatcatctatcaaccgccggccgaggtggagcgggagcttggactgagatgaggacgaggagtggatctctctaccgcagcggcggcggcggcggggagacggccatggttgggcagaagaggaagaggtcgtcgttgccgccgcagtacgccaccgccggtgactgctgcggcggaggaggccgccggaagaggctggccggtggtggcccggattacctcgacgagctccccgacgacctcgtcctcgccgtgctctccaagctcggcgcctccgcctcctccccttccgacctcctctccgttcacctcacgtgcaagaggctgaatgggctggggcgccatgacatggtcttcgcaaaggcctcgccggcgtcgctcgccgtcaaggcggcgtcgtggtcggagcccgtgcagcgattcctcaagctctgcgccgacgccggcaacctcgaggcctgctacattctcggcatgattcggttctactgtcttggcaaccggagcggcggcgcggcgctgctggcgagggcggcggtcggcgggcacgcggcggcgctctactcgctggcggttatccagttcaacgggagcggcggcgccaatcggaccgcgcgccggggcggcgctgtgcgcgcgcgccgccgcgctggggcacgtcgacgcgctccgcgagctcgggcactgcctccaggacggctacggcgtgcgccgcgaccccgccgagggccgccgcttcctcgtcgccgccaacgcgcgggagctcacgctcgcgctcgccgccgcggcgtcgcaccgccccttcgccgccctccccctcgccggcggcgccgccgccggcgccatcggctgcccgctcctctccgacttcgggtggagcctcccggaggcggagccccacccggccaacctcttcatggccgactggtgggcgtcccgcggcgtgcaggcgacggccaagaaacccggcctcgaggctcccgctgccgccaccggcgacagcgacggcggcggcgagctccgcctctgctcccacgtgcggtgcggccggagggagacccgccgccacgagttccggcggtgctccgtctgcggcgcggccaactactgctcccgcgcgtgccaggcgctggactggaagcgcgcgcacaaggcgcagtgcgtgcccatggaccggtggctcctcgccgccggcgaggcccagtgattagcccccgccgccaaatactcccttagaccaatcggtccaccggtttaacgctggaccgggtgtagccaaggcaagtggcagagaaaaaaaattgaggaagcctttttttctttttttttctttatgaccgaatccatcgatgtcttcttgtcaaaggtacgtattcccctagggaaaaaaagggtaaaaatggtacggatgctttttactcgcataattccttttttttttctcattccgagtaaactaaactttaaattaaattaaattataattataattataattccaacccctttaaaagacccagggggttt

SEQ ID NO: 23540 - DNA, 1535 bp, Oryza sativa
  Clone ID: TF_OsC11539_1
ggctgcaggaattcggcacgagccctctctctagtctctcctactattcgctagaagccaagaacgcgacgcggcgtcgatgaggacgaggcgaggcgcgtgctactcgccggcgtcgtgccaggacgggcggcggaagaggcggaggatcgccggcggcggcggggagggatcggctgcggcggccgcggcggtggccggcggcgccgaggggcctgccaatgatatgttcgaggagttgccggatgatcttgtggtgtcgatcctcgccgacgtcgcggcgtccgcccggtcgcccggtgacctcgccggcgccatgctcacgtgcaagcggttcagggagctcgggcagagcaaggtggtgctcgcgagggcgtcgccgcggtgcctcgccgtgcgggccaaggcgtggtcggacgctgcgcaccgcttcctgcagcgctgcgccgacgccggcaacctcgacgcgtgctaccttcttggcatgatccggttttattgtctcgggagccgcgggtcgggagcggcgctgatggcggcggcggcggtgggcgggcaccgggaggcgctgtactcgctggcggtgatccagttcaacggcagcggcggaagcaaggacgaccgcgacctccgcgccggggcggcgctgtgcgcgcgcgcggcgtcgctggggcacgtcgacgcgctccgggagctcgggcactgcctgcaggacagctacggcgtgcgccgctccgtgctcgacgggcgccgcctcctcatccaggccaacgcccgcgagctcgccgccgcggtcgccgcctcggcctcgctcctccgcgcggccaccggcaagccggcggcggccgcctcccgccgccactcgtgcctcctcaacgacttcggctcacacgccgcggcgcccaaggcccgccggcgaggcgcacgccgccaaccgcttcctcgtcgactggttcgcatcgcgcccgctcaccggctccaccacctccgccgccccggcgccaacgccagggagcgccgcggaggacgaggcggccgggctgcgcctgtgctcgcacgcgctgtgcgggcggccggagacgcggcgccacgagttccggcgctgctcggtgtgcggcgtggtgaactactgctcccgggcgtgccaggcgctgcactggaagacggcgcacaaggcggagtgcacgcccatggaccggtggctcgacaacgccgccgccggcgccgccaaccccaatgccgccgccatggccgcgcccgccccatgaccgcctcgccgcgacacgcgcacgcaggcgcagcagtaaatgcaccggacgaacggttggcgaactaggcgtgaactcgcaagttggaaacgaacggatagttattagtgactgtttaattagtacttttactttagacggttaaaaaaaaaagaggaaaattactgtgcgttcttttttttcacccgggtggtcttctactcttctgtacatgggaccttgaaacgagcgaacgaacactgaggtaaaaaaggtaaagcaagtctg

SEQ ID NO: 23541 - DNA, 1492 bp, Oryza sativa
  unsure (1)..(1492): unsure at all n locations
  Clone ID: TF_OsC114099_1
tgcgagtcgccgaacacgcacgcatttttgcccccacgccgccgccgaggatggagtccaacgccgagaagcttcgtggtctcaccatcacctcgctggatgaggaagacgacgagcccgaactgccccaccgatccccacccgccagcggcggcggcggaggcggcggcgcgggctacgaggacgacgatgaggaggaggaggaagaggcggaggtgacgcttggttttctggagaagccgaagcacccgggcctcctcctccgccacctgttccctagcaaggccggaggcatcccggcgtggttggatcctgtgaacttgccatcggggaactcgcgttgctgcggcttctgcggcgagcccctgcagttcgtcctccagatatatgcaccgattgaggacaatgcggcatcatttcaccgcactttgttcatgttcatgtgcccgtcaatggcatgcttactccgagaccagcacgaccagtggaaacatagacaaggcaatccgtgtagaagcgtgaaggttttccggtgccagcttccccgtagtaatgccttctactcaagtgaaccaccaaagcacaatgattctgacaagccactatgtccaggagctcctgtctgccattggtgcggtacatggaaaggtgataaactctgtagtagctgcaagaaagcacgctactgctctgagaagcatcagacactgcactggcgctctggccataagagtgattgcctacagttaatcagttcttctgaagcttcaagctctatttttcctgctgtaggaaaagttcctgctagcaaatcttggccagaatatgagattgcaatcgactatgagggtgctttcaattctgacagttgtgatgagagtaactcaaagtccttggtgatgcaaagacctggtaaaccagatgatatgatgcagtcatggatggatcaatttgaggctgatgctgacaacaaatgctgggcgtcttttcaagagcgggtctcaagagcaccaaagcaagtattgagatactgtcgagaagagaatgccaaacctctatgggcgttatcggctggttgtccatcaaatgccgatatcccatcatgtagctactgtagaggtccactatgctatgaatttcagataatgccacagctgctttattactttggtgtgaaaaatgagccagactctcttgattgggcaacaattgttgtgtacacatgtaaaggatcatgcgatcaaaatgtcagctacaaggaggaatttgcatgggttcagttataccctacaacaaccacaaggtcatgataatgtttatggtttatttgcccccncagaantaagctttgtnatggcctacaggganctggctgaaatcatctncactcntttttgacttgaantccggagctcnctgatccanacnaaatanatttgttttcccccnctgggggatttttttantgggggtgttggtttccaanaatccc

SEQ ID NO: 23542 - DNA, 571 bp, Oryza sativa
  Clone ID: TF_rsiceb_7074.y1.abd
gcacgaggggcggacaaggacgcgcgcgcgggctgtcgctgctgtgctgcgctgcgccgcgtggctcggccacaccccggcgctccgcgagctcggccactgcctccaggacggctacggcgcccgccgcgacgcccccgccggccgccgcctcctcctccacgccgccgcccgcgagcacctctcctggaagaagcacaaccacggacaccacgacggcagcgccgccgaggacgcggtgagccggttcatggtcgcgtggtgggactcgcaccgcgccaaggcggcggcgcgggggtgcctccctggcgaacacggcgacggcgagcacgacggcggcgaggacctgcggctgtgctcgcacgcgcggtgcgggcggcgggagacgcggcggcacgagttccggcgatgctcggtgtgcggcgccgccagctactgctcgcgcgcgtgccaggcgctcgactggaagcgcgcccaccgcgcccagtgcgccgccgcgcgctggctcgccgcggccgccgccgccgacggcgtcgcgcactgagcgcgacacgtcgcgcatccatgtaca

SEQ ID NO: 23543 - DNA, 486 bp, Oryza sativa
  Clone ID: TF_uC-osflM202007a02b1
gtggttttaaggatatcagatgcaaccaaccttgtggaaagaaccggcaatgtggaatgcacgcttgcaacaggtcttgccatccttccccttgtgatccaccacctgcaaatggagatgctagctcaagtactggtggtagagcttcatgtggacaggtatgtggtgccccaaggagggaatgtaagcacacttgcacagctccatgccacccatcatcaccttgcccagatttgagatgtgaattccctatgaccattgcctgctcttgtggccgtatcactgcaactgtgccatgcagtgctgggggaaccgccaatggcgataatatgtttgaagtatccatcatacagaagctgccaatgccactccagccggtggaatctgatgggaggagggtaccacttgggcagaggaagctcttttgtgatgaggactgtgcccagatggagaggaagagggtccttgctgaagcatttgacatca

SEQ ID NO: 23544 - DNA, 2577 bp, Oryza sativa
  Clone ID: TF_OsC24256_3
tcattcacaagcttcttcccaatcatccacttcgacttcaggctgcatcttactaaccggtggcgcagtacttggccctgcgctggatacagcatcggtgcgaggagcaggcttactctcctcgactggcctggagcttgtggccgcatcggactccagggcgttccagcggttcgatgtccccatgacttgggcgacagtgtcaccgccacgcctccatactgatcctggagcttgaccaagcacacctgtccagtctcctgaggatggatcaggctcagaggcagtggccttcttccatggattggcactgctcttggtagccgccactccatctttctgccctgcaacccagacattgcctggctgagcgctgctgcttggcaaaaacacagcagcaccctggtaagcagaaccataatccagccgcctcagagctgtcgctgctctagctggatcattgaagacagccacagcattcttgtcattcagccaaaccaattcacactccccgccaaaccttaaaaccagagcgctaacatcagcatcccggggcaggtccagcattgcaacaacaagccttgggtccatgtccaccaagggatcaaagaaaggatgggaagcagcaacaaatacacctggcttggaacccaggatgcgagcaggcgcctttgacttcggtgtgggatggatagtaatgaaacgtttgggttcccaaccagcagcctgaacagaaagcttccacctgtcggcaatgaccctgatagcatctctcttatcctttgtcatgtgacagaagacatggaccttgaggttgcctgaagaattgcctcttgtcttcccaagtacaaggaacttgcacctctcctctatggccatcacccattttggctcacggcggaaaaggtcagaaagcaaatccgatgcatttgagttctcaccaaaatgcaatgcatccaaattgggtggagtgatgtcaaatgcttcagcaaggaccctcttcctctccatcttggcacagtcctcatcacaagagagcttcctctgcccaagtggtaccctcctcccatcagattccaccggctggagtggcattggcagcttctgtatgatggatacttcaaacatattatcgccattggcggttcccccagcactgtccacatgaagctctaccaccagtacttgagctagcatctccatttgcaggtggtggatcacaaggggaaggatggcaagacctgttgcaagcgtgcattccacattgccggttctttccacaaggttggttgcataaggcttgttgcaacggaattcttcctccaagaccttgtagcactccaccatctggcctgatgaaccacagcggcacctctgttccacacgaaccacacaaggtgggcagtctccctcatggcatgtgaccttgcacctatgcacaccacaaggcagcttcttgtcgcacaccttgtcacaggttgggatcgggtccaagcagcttgctctcttctccagcagccttgtcttcccacaatggcatgctgtgaccttccctggcataagttcgcactccccgcatggccctgggtggcaaatgtcttggcaggcatgatttccgcacgacagcatatggctgcaggcctcactgcatgagaacactccatccttctcagataaattccctttcagttccatctctccacacagcaatgtctctgtcttcttcccacagaaacaccgggcagaaatgagaacattacagtccccgcatggtccagtgtggcagaccttctcgcagcggtgcctccggcaggggagcagccgatcacaccgctgcccgcacgtcacaggcgttgtccggtccgcacaccgccgcacaatggtctgcttgccgcatgggcacagccggtccggcgcgaacgctttgcaaggcgggcagggccctgggtggcactgcaggacgcacacatgggggcacctggtggctgcagcgtcgtcggccttcacggcagggtcagccttctcgaggggcttggagcagggctcgccgcaggagtgcggcgtgaggaagagatcgttgggtggctcgcggcggcgcccgcagaagcaggtgtaggcgagctcgcgcgcggggacggcgtgcacggactggcacccggggcagcgccaggaggagtccgggtcggacgcgtcggcggcggacgccggggagcgcgcccacttgcggatgcaggggaggtggaagatggagaagcagctgccgcaggaccacaccggcgccgaccgccgcaccatgtcgtagcagatcatgcactccaccgcccccctcgccagcttgtcctggatctcctgcaccagctgcggcaccgccccatctccccccgccgccgccttcgtcgccgccacacgcgcaggcgcaggcgcggcggcacgggtcggagcgggcgccgcatgctgctgccgctgctgctgctgcggcggcggcgggggcggcgcagcggaaggcctctcctgcggcgggccgcggcgctggccgccacccccatgattcctccggcgcgggcgacgttgctgctg

SEQ ID NO: 23545 - DNA, 15590 bp, Oryza sativa
  Clone ID: TF_OsC4072_1
ttttttttttttttttttttttgacttttttttggctcttgtcgtcaataacttcatttacggtcgttgtttcaccttcatgttcttcaattgcaggtggagcaaggaatgtgaatggaggctggtaaatgccaggacaaaagctagcatacaaaccttgcccagtttcattttacaaggaagaattataatgtttacagctgccacacaaaagctgactatccttacaaacatacaggcgcgtggcaaagtttcaacacaaattgtagatcctcggaaaacttcgttcagctctttgcaccgtgtatgatcgcccggacaaagtcttcacatgtagtgtggccaccggagaacacatctggcaacgcacccatgacatcgaaggcctcctgcaagtcctcagatgaggtcatgtcttcgagccatgagagcacgtctttggagaatcctagcatctccttcatgttccccagcttttctttcatcataatctcccaagcttcgaggttaccaccacttgatccgtccttctcaccgaccttttgcgtgccagacgatttgcctttcttgaaaaattgctgcagctgctcaatcaaaccagtgtacaccagcatcggctggacaatggcaaagagcctcttgctgtcgtttgaatcggcggatgaaccttcatctgatcggactgcagaggaagacgtgtcggcagaaagcttgagggtggatcgtccatgcttgtgttgcatgtaagcatggtagatgcccctctgcaggaaagcggggcggtgctgcagccaactctcataggactcagacagcagagaattgaccatcatgaactgtacagtctcctccgaggaacctgaaccaccacgagctccagatagagctgaaagtcgaacaggagattctggagttgaaggcgaagaggacaagtacgaggtaacagccttggccatgacatgacgctgctggttggcacttccatctacaagatgagaagccatttggatcatgaaaggaagaaaccgcgagttgctctccctacccccacctttgcagtcagtgctgaaagaagcgcctgttgcaaacctggccaacatcagaacaatgtcatatgttaacaagcgaaggcgacttccatctgctcgtcctagagaattcaattggtcccaatactggtcgagacatcgtgtgtactgcccaggaggaacagatggccccctcaagggaaagatacaattacacagtgtctcattatttctcagggtagcaccatcccattcctttttaggattcttcagtgcagcatcagctcttttagcctcctgatgacattggtagtgtatgatgttgaagtggctaacagtagtgtaaacacagtccccacggccactgcctgaactagtggcacccaagttcacccgtttactaaatgcatagactcctaacatgtcagtcggcctcaaagtatacccttctctacaaaccatgcatgctaacccatcctcttcttcttccacatcatccaagccttcaattataggctgagacacaacaatacgtctacctccatcagaagcaaattcttgtcgcattcctagcccctggagtagcatttctcttttcttgagagcacggcgtcgcatttcatcccttgtagcatgtcggagctcttgaatcttctctgccaagaagccatcaccattattttctttgttggcaagggtatccaaaagattttctgctcttgcaccaatttcattttcaccaggcactccttctaaagcatgcagcaatggcagaatatcttcttcatcgacacacttttgtgtaggcagatcacccttggcgagccccttcaacattgagaggatgagtggaatggaaggcagttttaacccaactgtccattctgcactagtcctaaagctagcctgccctgcagaagcaaagctttccctcagatgacctacagctgcttttgtaatgcccttctctagaataatctccttcagcctttcaccgcaagaacttgtcttgagtgactctgagactcgaacaaagttttcaacagcagacctctgcattgatgcgtttttgcttaaagtttcatcttttggattttcctcgtgttgtttctgcaactggtcaaactcactccagttcataaggtagggctcaaaatgcaaaacaagggcctccatggctgctggctccccatacgtcaagttaggtaagatccttgccaccatctcctcgtttctttgttgcttgtttgattttttggcaccatcaggagggcacagcctctcaagaaacatgagaacaattttctttgcctcctcaccagcaccagtctcctcagtagtagttgtaaaaacactttgggcaatacttatgtcactctcattagcttccattgtaagactttctacaattaatagaataccctcagctggctccatcgcatctactgagaatgcacgtctggctgtctcaagtagcaaacccaatgcacccaggcgtaataaagcacatctattttcacgaattttgcaacaatacttcagaaggttaaggactgaacccaattcttcctggtttgatcttaactcatcttcgcgtaggctctgaatcatgcttaatataatttcaaggcctccacattcccttacagcacctgctatagcaaactcaacttcaggatcttgtgattcctccctttcatcttctaactctttaatcataggttcagtagcttcaccatctaatccctgcaatctgtaagtgactgtcattggcggacaatctctgacagatgaagcagcagcagacagttggctagcattggacaaagaatgttgagtttgaccatggtgctttctccatacttgctcatagacttgggagatgctaaggtcaagtgaaattatattcccagcgaccagtaactccataccatagtcatcttctaaaagaccaatcaaatcaagttgatggcatattttatttttcacatctctcatcagtgggccaatctcagcactggagtatggattccttgtcatagagcccctaatgaactcttcttgagtatgtgctttgtttagaattaagagataaacaggttctggctttactgggcaaattaaattgcagagttgctccaaaatgaacagagatgtccgtctcttcttttccttcacatgcttttgcaatccagagatgcaagcacgaataaattgacgtttgtttgcagtactctctacaagcaagctatcaagaaggtccttcaaaagcctattgcagtcattaattaactttgtcttttgcacaactagcccacggataaccagaaaagcctccagcacatcagataataaattatcactcataaatcttgctctaatattgggaatttcaagaaatttgttgagaagctcaacaagcttgtgaagaatgaatccttgtgaaatgtcaatgctaaggcttctctcctgtgattcaacattggacacttcttttgttatcaaagaacataatgtggtcaaacaaccacgaacagttaagaaaagacgtgaagcttctgtatcaatcattgtcccaagtaactcaaagtactctgcggcactttcaccagctgacagtgttctagggagtaacgacataagcaagttcaatagttgaaactgtctggatgagtttgatgggcataacaagcttatgagagtgcatatttcagatcttattgactgagaacaagaacttaagatcaagtctgagacccaggagcccaaggcaaattttgagaagtcacctttagatgactttcgacatgcacgacgcttccacctcagtccatattttagaaccaggtagtcagatttttgtgaatcatgccgtgttttttgcagtcctttcacagcttgtgatactttatactgcctcctcacaaaatcaagatatgatgcaccgctctcccattctgaatagctgagaagtgaaatatcctgtcgtcttcgacttccatctggaatctttcctgataactcagactgagtcttggaagtggaaagattagttactgaatggccaactgtatcatcattctttgcctgcatcaagctagattttcccataccaggctctttttccccagaatcagattttggaggagtacaagcctgagaaatgattctcaaacaagggagaataatatgctctgaaattgcaggatgctttgctccaactttaatagaagaaaacaacaactgaaaagcaacacgaagccttgcctcccaaaactcatccacaagggcacatgtctctgaaagtagaagtaactcttctcgtgtagattgtgaaatatccatggagcgatggtgctcaagacaatacatcaccttcttctgaatcaggttattcagttcctgcactgcatctgcatcaccttcagagaaggaagaaagcacagctcttgcaagagtgcgtgcagttctagggccctgatgaatgttgttttcaaataattctgacagaatgccagcactaacaagttgcttcctgctggttgcatgcttggacagaacttgtaataactccaagcattgagttacaaacgtggtactacagccatagcaactacttggagaccttggtattgaacaagccggtaatgcatctgtatcattagaattcttctggtgcagatatgtcattagaacacggcgcagtccttgtaatgtctgaacactcttgctcactgaatcaaaagctgctttgcacttttcaccatacaaaacaccaagaagtgcaattttgcgatttactttgcctgtaggcccagggagagacaccatcatctgctggacagcatctttctgttgtgaatcaatctcctgctcacctatgcttgatacaagtttaatgagaggcttcttaaatcccatcagctgctgatatcgcctgtgagcattttctgattctgactcaattgctgtcaatcctttcctcatatcatcatcgttttccatgttatcgaatgagaaacttggttttgccatgaaatggaattcaaaacgaccatatttactgtatccacactcattgcagaggaaagaatcaaggttttcatagttaatatttctgcattgtctacattggtatgcattttcatgacaattgctacagatgccatgcttatcagttacagacctgctacaccgaggacactgcaatgactcaagggaagatgcttgaagattttcataaaatgaatcaagctcaatcatgaaattgcatgctgtgattggaatggggaactcaaccttcaattctgtctgattaaatgtaagatggcagcttttagcacgcttccagagagaccaattattcttcagttctgacaaatctgttaccggcctgttgttgtaatataggttaagtactttcactgactttgacttgcgagcatcataaacattcattgtcaccgactgtatagtaaagcttccagtacatttcactattatcctattgtcagtgaatttggtctcagacttcaaactttcaagcttcattctcgaatatggaacatctgggcagctgcaggtaacacaaggctcactttccaagtaatagccatcaaactccactaagcaactcagtgtattgtatatacgggaattcggatgatttgccaatagctcattttgagaatgaagtgtgtcgaaaatgcagcttactacatcagatgttaaacatttattcagaagttcagtgtcactttgctttgcagtagaatcattagcttttcctagtaaacatgtcatgagatcagtgtactcaatgatgttctgtccatacatgggtagatacttgaccttctgcagtagagttgttaacatgttctccttaaatgagctctttgcatggtaccacagtccaaatagaacacttttggcctcatggcgcacactcgttgagttccattccaacaagaatgtatcaacaaaacgtttcaagacatcaccatccttaccagtaaacactaccacagcctgctccatgtccatgcaggatttttctgaggagccttcagagctatcgtcacctttccgcttcttttttgaatctgatgactgtgaaccagtccttgtggaacttccaatatctccactctctgttttctgtgcattatggttagcatcttttcctgaatagaatgctagatttaaaagcttgagagtctgaacgatacattcttcactgaaatagtagaagttatccattaaaaaaggaagaagatctgtgtgcttcaagcaaaatttttgccaatttcttggccttgatgcagccacatcacaaagagtagacaaacattttataagcttaacacttctctcatagggcacaggatttcgaaaacctccagacttattaatgattttatgaagtttcttgacttcatgtgaatattgccatgaatccctgacactgtaataatgagtcttgctgccacacagatgaagaaatagcctccttgcatacctccgaacaaacgttgtatgagcattgctgatataactacaaagaacatcttggtatccatctaactttagatccttggtgttgggaaccttgcaacttttatccttatcagctgatttttccttttctggtcgaaccatgctatatacaagcctgaatgtattctccaacaacaatttgtagtagtccatgaaaagatcagtgggatgggacttggcatatgaatctgagaaaaagggagagaagtttcccgctggtaactctctccgtactgtcaatagggatccacagcctgaactagaagagccaccttcaccatttatggatgatgacttgaaaacatgaacaagttgttgcagtatatccatcaaatagttcagaaaggattgctgcctgagggcagaacaagcacgaattaactgggaagcaaactcatttttatcatggtcatcattggaggattgaagagtcgtggttgatacttggacatgaacaggacctttttctgtcaaatcagagctcccacctgacttcgaatgagagccatcagtcccaggctgatgccagttacggaacataagtgtgaaaaacatgaaaacaaggatagatacttctccgaaagaacaacgtgttttcgcaggaaatggtttacttatattgatttcatctataagccacttcacaaacttttctaaatccaaattttcaggttttgtgctatccatgaaaggtccgccaactgcagatgaaagtctgtaaaacagctgcattataggtatagctcgagtgccagcagtggtctccatccagccactaagctcttcaattaaacgactaagtagcaaagagttaatggcccgttttgatgcagaaattgatactgtcctttgttcggtcatggaaccatggaaatctacagactcacttgcatccagtacatgaattgacgatggtgaggtctggatagttctatcagcaggagcttgaaggacactggaatctgttagttcatcaacagagaaatgaatttcatttccttctcccccaaatgtatcaagctcaattggtattgctgacatgggatgatctcttgaatgtggtgcaggtagacgatctgcatcaagtatctcatagcatgtttcacacaagtcaaagtctggacatatgttgcagtgccaccttcgcctaagtattggaacagtggaacaaccatcacaacaatattgcactgaggatgtggcaggatcttcttcaatcatgacctgagcatttccagtggttgaatttgaagcagcacttgcttttgcatgattgtcaggagcatcatcattagcaatcattgtctgctttgggaaagggacttggagaaatcgtgatgaaatagccaaactgcttgaagtctggactgcttcatatggcgcaaatagtaacttcttcaataaagcaactgcaggtgctactgagactccagatttttcatttgaatgtaaggccaagcattcagcatagcctagctttcttgtgacattaaggatagcaacagcgtgggtctcaagaaaagaagccaagtttgatttcctgtgcacagcaacttttgacactgtgtggatctgggctatgaattcttttgtaacccaactggatgcagcacctccaactcctattcttgaagtaattgatggaagtgattttattacccctagaaggcgcatagtatccttaacatgatagtatatttccttcttcgggaacacagcctgaaggacacggcatgcagcagaatgtaacagaggctccctgtcactctgaaagattgtttccagcaaagatctgcattttagattgttaagttccatgtctgcatcgattgtgtccgtacagaaacctggttggcaaagcaggtatatccgtgagaggatcctgagagcatctgccagaacctgctcctggataggagcagcttgcatcgtttgagccttttttccagactttccactagcagaactaccacctaggacatgcgcttccatatcaagtgcagcatccattttttctttccatccaaattcatctttggcacgaccatacacttcaatagaatctatccgaggaatagatgaaccatcgaatgtccgaccaacaacaattgtgaattcttcgtcagccagaagtgattcagcagtagtgaacggaatatcataccaagatctcatgccttcatccagcttaatgactctatgaaaaattgtgatttctgaagggatattgctcgcagatgtgttacccacatggattcggcaaccaaccatgacaatatcagggtttgggtttgaaatagtcaccttgaaaccagcggatgtcaaactttctaaataaccatcatctgagcttaatctttgcttgatgctttcagaatcactacttttggttgtgtcactattgaatttcacatcacatgtgatacatgtcgtcttctcaaaaaaatcaagtggaaattctggtttggtgccagcataagctctactactaaggatactgctgcccaacttctttgtctgttctgcagtaagggttgttgaactatcacttccattaggtgtatgtgaataaatgttaaggcttccatcatcatacaaaagaagacaatgagctttatctttggataaaggcttatatgcagcaataccaacaactggagcatttgaaccacttgcatgtctcatgttatgtgcaaacaactcgtgaggacccaaagatacagcaagaggagagtttgatttaaattttgataggcaagcaagggccccactgccagctattagctctctccaacggtacaggcctgctggtttcgatttaccgtcttgatcattctcacatatgtaggacaattcagtaattgacgaggaatcgccatccaagcgccccatgtaagttgtgccatcttgatgagacacaaatagaagcctgtaagttgatgagaagtacaatgagagacctttgtgcatagatactgcatctttcaccaagactgtatcagtcaatgttttcgcaccaacatcacccgccaaggcaacattcaacctatacaaaaggcctccttcagaaagaacaagaagcaccaactttcccattgaggagggaacaagcgtggcatcaacaattatatcatcagccacagtaaaataatgcaacgggctaatgttgtcctgcgagagatcatatatcttcacaaacttgtttgttactaccatgagttgtacctgagaacctggaacccactccacgcaacgaatatatgctccttgcagagcaagttcaattgcaagccgatcagttacctcaccacggctatttaatgttagtacttgacaatcctcatacccggcaacagataggtaatgttccaccaatggattgaaaatcaaatgaacaatttcaaagcgaactatgttcctggagagaggcttcacatttgttttgtctgctgtaataggagctgcagtaggctgtccaataatttgtcccacatcaaatatagctactttatccccttctccaacagcaagcttacctcgaatgctgatacttagcaaggatttagtaagagacccatttgcaagatgcgacttaagttcccttgaatttggatagtctgcttttatcttcaggtccagcgatccacttttgaaagctttcttcagttgaaaaatatcagaagcttgtgacatgggcatttcacctcctaaaaatactttcctgtccttcaaaagattcagctctctttggctaagtatcattggaagcaacttcttgcagagttcaagcattcgaacttcaacatcaagatttttaagaaatacaggaagctcatcactgaagcctttcggcacagatagcttgatacaattctcagcttcagttgagatgtcatcttcaaaatcagaaccactgtctgcaacaggctccacatcctcatgataaggcaatattggctggaaactgctcgtgacaggaggagatacactagaggtaccagtaaatttccgaggtttcaagcactgacagctgcttcccctcacaccaccagctccacaatcacagaagaaacggcttgaccgagaataaacaacacgatgcccttgatggcacaccttggcacagacagaacagcaacccttggaaacagtcaaatcacatgtatagcagaagtaccaatgctgttccatgaaattgctaccactggatgtaaatgtgcacactttggttgcaagagctctttcactgtttccatcctcttcctcatctctatcaatactgaccaattccccatcagatgttccatcatcttcatcttcctcgccggagctagcatcacaatcaacagtggaattactttcttgattggtgcgaagaacaagactgtctgaattcttcagttgctttgggataagagatcctgaaccaaaactgttcccagaacttttagaagaaagcctcttaagtgcacttctgtttgatccagcatcaccaaacactgactccacgcaagtaaacagaaacttcaaagtatgaagcaaaccctcattaccaaccatgttctccatcagtttcagcgttttttcaaagagctctttgaaatgtgattcatcagttgagagttgagcaataaaatggaaatgtgctttaacaatctgaaggtcacatgacatgaatgctttatcaagtaataaaagcattgagtcaaagaggtgatgctgaagctctttggcaagtgtctcagatgaagggcaggtaaggcgcataagaaaatccattgtcaattctcttagggctgtaggacctgatgtagtactattggtgctttcaatcttcatagaatgacccaatgttcgaaattctagccaagaagaaaagcaggacacgtccattccaataaatttgtgttgcaatttctgcttaagatcgggacaaagaccatcacctagaatatcagtaaacaagttaagaatcttcaaattaacctgctcagactggcatttgtccagtacatcaataaaaacggacatatcagcctgctcaagagcaaaaagactgtttgctctttcaggtgctccttctgcttcaccaagaaagaatttgaacacatttgttttagatcggaggtcttccactagatcaacaatggtaaaaactataatttctttcacctcattatccatgatttctttcgagttgatgtctgccaggtacccttctaactgcttaagaacaaacaagtcgctatatccagccagatcatccttctggtcaattagagacataaatatagaatcacacagcttgtgaatggatgtgaacattccatctgactttatagtcattatcatactaagtagtttagaaataacacccacatcaactagatctctgtcattgggctgcatgatctttatacatccattgagcatgtaaatgatctcatttatcaccagaacacaagaaaggatagcactgttattggaggcagagttcactggaaatccatgtaacaaacacttcaagagaaagtattctttccgcccatcacccaatttcgtagcaactcgatctatccttgatgaaaggtcacatataggctccagcattccaatgtttgaaccaactttctcaaagagaagaggatgcttggatttgtcaaatgcagaatgtttaagcagccaggaaggataacaatgatcctcacaaaccctccctttctcaacaacaaatgagataaatgcttccttaaaagcatgaagataagtctccaacagtgatgacaaaacatgtaaacaatgtccactattttcacttatgaatgtaagcaaactcttcccaaatatctctgcatcttggaccacctgctttccctgcaaatcaacatcaggtttcccacttgtttggtgcccccaaaaaccagtattaattagagacagaataagagaaagccatgctcctttcctgaggaaatcccaactttctagaacacttggaccacagagaatctcagactgcaacaacttcaggaatccaaaaattacagaaggcagattggcgtccaaaagtgatgaagcatcatcacttacactgagagcaaacgaaatgaaaaagtttacatcagcgaagtcaggattcaacagaccttcatatccaccgctgtaacctataccagagagagtgctccagcaaatcaaaaataaatatctctccgcaatgagatcctcagccacttcagctttcctgcccttccaaacaccaagaatttcagaaatgtttgagcccaaattagcgaagttcaaacccaaagcttctagagcagacttgtcaaagtagatttcagcatgagctggagtcacgtcaatcaattgagggaacaaactactagttgaagcatactccttgacagtatcagcaaaaatgccctccacaacttcagctgtgaaggatggcaagtaatcattcatggagcgtgactgaccttctttcaacaaaatatccctcattctggatcttaacctcataagcaaccatgacggatgtgttaccggatacaacaacatatgccgcaagacaagcaggagtcttgacaggagtaaagcccatcttgtgagtccagatgcatttactccaagtggaggctgtctcattttctctagggaggaaagtacaatattgatcaaatcagccttttctggcccagtggttgaatggaatgccaccaaaagaatttctagatggaaggcacaaggaagaattctgcagaaattattcaaatctaatgagctggatgatttatcatttgctttctccaaaagataaccaacatactgaacaaaaacttttcttccaagattatatattgagcttgccccagagatgatagcacgtgccactagagcaagcgtataattgttgtaagtatacatcccattctcagcattaaacactttatccacaagatcctctcttaaagatgccgggcattcatgggaaataaggaacatctgtagaagttcaaaacaggctgtgttgatatgcaatgagttaacctcagaaagagatgttgtagcaatgctttcatcagagcaaaaggctggacattgaagtattgacagaaactgttccaaatgattgctgtggaacttcctgcaagcatccacatatatagcagtgcaccattcaggggagaagatggacatcttcataaagcatatcaaatcagcagctaattgaatagggccatgctggctgctcgaagggccactccctagagaaattggctgttcaacactgtcagctactcctgtagagcgggcttcagcaaatagattaccaaaaagtgcttcttcctcatgactagccacagactccaactctgaaagagtaacttgctttgtgcaactcatctgcggcttctcaagtagaggcattgattttactccctcttcatggaggaaaaagatgagatgtaccaaatcatccaaccattgctcttctgaagggaagattaattgcagatactcctcagatgtgtatttcttcagcaatggcactttctttgaacgagcatggcaagacaaaccatctgtctcggaattgcatgaataacctagaacatctttgccaggtctgtccctgtcaacacgacttgtccaacgtttggtatcattgagaagtttaagcacatattgaacaatgtggggtgagtaaactaaagggggcatcaagcaagcagcagatctgtcatatttccatttttctgggctgaaaatttccaacagggaagcaagtatgcatacttgtactgtacaacaaatatcactgttgcagaagataatatgaattagctgcagaaattcgtcaagtatttgcagcaacacagttccaacaccatctccagaaaacactctgtcatggttagcgaacttgaacttaagtttaaacaagactggcagactatcagtacatcttgctactgaacaaagcatcatcgcatcagaagcatcacaaggaaattccatagccaaaccatgtactaacttcaaaattctttggccaaaagacaacctcatattaaagttggtatcttctatcacatccaaagctggagactggcaaagcttctgaaccaatgtaagaaggactggtatgcaatgtaggtgaacaactgcaaaatgctgtgctattgacaccatgccgtttggggatgctgtgtgtgatgattcagtattctctgcaataacataatcttgctgtaaacattcaggtgataacgtcaaacgaaaccgttgcagatcatctccactatttgagcaattgaagcctggttgtgccatcaaaaaacaatcagcaaataaagcaccaacattccataaaccttttaaatagcagaaatacttctcttgtgggctgatacgctcagaatcaacttggacagacgaccactgctcaataacatcatttacgacactgggttccaacgagtaaaccttgctgggagtccctctaagcagcacgcattccatgaaataggcaacctcgttcagtaacccatagtcttcacatgcatatgatgatttttcgagatacaatagacagaattccaaagacctctccacaatctccacaaccgttgactccacttgctccactaaaacaaaagtgtaacgcccctcaataaaggatggtggtacactcaactcaactacagtgctgacttcacatttcatattattttcgaaaccaaatggaatggatggatcagaagtggaaactggtaattgattgtttttgcgcattacggcgcgcgcggcggcgaggacggcgcgcgcgcgggccgggtcggccggcgggcccgcggcgagcgcccccgcgagggcctcgagccccgcccgcgccgcgggcccgcggaggcggcgcgcgggcgggtcccggtcccccgccgcggcggcgggcggatggaggaggaggtcgagcagcgccgagatctccgccgccat

SEQ ID NO: 23546 - DNA, 2995 bp, Oryza sativa
  Clone ID: TF_OsC96744_1
gcacgaggcccaaagcatggcgctgtccgcgtcggcggcggcgtcggccgggcggggggcgcgggcggagaaggtggggaggatcttcgagcggttcgatgccaacggggacggggggctggaccgcgacgagatggcggcgctcgtcgtcgccgtcaacccgcgggtgaagttcagcgaggaccagatctccgccatcctcgacgaggtgttccgcacctacgccgagttcatactccccggggggcggggcctctccctgccggggctgctacgcacctacgacgacggcgccggggacgtcgaccgcgacttcctcgcgctgtcccttcccccgctcgagtccggggagtcctccccggagatcgccgcgggggacccggccgccgcctcgtccccgccctccggcgccgccgccgccgcgtcgctcctggacgaccacatcaagccgcttggagcagccggtggggcgccctcgtccagctcacgcgccgcggcggccgcgccggcgtgggcgacgtcgcccagccacgggattgcgttcgactcctcctgggcgctcctcgacgacctggagatactagtgaagcgcctccgctccaagcagctgcggagaacatcctccatcgacacgatcaacggcagcggcggcgcggggaacaacaatttcgactccttctccgaggccgggtggtcaagggagatctccggccaagcggattcggcttcgaccgccgcgccatgggacgagacgagccgcgactacctcaccttcgtcaaggagctcgccgtgctccgcacgcgcgcggacgcctcccgctcacgggaggaggccttcgacaatcacatggtcatcggcagggcgctctccgagcaccgcctcttccgggacgcgcttagcagcttccgccgcgcctgcgagctgcagcccactgacgtgcgcccccacttccgcgcggggaactgcctctacgcccttggccgccactcggaggccaaggaagagtatctcctggcgcttgaggcagcggaggcaggtggctcccagtctgcggacatcctcccacagatccatgtcaaccttggcattgccatggaggctgaggggatggtgctcggtgcctgtgagcactaccgagaggctgccatactgtgtccttctcatgcccgggcgctgaagctcctcggtagcgcgctctttggtgttggtgagtaccgtgcagccgagaaggcactagaggaggccatcttcttgaagccagactatgctgatgcacactgtgatcttgggtcagccctgcatgcgatcggggatgatgaccgtgcggttcaggagtttcagaaggcaattgatctcaaacctgggcatgttgatgccttgtacaatcttggtggattgaatatggatgcagggcgctttgtgcgggctgcggagatgtatactcgtgtgttgagcatccgaccgaaccattggcgtgctcagctaaacaaggctgttgctttgcttggccagggggagtctgaggaggccaagaaggcactcaaggaggcatttaagatgacacaaagggtagaggtgtatgatgccatatctcatctgaagacactgcagaagaagaaaccaaagcctcccaaaggaaaagatgatagtcaaggagaggaggccttcgttgtagtggagccatccaagttcaagagggttggaagaaagactaccttgcggcaggaccttgctaatgcccttgatataagagcctttgagaaaacgacaaagcttggccgctgtgacgcggagcttctgaggaaagagatgaacgagactgatgtccccatatcctactcaggcgctggcaacccagagaagtcaatacggaaagcagctctcgaggttattctccacaggctcctatctttcctcaagccagatacctttcagggttctgtgaaggcgattaacgaaagaatcctctccgtccttgatgcctctggttctggccgtgttgaccttgggatgttctttgctattatcgccccaatttgttctggtcctgtggataagcgcaagcgggttgtctttgatgcacttctttggcgtccggcaagtgaaggaagcaggggtcagattaggaggagcgatgcactgtcctacatcaaacttcttcgtgctgtttatatacccacccatggggctagcgacatgcttgaaatgcatggggagtctgaccccactatggtatcatacacggagttcctcgaaatgttcaatgatcccgattggggatttggaatcctaagcacattggtgaagcttgaggacagcgatcacattcgtcacggccgccacacctgctcaatttgccgatatcctatcattggttcccgattcaaggagacaaagcactcctttagcttgtgcaatcgatgctacagtgaagggaaggttccatcagcattcaagttggatgagtacaggttcaaagaatatggtaacgagtctgaggctcttatcgataagtgcatgtgctttaatttacattctaagaagctcgaagctgatacttgatcattcgatctttggtgtcgattgctcgagcatgaatctgtgtatcccctttctaggtgcaaagatctctagatagtctcctgccctcttgtaaactaaggtgctgttctgttcggagttttctgaatgtgttccaactacttgaaaatcctaatcaattagctattgttcgtccaagtgtatgggagtgagaacatgtgaattccaaacacactgttgttacaatccccaatgctcttgtttaatagagatccttgctgatatccatgaggttttatttgaaccaaacaattttgggctatttttttctttaatcacacttgtatgatttatagcttgggttgcaggaatagatggtaaaatcactatgtacattcagttttaaacttctttgtaagttggtctaacaaagattattttctaaggcagtcc

SEQ ID NO: 23547 - DNA, 1731 bp, Oryza sativa; identical to SEQ ID NO: 15795
  Clone ID: TF_OsC329578_1

SEQ ID NO: 23548 - DNA, 2991 bp, Oryza sativa
  Clone ID: TF_OsC15191_1
atgtctcgccgccgggacgctgcgccgacggcgcgcgagggcgagagggatctcgtcgtgaaggtaaaattcggtggcactcttaagcggttcactgcttttgtgaatggtccgcactttgatcttaatctggctgctcttcggtcaaagattgcgagtgcttttaagttcaatccagatactgagtttgtactcacctatactgatgaggatggggatgttgtcatactggatgatgatagtgatttatgtgatgctgccattagtcagagactgaaccctcttaggattaatgttgagttgaagagcagcagtgatggggtacatcagacaaaacagcaggtattggattccatatctgtaatgtccactgctctggaagatcaattggctcaggtgaaattagctatcgatgaagctttaaaatttgtaccagaacaagttcccactgtccttgcaaaaatatcacatgacttgcgttctaaagctgcatcatcagcgccatcattggctgatttgctggaccggcttgctaaactgatggcaccaaagagcaaaatgcagtcttccagtggttctgctgatggttcatctggctcctctagtggtaggggacaaactttgggaagtttgaatattaaaaatgacactgagctcatggctgtttcagcttcgaaccctctggatatgcataactctggatcaactaaatcacttggtcttaagggtgtgcttcttgatgacatcaaagctcaagctgaacatgtatcgggatatccttattatgtggataccctttcaggctgggtaaaagttgataacaagggaagtaccaatgcccaaagtaagggcaagtctgttacatcctctgctgtgccacaagttactagcattggtcatggtgcacctactgttcattctgctcctgcttcagattgcggtgaagggttaagaagtgatcttttctggacacaactaggcctttcttctgagtcctttgggcctaatggccagattggtggtgatttgaactcgacatgccctcctccaccactgtttccccgttacccacttcagtctctccgagctgataaaagcagtatcaagggtggttgctcttaccctccgtgcatctgcaaaagtagcacatctaagcctgagaatctctcccattacccagttcagtccctccaagctgacagaagcctaaagggtggtcactatttccctccatgcacctgcaaaagtaacacatccaagccagataatctctcaccagtcggtctttatggaccttattctgaaggcagcagctgtaataggtgcccatacagggatctaagtgataagcacgagagcatggcgcagcacacactgcatagatggatacagtgcgatggctgtggggtcactcctatcgctggttctcgctacaagtcaaatattaaagatgattatgatttatgcaatacctgtttttctcgaatgggcaatgtgaatgaatataccagaatagacagaccatcttttgggagtagacgatgtagagacctcaatcagaaccagatgctctttccacatcttcgacagctacatgattgccgcttcattaaggatgttactgtccctgatggaacagtaatggcaccatcaaccccatttacaaagatttggcgcatacataacaatggatcttccatgtggccatatgggacatgtcttacctgggttggtggacatctatttgcacgcaacagctcagttaaattagggatctcggtggatggtttccctattgatcaagagatcgatgttggtgttgattttgtcacacctgcaaagcctggtgggtacgtgtcgtactggagattggcatcacccactggccagatgtttggtcagcgagtttgggtttttattcaggtggagcacccggtcaaaaccagtagcaacaagcagagtgctgctataaacttgaacatgcccccagaaggaagcaacacagaatggaagcattctgttgatgcaaatattcagtctgcagatattgtgggtaaatactctggaagcaccataactgatcctcttgcacatgcactataccatgaagccaccaaaccgatggaacctgagcttgtttcaagtgccgtaccttctgtacctagagcatttgaatcagtgctagtgccagctactgatctcctcacttcatctgctggagctgaaaaggcttcgaagcctgctgccacgcctggacctgcacctcaagccgttcccctgccaaaacctgttagcattcctgcatctggacctgcgcctgctcctgttagtgcgactaccgctgcacctgtcggagctgctgctgctcctatcagtgagcccactgcacctgctgctgccattggaatgccctctgcaactgctcgcgctgcttcttgcctgcctaccgagccttcatctgatcacatcagtgccgtggaggacaacatgctgagagagctggggcagatgggcttcgggcaagtcgacctgaacaaggaaataattaggcggaacgagtacaacctggagcagtccattgatgaactctgtggcatcctcgaatgggatgcactccatgatgaactgcacgaactgggcatctgatcagaacggagatgaacaaggcgctcaccaaggacggcgaggaagcatgtggccgtgaatcttttttgcccctcctagaagggccagtgatgacctcgtcgtgttcagctattgagcaccttgcagtatccaagatatagaccgtagtatatttataaatagcttacctagttaaaagcggcgttcgtgctgctgtgctacccctactcgccagcaaccttagagggtctggtgtagtgccagtagtggtgtttaaagacttctaatcatcggtgtgtaatcgaaataagtaccgtacctactagttgtttattatgctatatgatgtattaaacttgtgttgct

SEQ ID NO: 23549 - DNA, 2986 bp, Oryza sativa
  Clone ID: TF_OsC1100_1
taacaggcatcgaggagcgccaggccccgtgggcgcaccggcacgctctcctctcctcctctctctctctctctcgcaccaccgctctcttccgccgctgcggctcacggctacgcagctctcttcccctctcggcggcggcgcggcgcggagcagaggaggacgaagcagcaggcggcggcggcagagcacggcgacctagcccgacctcgcaaccatggcaaggggtttgaagaagcatctgaagaggctcaatgcgcccaagcattggatgctcgacaagcttggtggagcttttgcccccaagccatcttctggtcctcacaagtccagggagtgcctgcctctgatcctcattatcaggaacaggctcaagtatgctctgacataccgtgaggttatttctatcctcatgcagcgccatgtcttggttgatggcaaggtcaggactgacaagacctacccagctggtttcatggatgtcatttccatccccaagactggtgagaactacaggcttctgtacgacaccaagggacgtttccgccttcagtctgtcaaggatgaggatgctaagttcaagctttgcaaggttcggtctgtgcagtttggccagaagggaatcccctacctgaacacctatgatggtcgcaccatccgctaccctgacccgatcatcaaggcaaacgacacaatcaagatcgatctggagaccaacaagattgtcgacttcatcaagtttgatgttggcaatgttgtcatggtgactggaggaaggaacacaggccgtgttggtgtgatcaagaacagggagaagcataaaggcagcttcgagaccatccacgttgaggatgccctgggccaccaattcgccacccgtctgggcaatgtgttcaccattggcaagggcaacaagccttgggtgagcctgcccaagggcaagggcatcaagctcagcatcatcgaggagcaaaggaagcgggatgctgccgcccaggctgctgccaacgcttaaaatctgctgctgcgtctgcctggagttttgctatagcgagttgtttgcaaggatatagaactatctgccccagactatccttttttgagctcttttgcctaatgttatgttgatcaattcgcgaactcatgtttgctgctagctgtaatgcgactgtttaccttatttaaggcgccttttaagaacctccaaaccaaaaagtcattaactgttgctgagatggtatggttttgagcattcagcccataccctggccgcctcttgtcctctggccatctgcatggagaccttggtaataacattgagaactcaccagcacgcacattccatagatggattcagtgtgatggttgtggagtgcaaccaattgttgggcctcgatacaagtctaaaacaaaagaagattatgatttgtgtgatgcctgctttcatcgcatgggcaatgaggtcgagtacaccaggattgacaagccactcttaccccagagattactgagagaccctacattgtgtcgcaagatccattcacgggctgcgatgaagtcaaagcgggagaaacttgaaagtcgcttcattttggatgtaactgtcctggatggaacattgatggcaccttcaactccgtttactaagatttggcgtatgcataacaatgggtctatcatgtggcccttgggcacacagcttatatgggttggtggcgaccagtttgcactgcagacctatgttccattagagattccagtggacgggtttcctgttgatcaggagattgatgttgctgttgattttgtggcacctgcaaggcctgggaggtatatatcttactggaggttagcatcaccttctggccagaaatttggtcagcgtgtttgggttcacatccaggtggaggatccttcttttgtcagtaacaacaggactgccgctataaacttgaatttgcccccagaaagcaatatcacaaacacaagtaatttgattgatgtcaatattgagcctgtggatcaagtcttcaaccaacatgtcaatagcacaaacaaggagttacttgaacatttgatacaccaccagattgacgagcccaagaatcctgagcctgctccattacctgtgcccattgtttcttccacaacatctcttcaccccatcattgatgttgatgttccctccagttcaactgctgctgcttttgtgcctgtctttgatgagcctgcgcctgaacctgctgtgactcctgtgcctccaactgttaatgtgcctgctggtaatgcacctgcgtctgttggtgcatcatcatctgatcatcatggcattgacaatctcacagaagagaaactgctgaaggaacttgaggaaatgggttttaggcaggtcgatctgaacaaggagatactcaggcagaacaagtacaacctggagcagtctgtcgatgatctctgtggcgtcagcgaatgggaccctctcctggaggagttgcaggaaatggggctttgaggacactgagataaacaaggagatgctcgagaagaacggaggaagcatcaagcgggctgtgatggacctcatcgctagggagaagaaagaccagtgaagatcgtgtgctcttgagccatccctatctataacctaactatgtgtgtatatgcgtaaataatgtgacgaggtgtaaggctagcgccggccgccggggctgctgctacagtctcagggcctgcttgcttatgaactgtgtgtggtgttgtgcgactggtatatttgtcgcggagatatgtgttaagtgcgcgtgcgcgcctcttaaaaagcggttaccttgccaggtaaactgcgtgtaattactatgggcttagctgctctatgcctcttatctactgctgtgactggaacttgatggattaataagatctatgttgcgtatgttaaaaaaaaaaaaaaaaaaaaaaaaaaaaaaaaaaaaaaaaaaaaaaaaaa

SEQ ID NO: 23550 - protein, 1081 aa, Oryza sativa
  Clone ID: TF_OsC259_1.pep
LVLENKKRDEDNPHSAHPHPVSTRPGREQGGEAPEPNGGPRPPTVRAGPLPACPTVPGAPDPQDGPGATAGRPRLSPSDPEVVGTEVECAPGGLSDEERPGDAAPGEEDRPRRKVQRPVYFVSEALRDAKTRYPQAQKMLYAILMASRKLRHYFLAHRVSVVTSYPLGQILHNREGTGQVVKWAIKLSEFDLHFEPRHAIKSQALADFVAEWTPAPEPVSVLEASSGPSQLPHTAYWVMQFDGSLSLQGAGAGVTLTSLNGDVLRYLVRLDFRATNNMAEYEGLLAGLRVAAGLGIRRLLVLGDSQLVVNQVCKEYRPPPGAFEERLAQPSARPDPLGETDAPERPPRPVGVQASGPDGSVPSSLRLIAWIAEIQAYLADKTLPEDREGSERVQRISKRYVLALQTIPLSWLFAVWGLDILGPFRRAPGGFEYLYVAVDKFTKWPEAYPVIKIDKHSALKFIRGITARFGVPNRIITDNGTQFTSELFGDYCEDMGIKLCFTSPAHPRSNGQVERANAEILKGLKTKTFNILKKHGDSWIEELPAVLWANRTTPSRATGETPFFLVYGAEAVLPSELTLRSPRATMYCEADQDQLRRDDLDYLEERRRRAALRAARYQQSLRRYHQRHVRARSLCVDDLVLRRVQTRAGLSKLSPMWEGPYRVIGVPRPGSVRLAMGDGTELPNPWNIEHLRRFYPYGTMNRVPTSWGFVYSRVNKVTTLAPAFMLWVLCGYRVPTGSVWAQGSPRGEGSRSLFGAQRAGTRLHWRNGPVAVDRQRVRASGHAGHQPVQQRRFVVVVKRFPTFPVPTKAAFASATTTATRRRRRRRGEEEREGEREAERYEEMVEYMERVARAAGGASGGEELTVEERNLLSVAYKNVIGARRASWRIISSIEQKEEGRGNDAHAATIRSYRGKIEAELARICDGILALLDSHLVPSAGAAESKVFYLKMKGDYHRYLAEFKSGDERKQAAESTMNAYKAAQDIALADLAPTHPIRLGLALNFSVFYYEILNSPDRACNLAKQAFDEAISELDSLGEESYKDSTLIMQLLRDNLTLWTSDANDDGGDEIKEAAAPKEPGDQ

SEQ ID NO: 23551 - protein, 136 aa, Oryza sativa
  Clone ID: TF_LIB3434-064-P1-K1-F6.pep
SLCVFITFRFCTSKCCLFYHLMLIPLSHYILFVILLSSILYSSTSSSLFSHFFPFLLPYFLFLLPSFLLSLLPSSFFSTPLPFLPSFSYLIPFLFPSSFPSSPFTPLPFFSLFPFSFHLFLSFPFFSSFFYFSSSS

SEQ ID NO: 23552 - protein, 111 aa, Oryza sativa
  Clone ID: TF_4879985.pep
AHQTSSGLCHLLHEFDHFLVTLKPARQALPCTHSPHAMPQQATFFLSFVLQRKLSLTLCTFPPPSPSRFPSALLTSSLFPTRAGFVRCGCGSPGRSGGRAGKRGEERRSGG

SEQ ID NO: 23553 - protein, 162 aa, Oryza sativa
  Clone ID: TF_uC-osroM202032b04b1.pep
VLTSGAATSARVVRFRRCSLGRADRRVTVTVALLLLLLGSHHPRRALLCSRSTASASHGATPKLQLNAGHLSRGDPGRLLPPWPGATPARLPFPTTRVTVARALRVPGAPRCDRCHGNDRSRRRTCNMKRDYYQYLDTLRLELRGRMLLRTPWWHTKPLMIL

SEQ ID NO: 23554 - protein, 108 aa, Oryza sativa
  unsure (1)..(108): unsure at all Xaa locations
  Clone ID: TF_OsC20576_1.pep
KGDYYRYLAEFSTGTEKKAATDQSLXPIRLGLALNFSVFXEIMNSPERASQVAKQALDEATAEINSAGVEGYKDSMLMMQLLKENLALWTSELTGGETSKDDDVVMEG

SEQ ID NO: 23555 - protein, 120 aa, Oryza sativa
  unsure (1)..(120): unsure at all Xaa locations
  Clone ID: TF_11118254.pep
GRRSXGPSFLLLDRRDDPLTNARRAPMTFLYXTDXRFRSSTVSSSPPEAXPXXAATRSMYSTISSYRSAXPPXRLVHALLPXCSAGDMANCLPTYLPLAFPLLLSSSASAAAAAAAAADA

SEQ ID NO: 23556 - protein, 88 aa, Oryza sativa
  unsure (1)..(88): unsure at all Xaa locations
  Clone ID: TF_2442689.pep
LVAPXHSQAQLNSTRIRKRDRXIRWRRRREEGRGRRWCTWRTGGQAERYEEMVEFMEXVVTAAAAGRGWELTVEEXNXLSWRXKTLSA

SEQ ID NO: 23557 - protein, 80 aa, Oryza sativa
  Clone ID: TF_uC-osroM202039c12b1.pep
VVTTPPEEIVYMVKFANHAQRIEVIREYVLHGGNTVGAHKLTVMDRTLLAVAYMNEIRARQASWLMRLILQTHRVAGNLA

SEQ ID NO: 23558 - protein, 88 aa, Oryza sativa
  Clone ID: TF_LIB4370-040-R1-K1-G5.pep
MAAAAGGGTREEMVYMAKLAEQAERYEEMVEFMEKVVTAGALCGPRQLTAPDMELLSSAYGHATVTTLSSVCVLRVLARHGCRRLPVL

SEQ ID NO: 23559 - protein, 62 aa, Oryza sativa
  Clone ID: TF_uC-osflcyp073d07b1.pep
MSPAEASREENVYMAKLAEQAERSEETVEFMEKVAIEPPDRLCEPQPVRAKPGNLCLFLMGF

SEQ ID NO: 23560 - protein, 39 aa, Oryza sativa
  Clone ID: TF_LIB3434-001-P1-K1-E7.pep
TYLTTRWDGILKLLESQLVPSNRGAASTGSYLKMKGDYY

SEQ ID NO: 23561 - protein, 218 aa, Oryza sativa
  unsure (1)..(218): unsure at all Xaa locations
  Clone ID: TF_OsC20576_2.pep
MKEREKVVRLAKLAEQAERYDDMVEFMKTLARMDVDMSAEERLLFSVGFKKTIGARRASWRILESLEQKVTAGDQPGVTINGYKKKVEDELRAVCNEVLSIIAIHCLPLANSGENVVFFYKMXCRFYQMMLRFHXGTEKKAATDQSLMAYQHAMVGACSELSPAHQLRLGLALNFGDFXEIMNSAERASQVAKQALDEATAEINSAGVVGYKGSVLMM

SEQ ID NO: 23562 - protein, 177 aa, Oryza sativa
  unsure (1)..(177): unsure at all Xaa locations
  Clone ID: TF_LIB4309-008-Q1-K1-A8.pep
ANLEKVVTAAAAGGGGELTVEERNLLSVAYKNVIGARRASWRIVXLKMKGDYHRYLAEFKTGAERKDAADATLAAYQAAQDIAMKELSPTHPIRLGLALNFSVFYYEILNSPDRACTLAKQAFDEAISELDTLGEESYKDSTLIMQLLRDNLTLWTSDMQDDGGDEMRDATKPEDEH

SEQ ID NO: 23563 - protein, 163 aa, Oryza sativa
  unsure (1)..(163): unsure at all Xaa locations
  Clone ID: TF_OsC327859_1.pep
RPELSGICQDVLNVLDKHLIPAAQSNEAKVFYYKMKGDYYRYXAEFKAGDLRKDAADKSLGAYQSASDIATKELASTHPIRLGLALNFSVFYYEIMNSPDKACQLAKQAFDDAIAELDNLTEDSYKDSTVIMQLLRDNLTLWTSDGQGDNDKDGGDDKDDKDE

SEQ ID NO: 23564 - protein, 73 aa, Oryza sativa
  unsure (1)..(73): unsure at all Xaa locations
  Clone ID: TF_LIB3431-002-P1-K1-B6.pep
RAHACAHTSGYEVMVEYMXMVANTAYVEELTGVERNLLAAADKNVNAAHRACWRIALSIVQTEEGRANEEHVT

SEQ ID NO: 23565 - protein, 87 aa, Oryza sativa
  Clone ID: TF_uC-osflcyp002e09b1.pep
REENVSMAQLDEHGERCKEMDEFIANVALTTDVRELTLVDRNLLFVSYKNDIGAQDALHKSISSIDQKEDSTWNEAYVASINDLQLR

SEQ ID NO: 23566 - protein, 206 aa, Oryza sativa
  Clone ID: TF_14571301.pep
DFERRPGRYMAKLAEQAERYEEMVEFMEKVAKTTDVGELTVEERNLLSVAYKNVIGARRASWRIISSIEQKEESRGNEAYVASIKEFKSGAEGKEAAENTLVAYKSAQDIALADLPTTHPIRLGLALNFSVFYYEILNSPDRACNLAKQAFDDAIAELDTLGEESYKDSTLIMQLLRDNLTLWTSDNAEDGGDEIKEAAKPEGEGH

SEQ ID NO: 23567 - protein, 125 aa, Oryza sativa
  Clone ID: TF_uC-osflcyp077e11b1.pep
FYLKENDVFHRGIDVAKMGLELKDLVDITVETYNSADAFGLTNLTATYMLRHVLTLYYSVYDYDMLNSPDLDCILEQQASDYCIGVLDTVQNMAYLDSSSNIQAMSIKLSLWTARISEDVRVKTR

SEQ ID NO: 23568 - protein, 92 aa, Oryza sativa
  Clone ID: TF_LIB3431-007-P1-K1-B4.pep
HASAHASAHAFAHASAHASAHASAHASDLLSVAYKNVIGARRASWRIVSSIEQKEEGRGAAGHAVVARSYRARVEADLSNFCAGILRLLDER

SEQ ID NO: 23569 - protein, 95 aa, Oryza sativa
  unsure (1)..(95): unsure at all Xaa locations
  Clone ID: TF_LIB3431-058-P1-K1-E2.pep
PTYVSGKASPANASCEENAYMAXLAYPAERYXEMRQFMDMAANTTDVLELTVQERNLLSRAYKNMTCARMALWRIISSIEQKEDSPRHAASVASI

SEQ ID NO: 23570 - protein, 73 aa, Oryza sativa
  unsure (1)..(73): unsure at all Xaa locations
  Clone ID: TF_uC-osrocyp028c02b1.pep
AKMHRQENVYMGKLVQQVEGHEVMAVNMEMVAXDCTXEELTAVECNLSSVAXKNVIGAHHASRDVDLFSAHYE

SEQ ID NO: 23571 - protein, 97 aa, Oryza sativa
  Clone ID: TF_LIB4309-032-R1-K1-D2.pep
ETFFFFLQTSAWWIPDCVGEAYEPASAARPALCSMMTSVVPKDESHGYEDSVARMRDSRARIETELSSCWDGTLNLLALHLGPMSSAPECKVSSLGT

SEQ ID NO: 23572 - protein, 656 aa, Oryza sativa; identical to SEQ ID NO: 15894
  Clone ID: TF_OsC2845_1.pep

SEQ ID NO: 23573 - protein, 181 aa, Oryza sativa
  Clone ID: TF_jC-osroLIB3475P018b07b1.pep
MVASGNNTAAPLANTLPAVINPLLLATACTGSPKGLDLLLNSKVAAGDQRVLPFALGSQRFRDLISAYTSSDRSSLATPTQRIPPHDDPEALLAEMLMLEGVAVDGDTVLHAVATYGENDDFQKCAQTMCSKARQLLFKQNKNGDTPLHCAARAGKIQMVSCLIDLARGGGGDGNSSSSSS

SEQ ID NO: 23574 - protein, 465 aa, Oryza sativa
  Clone ID: TF_OsC311016_1.pep
MPMQTTDKTDAVKSMLSGENSEGSDGSKSSDTVEWDPWDPPHPPCPTLPPTASLMSQVEMVKQHHFQVLAVLAASRATNIIAPDRTPQEVRRKFAEICNELADILEKDSVRRFLNLYRRNMRIMGWGLVITSQTMNFIVSFNALRCAKVVLEGKAPKLCQIRANPNYMTSYGYFPLHKAAEKFSVDMIKLLLCYGASANLRTSGQKVIEGLLPLHVAIENTCMHKYLEDNLLTDRKLKQVDLDFIYKLIHLLCLPEMKIFLDTTRLLADNTDNIVDELWNYIKEGRLVHAAILLLAAQRKIRTCASSNRNISCNLNGFDIIRDRVMGSIVSIEREGRGLTSGKNSKAHKQLEEKRKFFHNSLMLIFVISKTGEALDEYIQSHSEVSHQEVLEGVSSILDDHGFAPTGKGISIGDLECRPYDCNASNSVPKCNYEDSGTTKAVGESPNLNVKAKKSAPVVMLYGFG

SEQ ID NO: 23575 - protein, 231 aa, Oryza sativa
  Clone ID: TF_OsC180673_2.pep
MCAYMVEELQVDIDAADELGITQLDEAGADVKGVGTFTPLIVAATEGLTDFYKCLLEGGADPDVPDKVDPFFKIRPADLKLEGNRAYMRKDYLTAAKLYNMADGRRQQAAAATAAALSGVGGSSSNNSSTSTITRRRHRLHHRQHVTAVACSSNTTSTAAATTSKEDCGTRILRPDWPKGCYREGTAHMFMKDYEKACNAFLDGFKLDPANIEIENALREALKSLKASRAA

SEQ ID NO: 23576 - protein, 462 aa, Oryza sativa; identical to SEQ ID NO: 15813
  Clone ID: TF_OsC335757_1.pep

SEQ ID NO: 23577 - protein, 633 aa, Oryza sativa; identical to SEQ ID NO: 15814
  Clone ID: TF_OsC77260_1.pep

SEQ ID NO: 23578 - protein, 601 aa, Oryza sativa
  Clone ID: TF_OsC3800_1.pep
MCSGPRKPSTPPLPQQQKEATVMAASLLLELAAADDVAAVRRVVEEEKVSLGVAGLWYGPSASGVARLGMERRTAAMVAALYGSTGVLGYVVAAAPAEAARASETDGATPLHMAAAGGAANAVAATRLLLAAGASVDALSASGLRAGDLLPRATAAEKAIRLLLKSPAVSPSSSPKKSASPPSPPPPQEAKKEYPPDLTLPDLKSGLFSTDEFRMYSFKVKPCSRAYSHDWTECPFVHPGENARRRDPRRYSYSCVPCPEFRKGGSCRKGDACEYAHGVFECWLHPAQYRTRLCKDEVGCARRICFFAHKPDELRAVNPSAVSVGMQPTVSSPRSSPPNGLDMAAAAAAMMSPAWPSSPASRLKTALGARELDFDLEMLALDQYQQKLFDKVSGAPSPRASWGAAANGLATASPARAVPDYTDLLGSVDPAMLSQLHALSLKQAGDMPAYSSMADTTQMHMPTSPMVGGANTAFGLDHSMAKAIMSSRASAFAKRSQSFIDRGGRAPAARSLMSPATTGAPSILSDWGSPDGKLDWGVQGDELHKLRKSASFAFRGQSAMPVATHAAAAEPDVSWVNSLVKDGHAAGDIFAQWPEQEQMVA

SEQ ID NO: 23579 - protein, 405 aa, Oryza sativa; identical to SEQ ID NO: 15819
  Clone ID: TF_OsC140365_1.pep

SEQ ID NO: 23580 - protein, 94 aa, Oryza sativa
  Clone ID: TF_uC-osflcyp015c11b1.pep
LIIHIAVPRNSGGYFGHVLAKLEPSIDMKDNLGLTPLQLSILLGKYAAMQKLIDFGADIHIHSLYGGPIHAAVALDDEIALEALMRKTNTRLLL

SEQ ID NO: 23581 - protein, 153 aa, Oryza sativa
  unsure (1)..(153): unsure at all Xaa locations
  Clone ID: TF_uC-osroM202020g09b1.pep
CNPRGYTVLHIAARRREPKIIVSLLTKGARPADVTFDGRKAVQISKRLTKQGDYFGVTEEGKPSPKDRLCIEILEQAERRDPQLGEASVSLAMAGESLRGRLLYLENRVALARIMFPMEARVAMDIAQVDGTLEFNLGSCANPPSXRQRTTVD

SEQ ID NO: 23582 - protein, 552 aa, Oryza sativa
  Clone ID: TF_OsC4142_1.pep
MSESALDKHIVVKIPDHVLPDAFIGESVGKGKEDGATVDNMDPSRPFLVIKKSDLDKADEWVKIKYAWMAKSLTNDIIIPDPTPQVVRDAFFDISPRLDSVLRKDSVRCFFRLFAECTAAMAFKCNITSETLSCIVRHNALRCAKTVLEGKAPQLSCMHANPNCINPYGIFPLHEAAERFSVDMIKLLFCHGASANLHTVNDAGIPGLLPLHVAVGNTCLHKYLEDNLSPVQYHEDYIYKLIHLLCLPEMKVFLDTVRLLAEKTDNLADELWNYMKNDKLVESAVLLLAARKHIREGKPDGFDIIAQRIYEDYDSLVCDKGDTAEGQKLLEERRALLKCKCLIVTIISQAGEVLDNYIQAHSEVHNNETDLMKFMLARTTIMLSTMKYDLVPNVEVLARVSYILKEFGFCPNEEYIDTMILCPYNKISYSDIVHKDVTKAVAQMSTSLPAAEKKAARKKALKGWDPTFIKRNFFPYWRSVLGAQLSVSNGAADEKSMLHRPQFRNSVNAHEGAKDMSKKVPSGMLLLITIGLQSIMLRTSFADTLRRLRIYM

SEQ ID NO: 23583 - protein, 105 aa, Oryza sativa
  unsure (1)..(105): unsure at all Xaa locations
  Clone ID: TF_rsiceh_7309.y1.abd.pep
FAPLHMAAENFSVDMVKLLFRYGASANIRTKGEYVIEGLLPLHVAVEXASMHKYIEDHWAHGDHIINLIFLLCLPEMVSSSFNSYPYYITARAFSLFQILAWTNN

SEQ ID NO: 23584 - protein, 111 aa, Oryza sativa
  Clone ID: TF_uC-osflcyp039a01b1.pep
VISGQHSTMKILLEHHADPNRVFNLDGTPLIMSIVSGSLECVKLLIKVGADMNFRDSNGVTCVMVAANHGSSVIMKCLLDAGANPNIPDEVSNILSSIACDWMLLRQAVWS

SEQ ID NO: 23585 - protein, 388 aa, Oryza sativa; identical to SEQ ID NO: 15878
  Clone ID: TF_OsC115542_1.pep

SEQ ID NO: 23586 - protein, 526 aa, Oryza sativa; identical to SEQ ID NO: 15879
  Clone ID: TF_OsC46535_1.pep

SEQ ID NO: 23587 - protein, 556 aa, Oryza sativa; identical to SEQ ID NO: 15880
  Clone ID: TF_OsC99825_1.pep

SEQ ID NO: 23588 - protein, 167 aa, Oryza sativa
  Clone ID: TF_LIB3434-005-P1-K1-C10.pep
DKGLVARTSLILWHTHQNDAGAVRKLLEEDAALVNARDYDSRTPLHVAALHGWHDVAECLIANGADVNAQDRWQNTPLADAEGAKRHAMIELLKEHGGLTYGKTGSHFEPKTIPPPLTNKADWEINPLELDFSKAVIIGKGSFGEILKANWRGTPNAVKRILPSLSD

SEQ ID NO: 23589 - protein, 482 aa, Oryza sativa; identical to SEQ ID NO: 15882
  Clone ID: TF_OsC54254_1.pep

SEQ ID NO: 23590 - protein, 342 aa, Oryza sativa
  Clone ID: TF_OsC4338_1.pep
MATPAASPLLLPLPLPLPASTFPPRRAVPCARRLVLRPPRAGRPRLRDPPPAAPPPAAEEVGEEEEDDDAPPLRLLEPPQEDDPFPPEVLNLFPPSCFRCSHLFCSRACMHDEQCRRVQMEPADPDFYRIGYARMMRAYGVEFLEGPDGMAVYASRDVDPLRRARVLYAYISSAAFYNAMQIIKYGVIMEIPLELMLTITQKRPWMFFPDIIPLGHPIFDIIESTDPETDWDLRLACLLLYAFDVEDNFWQLYGDFLPSVDECTSLLLAPKHKTIPLKLKRLAPDHERFLLGLRRRRRRRWARNRSNQRRRRRPPSRRRISSTPLGTMTWRTSSRCSPPVFP

SEQ ID NO: 23591 - protein, 185 aa, Oryza sativa
  Clone ID: TF_OsC58045_1.pep
SCNHASPVSSQGKRLTDELARNVKSLTQTYTSNTSLVAILMATITFAAAFTLPGGYSNDSGSEGLPVMAKKLAFQAFLISDTVAMCSSLAVAFICILARWEDLEFLLYYRSFTKKLMWFAYMATTIAFATGLYTVLAPRMLWLAVGICFLSVLLPILTKLLGEWPVVKLRFRLGKTFKTDLLDMV

SEQ ID NO: 23592 - protein, 384 aa, Oryza sativa; identical to SEQ ID NO: 15883
  Clone ID: TF_OsC340376_1.pep

SEQ ID NO: 23593 - protein, 403 aa, Oryza sativa; identical to SEQ ID NO: 15889
  Clone ID: TF_OsC506_2.pep

SEQ ID NO: 23594 - protein, 411 aa, Oryza sativa; identical to SEQ ID NO: 15890
  Clone ID: TF_OsC180673_1.pep

SEQ ID NO: 23595 - protein, 749 aa, Oryza sativa; identical to SEQ ID NO: 15891
  Clone ID: TF_OsC14877_1.pep

SEQ ID NO: 23596 - protein, 341 aa, Oryza sativa; identical to SEQ ID NO: 15892
  Clone ID: TF_OsC359_7584.pep

SEQ ID NO: 23597 - protein, 160 aa, Oryza sativa
  Clone ID: TF_uC-osflM202091b10b1.pep
RTNMASQNALRCARVALQGTSPLLRCRRRADPNTRHRYGFAPLHMAAENFSVDMVKLLFRCGASANIRTKGDNVIEGLLPLHVAVENASMHKYIEDHWAHGDHIINLIFLLCLPEMKMFLDTTRLIAKQTDNIVDEVWNYIQHEEKHVQAAILLLAAEKQ

SEQ ID NO: 23598 - protein, 1003 aa, Oryza sativa; identical to SEQ ID NO: 15896
  Clone ID: TF_OsC64079_1.pep

SEQ ID NO: 23599 - protein, 341 aa, Oryza sativa
  Clone ID: TF_OsC1713_5567.pep
GATFRCHALRKWCYHYNFLWRYISKKIKTDIVSFNVIQSYFASISFSVCLTGRTPLIIAIVFNHVSTVEYLLDRGADANKASHNGLTPIHFAICLGECGMVQLLLAKGACVDPVAYCGTPLHVAATEGRDGAMKILLDHNADFNKMVDGLTPLDTAMDSGELKCINLLIKVGAVVSEDRMLTAENSGSTECFNYLMEETGANCNISDNGEPVNKRKATDLKSLGNKAVEKKDYLSATGFYSKALYLYPDDATLFSNRSLCWHHMGDGHKALLDAYECRKLRPDWLKAYYRQGAALMLLKDYESACETLYDGFKLDPGNSEMEDALREALASLKASASTEAR

SEQ ID NO: 23600 - protein, 1073 aa, Oryza sativa; identical to SEQ ID NO: 15901
  Clone ID: TF_OsC3235_1.pep

SEQ ID NO: 23601 - protein, 687 aa, Oryza sativa; identical to SEQ ID NO: 15904
  Clone ID: TF_OsC341728_1.pep

SEQ ID NO: 23602 - protein, 624 aa, Oryza sativa; identical to SEQ ID NO: 15924
  Clone ID: TF_OsC43580_1.pep

SEQ ID NO: 23603 - protein, 675 aa, Oryza sativa
  unsure (1)..(675): unsure at all Xaa locations
  Clone ID: TF_OsC102369_1.pep
MEEESQSQSHFPLRWESTGDQWWYATPIDWAAASGHYDVVRELLRLDANLLIKLTSLRRIRRLESVWDDDMRFADAARNRAAVARRLLHDCEPPRGAAAGGGSRPNRLIRAGYGGWLLYTAAAAGDAAFVRELLGRQPLLVFGEGEYGVTDVLYAAARSDSSEVFRLLLSAVLSPPECSAGGEGDGGTAAIAGGFMFRCEMMNRAMHAAARGGNWXVLRELLQGCSDASAFRDAQGSTILHAAAARGQLELSRMXVVKDLIASFDIVNSTDEQGNTALHLAAFRGHLPVVKALITASPSLISATNEVGDTFLHMALTGFRTPGFRRLDRQMELMKQLIGGVIMDLSSIINMQNDDGRTVLHLAVIGNLHSSLVELLMTAPLIDLNVRDNDGMTPLDLLRKQPPTASSEILIKQLILAGGIANSMDHETRSAIASQLKMHCIVGSPGTSFKIPDAEIFLHAGIDASDISERTNSFSSVGQSEPEFPESSRKKLNSMQNAAKHLKILLRWPLRKEKKSSSGARNELDDDASSVDSVKSWSHGETPTPLRQKYSRMSSLFNNKRTMAARIGSPSPSMKKSFADGLAHGVMQPESPSGSGSWSSSSLVDRIEAVHLDKNGQASPDTSVVIRRTPKKHGSLNSRLMNQYFCIGAQGIAVEDSTTGQRSSRMFRSSLLSAA

SEQ ID NO: 23604 - protein, 388 aa, Oryza sativa
  Clone ID: TF_OsC68848_1.pep
MGLQQSKEELVYQQWIDKEGKTPLMVASMRPDLINVVQVLIELGANVNAYRPGSYCGTALHHAAKKGLEQTVHLLLSHGANPFITNDDCHTALDLAREKGHVNVVRAIEGRISLFCGWMRENYGPGFLEAFAPQFLTRKIWAVILPREARNQTRPLKLELTIYPELQASKPQAVIKLWKCQLEEPKFNQANPSVVNYGNADGIRALRAQGAGLEWIDKEGKTPLMVASMRPDLINVVQVLIELGANVNAYRPLPSVISTPSQEDKKGPEPTIHSLLSHGANPFITNDDCHTALDLAREKGHVNVVRAIEGRISLFCGWMRENYGPGFLEAFAPQFLTRKIWAVILPREARNQTRPLKLELTIYPELQASKPQAVIKLWKCQLEEPTIN

SEQ ID NO: 23605 - protein, 212 aa, Oryza sativa
  unsure (1)..(212): unsure at all Xaa locations
  Clone ID: TF_LIB4371-012-R1-K1-H5.pep
MGQGASCGRPIEEVDFFGAAHSGDLARLAAAGRWRPSLLCRTTLFDRLSALHIAAAHGHLQVVSMALDLCVHPDVVNRHKQTALMLAAMHGRTECVRRLLDAGANIVMFDSSHGRTCLHYAAYYGHADCLRAILSAAQSAPVSQSWGFARFVNVRDDTGATPLHLAARQGWRRCVHVLLEXGAIVSASSSAFGFPGSTPLHLAARGGSLDCV

SEQ ID NO: 23606 - protein, 571 aa, Oryza sativa; identical to SEQ ID NO: 15910
  Clone ID: TF_OsC22761_1.pep

SEQ ID NO: 23607 - protein, 823 aa, Oryza sativa
  Clone ID: TF_OsC6747_1.pep
MSLPRRFGSIVSDSPFGDSAIDSDSRTGSCLFGSVLPGSELTGRARCSTSKLSLVLSNRAGGLGFGGNQEGASGPYFLGGAWFLFNRRVLRYFRNDGYEWRKKKNGKTIAEAHERLKVDNVDALNCYYAHADKNSTFQRRIYWMLDPAYDHIVFVHYRDVQEGSISVSALNDSSTSNQNGSGSRAEAQSSPGLTSELFAPCLNSCSPGSAEEVSSQIMAINNETNSVSQPDWVQHCNQAALRKLKVQLSLEDREDHDVDAKDIPSNSEPITVYGIQNEEPGTCRNLADVFSGLEFSKENHPEETGLPFSSTIDVLKNSDTWLEEDQIEAILHSASMIVTENQWFNIREVSPEWSYCSESTKVIIAGDFLRDPSHGSWAIVFGDVKLLFDGHVSEQFLKFGLPFPNLECGLQVSPSEIMKGASERLNRDTAVNCVMEVLLNNKFEEWLFSKYEQNSEGNHFLPRQYHGVIHTIAALGYNWALKLLLNSGVLVNYRDANGWTALHWAARFGREETVVLLLDAGAAAGALSDPTAQDPAAKTPASVASAYGFKGLSAYLSEAELIAHLHSLESKENGSSGDQISRVVGRISDTSAHAQSGSDDQLALKESLGAMRYAVQAAGRIQTAFRIFSFRKKQQAGLQNRGNHIISIREVGAASHGMLEKAALSIQKNFRCWKKRKEFLKIRKNVIKIQARVRAHQQHNKYKELLRSVGILEKVMLRWYRKGVGLRGFHPGAIAMPIDEEDEDDVAKVFRKQRVETALNKAVSRVSSIIDSPVARQQYRRMLKMHKQNKDDDEKVEVSPASHVYGSGSHHMCWLSYNKQPMF

SEQ ID NO: 23608 - protein, 417 aa, Oryza sativa
  unsure (1)..(417): unsure at all Xaa locations
  Clone ID: TF_OsC50757_1.pep
MPRGRVPGGSTANFSAHLIAAQLGMQCRMGPAAAEQMRRVIASSDCDTGRVMRMFGAMEGGDSDSDSDDSAETEKVGPLHEAASAGKMDTCKHLVEQLGFDINAEASDDLGMTPLACAVSKGKAIAVRYFLDKGADPNKQDNIGFTPLHYATKEGYDGLARLLLSKGASVDVISSKGTALHLAASSWKSGIMKILLEHNADPNKVSADSETPLAATLIASDGLNEPAVLKCIKLLVKAGANLNRAIPDTPLVIATNKDFVECVEYLLEAGANANIPTNNGGKTPIEIAAKSGRRKLVEILFPCTLPIKGVSNWTVEGIITHVKSKKSKKKACAQDKESGTDKKAQLKSLGASAVQGKDYVGASKFYSEMRVRGVATGISLVRLNMEEDEKVPGSSNTSYIXTCIGLKPDWAKGYYRK

SEQ ID NO: 23609 - protein, 557 aa, Oryza sativa; identical to SEQ ID NO: 15872
  Clone ID: TF_OsC75595_1.pep

SEQ ID NO: 23610 - protein, 399 aa, Oryza sativa; identical to SEQ ID NO: 15919
  Clone ID: TF_OsC52071_1.pep

SEQ ID NO: 23611 - protein, 192 aa, Oryza sativa
  Clone ID: TF_OsC55485_1.pep
KDVLTLNNSLLTVANMDGETPLLTAVTNGHMSLASILLECCCTLGFSEAILQQDRNGCNALHHAIHCGHKDLALELILKEPALSKAVNKYSESPMFIAVMRDFTDVSEKLLGIPGSSHVGTYGHNALHATVRNGNAVMAKKILEGRPWLGKERTRERKTPILMTVIWDKIDVLRVLLEHDVLLGYECYEVVI

SEQ ID NO: 23612 - protein, 329 aa, Oryza sativa
  unsure (1)..(329): unsure at all Xaa locations
  Clone ID: TF_OsC24838_1.pep
ARGETALYVSAEKGHTEVVSEILKFCDLQSAGLKATNSFDAFHIAAKQGHLDVLKELLQAFPALAMTTNSVNATAARAAATQGHIDIVNLLLETDASLARIARNNGKTVLHSAARMGHVEVVTALLNKDPGIGFRTDKKGQTALHMASKGQNAEILLELLKPDLSVIHVEDNKGNRALHVATRKGNTVIVQTLISVKEIVINAVNRAGETAFAIAEKLGNEELSNILREVGGETAKEQVNPPNSAKQLKKTVSDIRHDVQSGIKQTRQTKMQFQKIKKRIQKLHIGGLNNAINSXLVVAVLIATVAFAAIFTIPGNXSGRYGKIHMIPT

SEQ ID NO: 23613 - protein, 130 aa, Oryza sativa
  unsure (1)..(130): unsure at all Xaa locations
  Clone ID: TF_OsC308714_1.pep
MEEKGMGKQRWEKMLLQAAFDGNLRLLRKMARGLVTTGRGRGEADVLAAVADGGSGSRALHLAATEGRMDVLTYLVEDLRLDVNQTNDRGSDXLIXSAFFGRTASTRYLLDHGADPMIVGKSGSPLHAAA

SEQ ID NO: 23614 - protein, 434 aa, Oryza sativa; identical to SEQ ID NO: 15922
  Clone ID: TF_OsC115270_1.pep

SEQ ID NO: 23615 - protein, 523 aa, Oryza sativa
  Clone ID: TF_OsC1528_2374.pep
MTMEDGSCPSPVTPSEAEAGAEDYESWTLKQKIEDLVNCDPIHGIVPKNPKYKAYFEEKFQEKLSKYVRVVLPKLRPAIQKDSVKQFFQVYNCWSGFMGRGNFLLPDILTNMANENALRCARVALQGTSPLLRRRRADPNTRHRYGFAPLHMAAENFSVDMVKLLFRYGASANICTKGEYVIEGLLPLHVAVENASMHKYIEDHWAHGDHIINLIFLLCLPEMKMFLDTTRLIAKQTDNIVDEVWNYIREEKHVQAAILLLAAQKQLRGRLNNSSGKASLNGFDIVKSHIDDALNTIHLEGLNMVKEGKNGRALKRLKDKKEALLTALVLVGIVHKAGEALEGYIQTHSQVRHDEIVEHVSSILKSNGIAHSGESIDTGKLECYQHGGGMSIGKSDSQRVGYGETIEADKSSSDIGEVSKMILGKQPPKGSAIREVRDMFFPYWKSVLSRRLQLKIVPSCQLSRKDLLSAEASTKGTKSMDHPCNPIKSMGNLGSMGWPPLSSESRRMLYTVASMSRKVFKRT

SEQ ID NO: 23616 - protein, 1033 aa, Oryza sativa
  Clone ID: TF_OsC29324_1.pep
MAAAADARRFAVVPQLDIAQILKEAQQRWLRPAEICEILKNYKSFRIAPEPPNRPQSGSLFLFDRKVLRYFRKDGHNWRKKKDGKTVKEAHERLKSGSIDVLHCYYAHGEENENFQRRTYWMLEEDFMHIVLVHYLETKGGKSRTRGNNDMHQAAVMDSPLSQLPSQTIDGESSLSGQFSEYEEAESGGTGYHSFTQMQQQQNGIGPVTDASMFSSRVSASSIGNYQGQHAMGHTTNFYSSSQHDSPLVLSDPNLELANNGHESLWNGVMKPDEGTVQMTHLQPPVHPEQGMFTTEGQGVEYLTFDEVYSDGLSLKDIGAAGADVEPFWQFSSNSYLTEAIAFQLSSATADISATENSVQQNDGSLGAAIGFPFLKTQSSNLSDILKDSFKKSDSFTRWMSKELLDVEDSQIQSSSGAYWNTEEADSIIEASSREPLDQFTVAPMVLQDQLFSIVDFSPSWTYAGSKTKVLVTGRFLHANEVTERCKWSCMFGEVEIQAEISADGTLRCYSPPHKPGRVPFYVTCSNRLACSEVREFEFRPSDSQYMDAPSPLGATNKVYFQIRLDNLLSLGPDVYQATITNPSKEMIDLSKKISSLLANNDEWSKLLKLADDNEPLSHDQQDQYAENLIKEKLHVWLLHKVGDGGKGPSVLDDEGLGVLHLAAALGYDWAIRPTVTAGVNIKFRDFHGWTALHWAAFCGRERTVVALIALGAAPGALTDPHPNYPAESTPADLASANGHKGISGFLAESSLTSHLQALNLKEANMSEISGLPGIGDVTERNASQPAIGDSLGAVRNAAQAAARIYQVFRVQSFQRKQAVQYEGDKGGISDEHALSLLSMKPSKSGQLDPLHAAASRIQNKYRGWKGRKEFLLFRQRIVKIQAHVRGHQVRKHYRKIVWSVGIVEKVILRWRRRRAGLRGFRPTEGAIESSSGGTSSNLVPTRPAGDDYDFLQEGRKQTEERLQKALARVKSMVQYPEARDQYQRILNVVSKMQESQTVQEKILDESTEMDEGDFMSEFKELWDDDTPLPGYF

SEQ ID NO: 23617 - protein, 396 aa, Oryza sativa
  Clone ID: TF_OsC180174_1.pep
MASSPSAVVLQAALDGDLHLLCEMAKKLDLRGFKDMNGRNALHLAASYGHLEICKFLVEESGLDVNSGSHRGACTSMISRALGDINVLIYLLDHGGDPAIPDVGGLLSKGVPVEPLNFRVVRLYLSASEDRVHPMNVRVAQRADVSGVVNHIFSPLMMACCGHSLKCVKLLVEAGADVNGNSTNGPTPLTEAVDDSLTDVVKFLVGAGADPNIPDEQEGRIPIMVAAARGQRELVEILFPRTKPIPCLPDWNVDGIIRTMRTTRIEPQVCSPVEEQVSDAKSKGKEAFAKGDYLTAIYFYTLAMDKSPLDATLFANRSLCWLRQREGDRALLDAQQCRMLRPGWSKAWYREGAALSFMKDYKGAVDAFGEALKLDPMSDEVKNALREAIECLKRAA

SEQ ID NO: 23618 - protein, 642 aa, Oryza sativa
  unsure (1)..(642): unsure at all Xaa locations
  Clone ID: TF_OsC58329_1.pep
MASEIEVLEDTTTTMAASAAPVAPASPSPSPAAAADGEEGEGPAPAAEDDSLKNDVYTAAAYGDLEKLQRLVEGEGHPVTEPDGLGYHALQWATLNNRVAAAQYILEVVPHCASRPSVARFGWPSSSRCLLASEGFGWGFGVFTFSSLAGVLDRLHYLFSCLXHTHGADVNAVDHTGQTALHWSAVRGHIQVAELLLKEGAKVDVADLYGYQATHVAAQYGQTAFIYHIVAKWNADPDVPDNDGRSPLHWGNLEACTVLVQAGKKDDLMVKDKTGLTPAQLAADKSHRQVAFFLDNAKRVYDRGCDGNTNFGKLSKLGLAPVLWCIIVGLLATYIHSVISGQYIMDMTAPFGLFAWSGVFLATAGLVMFYKCSRKDPGYIKANIRDSQNQRDDEPLLKLELDNPALLSGNWSQLCITCKIVRPVRSKHCSTCDRCVEQFDHHCPWVSNCIGKKNKWEFFMFITLEVFAMIITGSAAIIRMVRDPASPASFIPWLSYSAFNHTGALSFFIMDLFLFFGVAVLAVVQASQIAKNITTNEMANSMRYSYLRGPGGRFRNPFDHGARKNCSEFLLNGYNEDIERLDHTSHTDEEMGMIQMTNAVSQNGEGPSHHGNGTGHSCAESHAHSKSHSQIVCVHAEAPLFI

SEQ ID NO: 23619 - protein, 711 aa, Oryza sativa
  unsure (1)..(711): unsure at all Xaa locations
  Clone ID: TF_OsC60113_1.pep
MDHHRQMQDIQLARCSSQHHGSEAAVTARGDSAGGLEMCPALYLAASKGRAEEVMALLLQPRHGGVAQGHLDQVNGTWMVPHNGREVEGPGPGAGRAVQAPWAPPSQGPPDQRHGQCNISEVSAESNTVFHVAAEQGHDELIREVYLRFKESSLLSRRNSSQDTPLHCAARAGHAGAVTAIVQLLALDSILGCKNEAGDTALHLAARNGHGAAVEALVSAAAPELSSELNAAGVSPLYLAVMSKSVTAVKAIITTCSDASPVGPNKQNALHAAVFQISEMVDLVLKWKPALSGQCDVKGSSPLHLASSDGDRSIVSAIVRAAPPSTAFLKDSDGLSAIHVAARMGHHHVVEELMSAWPDAAELRDGRGRTFLHAAAEKGHAPVISLAVKNPMLCGIMNAQDKDGNTALHLAVAAXRVPCKGLAALLSAGDNVRVNIMNNDGYTPFDLAANSSSFLSMSSDLLLETESGKKERKKRDMRTSREDTWSKISLVVTLSAYGAQSCPQRQDHLNQWRGNDTTDWIRKTSNSLAVVAVLVATVAFSATFNVPGGYGDDGKAVLQAKTAYKFFIVFDSVAMTTSVVAVILIVYGKASGSWKSFILALHFMWVSMIGMIVAFWAALVAVMRRRTINIVIYEVIINGIYVLVLSIMILTKPASWISFVKFMFSSLLPERHHRRVARQYPFAGTYSRNYSVFVVTNILAYVGAFLALSKS

SEQ ID NO: 23620 - protein, 265 aa, Oryza sativa
  Clone ID: TF_OsC20490_1.pep
MGRRHGGGGGGGGGRGRGGRGRGGGEEDDLHLHKAARSGDLAAAESLCEANPLALNSRDRLSRTPLHLAAWAGHVELVKCLCKHKADVGAAAMDDTAAIHFASQKGHVEVVRELLASGASVKAKNRKGFTALHFASQNSHLELVKYLVKKGADIAAKTKGGQTALHVAEKDDVRDFLKECEQSLKKGGELPSEKKDDSVSTIAEKPDDDKSSGEATKDEDEAGFGEKRKSDGIAAALRSPELKKAKVSLGHLISANDMEEEEEAD

SEQ ID NO: 23621 - protein, 562 aa, Oryza sativa; identical to SEQ ID NO: 15930
  Clone ID: TF_OsC354856_1.pep

SEQ ID NO: 23622 - protein, 418 aa, Oryza sativa
  unsure (1)..(418): unsure at all Xaa locations
  Clone ID: TF_OsC13066_3.pep
PRVRFLCGHLEFCKDVLSLPQDPTVKKKLLTTVNVMNETPLLTAITSGHVTLAAFLLKYCHEQGFSEVILKQDKHKCNALHHAICNGHKDLALELIATQPALSKDVNKYGESPMYIALMMRDSKFTDIFEKLLGIDGSSHSGTYGYNALHAAIRNGNPDIAKRIXSLNAQIWPQKKIRDGNTPIQLAVPWGKDRHATSVLLKHDRSQGYVINRKNGYPLLLSAAHRGHVAVAREIIKYCPDAPYCKKDGWTCLHKAVKSGNMEFVEFILGEPRLQKLVNMRSSKGKTALHYAIQKCDPKIVAALLDKKIDLTILGSDGNAAAWELRDALDSAKTLNWNEVSMLMIKADPPNAKSVYNLHEEAKEKLINASRKDARSLTQTYTSNTSLVAILIATITFAAAFTLPGGYSSDAGSQGLPI

SEQ ID NO: 23623 - protein, 516 aa, Oryza sativa
  unsure (1)..(516): unsure at all Xaa locations
  Clone ID: TF_OsC13066_1.pep
MAACAASTATIDWELLEAAISGDTRSMKMKYMDSHDPTILLGKNPQGNTCLHISSMCGHLEFCKDVLSLPQDPTVKKKLLTTVNVMNETPLLTAITSGHVTLAAFLLKYCHEQGFSEVILKQDKHKCNALHHAICNGHKDLALELIATQPALSKDVNKYGESPMYIALMMRDSKFTDIFEKLLGIDGSSHSGTYGYNALHAAIRNGNPDIAKRIIVERPNLATEENKDGNTPIQLAMLHIAKKMGGHVFIKLSNQKLVNMRSSKGKTALHYAIQKCDPKIVAALLDKKIDLTILGSDGNAAAWEXRDALDSAKTLNWNEVSMLMIKADPPNAKSVYNLHEEAKEKLINASRKDARSLTQTYTSNTSLVAILIATITFAAAFTLPGGYSSDAGSQGLPIMARNVAFKAFLISDTLAMCASLAVAFICIIARWEDLDFLLYYRSFTKKLMWFAYMATTTAFATGLYTVLAPRLLWLAVGICSVAVLVPILTKVLGEWPVLKLRIRLGQAFKSEFLDMV

SEQ ID NO: 23624 - protein, 259 aa, Oryza sativa; identical to SEQ ID NO: 15933
  Clone ID: TF_OsC1713_4802.pep

SEQ ID NO: 23625 - protein, 657 aa, Oryza sativa; identical to SEQ ID NO: 15913
  Clone ID: TF_OsC2195_1.pep

SEQ ID NO: 23626 - protein, 355 aa, Oryza sativa
  Clone ID: TF_OsC82589_1.pep
METSRRLWPCWSLTPALRALPPRPRAARAPPPPPDSDSGGAGSPLHLAALHGHAECVQLLLDLGASVSEVTINDGSTIDLIGSGSTPLHYAACGGSAVCCQLLVAAGANMRAQNTNGLTPLMVARSWHKSSVEGILTKRPEVPVRILPSSYLSLPLMSIVKIARECGWRKTSVSSVCHDPCAICLDTECTVSAEGCGHEFCTKCALYLCATASSSTSIRGVPGSIPCPLCRHTIVSFVRLTSTTPIKELPWTNKSLALCAAGASTGSKYAGPAAITSSKYAGSLHRRSEMRSLRSSSVDLGCSSFRTASSGKLSSIKLNCTGADETMPCLVNCFRPDVQRSSSYRERIRRYSQFS

SEQ ID NO: 23627 - protein, 123 aa, Oryza sativa
  Clone ID: TF_OsC763_1.pep
WYCILLIVCGGAVILIKALEDGTDMDEEDAEGRRALHFACGYGELKCAEILLEAGAAVNALDKNKNTPLHYAAGYGRKECVDLLLKHGAAVTPQNLDGKTPIEVAKLNNQDEVLKVLEMDAFL

SEQ ID NO: 23628 - protein, 426 aa, Oryza sativa; identical to SEQ ID NO: 15914
  Clone ID: TF_OsC12078_1.pep

SEQ ID NO: 23629 - protein, 444 aa, Oryza sativa; identical to SEQ ID NO: 15915
  Clone ID: TF_OsC306767_1.pep

SEQ ID NO: 23630 - protein, 722 aa, Oryza sativa; identical to SEQ ID NO: 15917
  Clone ID: TF_OsC17869_1.pep

SEQ ID NO: 23631 - protein, 1132 aa, Oryza sativa; identical to SEQ ID NO: 15942
  Clone ID: TF_OsC1991_2.pep

SEQ ID NO: 23632 - protein, 166 aa, Oryza sativa; identical to SEQ ID NO: 15943
  Clone ID: TF_OsC20391_1.pep

SEQ ID NO: 23633 - protein, 368 aa, Oryza sativa; identical to SEQ ID NO: 15949
  Clone ID: TF_OsC341610_1.pep

SEQ ID NO: 23634 - protein, 444 aa, Oryza sativa
  Clone ID: TF_OsC207789_1.pep
MDDLDMALPQAFELLLGRDRDAWPRGAAFLVAAHYGDVREMKRIAKELDEDGKGIEATVANTSFLGMNALHALGWLGKVPAYRYLVEEVKMDVNKADTAQGFTPLEHAVYHGRLPATRYLLDHGADVHQIRSTGNVSLLHSAAVKGFSEVAKFLLSRGVNVDAESEMGTPLALAAFRGYDSTVKVLLEHNADPNKVTNKALGAPLDLALTSSSVSCVKLLVQAGAEVKVEGPNNHLVRAAEKGLTEAIKCMLEAGANPNVPDRLGRMPIELAAEYGTREDVEILFPFSSAIPTVANWSVDGIINHVQSEIKQLEILFTQDDNFIKKRRSDMKQQGDAAFKKQDYLNASVFYTQALKVDPFDGTLFSNRSLCWLRMGDGERALDDANACEKLRPKWAKSYYRQGAALMFLKEYERAHRALGRALELDPESEEIENLYWESMELCG

SEQ ID NO: 23635 - protein, 847 aa, Oryza sativa
  unsure (1)..(847): unsure at all Xaa locations
  Clone ID: TF_OsC16902_1.pep
MGRGIGSKRRVEDDDGENMPGRKKKEEEEEEEDDDGEEEYEVDVVRDRIGSSRGSRLALFGSDLRLGRFRPRRRRVAPVDGDDGIFQDFVIDPDNKWYRLWTRFILVWAVYSSFFTPLEFGFFRGLPRNLFFLDIAGQIAFLIDIVLRFLVAYRDPDTYRMVHNPTSIALRYCKSSFIFDLLGCFPWDAIYKACGSKEEVRYLLWIRLTRAMKVTEFFRSMEKDIRINYLFTRIVKLIVVELYCTHTAACIFYYLATTLPESMEGYTWIGSLQLGDYSYSHFREIDLTKRYMTSLYFAIVTMATVGYGDIHAVNVREMIFIMIYVSFDMILGAYLIGNMTALIVKGSRTERFRDKMKEVIRYMNRNKLGKDIREQIKGHLRLQYESSYTEASVLQDIPVSIRAKISQTLYKPYIESIPLFKGCSAEFIQQIVIRLQEEFFLPGEVILEQGSAVDQLYFVCHGALEGVGIGEDGQEETILMLEPESSFGEIAVLCNIPQPFTVRVCELCRLLRLDKQSFTNILEIFFVDGRRILSNLSESSEYGSRIKQLESDITFHIGKQEAELTLRVNNAAFYGDMHQLKSLIRAGADPKNTDYDGRSPLHLAACKGFEDVVQFLLHEGVDIDLSDKFGNTPLLEAVKQGHDRVATLLFSKGAKLSLENAGSHLCTAVARGDTDFVRRALAYGGDPNARDYDHRAPLHIAAAEGLYLMAKLLVDAGASVFATDRWGTTPLDEGRRCGSRTMVQLLEAAKSGELSRYPERGEEVRDKMHPRRCSGVPXPHPWDGGERRREGVVLGAGEAXLAGSGEGLRLLGEDGARVLDVDMVHDGQKLYLVVGGGGDDGGTEARQ

SEQ ID NO: 23636 - protein, 682 aa, Oryza sativa
  Clone ID: TF_OsC1434_2.pep
MDRWACPRHSPPTIHTYNILIDCYRRVHRPDLGLAIVGRLLKNGLGPDDFSYSLIYGFVKDGEVDKAHCLFLEMMEQGVLPKILICNSIIKELCKMKEMDKAESIVQKMVDSGIAPDLFTYSLIIDGLCKSKAMDKAERVLEQMVEAGTRPNSITYNSLIHGYSISGMWNESVRVFKQMSSCGVIPTVDNCNSFIHALFKHGRTNEAKCIFDSMVLKGPKPDIISYSTMLHGYATATDSCLADVHNIFNLMLTKGIAPNKHVFNILINAYARCGMMDKAMLIFEDMQNKGMIPDTVTFATVISSLCRIGRLDDALHKFNHMVDIGVPPSEAVYGCLIQGCCNHGELVKAKELISEMMNKDIPPPGVKYFSSIINNLCKEGRVAEGKDIMDMMVQTGQRPNVVTFNSLMEGYCLVGNMEEAFALLDAMASIGIEPNCYIYGTLVDGYCKNGRIDDALTVFRDMLHKGVKPTSVLYSIILHGLFQARRTTAAKKMFHEMIESGTTVSIHTYGVVLGGLCRNNCTDEANMLLEKLFAMNVKFDIITFNIVISAMFKVGRRQEAKELFDAISTYGLVPNIQTYSMMITNLIKEESYEEADNLFISVEKSGHASDSRLLNHIVRMLLNKAEVAKASNYLSIIGENNLTLEASTISLLASLFSREGKYREHIKLLPAKYQFFEGAWQD

SEQ ID NO: 23637 - protein, 395 aa, Oryza sativa; identical to SEQ ID NO: 15950
  Clone ID: TF_OsC216950_1.pep

SEQ ID NO: 23638 - protein, 1026 aa, Oryza sativa; identical to SEQ ID NO: 15953
  Clone ID: TF_OsC40453_2.pep

SEQ ID NO: 23639 - protein, 732 aa, Oryza sativa; identical to SEQ ID NO: 15982
  Clone ID: TF_OsC12642_1.pep

SEQ ID NO: 23640 - protein, 387 aa, Oryza sativa; identical to SEQ ID NO: 15958
  Clone ID: TF_OsC341609_1.pep

SEQ ID NO: 23641 - protein, 126 aa, Oryza sativa
  Clone ID: TF_OsC68618_1.pep
KGRSVIHHTASVGDVEGLKKALEEGVDKDEEDSGGRRGLHFACGYGELKCAQVLLEAGAAVDAVDKNKNTALHYAAGYGRKDCVALLLDHGAAVTVQNLDGKTAIDVAKLNNQEEVLKLLEKHAFV

SEQ ID NO: 23642 - protein, 797 aa, Oryza sativa
  unsure (1)..(797): unsure at all Xaa locations
  Clone ID: TF_OsC413415_1.pep
MSRRRAAAVAAAAREEEEASPAQRLVEAALRGDVVTMEACLAAAAAAAAADDDTDDGVPAASRVGVARLRVRCAEVALREEAAGEVIVESRELKTDVSPLFAAAHAGHAEVVRTLLSGGGGKVAGVSSCKKVYCSVFEVAGADVNQKLFLGYATTAAAREGNIHILEMLLQAGVTREACEDSLSEAALFAEAEAVRLLVCSEMIQPEAAAHALVTASSRGFDDVVVILLQNGVDVNSMARVLLRSVKPALHANVNCTPLVAAVMSRQISTVKLLIEEGSYLDCLVQVGSWCWDSATGEELRVGACLGEKYNAIWCAVEYYECSGEILKLLLDKAPWLLETPRKGRNLLCHAILCQNPNAVSVLLNAGANPRFPIMMTNGTHVSYPIHFAARLGHAPVLKQLMLDGANINAQTSTGDTPLMVSARCGHSDCFLELIKSGADLGIVNNAGDTAIMLAKKSSFSSTIIDILSRALSCGGCITSSDITVFSPLHFFAASDSAEALLMTLHYSAADLNRPDGSGLTPVMVAAESGHADIFRLLVMAGADIAATSAEGKSAMSIIRSRAPETRDRFEQILLQASLADAIAGQQPSFRPLHYAARIGDTSSLTQLLKMGHDPNAMDEDGYTPLMHAAAAGKLEACRALVSRGGAADAGSETALSVARRSGRSNKATEEWLLDHVARAXVLAGEELTKHTRGGRGPPHRKAVRMMRSGVLTWGATRRRNVACREARAGPSAAFRRNRRIIRTGSEEQLILMVETVTGREIHFEATSASSVELWVRGINLIVQDCAWSRPDEAEQA

SEQ ID NO: 23643 - protein, 340 aa, Oryza sativa
  unsure (1)..(340): unsure at all Xaa locations
  Clone ID: TF_OsC359_7318.pep
TPLLSRRLANDIIIPDPAPXGWMCYTFLDKYDQLEPIFIKDSARCFLRLFKNWKGYTMSWNLTITAQTLTCMVSFNSLRCAKVVLEGRAPELLGVHANPNCVTKYGYFPLHEAAERFSIEMIKLLLRHGASANVRTVGDDVIDGLLLLHIAIENTCLHKYLEDNLSPGQDHLDYIYKLFHLLCLPEMKIFLDTTRLLAGKTNNLLEELWNYIENGKLIQTAILLLAAQEQIRGRKKNGYDIMYKRILRLSFALRWGKVSNGMAQKLREEKRALIDCTGLLVDVISQAGEPLSAYVQAHSEAPHVEVLEHVSTILKEYGFYPTAEVIDTMNLYFSLYCFTQ

SEQ ID NO: 23644 - protein, 630 aa, Oryza sativa; identical to SEQ ID NO: 15956
  Clone ID: TF_OsC349299_1.pep

SEQ ID NO: 23645 - protein, 546 aa, Oryza sativa; identical to SEQ ID NO: 15940
  Clone ID: TF_OsC298449_1.pep

SEQ ID NO: 23646 - protein, 466 aa, Oryza sativa; identical to SEQ ID NO: 15941
  Clone ID: TF_OsC309277_1.pep

SEQ ID NO: 23647 - protein, 461 aa, Oryza sativa
  unsure (1)..(461): unsure at all Xaa locations
  Clone ID: TF_OsC26711_1.pep
MGNSLGCSASGERLVSAARDGDAVEARMLLELSPALARYSTFGGLNSPLHFAAAKGHLDIVTLLLEKGADVNVRNYCGQVFHFRTAQAWRWTRGNSRILTGLAAQACSGAEEAATGRSSVMQRSMLDSFFFLVVNISGFIAAQXWEMSSGYFFCLPSCVSFPYXAKIFLIGEVNPAAFGCCSFYCIVAFWLQMCVVPVILDSPKITSYSSLXVCKLQELVGICFLSKLNIARPDYVLCRIAIISETVKLGREFGLLHTVASVDDSDLCAVCLERSCSVAAEGCCHEFCIKCALYLCSTSNTRVEFTGPPGSIPCPLCRNGIMSFTKLPSTPTEGLKSSSALTFCNPCMLNTRSVDSPATISKAEIRRNRVAAVSSELVCPLTCSPFPSSALPTCRCSDDDPCDAIETQDGSEVQSPQPSHCASMEMDKREQQDLDRTSCSGMFWSRRSCHREEQCNAEINA

SEQ ID NO: 23648 - protein, 252 aa, Oryza sativa
  Clone ID: TF_OsC45222_1.pep
MSATMDIDGAAASAAAGGGRHSEKELFSAAESGDAAAFSSLSPADLAAALALRDEDGRSLLHVAAASGHAQVVRVLAAMGGDAAASVVNGKDEEGWAPIHTAASSGKAEIISILLDQGANVDLTTDAGRTALHYAASKGRLNIAETLIAHSANVNKKDKFGCTPLHRAASTGNAELCEFLIEEGADVDAVDKTGQTPLMHAVISEDKAVALLLVRHGADVAIEDKEGYTVLGRASDSFRPALIDAAKAMLEG

SEQ ID NO: 23649 - protein, 308 aa, Oryza sativa; identical to SEQ ID NO: 15968
  Clone ID: TF_OsC35821_1.pep

SEQ ID NO: 23650 - protein, 191 aa, Oryza sativa
  Clone ID: TF_OsC1528_2259.pep
MHTPSMDQPAASNGDEAPRMEMCPSLYRAARSGRAEEVMALLLQQRPGDGAAAHRQVAGIIQHRQCNVLEVTAERNTILHVAAEKGHGELIQELYHRFIRDNSLLSRRNSAMDTPLHCAARAGHAGTVTILVNLAQDCEENILGCQNAAGDTALHMAARHGHGATVEALVVARAKATVLVSMKGSDHVMTT

SEQ ID NO: 23651 - protein, 210 aa, Oryza sativa
  Clone ID: TF_OsC97704_1.pep
MTTQQASGADAESGMDLDGVTTEGNTALHVVATCGDGPGYLRSAGVIYSRSQHLMLVQNNNGDTPLHCAVRAGHSKMVDHLIDLVETKDNSPSSARLEELLRKENCRKETAFHDAVCIGNKDIITNLLKYYSELAGFLMDATGTSPLYLAVLHQQVDIAKLLHQMTDGNLSYSGPNRQNALHAAVLQDQGAYAIYICCFEFHSSYIPYLF

SEQ ID NO: 23652 - protein, 329 aa, Oryza sativa; identical to SEQ ID NO: 15972
  Clone ID: TF_OsC763_2.pep

SEQ ID NO: 23653 - protein, 930 aa, Oryza sativa
  unsure (1)..(930): unsure at all Xaa locations
  Clone ID: TF_OsC35544_2.pep
MPIKRLEIEKVTAQDAVLAFKNDGIGLLHAAACQGQLNVCKFLVEEWGGDVNMAGAQGLTPVMAAAESDAVPILKGXLDHGGDVTNADVIGGTVIHHPAETSXWMETELSLSKAIPVKIDSDLGTPLFHAANDDKDKTPNILMYHNAAXKLGIGVLHAAACQCHLIVCKFLVEELGGDVNIAGKEDITPFMAAAEFGDIPTLEYFRNHSGDVTKGDVRVXNIPERCGCGIISHAKVKDIRPMTIDHGPTTVLYTNRSICRLLMGDGEDAQSDGNRSRMMRPNWEKACYRWSAGHMLLKEYKQLWDALMDAQKLDPGSVEIEKEQREYDIQESKDVVESKVGLYDKPTASYGVKPPNVSSVMGKTQIDTCKDVVFLKEEVEKRMRLDVSGSFFVYQMSTLEAGIPLSSYAGKTWNGNIDMDGLIVVHGRVRIKKKPWKGLNSSKMNSDCTKLTSMIREMFVKKNVHPPYLKHLLGKLEALAVDVFTVRQQLAFDYHISLIPSLNRVNLVYQIKRCYDGWDDREKMYFRFVADNCTVPEDWCNTLMSKHLFRLVILEGQKRNIIYGSNGMSAFHLVRNYNTHAPEHSWIHVFVDSKIEHYQWFQCDSGIELMVPKYLGDFLAEAVFKFIEDEFDLTHVKPNITKCNSGIPTLLRHNFHEGSECNSHDKLSSPFDGMGQKVMPSETFDRSVVYVAIIYGEALDRLASSSAMCSNGDFSVCSQVTRINEFMDRPTCISKCGKSDHDVKTHGLSLILHINAVLALNKHGIGVLHAAACQGHLNVCKFLVEELGGDVNIAGKEDITPFMAAAESGDVPTVEYFLDHSGDVTKADVRGCTVLHHAAGTDLWPISFIAGCCKSNVIVNNGAGSPLMSSLIYRSLKCMKLLIKAGADVNGKGTVVTPLMLAASQGGYTNFIQFLLKAGANPNIPDDVCF

SEQ ID NO: 23654 - protein, 416 aa, Oryza sativa
  Clone ID: TF_OsC60712_1.pep
MGNSLGCVGLGERLAAAAKDGDAAEAQRLLAANPGLARCTTFGNLNSPLHVAAAKGHHEIIYCNNMLNDQITDEIAALLLENGADVNARNIYGQVWRVENLSGRTALHMAAAGGHVKCVRLLVADAAGDRDGYVNKAANGGVTALHLAALHGHVECVHLLIDERASLAAQTLPCAAPPMASIGAGSTPLHYAACGGEVKCCQILVSRGADRTAINCNGIVVVRWIPIDAARIWGCNWLEHVLSPKSHLPCTGTPPSGYLSQPLPSLIAIAREQGLNLSSEVSDGFDEGADACAVCLERPCTVAAEGCDHELCVKCAMDLCSVIKSYDSAGIAGEIPCPLCRTGIASFRTTAAPPPPSLAGSPARRSRRNNSGGGGGEHEASNSGGSEKGYGSIDPDAGAVVPLYYAPPFAPSAILT

SEQ ID NO: 23655 - protein, 671 aa, Oryza sativa
  Clone ID: TF_OsC339703_1.pep
MDFGPCNETLDTELLHVLTSGDEVRMADLLGRERRGHGHSLSQVAIRVDDDDDGRAPAGASRLLGVTTGNGNTALHVAATRGHAALAALVCATAPALAATRNRFLDTPLHCAAKSGHRDVAACLLSEMLRAGGAASAALPLRRATNCLGATALHEAVRNGHAGVVALLMAEAPELASVANDGGVSPLYLAATVGSVDIVRALLHPLPDGTPSPASAAGPDGRTALHSAATTSKEPSLALVCDIQGSFPLHVAAVMGSVRIVVELIQKCPNNYNDLVDDRGRNFLHCAVEHNKESIVRYICRDDRFGILMNAMDNEGNTPLHLAAEYGHPRMVSLLLETMSVDVAITNRDGLTAADLAYRHLQPGLHYFLNPRAVVKNLFYCTRAPVTLEGDHARTGIPSAMEDADAPKDSGGVTSTGTVASVLIATVTFAAALTVPGGYVADDHPNAGTAASAGRFAFRAFAVSDTMAFLCSIVGTCLLVVGEAREVRPSRGRLRAYQGSAWALVTAGAQFMVAAFAFGLQVALGGGADSRWLVVFVHALCSASVLLCFPGIWAPFCLGKACVDLEPATRAWRSPKCAAASARKEACHAGTRRSYNWRFSFFQRFRSASTWLALGLLGHGRRPPLPALILAMGATAGSLPPNQRLPIANASLPQLPSPAQQQLHGGSLVDF

SEQ ID NO: 23656 - protein, 785 aa, Oryza sativa; identical to SEQ ID NO: 15976
  Clone ID: TF_OsC264249_1.pep

SEQ ID NO: 23657 - protein, 695 aa, Oryza sativa; identical to SEQ ID NO: 15977
  Clone ID: TF_OsC1713_3839.pep

SEQ ID NO: 23658 - protein, 860 aa, Oryza sativa
  unsure (1)..(860): unsure at all Xaa locations
  Clone ID: TF_OsC658_1.pep
LPSLGARSNRRIKLRRFIISPYDRRYRIWETFLIVLVVYSAWVSPFEFGFIPKPTGALATADNVVNAFFAVDIILTFFVAYLDKMSYMLEDDPKKIAWRYSTTWLVLDVASTIPSEFARRILPSKLRSYGFFNMLRLWRLRRVSSLFSRLEKDRHFNYFWVRCAKLICVTLFAVHCAACFYYLLADRYPVPTSTWIGNYMADFHERSLWIRYVTSVYWSITTLTTVGYGDLHAENTREMIFNIFYMLFNLGLTAYLIGNMTNLVVHGTSRTRNYRDTIQAATSFGVRNQLPPRLQDQMISHISLKYRTDSEGLQQQEILDSLPKAIKSSISQYLFFHLVQNVYLFQGVSNDLIFQLVSETNAXYFPPREDVILQNEAPTDFYILVSGSVELVEQQNGADQVIQVATSGEVVGEIGVLCYRPQLFTVRTRSLCQLLRLNRTAFLSIVQSNVGDGTIIMNNLIQFLKEQKENSVMAGVVKEIESMLARGNLDLPITLCFAVTRGDDFLLHQLLKRGMDPNESDNDGHTALHIAASKGNEQCVRLLLEYGADPNARDSEGKVPLWEALCEKHAAVVQLLVEGGADLSSGDTGLYACIAVEESDTELLNDIIHYGGDVNRARRDGTTALHRAVCDGNVQMAELLLEHGADIDKQDGNGWTPRALAEQQGHDDIQLLFRSRKAATASGHHHVPSSTTTRVAPAAAAASLIGRFNSEPMMKNMIHEDADLPSRVLPEKLRRKRVTFQNSLFGVISSSQAQRETDHPLSRGGLAATGSPNPSSGSRNAVIRVTISCPEKGNTAGKLVLLPQTLDMLLELGAKKFDFAPTKVLTVEGAEVDEVELIRDGDHLVLVSNEWDAEKMKGKS

SEQ ID NO: 23659 - protein, 943 aa, Oryza sativa; identical to SEQ ID NO: 15978
  Clone ID: TF_OsC658_2.pep

SEQ ID NO: 23660 - protein, 415 aa, Oryza sativa; identical to SEQ ID NO: 15983
  Clone ID: TF_OsC254554_1.pep

SEQ ID NO: 23661 - protein, 820 aa, Oryza sativa
  Clone ID: TF_OsC5083_1.pep
MEKPASCCCYFPLRWESTGDQWWYASPIDWAAADGHYDIVRQLLHLDPNLLIKLTSLRRIRRLEALWDDDARFAGAAGHRAGVARSLLLECECSKNGGAAAAAENTLLRAGYGGWLLYSAASAGDMAFVQELMERDPLLVFGEGEYGVTDMFYAAARGGNAEVFRLLLDHAMSPRCSTNCPNGGEGARGGGGGRSSVFRLEMMSRAVHAAARGGSVEMLRELIERRSDVSEYLDFRGSTVLHAAAGRGQLEVRHLLLGHCLLHYFCKMHHSELLFVPICMDDKVVKYLMATFDIVDSTDNQGNTALHVAAYRGHLPVVEALVAASPSTISAVNRAGDTFLHSAIAGFRTPGFRRLDRQMELMRHLIRGRTSNIQKIINLKNDAGLTVLHMAVVGCVHPDLVELLMTTPSIDLNAEDANGMTPLALLKQQLRSSTSDKLIRQIVSAGGVLNSTVLRTRSAIVSQIKMQGGIASSPGTTFKISDAEIFLYSGIGTAESRRPSSCSSNGKCDHAHHGDAKCGNAENHGSSEKRLSSASRAKDRLKLMLKWPDAEIFLYSGIGTAESRRPSSCSSNGKCDHAHHGDAKCGNAENHGSSEKRLSSASRAKDRLKLMLKWPRQKMSRGHKKSDDGDAMDSIKKLSEQAPPPPQSGKMKGTKTTALNNKRTLAVKTSTPSSATKKKLNSKLILGEPSSSGSSVNDDASAEMPARRHGCGNGRLINICFGAQGLTVEDSASGQQTSKMFKQQYNDDDDDAMGEPSSSGSSVNDDASAEIPARRARVRQREADQHLLRRAGPHRGGLGQRAADQQDVQAAVPQGVLTPE

SEQ ID NO: 23662 - protein, 206 aa, Oryza sativa
  unsure (1)..(206): unsure at all Xaa locations
  Clone ID: TF_OsC26711_2.pep
MGNSLGCSASGERLVSAARDGDAVEARMLLELSPALARYSTFGGLNSPLHFAAAKGHLDIVTLLLEKGADVNVRNYCGQTALMHACRHGHWEVVQMLLLFRCNVTRADYLSGRTALHFAAHDGLVRCVRLLLADFVPSAPLEDGASSTVDGGXECQTNSGSSPCSSLGLKFNESARLRYINXPAVGGVTALHMAALNGHFDCMQLV

SEQ ID NO: 23663 - protein, 1601 aa, Oryza sativa
  Clone ID: TF_OsC359_8351.pep
MGSVSGIDDLVFPPGQTFRFGSLDFVTNNFGKISLLDSESNQSGENRLSVPFGFPNAAESYFKTISTESASNHSAEIASSPTTPDQDDGAYPPVLMKLPDDLVAVSIATASSSRRPRRKSASTLISPSFREVGVILQPLGTVSTDQLDGDYSSPTVDSRPTNIVEYDEFSSRYHDPDLDDFDGSLDDNYTPLYFGVFMANNETEEQRQARETEARRETERRRLEEEHQAQEQERLRREQQERERTAKEAEDRRQRALEAGRRARDLIGQQDVEGTPVFRTPQQNAVAAITLLDTLLNQNELNQSDHVVNILNQTKTMIAASVPVNSESVHTPTGSRVPHFRSHDYRHPSLSITGAGSNRRSRGHDERSIHSPPDQYRERRVERPRSPPRRRPVDLRDTIIQRRAARGHHHSPNRHDDDLDGVAAFTDDLRRVDWPAGFKPTGIEKYDAGGDNKAMANYLPVALADSARSWLHGLPRGTIGSWAELSDHFIANFQGTFERPGTQYDLYNVIQKSGESLRDYIRRFSEQRNKISDITDDVIIAAFTKGIRHEELVGKFGRKPPRTVKLMFEKANEYAKAEDAVTASKQSGPSWKQNKGTPATGGGGSNNHKDRKRKPAELVATASHSSRQRSRVNTFDKIMNSQCPHHPNSNHVAKDCFVYKQFADQYTKTARKNSDEEQSTSRKKDDGDTPAGFQDHRKELNHIFGGPLAYESKRKQKLTEREINAVQPDTPQYLRWSEIAIKFDRSDHPDRVVHPGRYPLVLDPVVRNVKLRRTLIDGGSALNILFAKTLDDMQIPRSELKPSNAPFHGVIPGLSATPLGQITLPVTFGTRENFRTENISFEVADFETAYHAILGRPALAKFMAVPHYTYMMMKMPGPRGVLSLRSDIKQAVTCDKESCDMAQTHEMASARENNKDIFAWKPSDMPGIPREVIEHSLHVKEDAKPIKQRLRRFAQDRKDAIKEELTKLLAAGFIKEVLHPDWLANPVLVRKKTGQWRMCVDYTDLNKSCPKDPFGLPRIDQVVDSTAGCELLSFLDCYSGYHQIRLKESDCLKTSFITPFGAYCYVTMPFGLKNAGATYQRMIQRCFSTQIGRNVEAYVDDVVVKTKQKDDLILDLEETFASIRAFRMKLNPEKCTFGVPSGKLLGFMVSHRGIQANPEKVTAILNMKPPSTQKDVQKPTGCMAALSRFVSRLGERGMPFFKLLKKTDNFQWGPEAQKAFEDFKKLLTEPPVLASPHPQEPLLLYVSATSQVVSTVLVVEREEEGHVQKVQRPIYFVSEVLADSKTRYPQVQKLLYGILITTRKLSHYFQGHSVTVVTSFPLGDILHNREANGRIAKWALELMSLDISFKPRISIKSQALADFVAEWTECQEDTPAENMEHWTMHFDGSKRLSGTGAGVVLISPTGERLSYVLWIHFSASHNVAEYEALLHGLRIAISLGIKRLIVRGDSQLVVNQVMKEWSCIDDNMMAYRQEVRKLEDKFEGLELSHVLRHNNEAADRLANFGSKRETAPSDVFVEHLYTPTVPHRDTTQDADTHDVAMVEADWREPFIRFLTSQELPCHAQKFPNRIPSRMCIKTPVQDQPGYTNDNVDIQIHVLQTL

SEQ ID NO: 23664 - protein, 345 aa, Oryza sativa
  unsure (1)..(345): unsure at all Xaa locations
  Clone ID: TF_OsC359_7958.pep
GYGGGGGGGVGVCERERERGGAQRRGDWGAPFFSSTADPEKERDWVGDWVVGGEMARGLDTGQGEAAVVAAVEGSGFGHRALHMAASGGSVDVLRYLVEDLCLGVNQSCFSXAGQTPLFLSSIHGRAAATRYLLDHGSNPAIDKIVLPLHGAAVKGHCEIVELFLSKGVDVDLYSIAGTPLLAAAISGQHSTMKILLEHHADPNRVFNLDGTPLIMSIVSGSLECVKLLIKVGADMNFRDSNGVTCVMVAANHGSSVIMKCLLDAGANPNIPDEQFNTTPIEVAANHGRRDIVEMLFPLTSPISTLSDWSIDGIISHVENFGLKPRVFVPLSAHLQLHIIVYHHY

SEQ ID NO: 23665 - protein, 1050 aa, Oryza sativa
  Clone ID: TF_OsC134_92.pep
MVSPTLFLPVHWCRLPAATRRVEFNTRSGTFPHMPRRRHPLGADEDRAWRGHHDAYADGQAIVRWEAQRKRDGLRLLHQAHGLLLAMALLAVALLAAALHADAAPASAAPGSSFPDAYGDRARAAQLPPRKQQPQVAYALRRASATSSAHLHGATSRSFTGVATEDLVARHGGVGEAGLREENGDRSSVEASGGGHWPTIVKLASSIGTVVPVALSIVPYFYQVYTGNFERTIEVYGAPAMLAGSINSIIWLTYSIMASKKDLNLALILMHALLCMSTFTYLMCICACKRATKEGSVPKRSQKVATGFDLILSCITNLVTFIITFHDHPEHTTSLITSGVGFVLNVVEIVLLVIVTIMVRGLLPDFAMLFVEVIQRTMMRIERDHYIQILLQASGIAGQEPDASPSIRGRKRGGSVPLLVYYRCAAVLDVDTARAQAGETPLLLVATFGHTARRGGRPTYLLERAAGPSTPDPDVRRRHHNAAAASCLALQAPSKQAMSPMAMPAANLPGAPRRVVSESAARRRAGLGMGCRTRENGLHNCIVVYSFVSGENVTNGSSSSEMNVLCPSSSAATPPPPAPAAGAPGVGVAVGGEAREEERRRQCYYYRCAGALLRAAVLGDLHHLARMAAEVDAAAPGGGEGAGGVRSRCGRGALHLAAANGRTHVCRFLLERLGLPVDALSASGAPPSRPAAAARSSHVSSMLAERLISCFVFDAAAHAGETPLLLAATFGHTSTAAYLLDRGADPSTPDPNGGDTPLHWAAYNGDRELAKLLLLRGADVGAANPRGTALHVAAARGHAAVVSVLLNHGADVRGRAQQDCQYRLHTVGFFTFGGIIGMHEVAHSACSRTGSIGFIKCLVESGADPNIPDELDRLPIEIAAIHAEREVIEVLLPLTHQVPTLLDWSVGGIIRYVKYPAYKEWARNASCKRKDELKLQGNSSFNNEDYDAAILLYSMVTTFAHSRFFMLMFGCKCFFSSKGAKYCFAMKFDNTDAKLYSNRSACWLNLGIGDEALSDAQICSKMQPDWAKGYYRQGMAFSLLQVTIMYHPCS

SEQ ID NO: 23666 - protein, 245 aa, Oryza sativa
  Clone ID: TF_OsC22948_1.pep
VRIPGSTTRPAASAASGTSVPEQAQLQLYGLYKIATEGPCTAPQPSALKLKARAKWNAWHKLGAMPTEEAMQKYITVVDELFPNWSMGSSTKRKDEDTTVSASSSKGPMGPVFSSLMYEEEDQGNDSELGDIHVSAREGAIDDIAKHLAAGVEVNMRDSEGRTPLHWAVDRGHLNSVEILVNANADVNAQDNEGQTALHYAVLCEREDIAELLVKHHADVQIKDEDGNTVRELCPSSWSFMNLAN

SEQ ID NO: 23667 - protein, 203 aa, Oryza sativa; identical to SEQ ID NO: 15997
  Clone ID: TF_OsC35544_4.pep

SEQ ID NO: 23668 - protein, 1484 aa, Oryza sativa
  Clone ID: TF_OsC9301_1.pep
MDRYAGSVQTEMRQNGGRLTLEQILRYGADIARGVAELHAAGIVCMSIKPSNILLDTNGHAVVSDYGLSAILKNLTSRRVSDDSNMVGLDATLLSPNYTAPEAWVPLKKSMNLFWDSANGILPESDAWSFGCTLVEMCTGAVPWAGLSAEEICKSVVKERKPPPQYSRVVGVGLPGELWKMIGDCLQFKPSRRPSFQDMLKTFLRHLLDIPRSPPASPENDFTNASMPNGTDVPPASVLDMVQDNPNALHHLVCEGDAAGVRNLLAEAASDGNGRLIRSLLEAQNADGYTALHLACRRGSAEIVEAIVAYQENVDLLDKNENPPIIFAMAAGSPQCVRALVRRSSDVNSRLREGLGPTLAHVCAHHGQPECMRELLMAGADPNAIDGEGESILHIAVAKRYTDCAIVLLENGGCRSMGIPNSVNKTPLHLCIKTWNADVVKRWVEVASEEEIAEAIDVPSPVGTALCMAAALKKEHEKEGRELVRVLLSAGADPTAQDDPHCRTALHTAAMINDAELVKIILEAGVDVNIRNAQNTTPLLVALNRGANSCVGLLLAAGANCNLQDDDGDNAFHIAADAAKMIRENLSWIVQMLQQPSPAVDVRNHRQVYDVSGVKLNLLQYNVMQSKRGWTLRDFLERLPREWISEELMETLEEKGVHLTPTIYEFADWVKFRRTVTEPAFGWQAHARFRSVLIMIVLKVYTDVLDVVKNDGILVVPKKENDARCKCCSSAYCKKANFKNLIIGATVLIFMSMLMRIPSINILTEDLWRMSHGSNNKFTHLSRFGWRGQSRDSIGTVLCVDDDGILRVGFPGASRGWRADPAEIVRVEEYKVGNWVRIRPSLTVAVHGMESITPGSVGIVYSIRPDSSLLLGLCYLSSPWLCEPEEVEHVDPFKCEAHVSSNFQIGDQVCVKRSVAEPRYAWGGETHHSVGKIIDIESDGLLIIDIPNRAVHWQADPSDMEKIEKFKVGDWVRVKAAVPSPKYGWEDVTRSSIGVVHSLEEDGDMGVAFCFRSKPFSCSVADVEKAQPFEVGEKIHVLPSISQPRLGWSNETAATIGAISRIDMDGTLNVKVSGRNSLWKVAPGDAERLSAFEVGDWVRLKSSIGSRPTYDWSVGKISIAVVHSIQDSGYLELAGCFRKGKWLTHNTEIDKVEPLKIGHHVRFRAGITEPRWGWRDAKPDSRGIIAGVHADGEVRVAFFGVPGLWKGDPADLEIEQVYEVGEWVRLRNNADDWKSLKPGSIGVVHGIGYEDDVWDGTIHVAFCGEQERWIGPSSQLEGVSKFVVGQRVRVKLCIHQPRFGWSNHNHSSIGTISSIDADGKLRIHTPAGARAWLIDPAEVEKVEEEEEVCVGDWVKVKDCVATPTYQWGDVNHNSIGVIHRAEDGELWVAFCFCERQWLCKRWEVEKVRPFRLGDRVRIRPGLVTPRWGWGEETYESKGEVVGVDANGKLRIKFRWRDGLWIGDPADIVLDDIPSLTEASNGFCS

SEQ ID NO: 23669 - protein, 56 aa, Oryza sativa
  unsure (1)..(56): unsure at all Xaa locations
  Clone ID: TF_uC-osflm202110g02b1.pep
TTILVVSHDDGSADVVTILLEVXADPNIRDEDGTITIMTAATSGQLVLVEIVFPTT

SEQ ID NO: 23670 - protein, 359 aa, Oryza sativa; identical to SEQ ID NO: 15999
  Clone ID: TF_OsC116644_2.pep

SEQ ID NO: 23671 - protein, 593 aa, Oryza sativa
  Clone ID: TF_OsC3304_1.pep
MADATAALSARSKVQAFLEAAMAGDPASLKKLAAALDEEGKGVAAVAAAVKDANKRTALHFAAREGRTHVCHFLISDLALPVDPKDDDGNLDLMKLFLSKGVDVESESDAGTPLIWAAGHGQQEAVKLLLQHDAKASLCLALNHLSISRSCGLSLTFLLKLVIAWQPNTENDDGITPLLSAVAAGSLPCLDILIQAGAHPNIRAGGATPLHIAADGGNMEIINCLLKAGSDPNACDDDGLKPIQVAALRNNREVVELLLPLTSPIPGVSSWSIDGIIEYTKSVEEKAQVKEATTQKADRLQVPQLVEVSSEAKERSLEAKSRGDDAFRNKDYLVAVDAYTQAIELNPNDATLHSNRSLCWLRAGQAERALEDARACRALRPDWAKACYREGAALRLLQRFEEAANAFYEGVQLEPENGELISTKLIDQLARDDEKIKKKTRKPKPKKTVKQHQQEPQDNSRELPASEPKAPPGWPLQPPMYLPVTPAPPPPPPAFSELEAIRAVLEESEKVQEKLDKQHAGMRDELIKKSKDLRDKEFKLPYQNPTPCTEERSNCRQCYVSNAQDPLKCAEAVKRFEACVRLARQRGNTKVAQ

SEQ ID NO: 23672 - protein, 210 aa, Oryza sativa
  Clone ID: TF_OsC10700_1.pep
MAVPGRRDDLVGDDLVDDDGIGEEYMAPSDDEEAQLPDELFRLADAAQSGNVAALRAALDNYSGNIDDPIEDGDTLLHIACLYGHLPCVQLLLERQASLECKDEEGAIPLHDACAGGFSDIVQYILNFAANIDGCVTRMLNTVDSEGDTPLHHAARGEHLGIVDLLLKAGACAKKENTYGQVPAEMADEGTEVRKLLIQEQVEASTHTSN

SEQ ID NO: 23673 - protein, 445 aa, Oryza sativa
  Clone ID: TF_OsC10700_2.pep
MAVPGRRDDLVGDDLVDDDGIGEEYMAPSDDEEAQLPDELFRLADAAQSGNVAALRAALDNYSGNIDDPIEDGDTLLHIACLYGHLPCVQLLLERQASLECKDEEGAIPLHDACAGGFSDIVQYILNFAANIDGCVTRMLNTVDSEGDTPLHHAARGEHLGIVDLLLKAGACAKKENTYGQVPAEMADEGTEVRKLKVVTVPSSNPHPCHQLPIRHSPNHDDGGGAAPSPSSRRPSSAVPRTMEDERDERVVSMDGTYDADEKPVLLFSRGDGVVRVHDLPSLKKRGDILCYDEVKTISIRSRGVVFTGDASGEVPSTGVMFAKLNADTSEIKLTEKQDDDTEDDKKKVNGSMKIPRVWLSLSDCWEKMKVSIFEFMIDTSGKKEAIYTVYSYIAIGIILSLNCFWKVWREASNSDEKPSGFKAFFITIVCMVGKKLYDSLKTTK

SEQ ID NO: 23674 - protein, 613 aa, Oryza sativa; identical to SEQ ID NO: 15828
  Clone ID: TF_OsC566_5.pep

SEQ ID NO: 23675 - protein, 468 aa, Oryza sativa; identical to SEQ ID NO: 15832
  Clone ID: TF_OsC47742_1.pep

SEQ ID NO: 23676 - protein, 1031 aa, Oryza sativa
  Clone ID: TF_OsC40453_1.pep
MAETRKFLMPNQPPDISQMVLEARKRWLRPTEICEILSNYRSFSLSPEPPNRPGSGSLFLFDRKTLRYFRKDGHNWRKKKDGKTVKEAHEKLKAGSIDVLHCYYAHVEDNEKFHRRTYWLLEEDFAHIVLVSYLEVMGVKQSFSRAKEEIMPLSGADSPSCSNSITSQNQMTPQIMDAAESPISGQISEYEGAEPAKFGAADNCPASSRYNPLIEMQQPLDGIVMDNILYPSSSAICNQVSGYHGELPPGTSNLNGHTFSHSDIARMFDDSSSGLRDISRTLFDSMPYDEHFSGYANGFMEPTLHSSFSMIEANNLEDSSLLETYTSEALYTNNLSQKEADALSFAGISSPEVNGNKYTEGSTKHPLLKQLSLDLFKIESSGLKKHDSFSRWMSKELGEVVDLGIKSSSDALWSSIEIVNAADGPSAPTNEQLDAYAVSPSLAQDQLFSILDISPSCSYIGLKTKVLVTGTFLASKENVENCKWSCMFGDVEVPAEVLADGSLRCYAPEHQSGRVPFYVTCSNRIACSEVREFEYRDSDAQYMETSHSQANGINEMHLQIRLEKLLTLGPDDNQLLVCGNEKLELINAINSLMLDEKWSDQGSPSGSKDVVTPRNQSLKKLMKEKLHCWLIYKIYDCEKGPNILGKEGQGIIHLAAALGFDWAIRPILVAGVNVNFRDAHGWTALHWAASCGRERTVGVLIANGAAAGALTDPTSEFPSGRTPADLASTNGHKGIAGFLAESALTSHLSALTLKESKDSNADEACRLTIPEDLPEMNYGQLAVQDSHAESLKDSLSAVRKSAQAAARIFQAFRVESFHRKKVVEYGDDDCGLSDEHTFSLISLQKVKQGQHDTRLHSAAVRIQNKFRGWKGRKEFMIIRQRIVKLQAHVRGHQVRKNYKKVVWSVGIVEKVILRWRRKGRGLRGFRPEKQLEGQTQIQPAKTEDEYDYLQDGRRQAEGRLQRALDRVRSMTQYPEAREQYRRLTTCVAEMQQSRMMQDEMLSEAAGADGSDFMNGLEDLICRDDPQMSAIW

SEQ ID NO: 23677 - protein, 1161 aa, Oryza sativa
  Clone ID: TF_14346031.pep
MLLMGDVDVNEADPEGNTALHWCLSGSSSTQEPRIVWLLLKNGARVFQGNKLGLTPVHSAAAKGNYKALQSLLLHAQDCVDTPSKTKETPLFLAVKNGSLDCVKLLLRSGASTKVQNLRKQRPIDVATSQDMHFILTSANVVPWNRSSHPKKIVTNKESCKEFLDDNFVDYDSDDLNESFTGLKTSASHRDFRSSNGSAQGGKSKNHCAPKQGSKFVPRPNHWLKHDYTRKIFVGGLPLSVGAEYLTEFFTAEFGPVEEAVVIGIRMGDRVQSRGFGFVKFKREEDVISAKETHHVYMLGKRVEVKDAVARGFLPAEIQKTASFRHHSQEVPKVAHHMLDGELKEEHYIRKWRPLPEKCLPSWFFIFRKWLPGFLADATERLGDRYPLSSLKGDFRAICRMELDHGTFGYPKLSDFMRSLPGICRMCVVPVGSGPATHMVLLPPVSRPKYVPLLEPFSFDHDELPESVSDHQSPRSPLTTNITEDSLRNTDSQKGDTCSESNVQSHQGDECCGSNTESQQYSASTDNGSLPSEVAFGTTDLVELVQTREHDLIAPASTRRFDFLEPVSTREPNVIETVSLNQKIVSEPLTDLLQSGHTRRVGLIDSRSTCLGDFLVERVAEIPTRHINEDSNAQIFVVGCHGQLTLHVDLKKKTSSMIQAYEEKTGINHEYQYFIYERKVIDPDDTLSCYGIEKGSTIHACSRLRGGASMTLGQYLNRYKDDLLEDVILPDGRAYPVMKPEPSGVLRSWLKCFTTAFSKGYCWGENFLLSNFKVVNGKVEVIKEAKHQIRTDFLQAHLRKIDETIRWYFCRDGERFPPYLDELCDFLKLRRGLVLSEDAKEFIDDHVCFMNSYERGMLGIKLYKKLNSLSPGQKLKLLRALGKIAWDLSLMDDVDKLPLLCDIIVQAKAEGKPFPRTILGGFRLLRDYFAHIPEHQYDKATKPWKRKFRIYIGIELMIPVHLKKLLPRIIKCFLDAKIDIKRELLSSHTMRCSICYSAGTSSTVPRFSATPETRQTAGGITKSINELGTSSKAVASSTTPQTGHATKGTIGTSNELGTSSKAVGSSTTPQTGQDTKRTTRSSNELGTLSTAVGFSTTPQTGQPTKGTIRSSNELETSSTAQRNTWSTGQAARNLFAHSSGAPSAVQQQSQDDWETVQKRKG

SEQ ID NO: 23678 - protein, 450 aa, Oryza sativa; identical to SEQ ID NO: 15840
  Clone ID: TF_OsC286871_1.pep

SEQ ID NO: 23679 - protein, 292 aa, Oryza sativa
  unsure (1)..(292): unsure at all Xaa locations
  Clone ID: TF_OsC9959_2.pep
MDTGMRVALHRQVSSGSLKESGELRRQSSLESPRTGRAATRFLFGRQSSMDPNRRRGRSQSPVGLAEDLTVPDNLDATMQLLFLACHGXDAAGVEALLRGGVDVNSINLDGRTALHIASCEGHPDVVRVLLTWKANIDARDRWGSTAVADAKCYGHTEVYNLLKARGAKIPRNRRTPMMVSNPGDVPEYELNPSELQFKKGDXXWSRGVYQVAKWNGTKVHVKILDRECYCDQEVINSFRHELXTVLEKVRHPNVVQFVGAVTQNIPMMIISEYLPNGELSSCISRKGKLHG

SEQ ID NO: 23680 - protein, 495 aa, Oryza sativa
  unsure (1)..(495): unsure at all Xaa locations
  Clone ID: TF_OsC238283_1.pep
IEETHKSLSMDXLKERINGQGFSGVTFDVEGRRXMVFRELVXGHAADQPDTPPGAXILDHPGPRSPSAGALTSSPCDVGGFAATGAATAPGAVIPVSSFRYEVFLLLLHILHAGRVSMLRLKGEPGPGCGDRGCSHTLCFAAFVCALDAVAAARSLGVVELDHLTQKQLAGMVEKASIEDVMKVLMASRKQDLHQLWTTCSHLVAKSGLPPEVLAKHLPIDVVAKIDELRLKSMSRRSPFLSHHHHHPHAAAAGIEASSAAELDDHHKIRRMRRALDSSDVELVKLMVMGEGLNLDDALALHYAVENCSREVVKALLELGAADVNHPAGPAGKTPLHVAAEMVCPDMVAVLLDHHADPNVRTVDGVTPLDILRTLTSDFLFKGAVPGLAHIEPNKLRLCLELVQSAAMVMSREDAQTAAVNAAPIYGESPGGGGGGGVYNASGTSSSMVNLSLDNRMVYLNLGMDAQFGKMNDGGDGDDGGSRGPSSLFSPHGFP

SEQ ID NO: 23681 - protein, 728 aa, Oryza sativa
  unsure (1)..(728): unsure at all Xaa locations
  Clone ID: TF_OsC23574_1.pep
MFFTRLDDSPMFRKQIQSLEEGSELLRERCLRFHKGCRKYTEGLGEAYDGDIAFASSLEAFGGGHNDPISVAFGGPVMTKFTIGREXAMDQIDWIEKITGVIASLLSSQSPERRLLSSPKVARQNLTIPLVKTSIAGKELWKRTALSNIEAKKRFEFLEAVSGTMDAHLRYFKQVLAYAQQSRERSNYEQAALVERMQEFKRQIDRESRWSPNGINDSPNGDGIQAIGRSSHKMIEAVMQSASKGKAHISAWKFMSYFKSGYTNQRSSAPSEHGSGLLSRWFSSHYHGGVHDEKSVARHTVNLLTSTIKADADQSDLRFCFRIISPTKNYTLQRLLSSPKGSGHNRTASESSSFSSSTELDHSISEDCMLERNSGSGYFDHSGRAIQHHRTSMKPDKPIDLLRKVVGNNICADCGAAEPDWASLNLGILLCIECSGVHRNLGVHISKVRSLTLDVRVWEPSVINLFQSLGNTFANTIWEDMLPSSSSVDHGDNSRADGLENTSHNLIFSKPKHSDHIAVKEKFIHAKYAERDYVRKLNMDDSLVAQQMWENVSSNNKKGVYSLIVGSNADVNLTYGQTSFNSALTLGKALLLQEQPTSPSDGSSRCFDRSSLERISPRDSLSLASTSARIDELDDCVEGLSLLHLACRVADVGMVELLLQYGANVNSADSRGRTPLHHSILKGRHMFAKLLLSRESTDRDGRTALQYAIDSGTIDDEEILVLLEDPSR

SEQ ID NO: 23682 - protein, 525 aa, Oryza sativa; identical to SEQ ID NO: 15844
  Clone ID: TF_OsC199536_1.pep

SEQ ID NO: 23683 - protein, 450 aa, Oryza sativa
  Clone ID: TF_OsC506_1.pep
MGHGVSCARTGDEHDFFRAAQLGDLDALAALLAADPSLARRATLYDRLSVLHIAAANGRIEVLSMFLDRGAPPDAVNRHKQTPLMLAAMHGKIDCVLKLLQADANILMFDSVHARTCLHHAAYYGHVDCLQAILAAAQTTPVADSWGFARFVNVRDDHGATPLHLAARQGRPGCVQVLLENGAIVSALTGSYGFPGSTSLHLAARSGNLDCIRKLLAWGADRLQRDSAGRIPYSVALKRNHGACAALLNPTSAEPMVWPSPLKFISELEPEAKALLEAALMEANREREKKILNGTKYSLPSPSPGDDSADDDACSEVSDTELCCICFDQACTIEVQDCGHQMCAPCTLALCCHNKPNPTTLTPPSPACPFCRGSISRLVVAQTRSACDPDKPSSLQLTRKRSRRSHNLSEGSSSFKGLPSAMGSFSKLGRGSSRMADSDSSNLDKPEHDL

SEQ ID NO: 23684 - protein, 127 aa, Oryza sativa
  Clone ID: TF_OsC35544_3.pep
RPVVRRPTDDGTSGTNGYLGRLEGCFLSSSSPCPSHPIDLLDMGKGKARDAVLARKKDGIGLLHAAACQGHLTVCKFLMEELGGLPCLRLVMIKDAHSSPPCCWHRSPSISSSFLYILPIVLLYKAL

SEQ ID NO: 23685 - protein, 494 aa, Oryza sativa
  Clone ID: TF_OsC3119_1.pep
MSSEDSLKSLSLDYLNLLINGQAFSDVAFSVEGRLVHAHRCVLAARSLFFRKLFCGLDPNHQPPPPPPPLNWPMAGGGGGGSGGGGRGGAGGGGGAPATPELVIPVSSIRYEVLVLVLQFLYSGQASVAAPKSGPLPGCGARGCWHTRCGAAVDLALDTLAAARSFGVEQLALLVQKQLESMVKEASVDDVMKVLMASRKFEMQELWATCSHLVARSGLSADLLAKHLPIDVVAKIEEIRAKSPLAAVAAPRSPFLTHHYLPMNPASSAADRDNKIRRMRRALDAADIELVKLMVMGEGLDLDDALAVHYAVQHCNRDVVKALLELGAADVNSRAGPTGKTALHLAAEMVSPDMVSVLLDHHADPNSRTLDGVTPLDVLRSLTSEFLFKGAVPGLTHIEPNKLRLCLELVQSAVMVTTRDDGAPVTGGAEAGGSDGGNFPRSDADDSLVSLTMNSTLMYQGQEMAAAVAAGEGRKSNNGRGSPPPAMYFPNGFA

SEQ ID NO: 23686 - protein, 633 aa, Oryza sativa; identical to SEQ ID NO: 15855
  Clone ID: TF_OsC5805_1.pep

SEQ ID NO: 23687 - protein, 1667 aa, Oryza sativa
  Clone ID: TF_OsC1528_2163.pep
MDTPLHCAARAGHAGTVTILVNLAQDCEENILGCQNAAGDTALHMAARHGHGATVEALVVARAKATVLVSMKVVESVDQFPKRSILMASSSSTAATNPFQGHPISEKLGKANHALWKVQVSAAVRGARLQGHLTGATKRPPAEIAVTKDGATKKEPNPAHEDWEATDQQVLGYLLSSLTREVLMQVATCDTAAEVWSAIEQMYSTHTRARAINTRFALTNTKKGNMSTPEYFAKMKSLGDEMATAGGRPIDEEELIQYIITGLGEGYSEVVSAVCARVEPISVSDLYSQVLNFEARQAIYRGAQEVTVNVANRGGFSHGGRGNSNGGQGGSRGGGGGGHGRGNGGGGRGRGRTPGGVDKRPICQVCFKRGHTAADCWYRYDEDYVPDAKHVAAAAVNSYGVDTNWYIDTGATDHVTGELDKLTMKEKYNGGEQIHTASGAGHIYISRDVVFDENIFPFTELHANASARLRSEIDILTPELLGPIRSVGNEQCMHPVTNPLSADVSAALSNRANEPHRDGAVHPADAEDPPATPPLDASFGPEPDRVVHHSPAATSSGRHPGPTPGSVPRGVASSLAEETAEDSVSQAVQEQESQVVQEQEQSSPAQEHAQAVTDETNTLQHADVTDTGSEAPAGPRTRLQSGVRKEKVYTDGTIKYKHSWFTASGEPTNDLEALKDKNWKLAMDSEYDALVKNKTWHLVPPQRGRNIIGCKWVYKIKRKADGTLDRYKARLVAKGFKQRYGIDYEDTFSPVVKAATIRIILSLAVSKGWSLRQLDVQNAFLHGYLEEEVYMLQPPGFEDPTKPHHVCKLDKALYGLKQAPRAWFSRLSKKLMDLGFKGSKADTSLFFLNKGDITMFVLVYVDDIIVASSSEKATAALLQNLKGEFALKDLGELHYFLGIEVSKVQNGIVLNQDKYANDLLKKVGMIDCKPANTPLSVSEKLSLHEGSLLGPEDASHYRSVVGALQYLTLTRPDIAFSVNKVCQFLHAPTTVHWIAVKRILRYLKQCTRLGLEIHKSGSTLVSGFSDADWAGCLDDRRSTGGFAIFLGSNLVSWNARKQATVSRSSTESEYKAIANATAEIMWVQTLLAELEIKSPKAAKIWCDNLGAKYLSANPVFHARTKHIEVDYHFVRERLLSRFINLGFGCSQLRRTLYRHDGGCSHHIYINTKATHRISAIVSTQTNSQTELNKAGVSPLYLAVMSRSQAQNKNVFVNSIDKFVSLAEMVHLLLQWKPELASQVDCNGSTPLHFAASDGNRKIVHAILAIVPTGTVYMKDSDGLSALHVAARLGHANVVKQLIGICPDAVELRDGHGETFLHTAVREKQSSIVSLAIKKHKQVGGLLDAQDGVGNTPLHIAVVAGSPDIVNALLHKGKVQSDVLNDDGHSPLDLASTSTNLFNMVSFVVILVAFGAQGRPQRNDHLKPWSGRDIGKGIERTTDSLAVVAVLIATVAFAAGFNMPGSYGDDGTANLKGRFSFKWFMVLDTVAVAASVVAVILLVYGKASRSAGSWKSFVAALHFIWVSLVSLILAFFAAFRATMRTSRAVSIVFMVIYVCLIVLVVNVGTWVEPVTTMRIFWRFVWRSHRTNAVKRQYPLAVASIYNWLLFFHITYIMFAGLGVVHNHSNSDRGGLSSTLEPEPYLTCPCTYVIRALPQYFSYILRVLFLLCY

SEQ ID NO: 23688 - protein, 281 aa, Oryza sativa; identical to SEQ ID NO: 15857
  Clone ID: TF_OsC35544_1.pep

SEQ ID NO: 23689 - protein, 323 aa, Oryza sativa
  Clone ID: TF_OsC8940_1.pep
PVLVLSISGKRMDQAGRKKYVKQVTGRHNDTELHLAAQRGDLEAVRQIIAEINAQMTGTGEEFDSEVAEIRAAVVNEPNEVEETALLIAAEKGFLDIVVELLKHSDKESLTRKNKSGFDVLHVAAKEGHRDIVKVLLDHDPSLGKTFGQSNVTPLITAAIRGHIEVVNLLLERVSGLVELSKGNGKNALHFAGRQGHVEIVKALLDADPQLARRTDKKGQTALHMAVKGTSAAVVRALVNADPAIVMLPDRNGNLALHVATRKKRSEIVNELLLLPDMNVNALTRDRKTAFDIAEGLPLSEESAEIKDCLSRAGAVRANDLNQ

SEQ ID NO: 23690 - protein, 656 aa, Oryza sativa
  unsure (1)..(656): unsure at all Xaa locations
  Clone ID: TF_OsC50099_1.pep
QGVWFFSVNLIHYTSPLTSADSTSANHGLNQVNANHFGALKHQGDQTQSLLASDVDSQSDQFISSSVKSPMDGNTSIPNEVPARQNSLFHRASXPVTNERLLEINEISPEWAYSTETTKVVVIGNFYEQYKHLAGSAMFGVFGEQCVAGDIVQTGVYRFMVGPHTPGKVDFYLTLDGKTPISEICSFTYHVMHGSSLEARLPPSEDDYKRTNLKMQMRLARLLFATNKKKIAPKLLVEGTKVANLMSALPEKEWMDLWNILSDPEGTYVPVTESLLELVLRNRLQEWLVEMVMEGHKSTGRDDLGQGAIHLCSFLGYTWAIRLFSLSGFSLDFRDSSGWTALHWAAYHGRERMVATLLSAGANPSLVTDPTPESPAGLTAADLAARQGYDGLAAYLAEKGLTAHFEAMSLSKDTEQSPSKTRLTKLQSEKFEHLSEQELCLKESLAAYRNAADAASNIQAALRERTLKLQTKAIQLANPEIEASEIVAAMKIQHAFRNYNRKKAMRAAARIQSHFRTWKMRRNFINMRRQVIRIQAAYRGHQVRRQYRKVIWSVGIVEKAILRWRKKRKGLRGIASGMPVVMTVDAEAEPASTAEEDFFQAGRQQAEDRFNRSVVRVQALFRSYKAQQEYRRMKIAHEEAKVIFFKTFSNNCWHVP

SEQ ID NO: 23691 - protein, 615 aa, Oryza sativa; identical to SEQ ID NO: 15861
  Clone ID: TF_OsC47045_1.pep

SEQ ID NO: 23692 - protein, 855 aa, Oryza sativa; identical to SEQ ID NO: 15854
  Clone ID: TF_OsC168710_1.pep

SEQ ID NO: 23693 - protein, 300 aa, Oryza sativa; identical to SEQ ID NO: 15868
  Clone ID: TF_OsC116644_1.pep

SEQ ID NO: 23694 - protein, 1029 aa, Oryza sativa; identical to SEQ ID NO: 15869
  Clone ID: TF_OsC60670_1.pep

SEQ ID NO: 23695 - protein, 135 aa, Oryza sativa
  Clone ID: TF_LIB4506-035-R1-K1-H9.pep
TRPDGSSRCFDRSSLERISPRDSLSLASTSARIDELDDCVEGLSLLHLACRVADVGMVELLLQYGANVNSADSRGRTPLHHSILKGRHMFAKLLLSRGADSQATDRDGRTALQYAIDSGTIDDEEILVLLEDPSR

SEQ ID NO: 23696 - protein, 58 aa, Oryza sativa
  Clone ID: TF_jC-osflLIB3479017f08a1.pep
TKIQNRGVRKLPSMRYAAEIRNPTKKTPIWLGTLYSAEVAARTYYDSYRSLRGPTERT

SEQ ID NO: 23697 - protein, 147 aa, Oryza sativa
  unsure (1)..(147): unsure at all Xaa locations
  Clone ID: TF_uC-osflcyp004g06b1.pep
RKGIRQRTWGKWADQILGPXSKGVRVWLATYNTVEEADTAYDAKARKNRVMNAKVNFPDDPNVAQKLHLKQNAVMHDKLASPLKTCGDDAFFQLNSSYNDLXAMLAKAPAKSAETAELCPXVKPVAFTVKFLINMLFDSSXNSFGSS

SEQ ID NO: 23698 - protein, 277 aa, Oryza sativa; identical to SEQ ID NO: 16006
  Clone ID: TF_OsC172723_1.pep

SEQ ID NO: 23699 - protein, 127 aa, Oryza sativa
  Clone ID: TF_uC-osflM202047f04b1.pep
MEAAGIHAPTTTTSSDSGSCVTNGTREKREISKHKQLKRKRSTSPAPPPGCGGGQGQEAAVETDADAGAAGEEESSSVAAAGAGEGERKRGDAGRHPSYRGVRRRSWGKWVSEIREPRKKSRMWLGT

SEQ ID NO: 23700 - protein, 742 aa, Oryza sativa
  Clone ID: TF_OsC75926_1.pep
MKNGARKDAGGGGGGVFVPCVDIKSFVLSLAFLTVFVALWQLQPYGSLLTAARSTASVSASPCSLIATPAAAAASAGVIRSENSTADTAKTAPAAVASAVPARLARAARPARVEDPNKRELRPYGSAAALFVQMGAYRGGPRTFAIVGLASKPTHVFSNPYFKCEWLPNPTAGNPSPRPVRTKAYKMLPDWGYGRVYTVVVVNCTFPSNPNADNAGGKLLVHAYYSTTSRRYERFVALEEAPGSYDESRFSPPFPYDYLYCGSSLYGNLSASRMREWVAYHAHFFGPRSHFVFHDAGGISPEVKAVLDPWVRAGRLTVQDIRAQAEYDGYYYNQFLVVNDCLHRYRHAANWTFFFDVDEYIYLPNGQTLDQVLGKLSGYSQFTIEQNPMSSKLCVQDPSKDYSREWGFEKLVFRNSITKVRRDRKYAIQARNAYSAGVHMSQNVYGRTTHKTESLIRYYHYHNSINVMGEPCREFVPVPVNGSKLMFEGIPYVYDDKMKRLAGQIKREELGGLEEKEGEPVVGERVVEAALGGGAGGGRVEGGVDVGEEGVGDGDVDEEEEGEREDEGGGDAGEERAVGDDDDELRRRWLEGESGGGGGRAPLTSPASRRRRCPRPDPASPGRIWPPRRHSDDDDPAVFYLRGRSARLNFPEEISLLASPSEGGGAGEPREPDGGTLSAASIRKKAIEVGSHVDALQTGMMVAPTHHREQQKHHHHPHLQPHGEEQHHHEDWISSKYEDIHT

SEQ ID NO: 23701 - protein, 129 aa, Oryza sativa
  unsure (1)..(129): unsure at all Xaa locations
  Clone ID: TF_uC-osroM202039a06b1.pep
LISGHVRRSNHLRVHPAVGRCGGEEEEDDDDVVVVVPPPAAARFVVRAAAKAAPPTADGMLTTKLVQHDGPTARSAKHKRKNQYRGIRQRPWGKWAAEIRDPXKGGRVWLGTYNTAEEAARAYDAEARK

SEQ ID NO: 23702 - protein, 95 aa, Oryza sativa
  unsure (1)..(95): unsure at all Xaa locations
  Clone ID: TF_uC-osroM202016h11a1.pep
SPDSGVGEGGGAGAAGVGTGQHLRGVRKRPRGRYAEEIRDPAKKSRVWLGTXHTGEEAARSYDAVAREYRGAKAKTNLPYPNGAPAVRVNSGSSN

SEQ ID NO: 23703 - protein, 310 aa, Oryza sativa
  Clone ID: TF_OsC337824_1.pep
MEDEVVGGGGGSHGVKLEWRRPTAAIGRASDRALGGGNNRNSSLSCQQGSSWAQAAERRPGERRRWGKQRHGQCPARELLPAAVAVELEVGPGVMEVDTVDSEPRPTPAPHPPSLRVLAVNPRPISSLFARGLAAGASVERGSPPAGCRMPRLLLWTAAVVGELARAALERRDAEVGGRHRRKKREMLWVLEDAGWRRREAQTVGCEELGRALLELQGATDQDFDAVTVQPRHGTAVPGPGRRASGHMASIPRGAWNRTRFWLGSFGRTNYVALAYYQAAYRFRGNTAWLNLPDNAASRGLLHASVDAKL

SEQ ID NO: 23704 - protein, 113 aa, Oryza sativa
  Clone ID: TF_OsC1517_1590.pep
IDLVSTACLKKKEVQTKSSKRKRNWLDKMHKSTEKGSKKGGKKKEKGSKEQGTIKKGGKKKEKEATVQDSAAVQNIYPNTSLPMEELSEPYMAINTFSQILTGPITDDVLADF

SEQ ID NO: 23705 - protein, 409 aa, Oryza sativa
  Clone ID: TF_OsC331943_1.pep
YPYPRSDHREAAAGGGSSSTAASAASKVIVDDNDSYSDPDATDSDSDSDSADAGDHDISSRSSRTNAAAASPGGGRWTSGTASSRSGNGSARSPPRRRPGPPTTPSRCRYRASLSRGGAGASSPAVAIAPSPARVKIQLPAPRPSPSSKEAPPPSSSASAATPPPLNPPPFVVDTFLGEDDHLAADEDDRFGFGLADLGHLPLPRREPRRRLADARVVQRHEAPAARRVVGVLPALVVVVHVAPVPVAPPPPTPLLVAAASSLLLAVGVVVVVAVVVILVAAAATAAPRLEPVPAAPAAVIDRSGLSQSNARRRSHLPHPLPLSALPETRTHPLSRVHPKNHAAPPSHQLHSDASSQPLRPRIAPPSISASRASLHAACHQIGVTVADIDLAPLSESQTSAINPRLSGV

SEQ ID NO: 23706 - protein, 192 aa, Oryza sativa
  Clone ID: TF_OsC9802_9.pep
QLQVTGFAFYSLFSSTCNLYFFLMFGPSFPPLPACQFPQARHPGRSVTQPPDHLHLTFCWMLEQSAQKLSTDEARRPLDLAAACGVGASGCRRSESCARTRASGSARLPPPCHQGPRHPRPLQLTGDRARASPLGFGSPQRRESHTALATAMDDPDPAAVAAAPRQKATGLDRDSRIRRLRHRRPCRRKEQR

SEQ ID NO: 23707 - protein, 218 aa, Oryza sativa
  Clone ID: TF_OsC778_1.pep
MEVEEAAYRTVWSEPPKRPAGRTKFRETRHPVYRGVRRRGGRPGAAGRWVCEVRVPGARGSRLWLGTFATAEAAARAHDAAALALRGRAACLNFADSAWRMPPVPASAALAGARGVRDAVAVAVEAFQRQSAAPSSPAETFANDGDEEEDNKDVLPVAAAEVFDAGAFELDDGFRFGGMDAGSYYASLAQGLLVEPPAAGAWWEDGELAGSDMPLWSY

SEQ ID NO: 23708 - protein, 91 aa, Oryza sativa
  Clone ID: TF_uC-osrocyp021d02b1.pep
SCGRTRGLCTMAIVGFDGPAAKLAKRKRKNQFRGIRQRPWGKWAAEIRDPRMGVRVWLGSFNSAVEAVRAYDAEALKICGKKAKVNFTEAS

SEQ ID NO: 23709 - protein, 189 aa, Oryza sativa
  Clone ID: TF_OsC18518_1.pep
MELDMGAGGGGGVVGGGRAEAHYRGVRKRPWGRYAAEIRDPWKKTRVWLGTYDTPVEAALAYDRAAVALRGVKARTNFGSGSSGGGGVGGHGHGHSHAQLPQLHHRMHPPRPPQGPGHFGGLDISHPSPWHYVYFPARVQAMAPAAAGHVAAHVAASLPSTTLELRTGPSAGELPFDLNEPPPALLFGS

SEQ ID NO: 23710 - protein, 494 aa, Oryza sativa
  unsure (1)..(494): unsure at all Xaa locations
  Clone ID: TF_OsC917_1.pep
MDMDTSHHYPWLNFSLAHHCEMEEEERGAAAELAAIAGAAPPPKLEDFLGGGCNGGSSGGACPPVQTTAPTAAELYESELKFLAAGFQLSGAAGAAPPVPALLPAAALEQTDETKQLALPPQAAVAPPPEQKKAVDSFGQRTSIYRGVTRHRWTGRYEAHLWDNSCRREGQSRKGRQGGYDKEEKAARAYDLAALKYWGPSTTTNFPVAEYEKELEEMKHMTRQEFVASLRRKSSGFSRGASIYRGVTRHHQHGRWQARIGRVAGNKDLYLGTFGTEEEAAEAYXDIRGDQVPVRLNAVTNFEIGRYNVESIISSNLPIGSMAGNRSTKAGLELAPSSSADAIAATEANHTGVAPPSTLAFTALPMKYDQADYLSYLALQHHQQGNLQGLGFGLYSSGVNLDFANANGNGAMSNCYTNVSLHEQQQQHQHQHQQEQQQDQQDDQSQSSNNSCGSIPFATPIAFSGSYESSMTAAGTFGYYPNVAAFQTPIFGME

SEQ ID NO: 23711 - protein, 379 aa, Oryza sativa; identical to SEQ ID NO: 16075
  Clone ID: TF_OsC302166_1.pep

SEQ ID NO: 23712 - protein, 247 aa, Oryza sativa
  Clone ID: TF_OsC319797_1.pep
MAAIDLYKYQLSSSSSSSSSDQELMKALEPFIRSASPTSTSTSTSTSTPLFYSSSSISTTTTTPFSYSSPLPQESYYLPASSSYAAIVPPPTTTTNTTTSFSELPPLPPSSSSFASPANAAAVGLAHLGPEQIQQIQVQFLMQQQLQQRGMAASASASAAASYLGPRAQPMKQAGAAAAAAAGGKMYRGVRQRHWGKWVAEIRLPKNRTRLWLGTFDTAEDAALAYDKEALRLRGDYVLLTSALFAL

SEQ ID NO: 23713 - protein, 509 aa, Oryza sativa; identical to SEQ ID NO: 16107
  Clone ID: TF_OsC48348_2.pep

SEQ ID NO: 23714 - protein, 293 aa, Oryza sativa
  Clone ID: TF_OsC120_1.pep
MEAAAIHAPTTTTSSDSGSCVTNGTREKREISKHKQLKRKRSTSPAPPPGCGGGQGQEAAVETDADAGAAGRGGGAGEEESSSCGGAGAGEGERKRGDAGRHPSYRGVRRRSWGKWVSEIREPRKKSRIWLGTFPTAEMAARAHDVAALAIKGRAAHLNFPSLAHTLPRPASTSPSDIQAAAALAAAAAATDQCESSSSAVAAATATDAEAAESTSSAAASPCAATSSVEENALFDLPDLLLDLSDGLWCSPVWTTAPADQYDAGDDGDDAAAPLLWAEQCWMDAPAAPVQPD

SEQ ID NO: 23715 - protein, 344 aa, Oryza sativa; identical to SEQ ID NO: 16108
  Clone ID: TF_OsC251239_1.pep

SEQ ID NO: 23716 - protein, 150 aa, Oryza sativa
  unsure (1)..(150): unsure at all Xaa locations
  Clone ID: TF_OsC2721_1.pep
LGSYDTEEKXARSYDVAALKYWGQNTKLNFSVSEYERELEDIRDMSREECVTYLRRRSSCFSRGASIYRGVTRRQKDGRWQARIGLVAGTRDIYLGTFKTEEEAAEAYDIAAIEIRGKNAVTNFDRSNYMEKGMHCIEGAGLKLLASKPE

SEQ ID NO: 23717 - protein, 329 aa, Oryza sativa; identical to SEQ ID NO: 16088
  Clone ID: TF_OsC156_1.pep

SEQ ID NO: 23718 - protein, 550 aa, Oryza sativa
  Clone ID: TF_OsC21519_1.pep
MSLILSRRRLAAAVRRSGPAALASRWMHTPPFATVSPQEISGSSPAEVQNFVQGSWTTSGNWNWLVDPLNGEKFIKVAEVQEAEIKPFVESLSNCPKHGLHNPLKAPERYLMYGDISAKAANMLGQPVVSDFFAKLIQRVSPKSYQQALAEVQVSQKFLENFCGDQVRFLARSFAVPGNHLGQSSNGYRWPYGPVAIITPFNFPLEIPLLQLMGALYMGNKPVLKVDSKVSIVMDQMLRLLHACGMPAEDVDFINSDGITMNKLLLEANPKMTLFTGSSRIAEKLAADLKGKIKLEDAGFDWKILGPDVQEVDYIAWVCDQDAYACSGQKCSAQSILFMHKNWSSSGLLDKMKSLSERRKLEDLTIGPVLTVTTSSMIEHMKNLLKIPGSKVLFGGEPLENHSIPEIYGAFKPTAVFVPLSEILKSGNFELVTREIFGPFQVVTEYSDDELELVLEACERMNAHLTAAVVSNDPLFLQEVLGRSVNGTTYAGIRARTTGAPQNHWFGPAGDPRGAGIGTPEAIKLVWSCHREIIYDIGPLPKNRALPSAT

SEQ ID NO: 23719 - protein, 291 aa, Oryza sativa; identical to SEQ ID NO: 16092
  Clone ID: TF_OsC4061_1.pep

SEQ ID NO: 23720 - protein, 622 aa, Oryza sativa
  unsure (1)..(622): unsure at all Xaa locations
  Clone ID: TF_OsC70902_1.pep
MASADNWLGFSLSGQGNPQHHQNGSPSAAGDAAIDISGSGDFYGLPTPDAHHIGMAGEDAPYGVMDAFNRGTHETQDWAMRGLDYGGGSSDLSMLVGSSGGGRRTVAGDGVGEAPKLENFLDGNSFSDVHGQAAGGYLYSGSAVGGAGGYSNGGCGGGTIELSMIKTWLRSNQSQQQPSPPQHADQGMSTDASASSYACSDVLVGSCGGGGAGGTASSHGQGLALSMSTGSVAAAGGGGAVVAAESSSSENKRVDSPGGAVDGAVPRKSIDTFGQRTSIYRXHRWTGRYEAHLWDNSCRREGQSRKGRQXSNYEKELEEMKHMTRQEYIAHLRRNSSGFSRGASKYRGVTRHHQHGRWQARIGRVAGNKDIYLGTFSTEEEAAEAYDIAAIKFRGLNAVTNFDMSRYDVKSILDSSTLPVGGAARRLKEAEVAAAAAGGGVIVSHLADGGVGGYYYGCGPTIAFGGGGQQPAPLAVHYPSYGQASGWCKPEQDAVIAAGHCATDLQHLHLGSGGAAATHNFFQQPASSSAVYGNGGGGGGNAFMMPMGAVVAAADHGGQSSAYGGGDESGRLVVGYDGVVDPYAAMRSAYELSQGSSSSSVSVAKAANGYPDNWSSPFNGMG

SEQ ID NO: 23721 - protein, 342 aa, Oryza sativa; identical to SEQ ID NO: 16097
  Clone ID: TF_OsC338711_1.pep

SEQ ID NO: 23722 - protein, 190 aa, Oryza sativa; identical to SEQ ID NO: 16099
  Clone ID: TF_OsC19805_1.pep

SEQ ID NO: 23723 - protein, 274 aa, Oryza sativa
  Clone ID: TF_OsC143164_2.pep
MVPRVERGGGGFHLPNSEREDSLFMRALISVVSGDTTVPTLLPEPTMATVVAGAATCARCGVDGCIGVDCEVVVLAAAAGSSCSDEEDEGECTTGAVAIGGVTGGVGKMMPRRRSGGEGSRYRGVRRLPWGKWAAEILDPRRAVCKWLGTFDTAEDAARAYDVAALEFRGQRAKLNFPASTAAQQPRPLFHHNFCENCGSNASSPVHAPEHARTAAAAKDQEIWDGSTGDHDARRRQLLVHAMIDDLSPISLLDRCFISCSILNRILKPLLLFS

SEQ ID NO: 23724 - protein, 487 aa, Oryza sativa
  Clone ID: TF_OsC183204_1.pep
MAKRSSPDPASSSPSASSSPSSPSSSSSEDSSSPMSMPCKRRARPRTDKSTGKAKRPKKESKEVVDPSSNGGGGGGGGKRSSIYRGVTRHRWTGRFEAHLWDKNCSTSLQNKKKGRQGAYDSEEAAARAYDLAALKYWGPETVLNFPLEEYEKERSEMEGVSREEYLASLRRRSSGFSRGVSKYRGVARHHHNGRWEARIGRVLGNKYLYLGTFDILYNLSQNYRFKNLFYKNTDSVASFITKLQLSDTEAKLPADTQEEAAKAYDLAAIEYRGANAVTNFDISCYLDQPQLLAQLQQEPQLLAQLQQELQVVPALHEEPQDDDRSENAVQELSSSEANTSSDNNEPLAADDSAECMNEPLPIVDGIEESLWSPCLDYELDTMPGAYFSNSMNFSEWFNDEAFEGGMEYLFEGCSSITEGGNSMDNSGVTEYNLFEECNMLEKDISDFLDKDISDFLDKDISISDRERISPQANNISCPQKMISVCN

SEQ ID NO: 23725 - protein, 125 aa, Oryza sativa
  Clone ID: TF_uC-osflcyp034f01b1.pep
MAEHFSHAGMYIGYTADAAASSSSSSSSSSSSSSEMLRFDTGWPDETPAPSSVAGRRRSAGGDHRQGRGQTEAAAAFIGVRRRPWGRFAAEIRDSTRNGARVWIGTFDSAEAAAMAYDQAALSRV

SEQ ID NO: 23726 - protein, 429 aa, Oryza sativa
  Clone ID: TF_OsC1760_6.pep
MKKLEKELKHQELLKNEQYQMKLQKCNERRLALIKSSLDIVVAIGLLQLAPKKVPRALLYPSPPSPSPLVVGNALASWDLAPPSLQPCAAAVPVVAVAREGRHRGRRRVSVLVRPFAVAEDRRSTVAAVNPKSVAASSSSSSPSVDLPPLFWSPATASHLDHGHVSVALYTCELPLPPSAETNTKGNGEAVRRSDERRRVGTPATAPPAATHTTDMEYYEQEEYATVTSAPPKRPAGRTKFRETRHPVYRGVRRRGPAGRWVCEVREPNKKSRIWLGTFATAEAAARAHDVAALALRGRGACLNFADSARLLRVDPATLATPDDIRRAAIELAESCPHDAAAAAASSSAAAVEASAAAAPAMMMQYQDDMAATPSSYDYAYYGNMDFDQPSYYYDGMGGGGEYQSWQMDGDDDGGAGGYGGGDVTLWSY

SEQ ID NO: 23727 - protein, 253 aa, Oryza sativa
  Clone ID: TF_12581491.pep
MEKNTAASGQLMTSSAEATPSSPKRPAGRTKFQETRHLVFRGVRWRGCAGRWVCKVRVPGSRGDRFWIGTSDTAEETARTHDAAMLALCGASASLNFADSAWLLHVPRAPVVSGLRPPAARCATRCLQGHRRVPAPGRGSTATATATSGDAASTAPPSAPVLSAKQCEFIFLSSLDCWMLMSKLISSSRAKGSLCLRKNPISFCMVTNSYTALLLEYIILQMNSMIVLIHELSKYQVFLLLTMITHHLFQWRR

SEQ ID NO: 23728 - protein, 144 aa, Oryza sativa
  Clone ID: TF_uC-osrocyp005g12b1.pep
VRDMNGLKLAGFSTTKLGLGSSRKRTTRRRGIRQRPWGKWAAAITDPSKGMRGWLGTFGTGEDGVMAYDMKARRIRRKKAKVNLRDTVADGPKRPRRSSAKHSPHKQKARSSAPSTASLNASDAKSKTNNNRVSSGGSRTDTTD

SEQ ID NO: 23729 - protein, 273 aa, Oryza sativa
  Clone ID: TF_OsC272545_1.pep
MDASLRTLPPASFPGEVRSAVSSLLLSPGGSALDTVFSHLPPPVTIPPLGSSVYYRQSELLRHFAASQAAQAQSATAAASSSSAAAAGLDDGAPRKLYRGVRQRQWGKWVAEIRLPQNRVRVWLGTYDSPETAAHAYDRAAFKLRGEYARLNFPGVMDGRDCPDNLRQLRDAVDAKIQAIRVRMARKRARARRQREESKKSQRAEDAKAATPSRPVASERAASETTTTTTTTSSSYGSPDGVLSMSAASVDGDCPLERMPSFDPELIWEMLNF

SEQ ID NO: 23730 - protein, 466 aa, Oryza sativa
  Clone ID: TF_OsC44972_1.pep
MDMDMSSAYPHHWLSFSLANNYHHGLLEALSTTSAPPLGEEGPAEGAPKMEDFLGGLGGGGGAVAAAPAAAPEDQLSCGELGSIAAGFLRRYPAPENAGGVTIAMATDAAAELADPARRTAETFGQRTSIYRGVTRHRWTGRYEAHLWDNSCRREGQSRKGRQGGYDKEEKAARAYDLAALKYWGPTTTTNFPVANYETELEEMKSMTRQEFIASLRRKSSGFSRGASIYRGVTRHHQHGRWQARIGRVAGNKDLYLGTFSTQEEAAEAYDIAAIKFRGLNAVTNFDMSRYDVDSILNSDLPVGGGAATRASKFPSDPSLPLPSPAMPPSEKDYWSLLALHYHHHQQQQQQQQFPASAFDTYGCSSGVNVDFTMGTSSHSGSNSNSSSSSAIWGTAAGAAMGRQQNGGSSNKQSNSYSGNNIPYAAAAAMTSGSALYGGSTGSNGTWVASNTSTAPHFYNYLFGME

SEQ ID NO: 23731 - protein, 238 aa, Oryza sativa
  Clone ID: TF_OsC2061_1.pep
MCGIKQEMSGESSGSPCSSASAERQHQTVWTAPPKRPAGRTKFRETRHPVFRGVRRRGNAGRWVCEVRVPGRRGCRLWLGTFDTAEGAARAHDAAMLAINAGGGGGGGACCLNFADSAWLLAVPRSYRTLADVRHAVAEAVEDFFRRRLADDALSATSSSSTTPSTPRTDDDEESAATDGDESSSPASDLAFELDVLSDMGWDLYYASLAQGMLMEPPSAALGDDGDAILADVPLWSY

SEQ ID NO: 23732 - protein, 261 aa, Oryza sativa; identical to SEQ ID NO: 16115
  Clone ID: TF_OsC270762_1.pep

SEQ ID NO: 23733 - protein, 208 aa, Oryza sativa
  Clone ID: TF_OsC75926_2.pep
MQGEYHRSSSEDSAASAAAAAAAAAAAMAPLAAAAAAVAAKEEQAAAAAVLPLQQQQPRRQYRGVRMRKWGKWVAEIREPHKRTRIWLGSYATPVAAARAYDTAVFYLRGRSARLNFPEEISSLASLSEGGGASEPREPDGGTLSAASIRKKAIEVGSRVDALQTGMMPHGEEQHHHHEQKHQRTAWSGRAKNPDLNQAPSPENSDAE

SEQ ID NO: 23734 - protein, 205 aa, Oryza sativa; identical to SEQ ID NO: 16117
  Clone ID: TF_OsC313387_1.pep

SEQ ID NO: 23735 - protein, 362 aa, Oryza sativa; identical to SEQ ID NO: 16125
  Clone ID: TF_OsC126_1.pep

SEQ ID NO: 23736 - protein, 185 aa, Oryza sativa
  Clone ID: TF_OsC264665_1.pep
GLQEFGTRATRSHSLGQAPPSLDRSRAAVDMAGHEVNSSSSSSGAESSSSSSGRQQYKKRPAGRTKFRETRHPVYRGGRRRGGAGRWVCEVRVPGKRGARLWLGTYVTAEAAARAHDAAMIALRGGAGGGGAACLNFQDSAWLLAVPPAAPSDLAGVRRAATEAVAGFLQRNKTTNGASVAEAMD

SEQ ID NO: 23737 - protein, 237 aa, Oryza sativa; identical to SEQ ID NO: 16126
  Clone ID: TF_OsC101322_1.pep

SEQ ID NO: 23738 - protein, 490 aa, Oryza sativa; identical to SEQ ID NO: 16128
  Clone ID: TF_OsC399311_1.pep

SEQ ID NO: 23739 - protein, 374 aa, Oryza sativa
  Clone ID: TF_OsC53745_1.pep
MTVDQRTTAKAIMPPVEMPPVQPGRKWRARGSRGDPASVQETVKRWAELNNQQELDPQGPKKARQAPAKGSKKGCMKGKGGPENTRCDFRGVRQRTWGKWVAEIREPNRQSRLWLGTFPTAEAAACAYDEAARAMYGPMARTNFGQHHAPAASVQVVAQAAVKCALPGGGLTASKSRTSTQGASADVQDVLTGGLSACESTTTTINNQSDVVSTLHKPEEVSEISSPRGAPPAVLEDGSNEDKAESVTYDENIVSQQRAPPEAEASNGRGEEVFEPLEPIASLPEDQGDYCFDIDEMLRMMEADPTNEGLWKGDKDGSDAILELGQDEPFYYEGVDPGMLDNLLRSDEPAWLLADPAMFISGGFEDDSQFFEGL

SEQ ID NO: 23740 - protein, 275 aa, Oryza sativa
  Clone ID: TF_OsC77854_1.pep
MATVQPAASDPAPPPPPETEEQPAAAGGEEIAALDEQLAVADGGGDDGKAAAAAEGGGGGGGGKLVAETMRKYAAPRSSRYHGVTRLKWSGKFEAHLWDNSSQVEGRKRKGKHGSYVTEENAARAHDLAALKYWGAGPNTKLNFNVSDYEKEIERMKTMSQDEFVVYIRRQSSCFSRGTSSYRGVTRRKDGRWQARIGRIGESRDTKDIYLGTFETEIEAAEAYDLAAIELRGAHAVTNFDISNYCEDGLKKLEASSEVPKLLEGPSKAAKLAGR

SEQ ID NO: 23741 - protein, 112 aa, Oryza sativa
  Clone ID: TF_OsC154008_1.pep
SVRPYKGVRMRSWGSWVSEIRAPHQKRRIWLGSYATPEAAARAYDAALLCLKGSDAVLNFPSSASSRRRLDIHRGGTDSAAGDMSPRSIQRVAAAAAGAFDAAAAAVVLRRR

SEQ ID NO: 23742 - protein, 483 aa, Oryza sativa
  Clone ID: TF_OsC6832_1.pep
MRSSSSKATPTTSPAFPVLGFPPSAKSPRPNKGEDGGGEAEASHRRGKGDAMWDLNDSPAAEAAPPPLSPSADDSGASSSSAAAVVEIPDDADDDSAAVVVVTRQFFPPAVPGGGGDPAPGNARAGWLRLAGAAPPVAAAGPAASAAVSKKSRRGPRSRSSQYRGVTFYRRTGRWESHIWDCGKQVYLGGFDTAHAAARAYDRAAIKFRGVEADINFSLEDYEDDLKQMSNLTKEEFVHVLRRQSTGFPRGSSKYRGVTLHKCGRWEARMGQFLGKKYVYLGLFDTEEEAARAYDRAAIKCNGKDAVTNFDPSIYAGEFEPPAAATGDAAEHNLDLSLGSSAGSKRGNVDGGGDDEITGGGGGGAGSDQRVPMAFDLDWQTAAARSTKAKFLSNGDPGTAGGLSLTIGAGMAGHWPPQQQQGWGNAGGMSWPLPPHPPPPPTNAAAAATATAAAASSRFPPYIATQASTWLQKNGFHSLTRPT

SEQ ID NO: 23743 - protein, 397 aa, Oryza sativa
  Clone ID: TF_OsC58470_1.pep
MSSSLGPYSSIPTSSVTVASVPSSSSAASSSSGYGAPAEHGEAVQWTSWPDAQLQPAPARAEQTTGGATTPTTRAHAGFFVLFFFFFCFHPRDPTPPTTSVSLASSSSRSTATSYHLEASGSFGKEAAPRAALPGLAMPEEKEYAPVPLGQAPEAVDPEDPVKSPPRPTSPANSTRKACFAVLQSWVSRKFMTGCVVLFPVAVTFFITWWFVKFVDGFFSPLYAKLGFDIFGLGFLTSLLFIFLVGIFVSSWVGSTVFWIGEWFIKKMPFVRHIYSASKQVSTAVSPDQNTTAFKEVAIISHPRIGEYAFGFITSTMILQTDKGDEELCSVYVPTNHLYIGDIFLVRSEEIIRPNLSIREGIEIIVSGGMTMPQVIAAPGQTPHKGQSTRLNRMMSA

SEQ ID NO: 23744 - protein, 274 aa, Oryza sativa
  Clone ID: TF_OsC2062_1.pep
MERGEGRRGDCSVQVRKKRTRRKSDGPDSIAETIKWWKEQNQKLQEENSSRKAPAKGSKKGCMAGKGGPENSNCAYRGVRQRTWGKWVAEIREPNRGRRLWLGSFPTALEAAHAYDEAARAMYGPTARVNFADNSTDANSGCTSAPSLMMSNGPATIPSDEKDELESPPFIVANGPAVLYQPDKKDVLERVVPEVQDVKTEGSNGLKRVCQERKNMEVCESEGIVLHKEVNISYDYFNVHEIVEMIIVELSADQKTEVHEEYQEGDDGFSLFSY

SEQ ID NO: 23745 - protein, 358 aa, Oryza sativa; identical to SEQ ID NO: 16136
  Clone ID: TF_OsC45729_1.pep

SEQ ID NO: 23746 - protein, 282 aa, Oryza sativa
  unsure (1)..(282): unsure at all Xaa locations
  Clone ID: TF_OsC3062_1.pep
MRPPAMSPADSLAAGRSRRVGASMPRPKRVRVYFVDADATDTDSSGDEXLQAARPGGHRHRRRGRLAGAGAEAPEAAGSDGDGGAGPAXRAGMAASRRFRGVRRRPWGRFSAEIRDPSLQKRLWLGTFDTAEEAAAVYDDAALRIKGSHAVTNFPSDSDTPSAKAKQMKLHPRRHTTPDKTPSSSTAAAAKASVPDPTPAPPEEDRANDSSFNPFASPTSVLRYAAADEVTAPSFEHLLVELGDLSAPPPSTKAAEFDWLPWWEGEDFVTAGLTASNAVSVK

SEQ ID NO: 23747 - protein, 180 aa, Oryza sativa
  Clone ID: TF_OsC329744_1.pep
MAALFEAAETAAIVAALTRVIADGGRGGGGAVCVPPPAPSLAAAAVVVAAPATARRYRGVRRRPWGKWAAEIRDPRKAARVWLGTFRTTEDAARAYDAAVLRFRGRRAKLNFPEEASRPRRPWKGHDVDHMSCSPPSIANARFLGSWIFGPPPPSRSVAAATTTLLGGSHGSNGADNGRE

SEQ ID NO: 23748 - protein, 216 aa, Oryza sativa
  Clone ID: TF_OsC198236_1.pep
MCGGAIISDFIPQREAHRAATGSKRALCASDFWPSASQEAADFDHLTAPCTFTPDQAAEEPTKKRERKTLYRGIRRRPWGKWAAEIRDPAKGARVWLGTSGRAEAAARAYDRAARRIRGAKAKVNFPNEDPPLDDPAADGHSHGGAAIPCREFMDYDAVMAGFFHQPYVVADGVPAVPAEEAPTVAYVHHHLPPQPQQDAGLELWSFDNIHTAVPM

SEQ ID NO: 23749 - protein, 72 aa, Oryza sativa
  Clone ID: TF_LIB3433-061-P1-N1-C8.pep
HNNGVNRRPWGKYKVKIRDQTRHGARLWLGTFGTPEKAAAAYDRAAFRMRGAKAMLHLPPAVAGDGARRGAA

SEQ ID NO: 23750 - protein, 294 aa, Oryza sativa
  Clone ID: TF_OsC3842_1.pep
MPPCAAGKRSSIYRGVTRHRWTGRYEAHLWDKSTWNQNQNKKGKQGAYDDEEAAARAYDLAALKYWGAGTQINFPAYVHYVFAYLGKDITLDGKFAGTFGLERKIDLTNYIRWWLPKKTRQSDTSKMEEVTDEIRAIESSMQRTEPYKFPSHGLHSNSKPSSVVLSACDILTQSDAFKSFSEKSTKLSEECTFSKEMDEGKTVTPVPATGHDTTAVNMNVNGLLVQRAPYTLASVTAQMKNTWNPADPSADPLFWTNFILPASQPVTMATIATTTFAKNEVGDNILHVYGFPSS

SEQ ID NO: 23751 - protein, 126 aa, Oryza sativa
  unsure (1)..(126): unsure at all Xaa locations
  Clone ID: TF_286671.pep
RARSLCKQNAPTLPRASGSAPSPPPRRXPAPTTAPPAASAGPRPRSTSPTRTRHSTTRPPTAQPRRRRHPVQGVHGLRXRHGGLXXPALXXXRGLSXVRXRRXXGXVREXXLXXXRSRTXGLEFGV

SEQ ID NO: 23752 - protein, 373 aa, Oryza sativa
  Clone ID: TF_OsC23083_1.pep
MEEGFVALKRTEHVEVTSLAVAVEATPSAKGGKGKVVVGGGGAGGGVGPTRVRVFCDDFDATDSSSDEDEEEVTARRRVKRYVQEIRLQRAAAVAVPPVKVKGEEVFPAAVSAKMAEAAKARVVLAAGRKRKAGGVDGAEPRFRGVRRRPWGKYAAEIRDPWRRVRVWLGTFDTAEEAAKVYDTAAIQLRGRDATTNVHQSGDSASLDVPPEVAERVPQPPGASKNASPATSYDSGEESHAAAASPTSVLRSFPPSAVVATADTANKKQPPPPPLVVRETDESVDVFGCSFSDDGGFAGELPPLYTDFDLLADFPEPPLDFLSNLPVEPFSLAPFSSNNGSPDLHLDDAPSPAAAQVDDFFQDITDLFQIPVV

SEQ ID NO: 23753 - protein, 274 aa, Oryza sativa
  Clone ID: TF_OsC6641_1.pep
MTEKVIPAMAAARQDSCKTKLDERGGSHQAPSSARWISSEQEHSIIVAALRYVVSGCTTPPPEIVTVACGEACALCGIDGCLGCDFFGAEAAGNEEAVMATDYAAAAAAAAVAGGSGGKRVRRRRKKNVYRGVRHRPWGKWAAEIRDPRRAVRKWLGTFDTAEEAARAYDRAALEFRGARAKLNFPCSEPLPMPSQRNGNGGDAVTAATTTAEQMTPTLSPCSADAEETTTPVDWQMGADEAGSNQLWDGLQDLMKLDEADTWFPPFSGAASSF

SEQ ID NO: 23754 - protein, 237 aa, Oryza sativa
  unsure (1)..(237): unsure at all Xaa locations
  Clone ID: TF_OsC6832_2.pep
EEFVTCSRQEHGVPXGSSKYRGVTLHKCGXWRLGMGQFLGKKYVYLGLFDTEEEAARAYDRAAIKCNGKDAVTNFDPSIYAGEFEPPAAATGDAAEHNLDLSLGSSAGSKRGNVDGGGDDEITGGGGGGAGSDQRVPMAFDLDWQTAAARSTKAKFDQNSNHPQMPPVLQVTHLPFSPRHHHQFLSNGDPGTAGGLSLTIGAGMAGHWPPQQQQGWGNAGGMSWPHPPHPPPPPTNA

SEQ ID NO: 23755 - protein, 342 aa, Oryza sativa; identical to SEQ ID NO: 16145
  Clone ID: TF_OsC7160_1.pep

SEQ ID NO: 23756 - protein, 168 aa, Oryza sativa
  Clone ID: TF_jC-osroLIB3475060g11b1.pep
MMQPPYTYSNSYHHIHSSLPPEMSDRDVDMHILTALMADMADSSSSSSSSSSSSSSDDSDMRASAAAAEPEHRRSPAPPTPPRQQQMIGVRKRPWGKFAAEIRDSTRKGARVWLGTFDSPEAAAMAYDQAVFSVRGAFAVLNFPLHRVSGVASRPLPFGRRPGGNRPG

SEQ ID NO: 23757 - protein, 326 aa, Oryza sativa
  Clone ID: TF_OsC703_1.pep
MCGGAILADFTPARVPRRLTAAELLPVTPTPPAAERRTTRKRKSDVDFEAEFELFEDDDDDDEFELSDDGDESLAVSCVSSPKSKAVPSFSFSSDVSSSSRPRRRVAAAAAGRRKASKKSKYRGVRRRPSGRFAAEIRDPKKGRRVWLGTYGSAEEAAMAYDREARRIRGKGARLNFPRDGDGSPRRSNDRPCWTIDLNLPAAAVSGDDDDAMAVDAADADAGSAGRAAAYADQEALSAAKCKIKQCPRDEQMASATPELMEEDASSSRNMVPLSMALQLQYAAMIAECDREMEEIAAVERDLERRRRQVFERRGHLVRQASLLLD

SEQ ID NO: 23758 - protein, 280 aa, Oryza sativa
  Clone ID: TF_OsC4185_1.pep
MAAAIEGNLMRALGEAPSPQMQKIAPPPFHPGLPPAPANFSSAGVHGFHYMGPAQLSPAQIQRVQAQLHMQRQAQSGLGPRAQPMKPASAAAPAAAAARAQKLYRGVRQRHWGKWVAEIRLPRNRTRLWLGTFDTAEEAALTYDQAAYRLRGDAARLNFPDNAASRGPLDAAVDAKLQAICDTIAASKNASSRSRGGAGRAMPINAPLVAAASSSSGSDHSGGGDDGGSETSSSSAAASPLAEMEQLDFSEVPWDEAEGFALTKYPSYEIDWDSLLNNNN

SEQ ID NO: 23759 - protein, 396 aa, Oryza sativa
  Clone ID: TF_OsC819_1.pep
MCGGAIISGFIPPSAAAAAAAAAAKKQQGRRVTADVLWPGMLRKGKAAAAEEDFEADFREFERGMSDDEAEGGGGEEEEDDDDVVVVVPPPAAARFVVRAAAKAAPPTADGMLTTKLVQHDGPTARSAKHKRKNQYRGIRQRPWGKWAAEIRDPSKGVRVWLGTYNTAEEAARAYDAEARKIRGKKAKVNFPDEPAVAQKLSLKQNAAKQEKLAPPLKTCGDDAFFQLNSSDNDLFAMLAKVPAKPAEPVDLMPPVKPLASTETFEMNMLSDTSSNSFGSSDFGWEDDTLTPDYTSVFVPNAAMPAYGEPAYLTGGAPKRMRNNYGIAVPQGNGMPNLAQNMPTFDPEMKYLPLPYVESSSDESMDNLLQNDATQDGASNEGIWSLDELLMAAGAY

SEQ ID NO: 23760 - protein, 393 aa, Oryza sativa; identical to SEQ ID NO: 16163
  Clone ID: TF_OsC45661_1.pep

SEQ ID NO: 23761 - protein, 98 aa, Oryza sativa
  Clone ID: TF_OsC149947_1.pep
MRKSKQPQPQPSPEIRYRGVRKRPSGRYAAEIRDPAKKTPIWLGTFDSAEVAARAYDDAARSLRGPTARTNFPLAAPSAPPPRPPAAAAAAATSSHSS

SEQ ID NO: 23762 - protein, 172 aa, Oryza sativa; identical to SEQ ID NO: 16164
  Clone ID: TF_OsC160593_1.pep

SEQ ID NO: 23763 - protein, 72 aa, Oryza sativa
  Clone ID: TF_2799366.pep
HEDPKKRGSRVWLGTYDTAIEAARAYNRAAFRMRGAKAILNFPNEVGSRGADFLAPPPPPPPPITSTHGKRK

SEQ ID NO: 23764 - protein, 207 aa, Oryza sativa; identical to SEQ ID NO: 16156
  Clone ID: TF_OsC363381_1.pep

SEQ ID NO: 23765 - protein, 277 aa, Oryza sativa; identical to SEQ ID NO: 16157
  Clone ID: TF_OsC60460_2.pep

SEQ ID NO: 23766 - protein, 318 aa, Oryza sativa; identical to SEQ ID NO: 16161
  Clone ID: TF_OsC267094_1.pep

SEQ ID NO: 23767 - protein, 351 aa, Oryza sativa; identical to SEQ ID NO: 16176
  Clone ID: TF_OsC143388_1.pep

SEQ ID NO: 23768 - protein, 75 aa, Oryza sativa
  unsure (1)..(75): unsure at all Xaa locations
  Clone ID: TF_569065.pep
HYRGVRQRPWGKWAAEIRDPKKAARVWLGTFDTAEDXAIAYDEAXLRFKGTKAKXNFPEXFQGRTDLFLVTRGIP

SEQ ID NO: 23769 - protein, 260 aa, Oryza sativa; identical to SEQ ID NO: 16166
  Clone ID: TF_OsC407003_1.pep

SEQ ID NO: 23770 - protein, 338 aa, Oryza sativa
  Clone ID: TF_OsC19777_1.pep
MAAAIDMYKYNTSTHQIASSDQELMKALEPFIRSASSSSASSPCHHYYSSSPSMSQDSYMPTPSYPTSSITTAAATTTSSFSQLPPLYSSQYHAASPAASATNGPMGLTHLGPAQIQQIQAQFLAQQQQQRALAGAFLRPRGQPMKQSGSPPRAGPFAAVAGAAQSKLYRGVRQRHWGKWVAEIRLPKNRTRLWLGTFDTAEDAALAYDKAAFRLRGDLARLNFPTLRRGGAHLAGPLHASVDAKLTAICQSLATSSSKNTPAESAASAAEPESPKCSASTEGEDSVSAGSPPPPTPLSPPVPEMEKLDFTEAPWDESETFHLRKYPSWEIDWDSILS

SEQ ID NO: 23771 - protein, 94 aa, Oryza sativa
  Clone ID: TF_uC-osflcyp143g12b1.pep
FRPTDRKKRPRRSRDGPTSVAETIKRWAELNNQQELDPQGPKKARKAPAKGSKKGCMKGKGGPENTRCDFRGVRQRTWGKWVAENSEPDRQSRL

SEQ ID NO: 23772 - protein, 207 aa, Oryza sativa; identical to SEQ ID NO: 16170
  Clone ID: TF_OsC116_2.pep

SEQ ID NO: 23773 - protein, 195 aa, Oryza sativa
  unsure (1)..(195): unsure at all Xaa locations
  Clone ID: TF_8955884.pep
IGTSGDTIVFSRSAYGPDKLLFIDCKKNNAAAAAQQSSRYXGVVXHPNXXWGAQIYQRHXRVWLGXFPHKKAAARAYXXAALXXRGRDXATNFPRAAASXAXLPFLSAHSKXEXVHMLXXHTYPHKLXQGLPXGAAXAPXPXHPSWAREXLFQKGVTPXXXXTQXLLVPQHTPKKXPPAGPISHKGFHFKRKSVL

SEQ ID NO: 23774 - protein, 315 aa, Oryza sativa; identical to SEQ ID NO: 16171
  Clone ID: TF_OsC164210_1.pep

SEQ ID NO: 23775 - protein, 334 aa, Oryza sativa; identical to SEQ ID NO: 16173
  Clone ID: TF_OsC3461_2.pep

SEQ ID NO: 23776 - protein, 178 aa, Oryza sativa
  unsure (1)..(178): unsure at all Xaa locations
  Clone ID: TF_OsC160593_2.pep
MARPQQRYRGVRQRHWGSWVSEIRHPLLXSSVALGTFETAEDAARAYDEAARIMCGPRVRTNFPHDVADEAAPPPPPHSAAAASSSFLSAALVAKLHRFNLASVQAAQRGNSNDDDSTTSSSAAASSRAVIPSLPAAAGALGNAAATAEWSGGFLEEQYVDQMIEELLDSNFSMEISC

SEQ ID NO: 23777 - protein, 365 aa, Oryza sativa; identical to SEQ ID NO: 16180
  Clone ID: TF_OsC1774_1.pep

SEQ ID NO: 23778 - protein, 370 aa, Oryza sativa
  unsure (1)..(370): unsure at all Xaa locations
  Clone ID: TF_OsC1713_4843.pep
MEQEAAMVVFSCNSGSGGSSSTTDSKQEEEEEEELAAMEEDELIHVVQAAELRLPSSTTATRPSSRYKGVVPQPNGRWGAQIYERHARVWLGTFPDEEAAARAYDVAALRFRGRDAVTNRAPAAEGASAGELAFLAAHSKAEVVDMLRKHTYDDELQQGLRRGSRAQPTPRWAREPLFEKAVTPSDVGKLNRLVVPKQQAERHFPFPLRRHSSDAAGKGVLLNFEDGDGKVWRFRYSYWNSSQSYVLTKGWSRFVREKGLRPGDTVAFSGSGXYGPDKLLFIDCKKNKHGGRPPATRSQITSRRSNTASVRLFRHGHHRRRRQIARKRERQVEMGQEAVLDEEAMQWFISSTPALGAPAVITSNQFIYTS

SEQ ID NO: 23779 - protein, 282 aa, Oryza sativa
  Clone ID: TF_OsC6641_2.pep
MTNRISAMGGNQEYMIRFDGHIDDASPSSATAEPPPPLPPPRPFAGRAISAEREHSVIVATLLHVISGYRTPPPEVFPAARAEVCGVCGMDQCLGCEFFAGESGVVSFDGAEKVAAAAAAAAAGAAAGQRRRRKKKNKYRGVRQRPWGKWAAEIRDPRRAVRKWLGTFDTAEEAARAYDRAAVEFRGPRAKLNFPFPEQLSAHDDSNGDASAAAKSDTLSPSPRSADADEQVEHTRWPQGGGGGGGGGGGETGDQLWEGLQDLMQLDEGGLSWFPQSSDSWN

SEQ ID NO: 23780 - protein, 727 aa, Oryza sativa
  unsure (1)..(727): unsure at all Xaa locations
  Clone ID: TF_OsC48348_1.pep
MATTTWCCGCCCSCLATARSRSSVLNSGDAGGGGGGGGGGGLFRFDLLASSPDDDECSGEQHQLPAASGIVTRQLLPPPPPAAPSPAPAWQPPRRAAEDAALAQRPCHTRHESSPTRLPRRHRRRRRSRSLXAAKKSRRGPRSRSSQYRGVTFYRRTGRWESHIWDCGKQVYLGGFDTAHAAARAYDRAAIKFRGVEADINFNLSDYEEDMRQMKSLSKEEFVHVLRRQSTGFSRGSSKYRGVTLHKCGRWEARMGQLLGKKYIYLGLFDTEVEAARAYDKAAIKCNGREAVTNFEPSTYDGELPTDAAAQGADVDLNLSISQPAASQQSPKRDSGSLGLQIHHGSFEGSEFKRAKNDAAPSELASRPHRFPLLTEHPPIWTAQPHPLFPNNEDASRSSDQKRKPSEGVAVPSWAWKQVSHHHPAPPHTLPLPFFSSSSSSPSSSSAAASSGFSKAATTAAAAQHTATLRFDPTAPSSSSSSRHHHHLDKKKKPSPTEICGNRQFFSGRPGVSTFSSAPAGGRVFLVVISXLGFMTVFASTHKTPKKCSKGSYRRRRRSRPASYNVDALPDAGNEAIVDGDLDLDLRISQPNARDSKSDVATTGLQLTCDSPESSNITVHQPMGSSPQWTVHHQSTPLPPQHQRLYPSHCLGFLPNLQERPTARRAEQGPMPFPTQAWQMQAPSHLPLLHAAASSGFSAGAGAGVAAATRRQPPFPADHPFYFPPTA

SEQ ID NO: 23781 - protein, 318 aa, Oryza sativa
  Clone ID: TF_OsC34060_1.pep
MMVPSSRKVRVFCSDPDATDSSDEDDQNKKERRFSREILIPMENSKASKPVKTLVQCGTKTVKDSEKEPTSKYRGVRRRAWGKWAAEIRDPVRKSRKWIGTFNSEEEAAAAYLAQSNQFHEELMALKIQSSVSEQEDLSSSVTISCVSSSQSCDQKIQAKPQEHKRVSVVVNRETVEQKFKAQPQAQKIKAQPEVQKRVSVKISHETEDEHLLNLPSTPKGKEISMGAVLGRIDEIPVSNCVGHIDEFPPDDFTRLADAFPVSDFIGMADVPLGDDYIGLADISHLPLPITDLKFDLNAELNWDGFDFASLEQELNCL

SEQ ID NO: 23782 - protein, 232 aa, Oryza sativa; identical to SEQ ID NO: 16079
  Clone ID: TF_OsC111_3.pep

SEQ ID NO: 23783 - protein, 328 aa, Oryza sativa; identical to SEQ ID NO: 16177
  Clone ID: TF_OsC393619_1.pep

SEQ ID NO: 23784 - protein, 318 aa, Oryza sativa; identical to SEQ ID NO: 16178
  Clone ID: TF_OsC393619_2.pep

SEQ ID NO: 23785 - protein, 498 aa, Oryza sativa; identical to SEQ ID NO: 16024
  Clone ID: TF_OsC917_2.pep

SEQ ID NO: 23786 - protein, 69 aa, Oryza sativa
  unsure (1)..(69): unsure at all Xaa locations
  Clone ID: TF_3106746.pep
PWGKWAAEIRDPKKAARVWLGTFDTAEDAIAYDEAXFKGTKAKLNFPXXXQGRTDLFLVTRGIPPHPPP

SEQ ID NO: 23787 - protein, 241 aa, Oryza sativa; identical to SEQ ID NO: 16023
  Clone ID: TF_OsC2775_1.pep

SEQ ID NO: 23788 - protein, 330 aa, Oryza sativa; identical to SEQ ID NO: 16025
  Clone ID: TF_OsC143164_1.pep

SEQ ID NO: 23789 - protein, 340 aa, Oryza sativa
  Clone ID: TF_OsC1639_1.pep
MAPSKQQQQLMLLKKVMAKKPKTKRLSGFGLKPSAAFSRPHVPSAAASLQPSRRVRVVFEDPDATDSDSDDDEDAGAASKKRYFELFIGKPASSTKQASPASTVAAYANIGKVGSTCYRGVRLRKWGKWAAEIRNPFTGHREWLGTFDTADAASAAYQSASRNFAEEKRRRGVASSASPASSATPTPTASSSSSTSAAPFAHPSPSSVLEATKPAPKPESPPLPEQAATPLLVEATNETAELPDDPEFYKDILRGLQLPDIDPMDFRAGLDALDISDVPAYMNGEQDVLFTEDMLLGDFAEEDDLDLDDIGDDFCEDFPEIPSGYDFGRGDMFRQVDFCV

SEQ ID NO: 23790 - protein, 233 aa, Oryza sativa
  Clone ID: TF_OsC257865_1.pep
HESPLLSPPARGPFPIPTASIPIPISSIPELGAGMRRGGAAEEDAEAARFRGVRKRPWGRYAAEIRDPAKKARVWLGTYDSAEDAARAYDAAARALRGAKAKTNFPLSLPHAQPQLHHHHHHHLTYPAAAVVAARPATSSLSSTVESFGTRPRPVLPPRPPPPPPIPDGDCRSDCGSSASVVDDDCADAAASPSCRLPFQFDLNLPPGGGGGGGGGFGCAYDDEELRLTALRL

SEQ ID NO: 23791 - protein, 106 aa, Oryza sativa
  Clone ID: TF_OsC366234_1.pep
MERSEARSVADGGGSKSRKCCPLRRSRKGCMKGKGGPENQRCPFRGVRQRTWGKWVAEIREPNRGARLWLGTFNTALDAARAYDSAARALYGDCARLNLLLAGICC

SEQ ID NO: 23792 - protein, 198 aa, Oryza sativa
  unsure (1)..(198): unsure at all Xaa locations
  Clone ID: TF_OsC155_1.pep
MCGGAIIADFVPPAGARRAAASXSPTTPSSPLPVPVTSRSRRPRRRRRXRKTAYRGIRRRPWGRWAAEIRDPRKGARVWLGTYATAEEAARAYDVVARDIRGAKAKLNFPPTIGAAAAPPPPKKRRKAAAAANHHHHHHQQESSGSSSASSLPPTPPPAAEHQLRECMSGLEAFLGLEEEEDDGGAGEPWDAVDMMLE

SEQ ID NO: 23793 - protein, 250 aa, Oryza sativa; identical to SEQ ID NO: 16034
  Clone ID: TF_OsC111_1.pep

SEQ ID NO: 23794 - protein, 221 aa, Oryza sativa
  Clone ID: TF_OsC111_2.pep
MCGGALIPNDYGDDDWEAAFREFIAGDDDDDDGGVSMFPSGAGTMETTTEVAPAAAVVERPRRRRRVRRSYPYRGVRQRPWGRWASEIRDPVKGARVWLGTFDTAVEAARAYDAEARRIHGHKARTNFPPDEPPLPAPSQAPFCFLLDDDDDDDGVARGNSPASSSAPDRASACTTSSTVASGERGDELILLECCSDDVMDSLLAGFDVSSEPRSVLGMVN

SEQ ID NO: 23795 - protein, 297 aa, Oryza sativa; identical to SEQ ID NO: 16042
  Clone ID: TF_OsC10760_1.pep

SEQ ID NO: 23796 - protein, 1628 aa, Oryza sativa
  Clone ID: TF_OsC396045_1.pep
MDPEERVAEAMKGLLVEYSQQSARLAVQVRGNEYRRAAAAGGGGGFLLSPGERERLRAGSGLELVIVPVMEGDQVVSSSASAEVLVSPLVEGEVRVVPAVERRRWRRQAAAEEWEEIDPETKYRGVRVRFGTRYVAEIHNPTGAGRLWLGTFDTAEQGAWAYDAAARVLRGEAAATNFGDPAQTPSPLSAEMRSMLAFFDRARARRERVVEERGAAAAEAEASEAPAPAPLLLLPAPPPSSDVSPVTVQVAAPPSSSDAAPVPATLLSDASPVIVQVPVPPSSDAAPVPAPTLSDASPVPVQVPAPPSSDVALVPVPVQVPAPTSSGSDEAAFVGGRGRGAGAGVGGGRGLGRGGGGGRGRGGKRAPTTAVTVVAPPPPVPTPAAGAAAPTLAPASAAAHAPALSVEPDALVSPASIAPAYAAPAPAPAPAALEALAPPPPAAPASLSASGGERGCVAIANAAVAGRGRGRGSGAKRAPTAVTVGAPPPQARTPAAAPAKAFVSAPAPAPSSVISPVLAASASAAAAFAPAPAPAAAEVIPPPPLPAAASTAAAPAAERKRKLLTASSLSSSGGERGRGRARGRGRVADAAIAGGSRGRGRGCGLTPAVVTVGAPPPPSAAPAPAPASAPSLEPNDIIAPVVSSTLAPGASAAAAAAPAVAPPAAALEAILIPMPPPAAAAAAAAPVPKKRKVRTASTLSGSGGPGRGRGRVAEATFVGRGRGVWSVRGRGRGRIPTEVTVGTPSPSAPTPAPASATAPLIQSNVVISPVPPTLAASGVAAWPPVPAIPELTTAAAAPLPEKPVLTAHDVVMATLFPNGVFSYTAGSSHAPPPPVASGSFFQEVIPPGGVPTNYAIHEAPDFDPNVFFADVPDGEQDELVLLSLTSTLLDIDNSLTLVADDAASSAQAAVDVASSSAQAAIDVPSSSVLAVVDIPSSSAQAAIDVPASLAQAATDVASSSTQGAFVGGRGSGRGASVGVGGGRGLLRGVGTGHGRGGGGGRGRGGKCAPTAVTVVAPPLPVPTPAVHAPAPPVEPNAVISPPSSALAPAYAVPAPAPSLAALEALAPPPATPATLSASSREHGLGRGRGCVAIANAAGRGHGRGSETKCAPTVVIVGAPPPPAPIPAATPAKALVSAPAPAPISTVSSTLAASASAAAAFAPAPVAAEAIPPPPPPLPAAATAVAAPAPDRKRKLQTASTLFASGGERGRGRARGRGRVADAAVAGGNRGRGRGCGLTSAVVTAGAPLPPSAAPVPVPASAPTMEPNATISPGSSTLAPGASAAAPAVAPPTAVPEAILVPMPPPAVAAAAAAPVPKKRKLQTASTLSKSGGPERGRGRVAEATFASRGRGVWNGRGRGRGRIPTAVTVGTPSPSAPTPATEPALVPASASALATAPLMQPNVVISPVPSTLAASGAAAPPPVPATPELATAAATPLPEKRVLTAHEVVMATLFPNGVFSYTAGPSHAPPPPPAARPAASDSFFQVVIPPGGVPTNYAVHEALDFDPNIFFADVPDGEQGEPVLLSSMSMLLDVDTSSSLAADDASSSAQAAVDVASLSAQAAVDVPSSSVQAFINVPSSSAQAAIDVPSSSAQAATDVASSLTQGAAGNERPIVFDFDLNEPSSNYE

SEQ ID NO: 23797 - protein, 180 aa, Oryza sativa
  Clone ID: TF_OsC332429_1.pep
MSTTNSSSSVSVPAMDAHGQEEEEEPMQVQQQQAFRGVRKRPWGKFAAEIRDSTRNGVRVWLGTFDSAEEAALAYDQAAFAMRGSAAVLNFPMEQVRRSMDMSLLQEGASPVVALKRRHSMRAAAAGRRRKSAAPAPADQEGGGGVMELEDLGPDYLEELLAASQPIDITCCTSPSHHSI

SEQ ID NO: 23798 - protein, 399 aa, Oryza sativa; identical to SEQ ID NO: 16043
  Clone ID: TF_OsC341110_1.pep

SEQ ID NO: 23799 - protein, 224 aa, Oryza sativa; identical to SEQ ID NO: 16028
  Clone ID: TF_OsC251034_1.pep

SEQ ID NO: 23800 - protein, 289 aa, Oryza sativa; identical to SEQ ID NO: 16048
  Clone ID: TF_OsC303620_1.pep

SEQ ID NO: 23801 - protein, 235 aa, Oryza sativa; identical to SEQ ID NO: 16046
  Clone ID: TF_OsC375_1.pep

SEQ ID NO: 23802 - protein, 225 aa, Oryza sativa
  Clone ID: TF_OsC120_4.pep
MDDSSFGSEPTTSSSGGEAPASPPSTASSSSDGAGGKKKRPRKDGHHPTYRGVRMRSWGKWVSEIREPRKKSRIWLGTFATAEMAARAHDVAALAIKGRAAHLNFPDLAHELPRPATAAPKDVQAAAALAAAADFPASSANAGASNNPDGSDDASAGSASPPPPPDAADDALFDLPDLLLDLRYGPPSSGLSCASSWEDEVGLISGAGAAAAGVFRLEEPLLWEY

SEQ ID NO: 23803 - protein, 456 aa, Oryza sativa
  Clone ID: TF_OsC7483_1.pep
MSTKKRARWDPPPEEENGGPTRQSAQVRYYSTARLPVGPSGLRWGAVAAVLQPHPPTPCTRSTVRLPLPADGPYLSVKVLFPVHVSLSLLDSISNFRVLSSSNASKTELVKKYCQTMDGILDHLEVALNRAFPQITPDGELSKVLEELGATINEATELVGGWNQMMSKIYFVIQADSIIAKMQIYVFELCQIVNSLMQIESMHLEDLEHDSCGKISDVIREASRALAGEVMPNSEEFGKIQTTLSLSTNQELLMEYVALVKIKTKGNHEDNKEMDDINDIVELVNHMLDKHVEEKQTRSINGVTIPADFCCPLSLELMSDPVIVASGQTYEHVFIRKWFDLGYNICPKTRQILGHTKLIPNFTVKQLIENWCEMIECHHLGRVVRDGGGLRRGVGPQPQPLPRAGHPDLRHPLPPPPPPHAPVPAPLLLLAAAALRPAHCLLRRAEINLTVISLRS

SEQ ID NO: 23804 - protein, 377 aa, Oryza sativa; identical to SEQ ID NO: 16049
  Clone ID: TF_OsC371165_1.pep

SEQ ID NO: 23805 - protein, 318 aa, Oryza sativa
  unsure (1)..(318): unsure at all Xaa locations
  Clone ID: TF_OsC16652_1.pep
MTARSMLRNHPEASVLDTIRQHLLEEPRGGGGGEAAEASFGSLVADMWSDSLPFRDDDADDMVVFGAMRDAFSCGWLPDGVFAEVKPEPLLSPDSSSYDGSSCCFGFADVSEPVTPSDAASGAAEAAAAAAAATAEHGKEEEAAAAVARGKHYRGVRQRPWGKFAAEIRDPAKNGARVWLGTFDTAEDAALAYDRAAYRMRGSRALLNFPLRIGSEIAAAAAAAAAAAAGDKRPSPEPATSESSFSSSSSCTTTTTSSSTSSSGSPKRRKRGEAAAAXMSMPLVPPPSQLNWPVQAWYPAAAPVEQVAITPRVEQLVI

SEQ ID NO: 23806 - protein, 323 aa, Oryza sativa; identical to SEQ ID NO: 16057
  Clone ID: TF_OsC418377_1.pep

SEQ ID NO: 23807 - protein, 321 aa, Oryza sativa; identical to SEQ ID NO: 16060
  Clone ID: TF_OsC343773_1.pep

SEQ ID NO: 23808 - protein, 119 aa, Oryza sativa
  Clone ID: TF_rsiced_10763.y1.abd.pep
MDWAYSGNSYGYGYYSSGTSSPPAGGEDAYMTVSSAPPKRRGGRTKFKETRHPVYKGVRSRNPGRWVCEVREPHGRQRIWLGTFETAEMAARAHDVAALALRGRAACLNFADSPRRLRV

SEQ ID NO: 23809 - protein, 222 aa, Oryza sativa
  Clone ID: TF_OsC16240_1.pep
MAPRNAAEAVAVAVAEGGGDGMEPRFRGVRKRPWGRYAAEIRDPARKARVWLGTFDTAEAAARAYDSAALHFRGPKAKTNFPVAFAHAHHHAPPPPLPKAAALAVVSPTSSTVESSSRDTPAAAPVAAAAKAQVPASPSLDLSLGMSAMVAAQPFLFLDPRVAVTVAVAAPVPRRPAVVSVKKEVARLDEQSDTGSSSSVVDASPAVGVGLDLNLPPPIEEA

SEQ ID NO: 23810 - protein, 111 aa, Oryza sativa
  Clone ID: TF_jC-osflLIB3479036h12b1.pep
MDAHGDESFAAAKAPAPGRKTAYRGIRRRPWGRWAAEIRDPRKGARVWLGTYATAEEAARAYDVAARDIRGAKAKLNFPPTIGAAAPPGAKKRRKAAAAANHHHHHHQQES

SEQ ID NO: 23811 - protein, 397 aa, Oryza sativa; identical to SEQ ID NO: 16206
  Clone ID: TF_OsC11135_2.pep

SEQ ID NO: 23812 - protein, 120 aa, Oryza sativa
  Clone ID: TF_LIB4309-024-R1-K1-C1.pep
MAAAATAAASPVEGLTGGGGGGGGGVDGLFVELWRACAGPLVTVPAVGERVFYLPQGHIEQVEASTNQVAEQQGAPLYNLPWKIPCKVMNVELKAEPDTDEVYAQLTLLPGEQQDGNGSG

SEQ ID NO: 23813 - protein, 867 aa, Oryza sativa; identical to SEQ ID NO: 16185
  Clone ID: TF_OsC1713_3674.pep

SEQ ID NO: 23814 - protein, 852 aa, Oryza sativa
  Clone ID: TF_OsC788_1.pep
METKQQRARRNRRGSQDMEEEWPYPLLSKEIDARHRAKKIYDGNSCSSLAVLIPRTAGWLSAAGLLTFVQMTQARMHYDAREPKQKLMGAHSKRRQNIDKSLLMALVDRWRPETHTFHLPCGEMTITLQDVSMLTGLPLAGQAIVLPDPPEDWRDDIVSRYACILSRYATGDTDDDEDKIFFSEKETHGPTLKWLSQFEVRYMPDDVQEYQLTLYLEAYLLWLFGWVMFTGSHGNPVDARLIPLARQIAEGNISPSTQFTWGSAILAATYRGFCDACIKTGQREAIFTGCPLLVMLWSYERFSFGRPYMSVAVAHKDDYTDAVDDRPTFGTRWCYGPPQWARIQVHNVYEYFTEAFESLRENEVRWTPYTNEEAILRAPHGVSILCYRDEAYWMTRKMLVYDIFVEGQNRQADNRFCRSMHSRMTPWIEAWSQALNDVVHETRAYDHNTYKQYMAWYTSQTRIRLLAPEDPDERGPPTIDQIYDMQLAPPAHLTTDIAGELVKEAKTLWEKLRDGMAGTNQEVMAAVDSLRRKGKRIMRLASCRHSSDIYNPATSRRTFEPMRERPSTSSRPSTSSRPSASARRSSDGRVGVRSTSFREPPTIPTIPKITEISERLGGFGSTQAQPEWVPPYSSTPITSQWQGESASFAEGTRMVRPVPHMPPARPQMIRQMAPDVPTSHWQGGFAPFAGTSQGIPTIPQMSADFIGQGGFTSLGGPTQPVPLHAPTYGTNPWQGQSMDYGGSFRPELMSGFRPYTTSYGDMSCFGGGSSSVPNELRTSQTDDAPQVTQPIQPEVGEGNDNDPRRSNRERHEPNRLSLSGPRHAVGQRKKTTKKRGGTSMTTTDHDDDDEYN

SEQ ID NO: 23815 - protein, 908 aa, Oryza sativa
  Clone ID: TF_OsC789_1.pep
MKLSPSAGGVSDQPPSPPEVAEEQKCLNSELWHACAGPLVSLPAVGSRVVYFPQGHSEQVAASTNKEMESQIPNYPNLPPQLICQLHNVTMHADAETDEVYAQMTLQPLSPQELKDPFLPAELGTASKQPTNYFCKTLTASDTSTHGGFSVPRRAAEKVFPPLDFTQQPPAQELMAKDLHGNEWKFRHIFRGQPKRHLLTTGWSVFVSAKRLVAGDSVLFIWNDSNQLLLGIRRANRPQTVMPSSVLSSDSMHIGLLAAAAHAASTNSRFTIFYNPRASPSEFVIPLAKYVKAVYHTRISVGMRFRMLFETEESSVRRYMGTITGISDLDPVRWMNSHWRSVKVGWDESTAGERQPRVSLWEIEPLTTFPMYPSPFPLRLKRPWPTGLPSLYGGKEDDLASSLMWLRDSQNTGFQSLNFGGLGMSPWMQPRLDSSLLGLQPDMYQTIAAAAALQNTTKQVSPAMLQFQQPQNIVGRSSLLSSQILQQAQPQFQQMYHQNINGNSIQGHSQPEYLQQPLQHCPSFNEQKPQLQPQQQQQESHQQQPQHQQMQQQKHLSNFQTVPNALSVFSQLSSTPQSTPSTLQTVSPFSQQHNFPDTNISCLSPSNVSSMHDTLRSFPSEAASDLPGVPRITPVPVSDPWSSKRVAVESTITSRPHDISSQIENFDLTPSSIPQNSTLAPLPGRECLVDQDGSSDPQNHFLFGVNIDSQSLLMQDGIPSLHNENSSSTIPYSTSNFLSPSQDDYPLSQTLTTPGCLDESGYVPCSDNADQVKRPHATFVKVYKSGTVGRLLDITRFSSYHELRSEVGRLFGLEGQLEDPLRSGWQLVFVDREDDVLLVGDDPWQEFVNSVSCIKILSPQEVQQMGKPGIELFSTSARRLGNSCDNYMSRQESRSLSTGIASVGSVEF

SEQ ID NO: 23816 - protein, 808 aa, Oryza sativa
  Clone ID: TF_OsC788_8.pep
MPPAAMAPPPPPQGSSTGDPLYDELWHACAGPLVTVPRVGDLVFYFPQGHIEQVEASMNQVADSQMRLYDLPSKLLCRVLNVELKAEQDTDEVYAQVMLMPEPEQNEMAVEKTTPTSGPVQARPPVRSFCKTLTASDTSTHGGFSVLRRHADECLPPLDMTQSPPTQELVAKDLHSMDWRFRHIFRGQPRRHLLQSGWSVFVSSKRLVAGDAFIFLRGENGELRVGVRRAMRQLSNVPSSVISSQSMHLGVLATAWHAINTKSMFTVYYKPRTSPSEFIIPYDQYMESVKNNYSVGMRFRMRFEGEEAPEQRFTGTIIGSENLDPVWPESSWRSLKVRWDEPSTIPRPDRVSPWKIEPASSPPVNPLPLSRVKRPRPNAPPASPESPILTKEAATKVDTDPAQAQRSQNSTVLQGQEQMTLRSNLTESNDSDVTAHKPMMWSPSPNAAKAHPLTFQQRPPMDNWMQLGRRETDFKDVRSGSQSFGDSPGFFMQNFDEAPNRLTSFKNQFQDQGSARHFSDPYYYVSPQPSLTVESSTQMHTDSKELHFWNGQSTVYGNSRDRPQNFRFEQNSSSWLNQSFARPEQPRVIRPHASIAPVELEKTEGSGFKIFGFKVDTTNAPNNHLSSPMAATHEPMLQTPSSLNQLQPVQTDCIPEVSVSTAGTATENEKSGQQAQQSSKDVQSKTQVASTRSCTKVHKQGVALGRSVDLSKFSNYDELKAELDKMFEFDGELVSSNKNWQIVYTDNEGDMMLVGDDPWEEFCSIVRKIYIYTKEEVQKMNSKSNAPRKDDSSENEKGHLPMPNKSDN

SEQ ID NO: 23817 - protein, 899 aa, Oryza sativa; identical to SEQ ID NO: 16208
  Clone ID: TF_OsC790_1.pep

SEQ ID NO: 23818 - protein, 783 aa, Oryza sativa; identical to SEQ ID NO: 16209
  Clone ID: TF_OsC794_2.pep

SEQ ID NO: 23819 - protein, 238 aa, Oryza sativa
  unsure (1)..(238): unsure at all Xaa locations
  Clone ID: TF_LIB4506-019-R1-K1-E8.pep
MSSQGAGGGVGDPELFAELWRACAGPLVEVPQRDERVFYFLQGHLEQLQEPTDPALLAEQIKMFQVPYKILCKVVNVELKAETETDEVFAQITLQPDPDQENLPTLPDPPLPEQPRPVVHSFCKILTPSDTSTHGGFSVLRRHANECLPPLDMSMATPTQELITKDLHGSEWRFKHIYRDCSSFMCMLALIRXILGSLGQPRRHLLTTGWSTFXVTSKKLISXDAXFVYLRSETGEQR

SEQ ID NO: 23820 - protein, 917 aa, Oryza sativa; identical to SEQ ID NO: 16210
  Clone ID: TF_OsC789_2.pep

SEQ ID NO: 23821 - protein, 712 aa, Oryza sativa
  Clone ID: TF_OsC785_1.pep
MTGIDLNTVEEDEEEAAEEVAANGSSPAPARAGAVCLELWHACAGPVAPLPRKGGVVVYLPQGHLEHLGDAPAAAAAAAAVPPHVFCRVVDVTLLADAATDEVYAQLSLVPEKEEVARRADDGEGEDGDGMKQRFARMPHMFCKTLTASDTSTHGGFSVPRRAAEDCFPPLDYSQQRPSQELVAKDLHSTEWRFRHIYRGQPRRHLLTTGWSAFVNKKKLVSGDAVLFLRGDDGELRLGVRRAAQLKNGSAFPALYNQCSNLGTLANVAHAVATESVFNIYYNPRLSQSEFIVPYWKFMKSLSQPFSVGLRFKMRYESEDATERRYTGIITGSGDTDPMWHGSKWKCLLVRWDDDAEFRRPNRVSPWEIELTSSVSGSHLSTPHSKRLKPCLPHVNPEYMVPRGGGCPDFAESAQFHKVLQGQELLGFKSHGGTAAATSQPCEARHLQYIDERSCSSDASNSILGVPRLGDRAPLGNPGFSYHCSGFGESHRLQKVLQGQELFRPYRGTLVDASMGSNGFHQQDSPRAPGVVNKWQAQLHGRAAFHGPPALALPSQSSSPPSVLMFQQANSKMPRLEFGHGQLDKHENDRRVRFGPSEGIERREQRIPLQPYPTSGEVIDGQVTVEKSHSPGRHGKDGPDNKAVGTNSCKIFGISLTEKVPAREELDDGDANYSLQSLKQVPKSLGNSCATVHEQRPVVGRVIDISTMDMMI

SEQ ID NO: 23822 - protein, 699 aa, Oryza sativa
  Clone ID: TF_OsC795_1.pep
MSSQGAGGGVGDPELFAELWRACAGPLVEVPQRDERVFYFLQGHLEQLQEPTDPALLAEQIKMFQVPYKILCKVVNVELKAETETDEVFAQITLQPDPDQENLPTLPDPPLPEQPRPVVHSFCKILTPSDTSTHGGFSVLRRHANECLPPLDMSMATPTQELITKDLHGSEWRFKHIYRGQPRRHLLTTGWSTFVTSKKLISGDAFVYLRSETGEQRVGVRRLVQKQSTMPASVISSQSMHLGVLASASHAIKTNSIFLVYYRPRLSQSQYIVSVNKYLAASKVGFNVGMRFKMSFEGEDVPVKKFSGTIVGEGDLSLQWSGSEWKSLKVQWDEVTNVNGPERVSPWEIETCDGTAPAINVPLQSATKNKRPREPSETIDLQSLEPAQEFWLSGMPQQHEKTGIGSSEPNCISGHQVVWPGEHPGYGAVSSSVCQNPLVLESWLKDFNSSNKGVSPTLSEISQKIFQVTSNEARIATWPARSAYQAEEPTSKLSSNTAACGYRTEEVAPNASKVVEGKKEPAMFRLFGVDLMKCTSISTTTDDKSSVGAGEASAKGTGSHEDSGQLSAFSKVTKEHIAADESPQEIQSHQNYTARTRIKVQMHGNAVGRAVDLANLDGYEQLMNELEEMFNIKDLKQKWKVAFTDDEGDTMEVGDDPWLEFCQMVRKIVLYPIEDEKKIEPHPKLLSSANPEQDQKTGF

SEQ ID NO: 23823 - protein, 668 aa, Oryza sativa; identical to SEQ ID NO: 16212
  Clone ID: TF_OsC86356_1.pep

SEQ ID NO: 23824 - protein, 559 aa, Oryza sativa
  Clone ID: TF_OsC12032_1.pep
MGIDLNNTASGGEEDAPAPGPVCRDLWHACAGPVVSLPRRGSAVVYLPQGHLSAAGAGGGIRGEVAVALPPHVACRVVDVELCVFERNLHGGGIEREDDMEDGDEERKSRMLHMFCKTLTASDTSTHGGFSVPRRAAEDCFPPLDHKQLRPSQELVAKDLHGAKWRFRHIYRGQPRRHLLTTGWSSFVNKKKLVSGDAVLFLRGDDGELRLGVRRATQLKNEAIFKAFSSESSKMRTLSAVADSLKHGSVFHICYNPRATASEYVVPYWKFVKSFNHPVCIGMRFKFHFESEDVNERRSGMIAGVSEVDPIRWPGSKWRSLLVRWEDATDCNSQNRVSPWEIEIVGGSISVAHSLSASSSKRTKLCPQGNLDVPALYGNGRPDSVETEKFPRVLQGQELMGSRTHRATCSPQSIDITKIQQADFQCSTLAIPTNLLMLYQTGVPQLELASKNNDKSGNDSQPALRQHKLLSETSWDQFKIGKASTPGNATKPGNGGREVDRTSCRLFGFSLTEKIIPTDKDGEKEVRIRTCGDAATPRFIPDVNGIGLVMVPPFLMLCM

SEQ ID NO: 23825 - protein, 1096 aa, Oryza sativa
  Clone ID: TF_OsC792_1.pep
GATKVNQELWYACAGPLVSLPPQGSLIVYFPQGHSEQVAASMRKDADAQIPSYPNLPSKLICILHSVTMLADPDTDEVYARMTLQPVSNCDKETLLASELALKQTRPQTEFFCKTLTASDTSTHGGFSVPRRAAERIFPRLDFSMQPPAQELQARDLHDNVWTFRHIYRGQPKRHLLTTGWSLFVSGKRLLAGDSVLFIRDAKQQLLLGIRRANRQPTNLSSSVLSSDSMHIGILAAAAHAAANNSQFTIYYNPRASTSEFVIPFAKYQKAVYGNQLSLGMRFRMMFETEESGTRRYMGTITGISDLDPVRWKTSHWRNIQVAWDEAAPTERRTRVSLWEIEPIIAPFFIYPSPLFTAKRPRLPGMTDDETEMDGLLKRAMPWVGEEICKKDLNIQNSVVPGLNLAQWMNMQHSSSLPGTVVQPELLNSLSGKPVQNLAAADLSRQISFHPQFLQQNNIQFNTALVPQQNQQTEQLAKVIPTPNQLGSVIIPQKVVQDCNSEQRQHVVTQPVQGSQPNINIPQPQLVVQAQLQQPQVILQAQLQQPQVVVQAQLQQTQPSVQSHTVLQGGLQQIQLLQQQQPHVQHQQIPQQLHHQQQQTQQLQPVQQVQQSVQEHQQIKIQPVHVSMDASMNTQVADHQMKLQLLKALQPQQPLISEQQKMLLDLQQQVINSQSAPQQCVQVTNQAISLHNSNTIQYPTQQKVQSHQVQDLTGNVIPNSKSDIATSMGASSLHVAGGRQLLKTDDVPSTSTSPSTNSNPVLLQSIPSSSKNQSLTTAGKTSQSSVVLGPTIEQDTKPYQNVKQTVMIPKTTEQRPATGQDCINNNPQMDYLDTSSSATSVCLSQADGSLQQNFPPSSFHQHHLLKDTVPDSEFEVTDPRNNLLFGVNIDGQLGLPLNADLLANDIGTDKYMDQLPGNGISNFISSKDSQQELSSSMISHSFGVADMAFNSIDSAINDTPFLNRNSRSAAGPAHQRMRTYTKVHKRGAVGRSIDINRYSGYDELKHDVARMFGIEGQLGDQNRVGWKLVYEDHEKDVLLVGDDPWEDFVKCVRCIRILSPQEEMQMRLVGDFGDSFLPNQACSSSDGGHPWRITGD

SEQ ID NO: 23826 - protein, 182 aa, Oryza sativa
  unsure (1)..(182): unsure at all Xaa locations
  Clone ID: TF_LIB3475-006-P1-K1-D7.pep
PRVRPRVRFQVPYKILCKVVNVELKAETETDEVFAQITLQPDPDQENLPTLPDPPLPEQPRPVVHSFCKILTPSXTPTQELITKDLHGSEWRFKHIYRGQPRRHLLTTGWSTFVTSKKLISGDAFVYLRSETGEQRVGVRRLVQKQSTMPASVISSQSMHLXGVLASASHAIKTNSIXLVYY

SEQ ID NO: 23827 - protein, 1055 aa, Oryza sativa; identical to SEQ ID NO: 16216
  Clone ID: TF_OsC21910_1.pep

SEQ ID NO: 23828 - protein, 82 aa, Oryza sativa
  unsure (1)..(82): unsure at all Xaa locations
  Clone ID: TF_8856660.pep
VRTHGXQWCPGMRFKMAFETEDSSRISWFMGTVAGVQASDPVRWPQSPWRLLQVHLHGTNMRQPQLDHDRVVEFLINWPPRR

SEQ ID NO: 23829 - protein, 925 aa, Oryza sativa
  Clone ID: TF_OsC793_1.pep
MSSSSAASIGPPQPPPPPAPPEEEKKCLNSELWHACAGPLVCLPTVGTRVVYFPQGHSEQVAASTNKEVEGHIPNYPNLPAQLICQLHDVTMHADVETDEVYAQMTLQPLNPVRRLGFLHDVCSAEVLMQEQNDAYLPAEMGIMSKQPTNYFCKTLTASDTSTHGGFSVPRRAAERVFPPLDFTQQPPAQELIARDIHDIEWKFRHIFRGQPKRHLLTTGWSVFVSAKRLVAGDSVLFIWNEKNQLLLGIRRASRPQTVMPSSVLSSDSMHIGLLAAAAHAAATNSRFTIFYNPRTSPHYLWEFYNWASIKIHNILMRPMHTLMKHRYMGTITEVSDADPVRWPSSYWRSVKVGWDESTAGERPPRVSLWEIEPLTTFPMYPSLFPLRVKHPWYSGVASLHDDSNALIWLRGVAGEGGFQSLNFQSPGIGSWGQQRLHPSLLSSDHDQYQAVVAAAAASQSGGYLKQQFLHLQQPMQSPQEHCNLNPLLQQQILQQASQQQIINPDAQNIQTMLSPSAIQQQLQQLQQMQQVQNDQKQKIQPDQSYQVPTSAVLPSPTSLPSHLREKFGFSDPNANSSSFITSSSSDNMLDSSFLQGSSKAVDLSRFNQPVASEQQQQQAWKQKFMGSQSVSFGGSVLHNSPTSKDGSVENKIGRDVQNQSLFSPQVDSSSLLYNMVPNLTSNVSDGNLSTIPSGSTYLQNAMYGCLDDSSGLLQNTGENDPATRTFVKVYKSGSVGRSLDITRFSNYAELREELGQMFGIKGQLDDPDRSGWQLVFVDRENDVLLLGDDPWEFINIYMNVSNAKKSYIMKRREYNTLVSWFPQLIAYRGKTVLPSIICVGQSLYVDAQLPKTLRLGQMFGIKGQLDDPDRSGWQLVFVDRENDVLLLGDDPWESFVNSVWYIKILSPEDVHKMGKQGNDPRYLS

SEQ ID NO: 23830 - protein, 1430 aa, Oryza sativa; identical to SEQ ID NO: 16220
  Clone ID: TF_OsC787_1.pep

SEQ ID NO: 23831 - protein, 443 aa, Oryza sativa
  Clone ID: TF_OsC1528_1701.pep
MAVKDRFTGNPGRLTVLTTSGSGSKAIAGWIPGLLSWGERLIMINSVMSAIPNYFMSCIKWPDKTIEAVDRLRRAFLWKGDKKVKGGQCLVAWPTVTLNKEQGGLGIGDLRAHNLALLMRIGCRLLSDSSEPCFQWLRTQHMANEIPIKAKPTETPIWKTVCSVIEPIIASTKVTIGNGQLVQFWRDHWTAAGRFNLIYPTLASYATNINCTVSSQHTNGTWTIDLHPVLSSRAQTELQSLMDILLDQHIQQNVPDKRTLLLGSTDITTSANYNLLTYHGILWQPATLIWNKAIPNTCRIFLWLAFRDRLNTNANRVNKKWDSNPHCMSCPAIETANHIILRCKLAGEVWKKLNLYETAVRSSNIQDFVESILDTLPEHQKPGCPACFAACSHGLWKARNQLVFKLTETSVAYILPLWPDGWQLAILNSPYEVHSHAWSKPGA

SEQ ID NO: 23832 - protein, 529 aa, Oryza sativa; identical to SEQ ID NO: 16225
  Clone ID: TF_OsC378934_1.pep

SEQ ID NO: 23833 - protein, 702 aa, Oryza sativa
  unsure (1)..(702): unsure at all Xaa locations
  Clone ID: TF_OsC794_1.pep
MITFVDSAAKERERESDKCLDPQLWHACAGGMVQMPPXVSSKVYYFPQGHAEHAQGHGPVEFPGGRVPALVLCRVAGVRFMADPXDTDEVFAKIRLVPVRANEQVYAGDADDGIGASLSGTTSPAATGNSSLNWNTEKGASEGSGSGVIQNSPTDNTSFGEAPVVQGEQHRLRARAGVVWKFRHIYRGTPRRHLLTTGWSTFVNQKKLVAGDSIVFMRTENGDLCVGIRRAKKGGVGGPEFLPPPPPPPPTPAAGGNYGGFSMFLRGDDDGNKMAAAARGKVRARVRPEEVVEAANLAVSGQPFEVVYYPRASTPEFCVKAGAVRAAMRTQWFAGMRFKMAFETEDSSRISWFMGTVSAVQVADPIRWPNSPWRLLQVSWDEPDLLQNVKRVSPWLVELVSNMPAIHLAPFSPPRKKLCVPLYPELPIDGQFPTPMFHGNPLARGVGPMCYFPDGTPAGIQGARHAQFGISLSDLHLNKLQSSLSPHGLHQLDHGMQPRIAAGLIIGHPAARDDISCLLTIGSPQNNKKSDGKKAPAQLMLFGKPILTEQQISLGDAASVDVKKSSSDGNAENTVNKSNSDVSSPRSNQNGTTDNLSCGGVPLCQDNKVLDVGLETGHCKVFMQSEDVGRTLDLSVVGSYEELYRRLADMFGIEKAELMSHVFYRDAAGALKHTGDEPFSEFTKTARRLNILTDTSGDNLAR

SEQ ID NO: 23834 - protein, 531 aa, Oryza sativa
  Clone ID: TF_OsC2423_3.pep
MEMAANPGGSGTCSDALFRELWHACAGPLVTVPKRGERVYYFPQGHMEQLEASTNQQLDQYLPMFNLPSKILCSVVNVELRAEADSDEVYAQIMLQPEADQSELTSLDPELQDLEKCTAHSFCKTLTASDTSTHGGFSVLRRHAEECLPQLDMSQNPPCQELVAKDLHGTEWHFRHIFRGQPRRHLLTTGWSVFVSSKRLVAGDAFIFLRGESGELRVGVRRLMRQVNNMPSSVISSHSMHLGVLATASHAISTGTLFSVFYKPRTSRSEFVVSVNKYLEAKKQNLSVGMRFKMRFEGDEAPERRFSGTIIGIGSVPAMSKSPWADSDWKSLKVQWDEPSAIVRPDRVSPWELEPLDASNPQPPQPPLRNKRARPPASPSVVAELPPSFDVDSDQISQPSNGNKSDAPGTSSERSPLESQSRQVRSCTKVIMQGMAVGRAVDLTKLNGYGDLRSKLEEMFDIQGDLCPTLKRWQVVYTDDEDDMMLVGDDPWENASTMVHASCIADPGPVWIPCQEGWLGRQHFHHLALPA

SEQ ID NO: 23835 - protein, 955 aa, Oryza sativa
  Clone ID: TF_19352036.pep
MASSQEKAKTGVLRNAAALLDEMQLMGETQGAKKVINSELWHACAGPLVCLPQRGSLVYYFPQGHSEQVAATTRKIPNSRIPNYPNLPSQLLCQVHNITLHADKDTDEVYAQMTLQPVNSETDVFPIPTLGAYTKSKHPTEYFCKNLTASDTSTHGGFSVPRRAAEKLFPQLDYSMQPPNQELIVRDLHDNMWTFRHIYRGQPKRHLLTTGWSLFVGAKRLKAGDSVLFIRDEKSQLLLGVRRATRQQTMLSSSVLSTDSMHIGVLAAAAHAASSGSSFTIYYNPRTSPSPFVIPVARYNKATYMQPSVGMRFAMMFETEESSKRRYTGTVVGISDYDPMRWPNSKWRNLQVEWDEHGYGERPERVSIWDIETPENTLVFPSSTLNSKRQCLPGYGVSVPGMEIGSANMSSFPRAQGNPYGSLQHIPAVGSELAIMLLNQSGQTLGSPLSFHQSSYSSIIQNVKQNYIPPLTVSTSACLTKQESLPSDDAQHQFHMANMQNGDLEGSEVQPVIDSISESKLNATSRDPRNTDSYTSRSTSEQNSKGEPRGKTRRSKKGLPHKTVSEKSDLSSAPSWICDNQQVGLESKLVGCDEQVNCGNIEDSSGALTQGNFVGQPHGHQVEQKGVLSPPKVESSKSPDGGKSVNSFPNQGCFSQFIDGLDWMTQPSYYQDSNVIQPAGVSENIFSSSADIPPSMIADTMETFQASCLSDCLPNSIQEFISSPDLNSLTFLSPDMQNLEVQLQHDGSNLPSTSNSFVQMSFSEESASQSANLSGLHMESTHRSINTTSCSQPMSTGGFDAGMYSKLPRLKESQILSLPEIHTNSMGTSACSMDATEYSLDRSAKPMKPPVRTYTKVQKQGSVGRSIDVTGFRNYHELRSAIACMFGLQGKLEHPGSSEWKLVYVDYENDVLLVGDDPWEEFINCVRCIRILSPSEVQQMSENGMHVLNDCIQAA

SEQ ID NO: 23836 - protein, 860 aa, Oryza sativa
  Clone ID: TF_OsC436_1.pep
MWGPGGGMARAEVGGGGGERSAAPADVSRNPEAQGQGGGVGEDALFTELWSACAGPLVTVPRVGEKVFYFPQGHIEQVEASTNQVGEQRMQLYNLPWKILCEVMNVELKAEPDTDEVYAQLTLLPELKQQEDNGSTEEEVPSAPAAGHVRPRVHSFCKTLTASDTSTHGGFSVLRRHADECLPPLDMSRQPPTQELVAKDLHGVEWRFRHIFRGQPRRHLLQSGWSVFVSAKRLVAGDAFIFLRGENGELRVGVRRAMRQQTNVPSSVISSHSMHLGVLATAWHAVNTGTMFTVYYKPRTSPAEFVVPYDRYMESLKRNYSIGMRFKMRFEGEEAPEQRFTGTIVGMGDSDPAGWPESKWRSLKVRWDEASSIPRPERVSPWQIEPAVSPPPVNPLPVPRTKRLRPNATALPADSSAIAKEAATKVVVESEPNGTQRTFQTQENATPKSGFGNSSELESAQKSIMRPSGFDREKNNTPIQWKLGSDGWMQMSKPESYSEMLSGFQPPKDVQTPQGFCSLPEQITAGHSNFWHTVNAQYQDQQSNHNMFPSSWSFMPPNTRLGLNKQNYSMIQEAGVLSQRPGNTKFGNGVYAALPGRGTEQYSGGWFGHMMPNSHMDDTQPRLIKPKPLVVAHGDVQKAKGASCKLFGIHLDSPAKSEPLKSPSSVVYDGTPQTPGATEWRRPDVTEVEKCSDPSKAMKPLDTPQPDSVPEKPSSQQASRNMSCKSQGVSTRSCKKVHKQGIALGRSVDLTKFNGYEELIAELDDMFDFNGELKGPKKEWMVVYTDNEGDMMLVGDDPWIEFCDMVHKIFIYTREEVQRMNPGTLNSRSEDSHANSMERGSVGREMRGCLSTSSLNSENC

SEQ ID NO: 23837 - protein, 760 aa, Oryza sativa
  unsure (1)..(760): unsure at all Xaa locations
  Clone ID: TF_OsC445_6.pep
MVISRTLVVRGFDELWETIRPVLVSSDGPASMSKNGLLLVVSEEFWIGKVWWVSGDRIWGLEMKEVGEVEEVRCLDPQLWHACAGGMVQMPAPRSRVYYFAQGHAEHADGGGGAAAAAAELGPRALPPLVLCRVEGVQFLADRDSDEVYAKIRLAPVAPGEAEFREPDELCPLGAAGDAAEPSPEKPTSFAKTLTQSDANNGGGFSVPRYCAETIFPKLDYRADPPVQTVLAKDVHGVVWKFRHIYRGTPRRHLLTTGWSTFVNQKKLVAGDSIVFLRTRHGELCVGIRRAKRMACGGMECMSGWNAPGYGGGGFSAFLKEEESKLMKGHGGGGYMKGKGKVRMADVVEAASLASSGQPFEVAYYPRASTPDFVVKAASVQAAMRIQWCSGMRFKMAFETEDSSRISWFMGTISSVQVADPNRWPLAPGKRAPVTWDEPDLLQNVKCVSPWLVELVSSIPPIHLGPFSSPRKKLRVPPHPDFPFEGHLLNPIFHGNPLGPSNSPLCCYPDTAPAGIQGARHAQFGLPLTDHQLNKLHLGLLHSGSFNRLDAITPPSRISKGFVVSSAPAHDNISCLLSISTPQVAEKSDDRKTTPHIMLFGKAIFTEQQITSSGSTETLSPGVTGNSSPNGNAHKTGNASDGSGSSICIGFSSQGHEASDLGLEAGHCKVFMESEDVGRTIDLSVFGSYEELYGRLADMFGIEKEEIINHLHFRDAAGVVKHPGEVPFRXFMKAARRLTIIAGDRERIERPLIECLVEQA

SEQ ID NO: 23838 - protein, 822 aa, Oryza sativa
  Clone ID: TF_OsC793_3.pep
MSSSSAASIGPPQPPPPPAPPEEGGWLEKKCLNSELWHACAGPLVCLPTVGTRVVYFPQGHSEQVAASTNKEVEGHIPNYPNLPAQLICQLHDVTMHADVETDEVYAQMTLQPLNPQEQNDAYLPAEMGIMSKQPTNYFCKTLTASDTSTHGGFSVPRRAAERVFPPLDFTQQPPAQELIARDIHDIEWKFRHIFRGQPKRHLLTTGWSVFVSAKRLVAGDSVLFIWNEKNQLLLGIRRASRPQTVMPSSVLSSDSMHIGLLAAAAHAAATNSRFTIFYNPRASPSEFVIPLSKYIKAVFHTRISVGMRFRMLFETEESSVRRYMGTITEVSDADPVRWPSSYWRSVKVGWDESTAGERPPRVSLWEIEPLTTFPMYPSLFPLRVKHPWYSGVASLHDDSNALMWLRGVAGEGGFQSLNFQSPGIGSWGQQRLHPSLLSSDHDQYQAVVAAAAASQSGGYLKQQFLHLQQPMQSPQEHCNLNPLLQQQILQQASQQQIINPDAQNIQTMLSPSAIQQQLQQLQQMQQVQNDQKQKIQPDQSYQVPTSAVLPSPTSLPSHLREKFGFSDPNANSSSFITSSSSDNMLDSSFLQGSSKAVDLSRFNQPVASEQQQQQQQAWKQKFMGSQSVSFGGSVLHNSPTSKDGSVENKIGRDVQNQSLFSPQVDSSSLLYNMVPNLTSNVSDGNLSTIPSGSTYLQNAMYGCLDDSSGLLQNTGENDPATRTFVKVYKSGSVGRSLDITRFSNYAELREELGQMFGIKGQLDDPDRSGWQLVFVDRENDVLLLGDDPWESFVNSVWYIKILSPEDVHKMGKQGNDPRYLS

SEQ ID NO: 23839 - protein, 1123 aa, Oryza sativa
  Clone ID: TF_OsC791_1.pep
GEKTKAPAINSELWHACAGPLVSLPPAGSLVVYFPQGHSEQVAASMQKDVDAHVPSYPNLPSKLICLLHNVTLHADPETDEVYAQMTLQPVTSYGKEALQLSELALKQARPQTEFFCKTLTASDTSTHGGFSVPRRAAEKIFPPLDFSMQPPAQELQARDLHDNVWTFRHIYRGQPKRHLLTTGWSLFVSGKRLFAGDSVIFVRDEKQQLLLGIRRANRQPTNISSSVLSSDSMHIGILAAAAHAAANNSPFTIFYNPRASPTEFVIPFAKYQKAVYGNQISLGMRFRMMFETEELGTRRYMGTITGISDLDPVRWKNSQWRNLQVGWDESAAGERRNRVSIWEIEPVAAPFFICPPPFFGAKRPRQLDDESSEMENLLKRAMPWLGEEICIKDPQTQNTIMPGLSLVQWMNMNMQQSSSFANTAMQSEYLRSLSNPNMQNLGAADLSRQLCLQNQLLQQNNIQFNTPKLSQQMQPVNELAKAGIPLNQLGVSTKPQEQIHDASNLQRQQPSMNHMLPLSQAQTNLGQAQVLVQNQMQQQHASSTQGQQPATSQPLLLPQQQQQQQQQQQQQQQQQQQQKLLQQQQQQLLLQQQQQLSKMPAQLSSLANQQFQLTDQQLQLQLLQKLQQQQQSLLSQPAVTLAQLPLIQEQQKLLLDMQQQLSNSQTLSQQQMMPQQSTKVPSQNTPLPLPVQQEPQQKLLQKQAMLADTSEAAVPPTTSVNVISTTGSPLMTTGATHSVLTEEIPSCSTSPSTANGNHLLQPILGRNKHCSMINTEKVPQSAAPMSVPSSLEAVTATPRMMKDSPKLNHNVKQSVVASKLANAGTGSQNYVNNPPPTDYLETASSATSVWLSQNDGLLHQNFPMSNFNQPQMFKDAPPDAEIHAANTSNNALFGINGDGPLGFPIGLGTDDFLSNGIDAAKYENHISTEIDNSYRIPKDAQQEISSSMVSQSFGASDMAFNSIDSTINDGGFLNRSSWPPAAPLKRMRTFTKVYKRGAVGRSIDMSQFSGYDELKHALARMFSIEGQLEERQRIGWKLVYKDHEDDILLLGDDPWEEFVGCVKCIRILSPQEVQQMSLEGCDLGNNIPPNQACSSSDGGNAWRARCDQNSGNPSNGSYEQFE

SEQ ID NO: 23840 - protein, 829 aa, Oryza sativa; identical to SEQ ID NO: 16198
  Clone ID: TF_OsC793_2.pep

SEQ ID NO: 23841 - protein, 763 aa, Oryza sativa
  unsure (1)..(763): unsure at all Xaa locations
  Clone ID: TF_OsC2423_1.pep
MAGSVVAAAAAAGGGTGSSCDALYRELWHACAGPLVTVPRQGELVYYFPQGHMEQLEASTDQQLDQHLPLFNLPSKILCKVVNVELRAETDSDEVYAQIMLQPEADQNELTSPKPEPHEPEKCNVHSFCKTLTASDTSTHGGFSVLRRHAEECLPPLDMTQNPPWQELVARDLHGNEWHFRHIFRGSPHHSLILGQPRRHLLTTGWSVFVSSKRLVAGDAFIFLRGENGELRVGVRRLMRQLNNMPSSVISSHSMHLGVLATASHAISTGTLFSVFYKPRTSQSEFVVSANKYLEAKNSKISVGMTPTNSWLSPGTGLKMRFEGDEAPERRFSGTIIGVGSMSTSPWANSDWRSLKVQWDEPSVVPRPDRVSPWELEPLAVSNSQPSPQPPARNKRARPPASSSIAPELPPVFGLWKSSAESTQGFSFSGLQRTQELYPSSPNPIFSTSLNHFYWPMRETRADSYSASISKVPSEKKQEPSSAGCRLFGIEISSAVEATSPLAAVSGVGQDQLAASVDAESDQLSQPSHANKSDAPAASSEPSPHETQSRQVRSCTKVIMQGMAVGRAVDLTRLHGYDDLRCKLEEMFDIQGELSASLKKWKVVYTDDEDDMMLVGDDPWPEXCSMVKRIYILMRWTLTTLLQCLILLSRVLVNAALLILYIQRAVLFNGLCFQIHWINAGGFGGWKEGYSTKRASGVCREPVVDAIDVEGPQGIDMLAIALRKHSLNVAQGSNLEALPFITELIIEILVVQTQRKTYIEVLS

SEQ ID NO: 23842 - protein, 437 aa, Oryza sativa
  Clone ID: TF_OsC2629_1.pep
MASSWRDFQAAKDVHYCIVVKPKPTPPSYQHRTNRSAAPRRAASPAMDSDYGVPRELSEVQKKRALYQPELPPCLQGTTVRVEYGDAAIAADPAGAHVISHAFPHTYGQPLAHFLRKTANVPDATVISEHPVVRVGVVFCGRQSPGGHNVIWGLHEAIKAHNPNSKLIGFLGGSDGLLAQKTLEITDEVLSSYKNQGGGYDMLGRTKDQIRTTEQVNGAMASCQALKLDALVIIGGVTSNTDAAQLAETFAEAKCATKVVGVPVTLNGDLKNQFVETTVGFDTICKVNSQLISNVCTDALSAEKYYYFIRMMGRKASHVALECALQSHPNMVIVKAYELVETKLFQHSLDGRHVTETLVLVQFEGPGGETKPISLCVEDRDYMGRIKQLQEYLEKVKSIVKPGCSQDVLKAALSAMASVTEMLTIMSSPSFSGQATI

SEQ ID NO: 23843 - protein, 622 aa, Oryza sativa
  Clone ID: TF_OsC59278_1.pep
GEQVLKKKEETHSCHALMSVVQSSVSHTWDAFQLAHASFRLYCVRNNHVQSVKLGPRLLGDAPKINITPPENEMVEEEGSSDVFPAIKIYDDDINMKFLLCGVPSTPDPCLLGSLEDGLNALLNIEIRGCKLQNRISASPPPLHAASLPRGMVTMRCDITTCSSSHVSLLVSGSAQTCFDDQLLESHIKDEIIEKSQLVHALPNNDDKLSSSVPFTSMSTACGASTFEVWMTLPKWAAQVLKHLAPDISYRSLVALGIGCINGTPVASFDRRDADRLLFFCTNQHKDLAIENGPYFHLPRWSASLTKERVKVGLESKPKLLGANGIPEDKKRLIEGPSSSSKAKLKPATMRPIPHSRKQQMHPFMGFLEATVHETSQVKPNLPAAPPVKHNSVPAAPATHRKSTSGPSHAQSIIQLNPLPLKKHGCDRLPIQMCSEEDFLKDVMQFLIQRGHNRLVPHGGLAEFPEAVLNAKRLDLYNLYKEVVSRGGFYVGNGINWKGQVFSKMRNHTVTNRMTGVGNTLKRHYETYLLEYELAHDDVDGECCLLCHSSAPGDWVNCGLCGEWAHFGCDRRQGLGTFKDYAKTDGLEYICPHCSLANYKKKPPPQKVANGFANTVSVSRNV

SEQ ID NO: 23844 - protein, 473 aa, Oryza sativa
  unsure (1)..(473): unsure at all Xaa locations
  Clone ID: TF_OsC2705_1.pep
MAQFRSAPVESEAEPGADGPVDEANAVEEEKSGKGEDGIEEAADTVDSVKDSAKPEGMDAKEEAVEQEGGAAADKAKDIPVTSNGKTDAGGNEVAEMKVEKLENGDGHLKADGDSNGDNKGADGEKQLMLASAGEDVEDPVLSKLASNSFMFDYSCGGDDSGTEEEQAAFMKELERFYREKLMEFKPPKFYGEGLNCLKLXKQVTGLFCRQVTRLGSXLGVHEQVTSCKLWRQVGESFKPPKTCTTVSWTFRNFYEKALLEYEKHKIETGEFQVAASNLTERITSESQVGIHASGSGRARRESATRAMQGWHSQRLLGNGEIADPIIKDKGTVSVLKKDKTPKSSGSAKRKRTPTLEDDRIVPYKPDKLQNDSMVLDLGPPADWVKINVRRTKDCYEVYALVPGLLREEVHVQSDPAGRLIVTGEPEQLDNPWGVTPFKKVISLPSRIDPHQTSAVVTLHGQLFVRAPFEQSK

SEQ ID NO: 23845 - protein, 1592 aa, Oryza sativa
  Clone ID: TF_OsC135913_1.pep
MGISAAARGSGVGSSVPEAPVFRPTEEEFGDPLAYVARIRPLAEPYGICRIVPPPSWSPPPALDVCTLSFPTKRQPIHRLLARLAPADPDTFLLDYRRFLHRHRGRKKPKPKLPALSDGRPLDLCRLFHAVKRFGGYDGACAGKRWADVLRLVDDKAPRHAFSVSEHVIAQLYYEHLYQYEHFTNRLPSQSHDDQPPVSASSANISIRRQKKRLRKTSNTMGHCGGSTSAKTAASAPKQKRRKVDATATVVNEAMDQVCEQCNSGLHGEVMLLCDRCDKGWHLYCLSPPLESVPPGNWYCSECMNSDRNCFGFVHRRKTCQVETFRKFEERVRKRWFGHKNPSRVQVEKQFWEIVEGKVGELEVMYGSDLDTSIYGSGFPRLCDPVPSSVDPVMWHKYCSSPWNLNNFPNLPGSVLQTVRDNIAGHLMSNHRAAVSASLFHLHSYSMHVGEPKCWYGVPGAEANAFEKATLRLVMLEYLTFCDLQVMRNALPDLFDAQPDLLFHLVTMLSPSILQANGVPVYSVIQEPGLNCAEAVNFAPADWLPHGGIGAELYRLYRKAPVLSHEELLYVVAKNGVDNESLPYLQGEIERLFVKEKKCREELWITGIVKSNLMPPKNNPNFIGSEEVDLLVYRHLMSCDIDSALIPLILAKFIKSIFSFSQHWKHLCECSPEKHRLLYRHTLAELGDLVCEVSKANLPRENVKQNSLLHSDVFLPTRKDKDQYMSYTQLAEDWLSKADHILHMPFLDTAYATALEDAEQFLWGDHNMDSVRNMSAKLIEGRKWASSVRKCLSQIDGFLHCKENCSEKVNYVEIKELAAVRCKPCYEPSLAQLQVYVDKGEIMINEINNALSSRSKVDYLETLYSRALEFPVELTETSALSCEISSAKSWLKKACDCLEQNKRGIVDIDFLNELKSEELESFLLVVDGANFSIPELNILMQRYSGACSWVNHANNIVGKLLERNDYDNIVEELTGILKDGESLGVKGMLFEEFSVVEEELKKSFCRKQASEALATQTSMEVVKEVLKEASILTIEEEQPFVDLSHNLKAAITWEEKASFILEHSAALPEFENHILCSENIHVILPSELDMKAEVATAKLWMDKCQAYLRPRSDKPASGGFLNVDDLKDLIGQPASMKVILDTSAINSVLNNVIEWEHNSLSLIHSSRSLLDSNVIDSTIDPLKRKLEELQDKINAEIEKGLSLGFEFKVVHELKDSFFTLGWILNALSFCGVTPLLQDAEKLIQQAVNLPASLSDCSLAELLVRGSSWLRKALMFLPGSEMSETSRLLNVENILAEYKASISKFKLIYLIFHALVGDQEIAVPYPMMIAKLEDAINKHNSWAEQCNAFFMFPDHQSWDGLLSLRDSGQSVAFDCTEMDKVVAEIKKIEEWLTHCHCTLFPDGNNSDSLLSALLKIRGSMDNACMLYSDCNQKGLCAICSCDVGDHITPRCMICQARYHSSCVEPLPASTQVTREWTCPFCFHLESGDPLQNRLQEKISKGNRPALPALIGLRSFAKGFYSGIEELDLLEEIAEKAHKFKSYLMQILHDADSYHGEDLSVMHRSLLIALKATSAAGINDRQFSYRFDSLAHED

SEQ ID NO: 23846 - protein, 208 aa, Oryza sativa
  unsure (1)..(208): unsure at all Xaa locations
  Clone ID: TF_LIB4309-005-Q1-K1-A4.pep
MDAKEEAVEQEGGAAADKAKDIPVTSNGKTDAGGNEVAEMKVEKLENGDGHLKADGDSNGDNKGADGEKQLMLASAGEDVEDPVLSKLASNSFMFDYSCGGDDSGTEEEQAAFMKELERFYREKLMEFKPPKFYGEGLNCLKLWRQVTGLGGYDQVTSCXLWRQVGESFXPPKTCTTVSWTFRNFYEKALLXYEKHKIETGEFQVAAS

SEQ ID NO: 23847 - protein, 258 aa, Oryza sativa; identical to SEQ ID NO: 16237
  Clone ID: TF_OsC325_1.pep

SEQ ID NO: 23848 - protein, 268 aa, Oryza sativa; identical to SEQ ID NO: 16259
  Clone ID: TF_OsC151708_1.pep

SEQ ID NO: 23849 - protein, 272 aa, Oryza sativa; identical to SEQ ID NO: 16254
  Clone ID: TF_OsC413392_1.pep

SEQ ID NO: 23850 - protein, 375 aa, Oryza sativa
  unsure (1)..(375): unsure at all Xaa locations
  Clone ID: TF_OsC170713_1.pep
MGQMDGGDGGGGGHPYHYQALLAAVHQQTVPFPNPFPAPSSGAEPPHPHNHNHNHNHNHNIHNSHNHNHNHNAAPHPCHTPTPTPTPRGFADWSASTSAFTSLAAHSSTAPSNAVHYSFSPCYAFWTHYMLNKNAYPTSFPAPHDDHLRLANNNHPRDAPGPASSYGVESFTSPSMAPNICTHMPPIEGPISAKEDKKPEILPRVVKSSDELETRNSNVEFHSETVGTLPESKQGHDSRATKLLNSGEYQVILRKELTKSDVGNVGRIVLPKKDAEASLPPLLQRDPLILHMDDMVLPVTWKFKYRYWPNNKSRMYIGXAGEFLKTHGLQAGDVHILQKTLASWPNFIIPEEEKAHIQPDHKSLDAFGVNCNSVS

SEQ ID NO: 23851 - protein, 530 aa, Oryza sativa
  Clone ID: TF_OsC80572_1.pep
MADARGSSSSSGDGGGGEGNGGAGHGDFVGGGQHNWYHGILGAVPPPNVGRQNIVHHQYPAASLIQQHHQSPTMPLPMAQLPYVPQYTVLPTPAVLPSHHHHHGQSQISQENFQDWVPSNNVAAPHVPSAFQDWRQMCNGSAFMPFGQTAANSNVFYQNLTFNSWTSNNMPRNPVYTSFHPAAIEDHHAPLFHSNNHDIDPEFLGNRHLHGVDIAGAPPAKATSPATAGGLLTNTAPATVSQIHARCRRRQIYRCCGLLPRAPPPSDPCAFARAAITAARSARGLLSHLYGGLVFWLVGKRKLGEKRERKRKVVAGMDPPIVFRRSDMESEKNDDNPDQTPVSEPPSMNQNGENLIIRFNCREYRVILRKELTNSDVGNIGRIVMPKRDAEAHLPALHQREGVTLKMDDFKFETTWNFKYRFWPNNKSRMYVLESTGGFVKHHGLQTGDIFIIYKSSESGKFVSSVPFTSTTYGESDGEDYNGDRSGPGAGEVADEDFRKPEFGWYCCAKINRKESEIREQVSKEKVNSN

SEQ ID NO: 23852 - protein, 728 aa, Oryza sativa; identical to SEQ ID NO: 16256
  Clone ID: TF_OsC159728_1.pep

SEQ ID NO: 23853 - protein, 267 aa, Oryza sativa; identical to SEQ ID NO: 16257
  Clone ID: TF_OsC413391_1.pep

SEQ ID NO: 23854 - protein, 400 aa, Oryza sativa; identical to SEQ ID NO: 16200
  Clone ID: TF_OsC11135_1.pep

SEQ ID NO: 23855 - protein, 449 aa, Oryza sativa
  unsure (1)..(449): unsure at all Xaa locations
  Clone ID: TF_OsC55481_1.pep
GVLPCMDAKARSQLLPRYWPRITDQELQHLSGDSNSVITPLFEKMLSASDAGRIGRLVLPKKCAEAYFPAISQAEGLPLKVQDATGKEWVFQFRFWPNNNSRMYVLEGVTPCIQSMQLQAGDTVTXIDKGALPQKEGPGTSSSSPLPVKRKATSVGPKIKRFHMDSEESMELKITWEEAQELLRPPPKAPSIVVVDGHEFEEYEEPPILGRRTYFVTDQSGENHQWAQCEDCSKWRKLPVDALLPSKWTCSDNKWDSERXTCYFRTXSLLYAVFMISYNRKSAAKKTKGKVDTDNIDVSDGLDTLANLAILGEGESLPSQPTTRHPRHRPGCSCIVCIQPPSGKGPKHKQTCTCNVCMTVRRRFRTLMMRREKRQQSEKDSGVPRKREPGQSSEPVPQXNKRTSSPVKNQIDLNSQPEREDDLEIVKFSSASSASGAVFTTSGTVTSTG

SEQ ID NO: 23856 - protein, 877 aa, Oryza sativa
  unsure (1)..(877): unsure at all Xaa locations
  Clone ID: TF_OsC1713_4735.pep
MADEGERVCIIVDEMEREDSDNEEADDDASSDEEGDVMATNWANEDFSGLVISEGDHVPWEYKENEVIEGARYAHKDEMKEANGWDEKGLPAKWPDIRSRWCMRHMGANFYKQFKNKHLMELFKRLCAQNQEKKFNELWDKLDELTTKQTDEQSRRPQVEGDEPPIPLGALHDDPPTMRSRSGSSIRNFTQWIENEPKEKWSLLFDTDGSRKCDLRGHTYKKCPKNAEVPSGADASPSRQASDGMAYDTPALLNRGIDRNHRSFPSAVEGAQLGTFRPRTSREWLRVDPRHVPWYALVEAAADDRDPAKRWDADRSLLAALVDRWRPETHTFHLPCGEMAPTLQDVSYLLGLPLAGAPVGPVDGVVGWKEDITARFEQTDLLHPDADDYSVRRSLEAYLLWLFGWVMFTSTHGHAVDFRLVHYPRSIADAQPQDVPQWSWGSAMLAATYRALCEACTKTDAGAIIAGCPMLLQLWAAERFAIGRPVVDSAPYGVGRSTQWPEDGPTMGTYWCRRGRRYAHVQVRRGYPDFVFEFDRLQPSDVIWEPYTEEAVAARAPLGLSSLCTRDQAYWLTILPMVFDIFVEPHCPQRVMRQFGLRQVFPGNVQPTVLPADHSLTRRGQLAGALWAPRVQQYVDDWVLATEEVINELFPHTEENYRDYLRWYLPRTRARVTFTPDAPEPHVAAVTDAYPTHRDRDYFVGADAARDISADITAVQVRLNRAPWTSYLQLVRYNHGLARLPSEQDLDLRHLFRTDLVCLRAPLASEQCDLQHRTSSAFERVRRHDRRFRELRRGVRHLFGRVRQLFLSRSVDPSPTRRDLRYWGLFVSRRXGGAPEAHTQEQPEVTPVXAGRVARAVPPDRLTYSQGHIRAQGTLGW

SEQ ID NO: 23857 - protein, 433 aa, Oryza sativa; identical to SEQ ID NO: 16262
  Clone ID: TF_OsC80572_2.pep

SEQ ID NO: 23858 - protein, 313 aa, Oryza sativa; identical to SEQ ID NO: 16264
  Clone ID: TF_OsC255862_1.pep

SEQ ID NO: 23859 - protein, 305 aa, Oryza sativa; identical to SEQ ID NO: 16250
  Clone ID: TF_OsC77518_1.pep

SEQ ID NO: 23860 - protein, 979 aa, Oryza sativa
  Clone ID: TF_OsC29041_1.pep
MRKAFLFLLLLIGVQMAGMAAAAAALVAAKRCMNAACGAPAPSPAGGEWRKGWPLRSGGFAVLCDKCGLAYEQLVFCDIFHQKESGWRDCSFCGKRLHCGCIASKNSFDLLDSGGVQCVTCIKNSAVQSVPSPVVPKLFSSQNNQRLFGKSDDLLSGRPLETSSLMVDARNDDLTIIAKNNLPFMVKNVEAGQSSNILRQKELENGARQIKWELPTLSIGDMGRIPFLTRSQSALESRRDENKDPTTESTTSESLSEACLNMSLGIASNGNKLEATSTVERPMLSPTTGFPEGRELTTALSPFQHAQRARHFLTRPPRVGEGAVFDPTKDMLPHLRVARPPAEGRGRNQLLPRYWPRITDQELQQISGEYPYYIYQLLGDIMHNSNSTIVPLFEKVLSASDAGRIGRLVLPKACAEAYFPPISQPEGRPLTIQDAKGKEWHFQFRFWPNNNSRMYVLEGVTPCIQSLQLQAGDTVTFSRIEPGGKLVMGFRKATNTVSLPDSQISAIANGSILGDTLFSSTNENLAIVSGYSGFLQSIKGAADLHTSSIYDHHVNSADGDVSWLKTDKFGSRPDEGSLQFLKRGRNIGSKSRRLSMDAEEAWELKLYWDEVQELLRPAPTAKPTVVMIEDYEIEEYDEPPVFAKRSIFTIRSTGEQDQWIQCDDCSKWRRLPLNVIVASKWTCADNTIDSKSCSCSAPEELTPKELHIVLQQYEDMRRRRNSFGFKQNIPEMDAVSLDAFATAAVYGDVGNQGSPSVATTTKHPRHRPGCTCIVCIQPPSGKGPKHNPACTCNVCMTVRRRFKTLMMRKKQRQSEREEAEASKKIAWMNRDEPEGSSLSRSPQTVDTTRDGDVTMFDKVDINKGHIDLNFHPTAVRDEERHGGQPRVSMVSLLEVANRPLENYMKQNGLTSLAGEQGSSSTCTGAATVPQPALVESEERTSNNDGGRVATAEQPESMAVDEAGDNQPDKAAGDSAAALA

SEQ ID NO: 23861 - protein, 176 aa, Oryza sativa
  Clone ID: TF_uC-osflcyp024e03b1.pep
WPRITDQELQQISGDSNSTIVPLFEKVLSASDAGRIGRLVLPKACAEAYFPPISQPEGRPLTIQDAKGKEWHFQFRFWPNNNSRMYVLEGVTPCIQSLQLQAGDTVTFSRIEPGGKLVMGFRKATNTVSLPDSQISAIANGSILGDTLFSSTNENLAIVSGYLGILQSIKGAADLH

SEQ ID NO: 23862 - protein, 636 aa, Oryza sativa; identical to SEQ ID NO: 16266
  Clone ID: TF_OsC51357_1.pep

SEQ ID NO: 23863 - protein, 816 aa, Oryza sativa; identical to SEQ ID NO: 16268
  Clone ID: TF_OsC28675_3.pep

SEQ ID NO: 23864 - protein, 560 aa, Oryza sativa
  Clone ID: TF_OsC98543_1.pep
MDGMKDGRDEEVATDAVGAGGVDVGGETSKLIDQDCMAILDVLARRLMSGESEPYIGKIIKIWQQNQAKKVKILWFFLPDEIRKHLSGPVMEKEIFLACGEGVGLADINPLEAIGGKCTVLCISKDERNRQPSPRELAMADYIFYRFFDVNSCTLSEQLPEKIAGVEGNLLLNSKVEQVTSCSDQEVHGVDQKMLNVPVPLPQSTVMEDESPVAAVSLPPSVFKEENVASAIPFPQPVVKEESAAAAIPPPHVALKEESVSKSTENITKPAQKVLPGERPPKRVKFSENVTVQNVPLDVPERPSRTGPLELAGRQADRSKWFKIPWDTRLRNADEQGTLVYIQNLDIQFAAADIEELIRDALQLNCIAKPINHPTYDDPNNGKAYAIFKTKSAADSAISKINSGLVVGGRPLYCSKGLLKVPKPSETLLGHLTINNIRMGIRQREEQVLMLSYEVCSISFLCLNIFAQPLFFLQKKAVSTSHCSQPNTMEYDLALDWMLVRAKQETKFRTLHKLLNAATGLGRLKIDTANSGDRLVGIVGIAKDDHVFVLDALGEPYAGS

SEQ ID NO: 23865 - protein, 812 aa, Oryza sativa
  Clone ID: TF_OsC866_1.pep
MDLSATPSRSKSGLRSSPRKPVAAPAVAQMDLSTPSKPTPRRKPKAPPGGGSDVPRDPVLRPPLLPPPRDADQGNFRDPREAHPNPEAERAAPSPSPKTPTQSEPKRQRQRQRQQPKKPKKRAYYRKVVYDGGEFAAGDDVYVKRRDGAESDAEDPEAEECRVCFRAGAAVMVECDVCLGGFHLRCVRPPLRRVPEGDWACPYCEAERAGKAIERPKPPEGKRIVRTAKEKLLSSDLWAARIESLWREPDGIFWAKVRWYIIPEETAAGRQPHNLRRELYRTNDLADIEMETILRHCYVMSPKEFKDASDQGDDVFYCEYEYDIHWHNFKRLADIDDEPETKEDPGDEPYNAGNDYVSDSDEDSEYDEEEEPTKCSSARTHQSHALAANLRKGRTYGLQKIGIRKIPEHVRCHQKTNLEKAKATLLLANLPKSLPCRDKEMEEISAFVKDAICNDQCIGRCLYIHGVPGTGKTMSVLAVMRRLRSELDSGNLRPYSFIEINGLKLASPENIYKVIYEQLSGHRVGWKKALHYLTEHFSGGTKIGKQANQPIILLIDELDLLLTRNQSVLYNILDWPTRPNSNLVVIGIANTMDLPEKLLLRISSRMGIQRLCFGPYNYRQLQEIITSRLKGIDAFEDQAIEFASRKVAAMSGDARRALEICRRAAEFADYRVKQSGHTSVNRGKNVVCMGDIEAAIQEVFQAPHIQVMKNCPKFGKIILVAMVHELYRSGLGEVMFDKLAATVLSWCHVNRELLPGYDNLLKICCKLGEGKIIFCEEGTKHKLQKLQLNYPSDDVTFALKESPDIPWLSKYL

SEQ ID NO: 23866 - protein, 227 aa, Oryza sativa
  Clone ID: TF_OsC3802_2.pep
MAKTKQGKRDVDSYTISGTNKIVRVGDCVLMRAADSENQPYVGRVERLETDGRGSVRVRVRWYYRPEESKGGRRQFHGAKELFLSDHFDTQSAHTIEGKCVVHSFKNYTKLDNVGPEDFFCRFEYKAATGAFTPDRVAVYCKCEMPYNPDDLMVQCDGCKDWFHPSCMGMTIEQAKKLDHFVCSDCVKENGAKRPSHAYPASSKYEPKWIQGFSLSTGISLLLFHFW

SEQ ID NO: 23867 - protein, 247 aa, Oryza sativa
  Clone ID: TF_OsC97337_1.pep
MAKSRPPKRILESYTIKGSDKVIKHYGSSVSGDCVLMRASDTSKPPYVARVEAIEAAGSRGTNVRVRVRWYYRPEESMGGRRPFHGAKEVFLSDHYDVQSADTIEGKCNVHSFRSYTKLDSVNAEDFFCRFEYKSATGSFVPDRIAVFCKCEMPYNPDDLMIQCEECSDWFHPSCIGMTIKDAKKLEHFFCQSCTAENGKMAENSHEATAQSEEKVTFVLFVMSQGSSWETVPIYSYGSKSGVILQL

SEQ ID NO: 23868 - protein, 1407 aa, Oryza sativa; identical to SEQ ID NO: 16282
  Clone ID: TF_OsC65931_1.pep

SEQ ID NO: 23869 - protein, 1614 aa, Oryza sativa
  Clone ID: TF_OsC13482_1.pep
MVRRGAGGRRGGIGGGDDARLCMGGAKAADGREFRVGDCALFQAVEVPPFIGLIRWIEKKEEGFPKLRVSWLYRPADIKLNKGTQLCAAPNEIFYSFHQDETSAVSLLHPCKVAFLRKGVELPAGISSFVCRRVYDIDNKCLWWLTDQDYINERQEEVNRLLHRTKLEMHAAVQSGGRSPKRLNGPSSAQQKSGSDGAQNCGLSKGKKRDRGEQGTDPAKRDRERPLKAEDGESGNFKVENLKSEITKITEKGGLPHAEAVEKLVHLMQLDRTERKIDLPGRVILADIIAATESPDCLGRFVQLRGLPVFDDWLQEAHKGKSGEGGSPKETDKPMEEPVLALLRALAKLPINLTALQSCSIGKSVNHLRSHKNPEIQKKAKCLVENWKKRVDAEMKSNDVKPVVSGQAVSWPGKPGFPEISSAGNRRSGSSESSLKSPVSQLSSSKALTSKPVAADAAAKSSPVISGSSKLQHMQPGNAVTNLKEQPSKSTGGTCGSELPAVKEEKSSSSSQSLNNSQSCSSEHAKTIGSSKEDARSSTAASGVAYKTSGSSSRVHRRTNNGLLGSGIQKEAAVARSSSLDHSSVQEKVSQSGTACEKGADIQSDQGNSHRLIVRFPNPGRSPARSASGGSFEDPSFTGSRASSPVADKHEQSDRRVKMKTENSNPHLGNDTNAESWHSNDVKGASVSEEGDKSPRAMLTDDSKTTEGAGRDVPVSRVACSSYANEKGICSSETGLTKLFNPMNALIEIKYSEASHSLQAGDDTAMNLLASVAGEISKSELISSSPSPRNSSANEQGCEGDNIGKLKVECDVSLPQHAGPSNEVEKVISEKSEKSGVGLVGKELHREDVNMLSVNNLLSQGDKGTTSAGSSPLPEIDSKAKTENREVEDTDKCSHPPSRGDDGVKSNAKQPIGFKIDTNSNIKSSTTSEYRSAFTVRGKVEDGCTTSSDVGSTLGDQCKLAVSNRKMLPAEEPLCGGDKQAHGLLKPTDQKHLLGLPDYSEHIDKSGDSTANKLKLKPSFSSSTVEVNKADGLLVGSNTVLKEDEKKEHPADVTKLAVATGVKHGPENGISSKESKDNSSESSSHTRPGGTVSQETEHSAQRSSKKSSDDAGGKDDLVSSDDGSSFSAKTRSNATAKLDFDLNEGIPGDEGHLSEPATSPAVCSSAIHLPRPSPFVSPDASGNEDPIAAPDKGPFVPPDNLIRLKSETGWKGSAATSAFRPAEPRKIFEMTLSASGILVSDAAGKNRPALDIDLNVADEQFLEEDVSQSSVQTTGSESGNTRRSNGPVRSVGFKLDLNRADEVAENGQIVSNTNHRVEVPLLSRPLPGVFSSSDANSSRDFDLNNGPTLDEAGTEHAPRSLSSKNTSSIPFLPQVASMRMNSAEMSNISPWFASANACAPVAIKSFLPSRGEQPHPVETAAGSGTQRIITSLADGVQHGSDPSRTPVISTSPTMMFHPPAYQYAGFPFTPSVHLQAPGFSIGSTSYANSAPGGIPYFPTIAPTLVGPAGALPAQHTRQYAINLPEGSSTVGHDNNRKWGRQGLDLNSGPGSVDVEVKDDRVTLPVRQNFIAPPHAFVDEHTRMYQMPPGVGIKRKEPEGSWDAERSSYKQLSWQ

SEQ ID NO: 23870 - protein, 1544 aa, Oryza sativa; identical to SEQ ID NO: 16284
  Clone ID: TF_OsC57123_2.pep

SEQ ID NO: 23871 - protein, 258 aa, Oryza sativa
  Clone ID: TF_OsC33365_2.pep
MAKTRQPQKRVLESFTIKGPDGVIKREDPFLDPFIYLSRFLLFWGKFWIVESRYYLRFRSIVEMNTGDTVLMMAPDSSKKPYVARVEEIEATGPQASQVKIKVRWYYRPEESIGGRRPFHGSKEVFLSDHYDSQSADTIEGKCYVHTFRDYTKLRSVSAEDFFCRFEYKSATGSFVPDRIAVFCKCEMPYNPDNLMIQCEDCSDWFHPSCVEITIKEAKKLEHFYCKSCIAENGKDLQKSNGATVQSEEKGFRFYPYF

SEQ ID NO: 23872 - protein, 1862 aa, Oryza sativa
  Clone ID: TF_OsC57123_1.pep
MVRRASVAACLTCPLCGRLLRDATTISECLHTSYGIFNCVLFRVDHSMQFVRSRIFPFKRRKVENPEIICPVASPVKRKERSLSSLTIPAPQVSIQKCLTKRRTKASCLRNFPLHSTSRGSKDTSKKLGGWRPLGCQLKLGKDKKSLKSSVKDTNRTKSKSGDTDDGAPASKAKAREPFTRYGRAAKRTGRKKLLMLKNKKKRFKAKQPSKKRRFRALWFYLLAAFDQRGVPTLPQLPAKYLRIKDVDLPASIIQKYLAQKLNLSSETEVEVLCGGKVVNQGMTLHDLADCWLEKGPKSRMRSSFCLCLGCLWGFVADRGVVGRADRGRVMRGAMAKSPRSVVTTGTKRRRAKVHKEDEPVENENLESEFDVSKKESNGATEPGNEPVASKRPKRAAACSNFKEKSLDLSEKDSIITIKESRVEEKEIEAVNLTRTGPEDGQPCRKIIDFILHDGDGNLQPFEMSEVDDIFITALIMPLDDDLEKDRGKGICCSGFGRIENWAISGYDEGAAVIWVSTETSDYKCVKPASSYRSYFEHFSEKARVCVEVYKKLARSVGGNPQVDLEELIAGVVRSINSNRSFNGTVTKDFVISSGEFIYKQLIGLDHTAGNDDEMLATLPVLVALKDECKSRAGFTHLPAMPSNGTLRIKDGQDKGLTEDEDAKLARLLQEEEEWKMMKQRGKRGTSQKNIYIKICETEIANDYPLPAYYKPYNQEMDEYIFDSDIGMYSDDVPVRILDNWALYNSDSRLISLELIPMKAGAENDIVVFGSGFMREDDGSCCSTAELAQLHSSSSKSGREDPGVPIYLSPIKEWVVEFGGSMICITIRTDVAWYKLRQPTKQYAPWCEPVLKTARLAVSIITLLKEQSRASKLSFAEVIKKVAEFDSRHPAFISSKAPTVERYVVVHGQIILQQFADFPDESVKRCAFITGLLAKMEESRHTKLAIKKKSQQMRGENLNPSAKMGPILRKKLMRATTTMLISKIWGEYYATYFPGDTKEEDQNEPKEIDDDQEENEDNDAEEEVNVQDEKATRTPPSTRSRKSSADTRKEIKWEGQTAGKTVSGEVLYKCVIVQDLSISVGATVTTEDDSGETIMCFVEYMYEKLDGKNMIHGIILQEGSQTVLGNAANDREVFLTNDCLEFEASDIKELVTVNIQSLPWGHKYRKENSEAKRIEKAKAEERKRKGLPVEYICKSLYWPEKGGFFSLPYDKIGNGTGICSSCERKPVGNEFKLLSESSFVFENITYNIHDFLYIRPEFFSQGEGHETYKAGRNVGLKPYAVCHLLSVHGPAGSRKANPESTKVKVRRFYRPDDISSTKAYSSDIREVYYSEDIISVPVVMIEGKCEVRLKDDLPNSDLPAVVEHVFCCEYLYDPANGALKQLPPNVRLVTLTRKVPASKKNKGKQICDIELGGSDKPKDGQSENCLATLDIFAGCGGLSEGLQRSGLSLTKWAIEYEEPAGDAFGENHPEAAVFVENCNVILKAIMDKCGDSDDCISTSEAAERAAKLSEDKIKNLPVPGEVEFINGGPPCQGFSGMNRFNQSPWSKVQCEMILAFLSFAEYFRPRFFLLENVRNFVSFNKGQTFRLTLASLLEMGYQVRFGILEAGAYGVAQSRKRAFIWAAAPGETLPEWPEPMHVFASPELKITLPDGKFYAAVKSTAAGAPFRSITVRDTIGDLPAVENGAGKPTIQYGSGPVSWFQKKIRSDMASLNDHISKEMNELNLIRCKHIPKRPGCDWHDLPDEKVKLSTGQMVDLIPWCLPNTAKRHNQWKGLYGRLDWEGNFPTSVTDPQPMGKVGMCFHPEQDRIITVRECARSQGFPDNYQFAGNIQSKHRQIGNAVPPPLAFALGRKLKEAVDAKRQ

SEQ ID NO: 23873 - protein, 216 aa, Oryza sativa
  Clone ID: TF_OsC3802_1.pep
MAKTKQGKRDVDSYTISGTNKVVRVGDCVLMRASDTEKPPYVGRVEKMELDGRGSVRVRVRWYYRPEESKGGRRQFHGAKELFLSDHFDMQSAHTIEGKCVVHSFKNYTKLDNVGPEDFFCRFEYKAATGAFTPDRVAVYCKCEMPYNPDDLMVQCDGCKDWFHPSCMRMTIEQAKKLDHFVCSDCVKENGAKRPSHAYAGSSKYEPKAESKRQRR

SEQ ID NO: 23874 - protein, 1761 aa, Oryza sativa
  Clone ID: TF_OsC12270_1.pep
MEAEAEAVADLDEIDREMSRAESRKRQRRTAKEKPGARKGATEWKPEDVEKAAAAEGVAELDEIDREMPRPELRKRQRRTAKEKPSAHEGATEWKPEDVEKAAAQEPEGTELDSGLSPAESRGKRQRGVEKVKRRTRKKTAKEKTKETTEKSAAQAPEKMKVNDAGGALAEDVCADEPDAEQMAMEEEEEAADVLEAEERMGKCVGEGSAEKAATRKRVARPSTARRVEDSDDHFVGDPVPDDEARQRWPVRYSRKGSDSLLKQEPDEDEEMKARCHYLAANVDDEIYHLDDDVYVKAGPDEENYIGRITEFFEGVDRGSYFSCQWFFRTADTVISSKLLKVHDHRHNHKRVFLSKEKNDNLIECIVSKVKIAHVDPNMTPQARAHAISDCDLYYDMSYSVAYSTFANLPADNDGALGSEATSNISCDDADNSSKGKLSADIVAPYSEQTETASLLDLYSGCGAMSTGLCLGFAFSGINLETRWAVDINKYACACLKHNHPYSQVRNEKTEDFLALIQQWDALCRKYVVHKNDTLEPSIDMPLNDADDVNEPLPEDIFDVEELLEICYGDPSNTGKNGLWFKVRWKGYDPSYDTWEPIDGLSDCPERIKEFVEKGHKENILPLPGAVDVICGGPPCQGISGFNRFRKHNDPLEDEKNKQLVVFMDIVKYLRPKYVLMENVVDILKFADGFLGRYAMSCLVAMNYQARLGMMAAGYYGLPQFRMRAFLWGALPSMVLPKFPLPTHDAVVRGIVPTTFSQSVVAYNEVDTRCLRKALLLADAISDLPKVGNDQPKDVIEYSVAPKTEFQRYIRNNRKDIQDYSFRGDDPSEEGKLFDHQPLKLNKDDYERVQRIPVKKGANFRDLKGVIVGPDNTVRLDPNISRERLSSGKPLVPDYAISFVKGKSTKPFGRLWWDETVPTVVTRAEPHNQIILHPSQDRVLTIRENARLQGFPDYYRLIGPLKEKYIQVGNAVAIPVARALGYALGLAYRGESDGDRAVLKLPESFIYADQETVVKSSAGTPGSEIADSEQLFEYFINPNFFCMMFAFLKVNVVIPLILDSRRGLSRRGAEEGEARRAVPFQNILSWEGWNRLDHRRGEIRLDVRREMDDSPLDNLFDGNGLDSSAGADSSSSTGSPPSSTSSSPPSSQSPPPGSSPPPASPPPSTPSAPPTNSSGSAPSPPSPSQSAPPANTGGGGSPPPSHGSPPAPKAVQSQPAPKRSGDGGSSSDSGSSKEGGSSSDRGKSESNGNRPGPEAAIIAGMVIGFFTFALLLAVRACVCCSKKKKRPPHMHMPYYTDENGKVYYANSMPRWQNSVDQGGGWHAQYSPGQAPPSSEMSGSHGAGPLPPPSPGMALGFSKSSFSYDELALATGGFSSANLLGQGGFGYVYRGVLAGSGKEVAVKQLKAGSGQGEREFQAEVEIISRVHHRHLVSLVGYCIAGSSQRLLVYEFVPNDTLEHHLHGLHIFPALFPAIVTRHSEGRAGDGLDDEARHRARLSQGPRVPSRRFLQGQILSVRPSNDLICCIVVVTYEGHPRIIRRDIKAANILLDENFDAKVADFGLAKLTTDTNTHVSTRVMGTFGYLAPEYASSGKLTDKSDVFSFGVMLLELITGRRPVDPTNYMEDSLVDWARPLLARALSEDGSFDELIDQRLENKFDRLEMERMAACAAAAVRHSAKRRPKMKQIVRALEGDASLDDLNEGVKPGQSMMFSTGSEYDSGNYASDINRLRKVAFESSIEDSSEYGTHSSADSGEPPRRQQHR

SEQ ID NO: 23875 - protein, 1536 aa, Oryza sativa; identical to SEQ ID NO: 16289
  Clone ID: TF_OsC13482_2.pep

SEQ ID NO: 23876 - protein, 844 aa, Oryza sativa
  Clone ID: TF_OsC58534_1.pep
MAPSSPSSAAAPTRTSTRKRAASASASAKATDEPSTKRTRRPKAETKPRKKKDEVKEEEKPPMEDDACGEEPDAEEMALGEEAEAEEAEAEQKQLDAPAPGVARKRVAQPSRVRHGSDGDHDPEFVGDPFPAKEARDKWPQRYQRNAATRRPDEEEDIKARCHYSSAKVDGTLYCLHDDVYVKAEEDKADYIGRITEFFEGTDHCHYFTCRWFFRAEDTVISSIMMENADDEKHDLKRVFLSEEKNDNVLDCIISKVKIVYIDPNMESEAKARRLADCDLYYDMSYTVAYSTFANIPLGSEASSVGKATLLDLYSGCGGMSTGLCLGAALAGLNLETRWAVDFNSFACESLKYNHPRTEVRNEKADEFLALLKGWHSLCDEYVKKDIDFSSAGASENEEDDDEPLEKDEFVVEKLAGICYGGSGREDGLYFKVQWKGYGREEDTWEPIENLRDCPLKIKEFVQEGYRRKILPLPGDVDVICGGPPCQGISGFNRFRNRKEPLKDEKNKQMVTFMDIVAYLKPKYVLMENVVDILKFADGYLGRYALSRLVAMKYQARLGMMVAGCYGLPQFRMRVFLWGALPTMVLPKYPLPTHNVVVRGGAPNAFSVNNHQPNEVMEYGSSPKTEFQRYIRLSRKEMLDSSFEGKDGPDLGKLLDHQPLKLNKDDHERVQQIPVKKGANFRDLKGVRVGANNIVEWDPDVPRVYLSSGKPLVPDYAMSFIKGRSLKPFGRLWWDETVPTVVTRAEPHNQARVLTVRENARLQGFPDYYKMFGPIKEKYIQVGNAVAVPVARALGYSLGLAYQRESEGSSPLFVLPDSFTEVGRQAAPARASSVGIPVGEVVEQ

SEQ ID NO: 23877 - protein, 218 aa, Oryza sativa
  Clone ID: TF_OsC33365_1.pep
MAKTRQPQKRVLESFTIKGPDGVIKPGDTVLMMAPDSSKKPYVARVEEIEATGPQASQVKIKVRWYYRPEESIGGRRPFHGSKEVFLSDHYDSQSADTIEGKCYVHTFRDYTKLRSVSAEDFFCRFEYKSATGSFVPDRIAVFCKCEMPYNPDNLMIQCEDCSDWFHPSCVEITIKEAKKLEHFYCKSCIAENGKDLQKSNGATVQSEEKVQSKRRRR

SEQ ID NO: 23878 - protein, 1568 aa, Oryza sativa
  Clone ID: TF_12002700.pep
FLQTEIKSQLCDLETKLHKEELSEEGYLAKVKSLLNKDLSLENGTHTLTQKANGCPANGSRPTWRAEMADSNRSPRSRPKPRGPRRSKSDSDTLFETSPSSVATRRTTRQTTITAHFTKGPTKRKPKEESEEGNSAESAAEERDQDKKRRVVDTESGAAAAVEKLEEVTAGTQLGPEEPCEQEDDNRSLRRHTRELSLRRKSKEDPDREARPETHLDEDEDGKKDKRSSRPRSQPRDPAAKRRPKEAEPEQVAPETPEDRDEDEREEKRRKTTRKKLESHTVPVQSRSERKAALSKSVIPKINSPKCPECGQHLDDPNLKYQQHPEDAVDEPQMLTSEKLSIYDSTSTWFDTYEDSPMHRFTSFSVYCSRGHLCPVDTGLIEKNVELYFSGCAKAIHDENPSMEGGINGKNLGPINQWWLSGFDGGEKVLIGFSTAFAEYILMEPSKEYEPIFGLMQEKIYISKIVVEFLQNNPDAVYEDLINKIETTVPPSTINVNRFTEDSLLRHAQFVVSQVESYDEAKDDDETPIFLSPCMRALIHLAGVSLGQRRATRRVMGATKEKDKAPTKATTTKLVYQIFDTFFSEQIEKYDKEDKENAMKRRRCGVCEVCQQPECGKCKACKDMVKFGGTGRSKQACLKRRCPNLAVKEADDDEEADDDVSEMPSPKKLHQGKKKKQNKDRISWLGQPMKIEENRTYYQKVSIDEEMLEWATGSRSFPDDSSKPLYLARVTALWEDKNGQMMFHAHWFCAGTDTVLGATSDPLELFLVGECENMQLSYIHSKVKVIYKAPSENWAMEGGTDPETTLPGAEDGKTYFFQLWYNHDYARFESPPKTQPTEDNKHKFCLSCIRLAELRQKEMPKVLEQIEEVDGRVYCSSITKNGVVYRLGDSVYLPPEAFTFNIKVASPVKRPKKDPVNETLYPEHYRKYSDYIKGSNLDAPEPYRIGRIKEIHCGKKKGKVNEADIKLRLYKFYRPENTHRSYNGSYHTDINMLYWSDEEAVVNFSDVQGRCTVEYGEDLLESIQDYSQGGPDRFYFLEAYNSKTKNFEDPPNHARSPGNKGKGKGKGKGKGKHQVSEPKEPEAAIKLPKLRTSGVFSGCGGLSEGFHQAGISETLWAIEMWDPAAQAFRLNNPGTTVFTEDCNVLLKLVMAGEVTNSLGQRLPQKGDVEMLCGGPPCQGFSGMNRFTLPHLSPSSNNSLVVSFLSYCDYYRPRFFLLENVRNFVSYRRSMVLKLTLRCLVRMGYQCTFGVLQAGQYGVAQTRRRAIILAAAPGEKLPLFPEPLHVFAPRACQLSVVVDDKKFVSNITRLSSGPFRTITVRDTMSDLPEIQNGASNSEIPYNGEPLSWFQRQLRGSQYQPILQGYLQGHGPLVAARMPHIPLFPGSDWRDLPNIQVRLGDGVIAHKLQYTFHDVKNGYSSTGALRGVCSCAEGKACDPESRQFSTFIPWCLPHTGNRHNHWAGSYGRLEWDGFFSTTVTNPEPMGKQGRVLHPEQHRVVSVRECARSQGFPDSYRFFGNILDRHRQVGNAVPPPLAKAIGLEIKLCLLSSARESASAAVKAKEEAATKD

SEQ ID NO: 23879 - protein, 658 aa, Oryza sativa
  Clone ID: TF_OsC5082_1.pep
MGRRRRFAQLATTSDDDDDDAPAADAPPKAKPPPPPSSSSGPKKPKQRRLSSAAADDDDDVEEDDLELEEEEEDEKDLEEMRRNEEEERREETQTRRRRRRRGRKPKRPAEESEEDEEEEEEEAKAEEAREEENTEAVPIGEPVKITGRGKKQRKHYTSFEYEGNTFELEDPVLLTPEDSKEKPYVAILKDITETEGSLSVTGQWFYRPEEADKKGGGSWKASDTRELFYSFHIDDVPAESVMHKCVVHFIPQHKKIPSRKEHPGFIVQKVYDTVAKKLWNLTDKDYEDNKQHEIDLLVKKTIDRIGQLSDIEPADAPGDNNDQLSNKRGLRKRPVLPIDVSRDDALAGKSEQFGKAETPGSDKLKNYATLVKYKAVTGDQYRDRWLDKLVDTIPLTSKESAGASHADPGGATKSSTNGSSAKEDNEKSYSPDVIVSIMASLERSTYEALGSDFQKYNQKLRQLLFNIKNSPVLRNRLMNKELDPPVLLTMSPDELKVGLTAAERTSEPEESRKLQMTDARCVRCAEKEVGVSDIIHAGHGDRYQKVVASRRENEVVNVGGDRTLRLARLVASGGSVGTAPWATAKFDVMEKQLTSPRDHQPDKPLADALHKSAAPVHAHAGEAEIVRQAQARRALVGASSWPRVDQTVHTHYTSRQN

SEQ ID NO: 23880 - protein, 730 aa, Oryza sativa
  Clone ID: TF_OsC6126_1.pep
MVFQKRSSLEMESGGGSHVAEMPRVPKSARGKRSIRKKESQGQVMCAFDLLATVAGKLLDEGEGSLGNASSGTPAVDASPKDVRVKQEQCDEEAKHFKNEVMDQDSCNESALVSHIAFQRPVNHHGRKGEDPEGSHAVIEDPKAKSEALDKESSMISCTKAELGCNFAAIADRWSPESVESGAFTGDAAAIAMPATTSGFHKNAPDMYNLLDPMDVDVKPPPLVSSDSTGEMPLYGNKIRRSTSFPRVPKGGAGFTVDRDEDDDDKSSGCTHPSTATNRGFRPNCTAGHSRVKKLLACKHRKVAPARMHKGDLSYSGEHCEIPFTFSFFEEHCIDGTHIQTCLLYSYLSSLILLDVDRKPSFRNKKMYYTRQRTQRSTFKRRKMFDRHSAQVSEEYAKANTKFAARDSHAVSLEANKGTNSTAFQKSQESSDCHVKLRIKSFKVPELLIEIPETATVGSLKKTVLEAVNAILGGGLRVGVLHHGKKVRDDNKTLMQAGISHDEVLDNLGFSLEPNCAPHPSQLSPPEDNEFMETVDTTEPLARIAPADSSSKHGEVDASQELALAPLSANYQGSDHDFVHSPGGMSSPDKASTNSRAIVPVTPADSNAGAIVPANKAKRSPEQGQRRIRRPFSVAEVEALVLAVEKLGTGRWRDVKLRAFDNAKHRTYVDLKDKWKTLVHTASISPQQRRGEPVPQELLDRVLAAQAYWSQQQAKLQPKTPPLAEALLLT

SEQ ID NO: 23881 - protein, 58 aa, Oryza sativa
  Clone ID: TF_LIB3431-053-P1-K1-F4.pep
LAYTLRLTASIWPEQPLSQPLPHELLDRDVYGHDYRAQLQAKMHPMTPALAVALLLTL

SEQ ID NO: 23882 - protein, 633 aa, Oryza sativa
  Clone ID: TF_OsC1905_1.pep
MVLQKRLDYGSHGHRAPIKPRVATLAPVKRSTRIRKKQMYALDLLATAAEKLLADQDNLSSGPNINETPEGYVTSMKPVKAEQFDEAFPLRSVAVKKDDCKGCTVGCAGICGFLRQANMCLAENSSTQNLADSVLESLTAKPDVLAKDSFVSSKKSCRLGFGLGTIPEYGSVGVCQPWSTRSAEVKQVHRARPTAIRSQEDSDAAALCALVETMDLDTKPLAEASSGSNSGVHICGPDRGHNSHPSCLAKVQHAADRDDDENSSGCVHPSTSGNNRGYIPHYIGDRRIRRLFASRLRKAARNRICGEMSCKGNKLSLCEKKMPTTRRRVQQTTLKRKRLAQLYSEKSSDEVKLTIKSFNIPELLIEIPENATVGSLKKTVSDAVTTIIERGLRVGILLQGKNIQNDNKTLRQAGIYRGKKLNDIGFTLECEAGQDSHPGVIVPEEMDFVGASVVDKSATVKCEEPAENQQLMQDFPGCSLSDPGSVDYPVEWSTQETSASSQAIVPFADPNSLALANVPLSRSKRPDFGQRRIRRPFTVAEVELLVEAVEHLGTGRWRDVKFRAFENVHHRTYVDLKDKWKTLVHTASIAPQQRRGAPVPQELLDRVLAAQAYWSEQQAKLHGDPPVPEICPT

SEQ ID NO: 23883 - protein, 616 aa, Oryza sativa; identical to SEQ ID NO: 16305
  Clone ID: TF_OsC47793_1.pep

SEQ ID NO: 23884 - protein, 605 aa, Oryza sativa
  unsure (1)..(605): unsure at all Xaa locations
  Clone ID: TF_OsC156600_3.pep
MQSRCPSAAVFTPTTCRLRFRVLHRRFSGGVTAENEDADGGEEEEEADAAAVAGWVEELRELRVAELRREVEKYDLSIGSLQSKVKRLKEEREKSISGETKPPPAAAAVKEEEEDVRKGSPEEAGAVEDRVSGHESGRSCKESNSSDLKRPENDPAVADDDDREAEEEEEAAAAPAAGDIAVKEEASGESVAGSKEADVEKESSDVQSSASPSRRRRRKGGGGGEEAEAASPSVSVPLPAAEAEPLVAFLESVRTSKAGAVFERRLDSQDGERYSGTIRRHVDLETVRSRLVGATAAAAAAACYASASEFYRDMMLLCANALVFFPRGSPEHAAALQLRALVSKQVSKDRQPHAGAKAPAAAAEEEEKKKPAKADADIAGPLLEKAPIIVCRKRSSIAKAAAAAAKGEKAEKAETDKKEKDGSEEKKKAAAAATTATAAATAKDKKARGMRTNKSRGPARNQKTAKLSETGEGTKKSDKKGGGGGGSSSAGAAAGGVAKKRNAVDFLNRMNQNGSPSTERVSLLETLKLSAAATEQQXQSSSSSSGKGDGRKEAGGSGSKKGAAASTPPGRRIGRPPKRAAAPPTPPPXSKRAKDDKPTRKRGKK

SEQ ID NO: 23885 - protein, 494 aa, Oryza sativa
  unsure (1)..(494): unsure at all Xaa locations
  Clone ID: TF_OsC84045_1.pep
MVVVVVGGGGGGGGGGGVKKEEGEEEARGRGGGGGVVGGWGTWEELVLGSAVIRHGGVAWGAVAAEVRSRSPCAFSPEECEAKFSEIQARYSACDAWFEELRKRRVAELRNDLKKSENFIGSLQSMIKSLSNSKHDDGNSECHTSHTESCSNNENTADNNSSSXALSKDRSSAASFTEEESDSQNSDKVQHCDTDSIQVNNTSAEALVKPLVEKKVCAEDGLLWGSRKKRAVRDRRTFLMADNSCRAGENTSTSHIQTDGSSEGYAKKGLKTPNLESGVSVVEKAKPNLAEILKTISTQSDCYMLQRRLDVQRKRTRYKKMIRRHIDFRILHSKIKSGATSSTKELLRDILLFVNNVLAFYPKATLEHMAAIELRNIAFRTVQESASMPSKSCGVTGAATAPLVKKNTRPVQPGSHGPHDAKRSKVSLKGTGSTVKQGEAKGSRGGSSVTANVKTMQRNPPAKKRGVGRPPKNGQKRAAAQQDSPNKGRKRTRR

SEQ ID NO: 23886 - protein, 224 aa, Oryza sativa
  Clone ID: TF_jC-osleLIB3474035c11b1.pep
TVSLAGEEKGEARLRRRRRRAAEVGLEVLRSLLRLDLPPNPEARGILRGEGGGPYSPAAVSRGGAEAAISLPLSESSGPEKKLKLFFFVKTKKYLFKPNTMTTQACKKRRAVYISSESEDSGTDSEVEGSKLSKKDGVTSVYTCGHQPTSKNKVDPMNTSKSRQCGSILKKLMDHKKGWIFNTPVDPVVYGIPDYFDVIRNPMDLGTVKRKLTSKQYSNPYEFA

SEQ ID NO: 23887 - protein, 558 aa, Oryza sativa; identical to SEQ ID NO: 16293
  Clone ID: TF_OsC18330_1.pep

SEQ ID NO: 23888 - protein, 170 aa, Oryza sativa
  Clone ID: TF_OsC76474_1.pep
PTRPGSWWEGRVSAVKPKSLDFPESPWEKYVIQYKNDGSDHPHSPWELHDTGNLWVPWKHPHIDLGIKDKLLSELDNLLELSHRNQDRYGVLKLNSVAEKSDFINRFPVQFSIEVIRIRLENNYYRTLEAIRHDATVMLANAQSYFSKSTDMTKKIRRLSDWIEQTFSSL

SEQ ID NO: 23889 - protein, 219 aa, Oryza sativa
  Clone ID: TF_jC-osflLIB3477P007b02b1.pep
RNPMDLGTVKENLAFGRYPSHEAFATDVRLTFSNALRYNPADHHVHRYASNLLATFEGLYKEALSWFEQECQRLEPPMPLALPPPPQPPVPMPMQAPPRIGGGGRRPKPKAREPNKREMSDEEKHKLRVEIGNLPEEKMGNVLQIVQKRNTDPALMGEVVELDFDEMDVETLWELDRFVVNCKKALSKSRRTVAMNGDAVDATAIVPIEDDTVQVDVHH

SEQ ID NO: 23890 - protein, 111 aa, Oryza sativa
  Clone ID: TF_LIB3434-060-P1-K1-C1.pep
QQLTNLMRSLLKNMNEHPDAWPFKEPVDSRDVPDYYDIIKDPIDLKTMSKRVESEQYYVTLEMFVADMKRMFSNAKTYNSPDTIYYKCASRLESFFSNKVASQLAQASTKN

SEQ ID NO: 23891 - protein, 1117 aa, Oryza sativa
  Clone ID: TF_OsC51154_1.pep
MVGMEGKGDASVTPVRTSDRLRKRPKYFGRNYMYYNPAIRKKMKSKKRAAASQIAKKLLRKSAARAPPADSALEIIERVDRVILDLLGIIVSVWSNLRRSTRKRRMSVNLEDYDTDSSSMEDDDLMRPRYRSSKNKVDDEVSARPKRKKLSNSSSIPRREGLRPRRSIRGQRLHPYQESEDDQESSEEQPAQDRRENGNDIEEDGNEEEVDGGDEAEADGDDEDGEEEQEGRRRYDLRDRSEVRRPSPRKEGKHRTQSPRRVLVHGIGPKNSKYLKKGGSRMHKRPRFSLPDDSDDSLLVDEPDEGPSMPWMRGGRGGMPWFLGGLDMHCPGAWGLNVGASGWGHQGDNTVSTSSLMPGIQTAGPSSKGGADIQPLQVDGSVSFNDIGGLSDYIDALKEMVFFPLLYPDFFANYHITPPRGVLLCGPPGTGKTLIARALACAASKAGQKVSFYMRKGADVLSKWVGEAERQLKLLFEEAQKNQPSIIFFDEIDGLAPVRSSKQEQIHNSIVSTLLALMDGLDSRGQVVLIGATNRIDAIDGALRRPGRFDREFFFPLPGYEARAEILDIHTRKWKDPPPKELKTELAASCVGYCGADLKALCTEAAIRAFREKYPQVYTSDDKFVIDVDSVRVEKYHFLEAMSTITPAAHRGSIVHSRPLSPVIAPCLKRHHEKIMERIADIFPFLSSVDVSKFSALSYGSSIPLVYRPRLLMCGGVSVGLDHVGPAVLHELEKFSVHSLGLPSLLSDPSAKTPEEALVHIFGEARRTTPSILYLPQFHLWWDTAHEQLRAVLLTLLNELPSNLPVLLLGTSSVAFGDLEEECASIFSSRNVYEVDQPSDDDRMRYLHALFESLLSFQMEESRSKSKDQKSSVDLPKAPKEVDGPKLSELKAKAEAEQHAVRRMRMCLRDICNRILYNKRFDVFHCPNSVALFSDYRSVVHNPMDMATVLQQVDSGQYLTRASFMKDIDLIVSNAKTYNGSDYNGSRIVSRACELRDVVQGMLSQMDPSLVSFCDKIAEQGGPLQVTDDGDSSILQAAPVAQLVSGTRMSARLRNVQPEVNLSRSYEALKRQKKSTETEQGMVKESTTRDDKSLGDVDLSKPISPEEAPKEPVQMVF

SEQ ID NO: 23892 - protein, 563 aa, Oryza sativa; identical to SEQ ID NO: 16307
  Clone ID: TF_OsC57969_1.pep

SEQ ID NO: 23893 - protein, 714 aa, Oryza sativa
  Clone ID: TF_OsC1956_1.pep
MTPTVLMEFGQQRQIKRGYDEMAFRGMASAAPRGYAETVGESEGAAGSPVRVDSEDSSAPKRKCISLNSDGFDVKREIFVPAKMSSSERRHLRKRFRTELDSVRNLLKKPEFAVPVPVNRAPALSSSAAPRGKKGQRGNHVVRGAKGRFLPTKPRPEASTVLTEDAIFKQCDAILKKLMTQKCSNIFDSPVDAVKLNIPDYFQIIKKPMDLGTIRNKLDSGSYTSPSEFAADVRLTFSNAMTYNPRGHVVHDYAIQLNKMFESRWRTIEKKLASIATEAHVEVDRADSKRRKTPPVDCSEVSTECVRPTESVRPTESVKPKMTFEEKESFGNCLASLSEDPEVPSHIIDLLQQCIDNNTDQLGDGEIEIDIHAVSDDLLFELKKHVDKYLQEREQSQQAKSEPSENEAANVSGLSHSSTNPCKGGDPVEEDVDICGNASPILIEKDAHNNPNKCGSPSSSSSDSGSSSSDSESGSDSESEQEKGGSPGKPKGSKRSEQLVEQEKSDVISPVDAIRPADDVELREQDNESKPAPEGENSKPDRQVSPDKLLRAALLRSRYADVIVKAQGILSQGGDKQEELEKLQKEEKARLLAEGNAAMEARRAEAEAEAKRKRDLEREKARQALQEMERTVEINDNLHLKDLEMLGTATTEHIVSSVDETSPEHSQDGMPSFLPGSGNPLEQLGLFMKADEEEEEEDPSSVPSTKDAEEGEIN

SEQ ID NO: 23894 - protein, 734 aa, Oryza sativa; identical to SEQ ID NO: 16310
  Clone ID: TF_OsC1956_2.pep

SEQ ID NO: 23895 - protein, 1824 aa, Oryza sativa; identical to SEQ ID NO: 16311
  Clone ID: TF_OsC48901_1.pep

SEQ ID NO: 23896 - protein, 167 aa, Oryza sativa
  Clone ID: TF_OsC48683_1.pep
LSWPFLEPVEGVILTIPDYFDIIKNPMDLGTIKQNLESGSYTTVNQWIADVRLVWSNAMLYNPPGNEFNTMAKTLSDTFEKKLAQMVHKLSYSSSQKRDQLRSTLETLVAQYKNYESELGMLTKQAEDEAREHPDLSPPIKPSSALLRSPLNFNEKMKLYHNINSLD

SEQ ID NO: 23897 - protein, 583 aa, Oryza sativa; identical to SEQ ID NO: 16314
  Clone ID: TF_OsC105877_1.pep

SEQ ID NO: 23898 - protein, 722 aa, Oryza sativa; identical to SEQ ID NO: 16313
  Clone ID: TF_OsC35984_1.pep

SEQ ID NO: 23899 - protein, 181 aa, Oryza sativa
  Clone ID: TF_uC-osroM202030e06a1.pep
MGLPDGSAKGEKTRKATDGSEEPSDSGPTTPLPDKKLLVFVLDRLQKKDTYGVFSDPVDPEELPDYHDIIKHPMDFSTIRKKLNKGAYGNLEQFEDDVFLLTSNAMCYNSPDTIYYRQARAIQELAKKDFENLRQDSDASEPEPEPEIKPDPEPKPQPRRGRPPNKNTIKQKVGKPPVERA

SEQ ID NO: 23900 - protein, 516 aa, Oryza sativa
  Clone ID: TF_OsC34269_2.pep
MALAQPTLTLTQRCGPARYGESLPLSESSGPEKKLKLFFFVKTKKYLFKPNTMTTQACKKRRAVYISSESEDSGTDSEVEGSKLSKKDGVTSVYTCGHQPTSKNKVDPMNTSKSRQCGSILKKLMDHKSGWIFNTPVDPVVYGIPDYFDVIRNPMDLGTVKRKLTSKQYSNPYEFAADVRLTFSNAMKYNPPGNDVHGIADQLNKIFDSEWKLLERKWKDRNLVQEQPSLKVLKAQPAVTPKPVLPKGVTAGTNSAVSKTLATALSSKVKIKFSVRGSELTSSKDTPLQAVGRRDGTINQSLPCTKDNAKTPRIQSSEDRSESTGDEYLPGDDASPSKALRAAMLKSRFAGTIVKAQQKALLDHGKKIDPAKLQLEKERLEKRQQEEKARIEAQVKAAEAAAQLKLDEEMRMKREQERRAARLALHMMKKTVDIDNSDFLKDLENLSKKWELNPPGKLIVDFVDGIDLPPGLGSPLERLGLFMKKDLEEEVEHEMEDSVSPSTEIDVEEGEISFCQ

SEQ ID NO: 23901 - protein, 791 aa, Oryza sativa; identical to SEQ ID NO: 16320
  Clone ID: TF_OsC6193_1.pep

SEQ ID NO: 23902 - protein, 590 aa, Oryza sativa; identical to SEQ ID NO: 16321
  Clone ID: TF_OsC11739_4.pep

SEQ ID NO: 23903 - protein, 620 aa, Oryza sativa
  Clone ID: TF_OsC11739_1.pep
MKRKRGRKMGKKGKLKASITADASPMSPSSPSTVDASSKSPSSPSTEENGTSPAHHQADNAPVIAPPPVPEPAPPEPEKPAVSTDVQNAKPKVYSRVRLKFKSAKVLETHQGPSEAKAPVDGGGGKPASAAPEASKEVVAEKAIVSPDGQKDAQAAELSGSDKDKVARKVASIKIKSVGLSSVEDKNQDRKADSVSEPLPSKQETVLENVESETALELRSSQELEAIKKVMKMDAAEPFNTPVDPVALGIPDYFDIIDTPMDFGTICQNLERGDKYMNSEDVYKDVQFIWDNCTKYNSKGDYIIELMKRVKKGFMKNWLAAGLYSDVQENAAGEEDGATGGRGRVGILVNVAANPWLSEVALRRVGTSAAMVDRLVEMLTWNGRDKPAARRGRAPTARSGTRSGAIESVSSLLFVADEECNLLGLLFAMQVGPGHLASLHGGRRTVAGVDRRLGGQRRASALRLGGVRLATNGGGWPATSGGTATGVRRAAVGGGSVLLVFLFGGGGRVGRRLPPPPRLRFRSARTPPPPAASSRPRSPPRRDRVPLHPPVRPFANSLLAASSSMESQTRPTGARRERRSGRRRGDGPRRPPLVQLLPLRLRPPARCSAVRGPWRRERER

SEQ ID NO: 23904 - protein, 360 aa, Oryza sativa
  Clone ID: TF_OsC48985_1.pep
MVPGGGVPQGAEGGRAMAAAETAATAAAAGERAPGTEVDAFRRQVEDLVSKTDQLERRVNEVVGFYDGKKHGSGGRKAGRKDSSLSKGMPDLMRQFGTIVRQITSHEWAEPFLKPVDVVGLQLDDYYKIITKPMDFSTIQKKMEGKDDNKYNNVREIYSDVRLIFANAMKYNDERHDVHIMAKSLLEKFEEKWLQLLPKVENEERKQKDEESNGVPKVNISPEEAIAKLAKDTDNELIEINKQLEELRQMVVQKCRKMTTYEKRKLGAGLCHLSPEELTKALEMVAQDNPSFEAKGDELELDMDAQSETTLWRLKFFVREALERQANVASGRTDENAKRKREICNALARTASKRVKQQPN

SEQ ID NO: 23905 - protein, 656 aa, Oryza sativa; identical to SEQ ID NO: 16297
  Clone ID: TF_OsC166303_1.pep

SEQ ID NO: 23906 - protein, 175 aa, Oryza sativa
  Clone ID: TF_OsC59345_1.pep
PSLRPPAATVAPSVPDPSPSGHVTIRPSELSRREAQVLRARLTGELSRVRALLSDIDGWEARRRRPAEPPRQRGHVSPPPALQAAMRKRCTQILTRLRKQKISVWFNSPVDVERLKLHDYHAIIRNPMDLGTVKENLAFGRYPSHEAFATDVRLTFSNALRYNPADHHVHRFTRG

SEQ ID NO: 23907 - protein, 456 aa, Oryza sativa; identical to SEQ ID NO: 16298
  Clone ID: TF_OsC82910_1.pep

SEQ ID NO: 23908 - protein, 948 aa, Oryza sativa
  Clone ID: TF_OsC13486_1.pep
MPRSPSPPPDRHHHHHHPARRRGPAGAAAPPPRSLRPRRAAAPSSRPLVDDFFPFPSSPSSSPSRPPPPQQQQQRRPSPEPSSSDSDGHGGGGGGGGGGSSASDRRRRKLKLVVKLSQLAPDQNHHRRGPPPPSYSDSSGGEQEQEEEEEAGGNGGDDVSGGEERVKPPKKRRIEPRGDRSRHREVRGETANPKLVGGRSDAASAPRTKRLPVPGMARTTPLPDRKALDMILDKLQKKDTYGVFAEPVDPEELPDYHDVIEHPMDFGTVRRKLARNAYRSFEQFELQPNRCNGIALYQINHRFTITSVDFVFLLDDVFLICSNAMQYNAPDTIYFRQAHSIHELARKKFQELRDEGIPTENLIKSEQKIRPHPSNREPIKKPPVRMNSQDALGSDVSAATIASAGDDSNGLSMSQANAVEPQDCIAANGFMDKDISSPLDEIRSEKPDDISARESSVKPSYKSIVVDETRRKTYDTYEEQPSSESDTIFDVFCEEPKELVNVGPHSEHSYARSLARFAGSLGTQGWRLASERIQRVLPTDVKFGRGWVGEYEPPLPPILFVQNQPRSLVSSEANVQRSASMTRNNERIRPTESVNPKDMSLSLLNRITTGNNVVGVPGPLESPEIKPRLFGVTAEPQQRSTEAPSLHENHRAPGSVAKTKRAPSEQTRKGSSLECAKGASGVHDMPSLNNTSGQPKPFFQSQEAAVPQPRNENTWVYHGRPGDGKYGTTDKSRPMSSMGFITKNQQVNAASFAMNLNGQKNVNDNVKSVGSTVMPVQVNTTNRGPDSSRNIFSAFPPAVRENQSIPSAPVAQSWISFGASSESKPTIVSPTFHDSNSGWKMPFANARPDEAKMTAVPQFFRQPVQMVRESPGQNKGLVIFPQLVQTDFSRSQGQPQWQGLVPPMQQKPNKDMLRPDLNIGFPSPGSPPARQSSGINLEAQQPDLALQL

SEQ ID NO: 23909 - protein, 505 aa, Oryza sativa; identical to SEQ ID NO: 16302
  Clone ID: TF_OsC187148_1.pep

SEQ ID NO: 23910 - protein, 187 aa, Oryza sativa
  unsure (1)..(187): unsure at all Xaa locations
  Clone ID: TF_OsC346887_1.pep
MDGTDVTFDIGQDIFSAHKCILAARSSVFKAEFFGAMSAKAHRTIKIEDMEAGVFRSLLHFIYTDALPETALDVVMAMXQTSALAWRGKNDRYNVERLKLICEEKLSKHIDSNMVATTLALAEQHSCHGLKEACFKFLSSDANLERMKASEGYEHLKVSCPFVLKELIARFISPEMEAAREITMDLQ

SEQ ID NO: 23911 - protein, 347 aa, Oryza sativa; identical to SEQ ID NO: 16329
  Clone ID: TF_OsC60230_1.pep

SEQ ID NO: 23912 - protein, 557 aa, Oryza sativa
  Clone ID: TF_OsC6748_1.pep
IHRFELRHDLFGLINTEGSGNVVCHVCGEVFTAHRGLLAARSPVLGAALNGPRMGSGGLYGGVTIKTNALDPLVDKPLLRYLDTDSLPPQMQQGELEEEGRAMAQHLLAAADRYGMERLRLLCEAQLCKHIEVASVASILILADQHGCSGLKNACFEFLKSPGKFAAAMATQEYDYLKTNHCALADEVVKGNQAKWMLATVETFMRHRLNSKSILETATREIALHASTSNETPPVFLDLEESLRAKGDMTLREEATLKVLKVVATLGKAISTGAIAAVGYYVPGIVGAKFGEPSLPRLPRFAMAAVTSWFAGKVMYYAILQGSTEFILKHGEERMKMELSNIILNKHSDDKTLVEAVKTQFFAEHLFSDQYQDRTLFRWHLRRTYVDSAFMERVKEIEVKSSNDGPGLISGQRIISTRPFGDLMEDPLACILGSPDSNMESNKSAEHTGTIVKRREIACPPAVLVEPIRLQPNVPICSLLARSRTGSNLEVNPVILDLEESLLAKGNMTLEEEVTIRVSKMTASVFKVFATAAFGASSYYALGLGELSLHARARLDL

SEQ ID NO: 23913 - protein, 355 aa, Oryza sativa; identical to SEQ ID NO: 16335
  Clone ID: TF_OsC2144_1.pep

SEQ ID NO: 23914 - protein, 656 aa, Oryza sativa
  Clone ID: TF_OsC3651_1.pep
MGDLSSSDSLLGWANDELDLFASYGASLFPNTRKPLICSEHQPIQSVPPSCRVPNVAIVYVLADVPGGVELAARAAAPAPAAAIGEAVRVMERVRRRIRVRIGVGEAGGAGAAGGEELGGARHGGVAAVRKEQRKKGKWGSSKHKPFGTDSIHKPPYELPLCGVQPPRGSNGNRGSIRRVPHLRHSLHPILSQELPSDITIKVDDAAFNLHKLPLASRCGYIKKQVSGVGGNKATHLEIAGMPGGSKSFELVVKFCYGVNFEITVDNVAMLRCAGEHLEMTEECRPGNLVGRTEAYLEEVALASLEGAVAVLRKAEELLPASEEKARLVARCIDAVASIVCGGDGQFSMSLGTPGGGGGGGYNGVGAAASREVDDWCADELTALRIDTFQRVMIAMKARGFKGIAMGTLIMLYAQKSLRRLDMHGRDRKKMGARQEHEKRVVLETIVSLLPRERNTLSVSFLSMLLRAAIHLDTTLACRLDLEKRMAAQLGQAVLDDLLIPSSSPDAAAATTAYDIDAVQRILAGYLDLDYTGRHLISISPPVSPKTSGATTHLPPWHRRRRDPASARWRRAPRRPPPPRRGAACPPPPTTTPMRRPSGRRSPTPGSSPAPCWRRTTSPRATPTSTSRRRTPICTSVTRSSHGDPMAYLRTSTIKY

SEQ ID NO: 23915 - protein, 588 aa, Oryza sativa; identical to SEQ ID NO: 16364
  Clone ID: TF_OsC359_6807.pep

SEQ ID NO: 23916 - protein, 246 aa, Oryza sativa; identical to SEQ ID NO: 16363
  Clone ID: TF_OsC97452_1.pep

SEQ ID NO: 23917 - protein, 369 aa, Oryza sativa
  Clone ID: TF_OsC299619_2.pep
MATAACGESPSRLGSASAIVADTETRYHLLKIGCYSRTKATTPTGSFLSSGQFTVGGHRWRINYYPNGESADSADYISLYLLLDDKATNSSVKVQAQFKFQISSTDQVKNTPSLASTNVNTYGEDSSWSWGHRKFIKREDFEKSNDLRDDSFTIRCDVAVIGEIRTEKTTEIPSATTFVTVPPSDLNQQLVDLLETEKGADVVFEVSGETFAAHRCLLAARSPVFSAELYGLMKEGDTAGVVRIEDMEAQVFKLLLRFMYTDSLPKMEEEDVMWQHLLVAADRHDLQRLKLICEDRLCNYIGVSTVLNILVLADQHHCDGLKKACFSFLGSLENLSAVVTGDGLEHLSRSYPSLMKELFVVMALPPNHA

SEQ ID NO: 23918 - protein, 370 aa, Oryza sativa; identical to SEQ ID NO: 16374
  Clone ID: TF_OsC243412_1.pep

SEQ ID NO: 23919 - protein, 342 aa, Oryza sativa
  unsure (1)..(342): unsure at all Xaa locations
  Clone ID: TF_OsC389532_1.pep
MASSRPISESTITRSTCATRTARATHQFEIVGYSLKRCLAAGEFVRSSAFAACGYRWSVRVYPGGFGPAHREFVSVFVKMMTNRGKAAARFDLRLIDRATGLPRSVFRAAQPVVFDYSVKHKKCKGKRGTRAFMRRRDLESSAFVRDDRLIVECVIDVVVANGGDDDTAAAASPLAGVPAPDLSRHLGELLERADGVGADVTFDVRGQPFAAHRIVLAMRSPVFMASLYGSMREHRAPRIAVDDMEPEVFDALLRFVYSDTLALPGDLGEGEYKEMVRQLLEAADRYAMDRLRVICELILSRSLDAKTVAATLAMADQHSTXCDALKDVCVQFMAVGLDDHN

SEQ ID NO: 23920 - protein, 354 aa, Oryza sativa; identical to SEQ ID NO: 16376
  Clone ID: TF_OsC389533_1.pep

SEQ ID NO: 23921 - protein, 696 aa, Oryza sativa; identical to SEQ ID NO: 16377
  Clone ID: TF_OsC100212_1.pep

SEQ ID NO: 23922 - protein, 242 aa, Oryza sativa
  Clone ID: TF_OsC951_13.pep
MRRRELEEMGFVRDDRLTIECVVNVVLDPVVTAGDAPELDHPPSNILGHLAGLLGDKGTADVTLVVRGEEFAAHRAVLAMRSPVFKAALYGPMKESTDANAGRVAIDSVEPAVFRALLHFIYTDTTAAMDDLDDDDDDKAQMIMHLLEAADRYDVERLKLICELMLCKSIAVDTVAATLAMADQHHCQKLKEACIEFLATSKKMEGVMESQGYEKMKLSCPSFMVDLWEIIGRKNYKVLSDS

SEQ ID NO: 23923 - protein, 931 aa, Oryza sativa
  unsure (1)..(931): unsure at all Xaa locations
  Clone ID: TF_OsC951_1.pep
MGSGGNDRGLLIHRVVKEAGGPANNPVLMKTNYNVWSLLMKIKLQARCLWGAIDPGEVELHEDRMTLDAICSVVPAEMISTLATKETAKAAWDCIKTMRVVNDRIRKASAQKLRSEYEALAFRDGESVEDFAMRLNTVVTQLSTLGDPEPDDKVVEKYLCVARPRFSQLVLSIETLLDISTLTLEEVTGRLKAVEDSGQSSSSSSPGAGAKLYLTEEEWLERHKKKQQEAKKRNGGGNGRGKRRGGQGHTSGGGGGVGNADSTGVGPARKTDKCRNCGKLGHCAKDCRSKPKQEQAHVVQDEDEPTLMLMTGSCIDEVEETGAQCATPSPLAPQPRPDVIELVEQKVFTALDDATDHDNKCWILDTGASNHMTGSRAAFSDIDTNVAGNVWLGDSLLVRIGGRGTVLFACKNSEHRMLHNTYYLPRLAANIISVGQLDETGFKVVVEDGVMRVWDERRRLLACIARSPGRLYLLDINLARPVCLMARAGEDAWRWHARFGHINFAALRKMGRESLVRGLPVLSQVERVCEACLAGKHRRAPFAQEALHNATELLALIHGDLCGPITPATPSGNRYFLLLVDDYSRYMWLTLLATKDGAPAAIKRVQAAAERKSGRKLWALRTDRGGEFTVGHFTEYCAELGVQRELTAPYSPQQNGVVERRNQSVVGTARSMLKAKGXPRSSSKSIGGKTPYELWNGVPLAVHHLRVXCVAHVKVTAPNMKKLDDRSRPMIFVGYEPGSKAYRVYDPATRRVHVSRDVVFDKEAQWNWDGEAAANVDSGFTIEYTTVYHLATAAPTQIGTEHGGAPASPRSPASGSTPPTPPLAEEPPVEFVSPPPDVEDDLDADHHAAPLRHPRIDDGLRPPKRPGQAVRELLDDLIAARAQAPASVGVLRRHASSIHSVTRIWRSLEDRNWSRVARPMAVQRRGGRKGP

SEQ ID NO: 23924 - protein, 355 aa, Oryza sativa; identical to SEQ ID NO: 16381
  Clone ID: TF_OsC12993_1.pep

SEQ ID NO: 23925 - protein, 307 aa, Oryza sativa; identical to SEQ ID NO: 16387
  Clone ID: TF_OsC356569_1.pep

SEQ ID NO: 23926 - protein, 404 aa, Oryza sativa; identical to SEQ ID NO: 16419
  Clone ID: TF_OsC299619_1.pep

SEQ ID NO: 23927 - protein, 395 aa, Oryza sativa
  Clone ID: TF_OsC299619_11.pep
MGQCAMSHTRSTTAGAAGGKPPIAPPPTSSASAIVADTASGYHLFKINDYSRTRDIFPTGSALKSRAFTIGGHQWRIHYYPNGNTEECGEYISLFLHLDEIVTDKNVYAQHGFRLFDEFAGDNDDDDELQPSSIADLGQVSTFGGNNIGLGRLRFIKREELEKSKYLKNDSFTVRCDVVVTKRIRSEETPLVVRTSPKPKVARLVTVPPSDLHRHLQDLLCAEKGADVVFEAGGETFTAHRCVLAARSPVFSAELFGSMKESDTTVVIRIDDMEAQVFRALLRFAYTDSLPETKEEDEGAMCQHLLVAADRYAMERLKLVCEERLCGRIGVGSVATVLALAEQHHCDGLKKACFDFLSSQENLKAVTAGEGLEHLSRNCPSLVNELIGTLGNLIQ

SEQ ID NO: 23928 - protein, 558 aa, Oryza sativa
  Clone ID: TF_OsC5514_1.pep
MKVEEKKRSITVAPFECAWDEEFRFRETGRGCITFEASAHNDVTLVFREQPGSQHYHYKMDNSRHYIVILGSHRNKRLKIEVDGKTVVDVAGIGLCCSSSFQSYWISIYDGLISIGQGRHPNNNILFQWLDPDPNRNVQYVGLSSWDKHVGYRNISLMPSAPQNSILWSQIECAYVEPDGAGGHTRKQESKDGLDQRALANFLENWDFSDSIFVVGSERKVVPAHKVVLGSCGDFPFNLMMSRPAIELPSVSYPVLHSLLEYIYTGSTQISEWQLVSLLELSSQFKVKPLVMYCEEIIGCLKMSDAVSESSKKIQLSSGGSQAHQFYYFPFKAPLNTQKIEQFLVNGEHSDVNIYVNGHGLVTHAHKLILSLWSMTFDKMFTNGMKESSASNVFFEDVPVEAFFLLIQFMYSGELKVDIEEITPVLVELLLLSDQFGITALQFECCKRIMEFLSKDSLCSVLRAVSSIPSCKLLEEMCKRNFAEHFDYCTTACTDFVLLDEATFKDILQHGHMTVTSEERVLDAILTWCMEACDCFNWTSVHELLSTSRPEKLFGGRL

SEQ ID NO: 23929 - protein, 772 aa, Oryza sativa
  Clone ID: TF_OsC299619_6.pep
MGQCAMSPARSGTTAGSGGGPTPSSSSSRSASTIVAGTASGYHLLKIDDYSRTRDLFPTSTALKSRAFTIGGHRWRIQYYPNGNTPNCGDYISLFLHLDEEVTREVYAQLQFRLLDDELGDKLPPPPPPPSLDANKFFSHASWGQPKFIKKEELEKSRHLKGNSFTVRCDVVVITEFVAKDMPEAATATAARRRTPARGTGSFVSVPPSDLHRHLGELLLGEKGADVVFKVGGKTFTAHRCVLAARSPVFGAELLGSMKESRRKAVVRVVDMEAQVFKALLRFAYTDSLPEMKEKDEGAMCQHLLVAADRYAMERLKLVCEEKLCERIDVSSVATVLALAEQHHCDGLRNACFDFLSSPENLKAAMAGDGFEHLSRSCPSLMTELVAMLAAAATSDGPTLPPVMSHGALSPTTAAAVSASAIVANTSRGYHYLKIDGYSHTKATPTGEALFSCQFAVGGHRWRICYYPNGNVLEAADYISMFLVLDEIVVRNVKAQFQICFAGQVEKQAPSLAWKTVRAFNKQTSSSSSWGYPKFIRREDLEKSEYLRDDSFTIRCDIIVVDNYRAEDASSGAAGFVSVPPSNLHSHLGDLLKNEKGTDVVFEVAGQRFTAHRCVLAARSPVFNAELFGMMMESDTTTNDAIQIGDMAAPVFKALLHFVYTDSLPETMEEREDTMCEHLLVAADRYNLERLKLICEERLCKYIGIGTVMDILALADQHHCKGLKKACFDFLRSPANLSAVTGSESFEHLSRSFPSLMKELVDILGTSHNYAW

SEQ ID NO: 23930 - protein, 353 aa, Oryza sativa; identical to SEQ ID NO: 16408
  Clone ID: TF_OsC356517_1.pep

SEQ ID NO: 23931 - protein, 268 aa, Oryza sativa
  Clone ID: TF_OsC16921_1.pep
MWGYKRFFKRSALETSDYLKDDCLLVNCTVGVVQSHTEGPKIYTIPVPPSNMSQHIGQLLTDGKRTDITFEVDGEVFPAHKVVLAARSPVFRAQLFGPMKDKNMKRITIEDMEASVFKALLHFMYWDELPDIEELTGLNTTWVSTLMAQHLLAAADRYALERLKLLCELKLCEDVAINTVANTLALAEQHHCYQLKTVCLRFVALPENLKAVMQTDGFDYLQQSCPSLLTELLEYVAKVGEHSVSPCLYSNEVLDGGDANGRRVKPRI

SEQ ID NO: 23932 - protein, 267 aa, Oryza sativa; identical to SEQ ID NO: 16359
  Clone ID: TF_OsC109153_1.pep

SEQ ID NO: 23933 - protein, 394 aa, Oryza sativa; identical to SEQ ID NO: 16357
  Clone ID: TF_OsC341870_1.pep

SEQ ID NO: 23934 - protein, 381 aa, Oryza sativa
  Clone ID: TF_OsC341874_1.pep
MAAASTTDQGVAVINDSPLCKLLSSGDGRHVTFRVDYAAARRPAVAGRTLRTTCAIGDSGAYRCEASFRLLIGRRKLAAFAVGVSGPRYRDVHKVVVDLVLVDNARSVALQPPTRSMAIQAAAGSNQGGCGLLVSKDYLEENCVQDGVLVAVCSVLFLPELPPCLWLDSLGHRLAAMSNKKDSTLTDVCFDVDGERFNAHRLVMAAQSEVFRSLLFGSDDAETKTETAVVTIDGISATTFKHMLHYIYCNQLPPPATGDGDDDDGEADHVTRIAELQRLLVAADAYGVEALRQACEDTLCAGINMDTVASTLALTEKGSYPKLRGSCLEFLSNTQIYSVATNDECYEVVQSYPDVLTEIRDSCLIYYRYATFVVVTELEDL

SEQ ID NO: 23935 - protein, 590 aa, Oryza sativa
  Clone ID: TF_OsC404288_1.pep
MATASIASNVAGGGCPTPSRSAAASTVVTTQAYHVLKIDGYSRTLQVHCYRSLSSFPFNAGDRTWYICYYPHGKNDISKDFISIYLVLYDAIAEAVMVQATFSLLDQHGKPVPSHTHATRLLSTSNQDDMANNLGFETFIAKGDLEKSGHVQDDCFAIGVHVVITKETPPPIIAVPPSSDMHLHYGDLLSSKRCADVEFLVGGETFAAHRLVLAVRSPVFVAEHFGPMKEGVNVNDVIEINDMDAQVFKALLNFIYTDTLLEMDQEEDATMAQHLLVAADKYGLERLKVKCEERLSNHIDADSVATLLVLTDKHNCRGLNKACIEFFSSPTALAKIIETDEFQYLTQSHPNILEDIISNIVASQLEKAIFSPENEGGKINKVDIRIQPWQNSNARCGKAAGADCRGRQARRERGGRRRDLAAEREDVDTADVDAVEEHSTRRRLPEAVERAEQRGLAAAAGPDDTDDHPSRHVQVLTVRYYDLRVNTRPPRRHHRRPFFPDAVHDQEVLPDIMLFNSIVDRTCQQHVHWNTKLTQKRRGVLAHLKLSPSERQRRRSKQESGEERKTKIEKTEIAGVDCSNRRPPFCSFRR

SEQ ID NO: 23936 - protein, 510 aa, Oryza sativa
  Clone ID: TF_OsC26378_1.pep
MASMNNLYRLCIRSKQVTKQILQILGDLPALLDLELRSESDDPMEILIISKCIFRCLKIFRLYGSFVGLIFEDGSMQKVREISVVVRAHKAKSAFADHPDLGIRNLTSLMDLNVWINCEGARVQEVKVLEAAIADATALLPNHPTPHFFRENEENMVKDYLPNHPTPHFFRENEEKMYVPNSRLMSCASLLSAAIRRGVAGCRASPPSASAIVSRPATGSHILRIDGYTNTKSILATGESATSRRFAVGGHSFVMRYYPNGLDDGCADSISLFVDVAGGGGCGRSGIAGHARFSVLDHAGSPARRTDDASSEALAAGADAGVVVPPSDLHRHLAELLWSKEGADVVIELDGGDGETTTFHAHRWVLAARSPVLKAKLSASPSSPATLRLAAMDADAFRALLHFIYTDTLPDDDDDDDAMARRLLAAADAYGMERLRLICEDRLRRRVAMGNVAVTLALAEQHHCRALKEACVEFLSSPGNLKAAMATDGFEHLKATCPSVLTELVMKQLV

SEQ ID NO: 23937 - protein, 371 aa, Oryza sativa; identical to SEQ ID NO: 16405
  Clone ID: TF_OsC174949_1.pep

SEQ ID NO: 23938 - protein, 154 aa, Oryza sativa; identical to SEQ ID NO: 16410
  Clone ID: TF_OsC340718_1.pep

SEQ ID NO: 23939 - protein, 365 aa, Oryza sativa; identical to SEQ ID NO: 16412
  Clone ID: TF_OsC391235_1.pep

SEQ ID NO: 23940 - protein, 374 aa, Oryza sativa; identical to SEQ ID NO: 16413
  Clone ID: TF_OsC393414_1.pep

SEQ ID NO: 23941 - protein, 421 aa, Oryza sativa
  Clone ID: TF_OsC45143_1.pep
MKATAGLVEAQRRPARSKAVRRRQGSCGGLDVYGQASVEVEASAPTSPSDVGLDAGMTTTTTAAATALTSSVGAGPPPSRSTTTITAGRTYHILKIEGYSSTLKAGRGQALRTSPFSAGGRTWYISYYPNGGRETNKHCISFFIHLDDDTVNDDVMAQVTFSLLDRHRNPVRSHTVTTTLYNFSVANSSALGFENFIRRDELQRSEYLNDDCFAIAVRLVITEEPPSFTVPPSNMHLDYGDLLSSKEGTDVEFVVGGETFAAHRLVLAARSPVFKAELFRPMEGGTTDVIKIDNMDAQVFKALLVFIYTDTWPEIGQDETTMVQLLVAANKYSLSRLKIMCEDRLCSYIDTSSVVTMLMLADKYQCHGLKKVCFNFLASSRALSLAMKADNFRCLIQGRPTMLKDLIYNIVTHQLEIKLSV

SEQ ID NO: 23942 - protein, 824 aa, Oryza sativa; identical to SEQ ID NO: 16417
  Clone ID: TF_OsC15_30.pep

SEQ ID NO: 23943 - protein, 300 aa, Oryza sativa; identical to SEQ ID NO: 16395
  Clone ID: TF_OsC389531_1.pep

SEQ ID NO: 23944 - protein, 371 aa, Oryza sativa
  Clone ID: TF_OsC346893_1.pep
MANHCNNTSSVTVAEVARGSHVIKIDGYLRTKELMENGKYVSSIPFSVGGHSWFITYFPNGVNTESKDYLSVFLTIDFACAGGVKATFSFALLDKNGRSVQLYSKLYPLHTFTEKGSDWGHSKFMKKTDLERSVHLSNDSFSIMCDLTVMKDICSKETTQKQFVVVPPSDLHQHLGDLLLKNMDSTDVTFNVGQDIFSAHKCILAARSSVFRAEFFGAMSAKARRTIKIEDIEAGVFRALLHFIYTDSLPETAQNIVMAQHLVVAADRYNVGRLKLICEEKLSKHIDSNMVATTLALAEQHSCYGLKEACFEFLASRSNLERMMASDDYEHLKISCPSVLMELVASRPPPPLWSSSSLGKAAVGFAKSSPS

SEQ ID NO: 23945 - protein, 348 aa, Oryza sativa
  Clone ID: TF_OsC951_10.pep
MGTVEGHHRFAIRGYSRLRALLAAGEYVRSAAFTVGGYDWAVVFYPRGATHADRDHAAVYVQLLTDRAAAAATFDLRFVRADSGRALSVHPPLAAPRTFSTVLRSSSAAMYGVKVEAIQALQANYVRRDRLTIDCAVRVVGKPRVSAAAPLTAADVPPPDLAAHLGRLLDLKSHADVTFDVRGVQFAAHRVVLAMRSAVFAAELFGPMRNNAGGAIKVGDMQPAVFKVLLGFIYTDTLAAMDDLDADEDDRRELARHLLVAADRYDMGRLKLICADMLARSLTAQTVASTLALADRHGCRGLREACVEFVIAMGMNDEVVISRHPDQLSCISLFKYFFYQIGSLLKIH

SEQ ID NO: 23946 - protein, 352 aa, Oryza sativa; identical to SEQ ID NO: 16423
  Clone ID: TF_OsC50081_1.pep

SEQ ID NO: 23947 - protein, 614 aa, Oryza sativa; identical to SEQ ID NO: 16424
  Clone ID: TF_OsC299399_1.pep

SEQ ID NO: 23948 - protein, 316 aa, Oryza sativa; identical to SEQ ID NO: 16425
  Clone ID: TF_OsC340717_1.pep

SEQ ID NO: 23949 - protein, 479 aa, Oryza sativa
  unsure (1)..(479): unsure at all Xaa locations
  Clone ID: TF_OsC1713_5345.pep
MGQTTSKSAGDGKPKPKTTSAAAAAAAVVSETATGSMTMRIAGYSQTKGIGVGNSINSSKFHAGGHTWYIAYYPDGDREEYSDWVSVYLCLARPAAGAAADDVVEAKFTLSLLSGTYGAVVEEKICTAKKFSFANGYWPSWGHTRFIKRKKMDSRLWSCLHLDGQSFYIRCNITMDIIRCEAATTAVAVPPPDLHRHLAALLGSGVGADVRIRVGGKLFAAHKNVLAARSPVFMAELFGNNGGKDQKEAKAAAAATGNGVIRIDDMDLRVFRAMLQFIYTDTLPKIDKGDTAFMAQNLLVAAHRYGIERLKSISVDMIRKAARTMNLIAMIIRNNDEGIATQLRTRGRLGLHLPDAPEKPHRCRRLFELTLCYLSLDSTLLIQAAGDASTRSCDLAEMPDVLDLQASPHWSGLTMEEVIGKPPCRSAPRIAGAATDCQDFYPFPCRRSSITHGVETSTMTMEASIAAAQEEGRRGGRRX

SEQ ID NO: 23950 - protein, 284 aa, Oryza sativa; identical to SEQ ID NO: 16437
  Clone ID: TF_OsC299619_8.pep

SEQ ID NO: 23951 - protein, 249 aa, Oryza sativa
  unsure (1)..(249): unsure at all Xaa locations
  Clone ID: TF_OsC346729_1.pep
MRIGRRPGRPQGVRVGRFINAAGTTGFPTGKMDRVDTALPCFSSQCMNISLRTLFPPIFTFLKYILYAGDDDGTIPIPRSNLNGQLDDIADRADGSDVLFSVGSETFHAHRAVLAARSPVFKMELLGSMAESTMPCVTLHNIDPATFKALLHFVYMDALPSPTXRYALERLKLMCAQKLWESVSVETVAMTLGYAPTXERYHCPELKSKWLSFLMAEINFKKVAVTDGYFHLRRDFPLIIEEIKKRIES

SEQ ID NO: 23952 - protein, 434 aa, Oryza sativa
  unsure (1)..(434): unsure at all Xaa locations
  Clone ID: TF_OsC8342_1.pep
MAAPPVSGDGAAAAAPVVALGAAGAVGGPRPYEVAVAAAELRPVDCNLAALCDHVQAEGFGSGAFSDVVVEAMGATYRLHRLIISRSAYFRNMLHVKTMVVMGNVSEMPAGVIFAKVPHWNYERXRFELALYALLAKVTLSDVEVSGNENLNLTSSSANSDHSMRKGKSPMNEAGNIYLTDAHGEGNAVFGPVRVNVRGAVDGLAGIGRGNSNVPGAAWAPTRYVFSRVPYGLGSRNGQQPFANDESEPRVDYNGGSPRVRQESKEHELGSNLETTENTTISLDMKTPLSHFPPFRFGVEFEDVHRLADSQVKHSTEVFYAGSLWKVSVQAFNDEDPHGRRTLGLFLHRRKAEPLDPLRKANMYVDHREKVTARYQLICPSKREVMIFGSLKQAGTLLPKAPKGWGWRTAILFDELGDLLQGGSLRIAAVVQLV

SEQ ID NO: 23953 - protein, 313 aa, Oryza sativa
  unsure (1)..(313): unsure at all Xaa locations
  Clone ID: TF_OsC31069_1.pep
MMQQPPSQPQPGMRGPPPPPQPAPGQPPEWGAVPPPQPYYAAPPPQAMPAPAAADEVKTLWIGDLQPWMDESYIYNCFAATGEVQSVKLIRDKQSGQLQGYGFVEFTSRAAADRILQTYNGQMMPNVEMVFRLNWASAGEKRDDTPDYTIFVGDLAADVTDYLLQETFRVHYPSVKGAKVVTDKMTMRSKGYGFVKFGDPTEQARAMTEMNGMLCSSRPMRIGPAANKKTTGVQERVPNAQGAQSENDTNNTTIFVGGLDPNVTGVVMKPVFAPYGEVIHVXISIGHRCGDGHFVNRLSAVQGLAVLQRSLIG

SEQ ID NO: 23954 - protein, 274 aa, Oryza sativa
  Clone ID: TF_OsC128453_1.pep
PGLQARGARERETRAGSLPRPAPPRLGDLRPAPYRRSVPLFVPIPCWYLSVEKARYVYVRLFPEPGRVAKERPPLARFLLRACWSGPPRRSCVSPVHEHLLRSSEDFFWQLDTMYAGRFTIDVEFLDLKIASNNAAESSTSIWPNESIAVQNIASKSSLGCLSRMLTESIHADVTINTTDGVLKAHKAILASCSPVFESMFLHDLKEKESSTININDMCLESCSALIGFIYGTIKLDQFWKHRLSLLAAANKYSISDIKDCCEESLLEDINSSN

SEQ ID NO: 23955 - protein, 261 aa, Oryza sativa; identical to SEQ ID NO: 16445
  Clone ID: TF_OsC346888_1.pep

SEQ ID NO: 23956 - protein, 392 aa, Oryza sativa
  Clone ID: TF_OsC386240_1.pep
KTTTQQIDRHIQKSIDTTNRFSYYGNTEIGVLDYSATNASAIGDPINSDLFTAGGLTWRVNCYPRGDKADNNGDYISLYLELISKSKNIKAIFDAFMVDEHGNPSDGSNRLVQVYPPAGYPAWGWPRFVKRSNLSSVFVVDGKVRIMCVVGVTGGHLDGGLLPLPPPNIGVHLGGLLDSEDGADVTFAVGGETFHAHRAVLAARSPVFRAELLGSMAEATMPCVTLRDIEPATFRALLHFVYTDVLQIEGSSSTSTTDLLQRLLAAADRFALERLKLMCAQKLWESVSVETVIATLCCAEMHSCPELKNRCIDLVVTKDNFMEVAVTKDYFHLGQSFPSVIEEITGNLPRTMQRGPWGQTWRQHRVSGSLGGVTSSSRVIYSRIMSATKARS

SEQ ID NO: 23957 - protein, 129 aa, Oryza sativa; identical to SEQ ID NO: 16370
  Clone ID: TF_OsC306844_1.pep

SEQ ID NO: 23958 - protein, 541 aa, Oryza sativa
  Clone ID: TF_OsC31069_3.pep
MDIGPHSIQLIAPPSLYHAASAAAMGDHRDPAFPAAAGGCRLPKTSSVSVTESVTAVHDFKVTGYSLIEGLGIGRYVSSSTFTVGGVDWAVRFYPDGSTVTCLGNASAFLYYCGREKEVRTRFTLNLLGKDGKLSQVTNSYMKHTFSPASDNWGFIKFAEKSKLQSSPFLHNDCLTIRCLLTVVRESHTKDVEVNSVVVPPSNLHTDFENMLQDGEGSDVTFTVGGQEFRAHKCVLAFRSPVFKAELFGPMKENGTQCIKIDDMEPEVFEALLHFIYTDRLPDSCRDGKAAAMQHLLVAADPKHRTNQGQPYRNCSYGGILHHSQNKLWRNRRQELRVRGDSVSPMEHVPPWTLSPAHRSREVEDEADRDDGEAAVRGAEGRRPQIEEAVVDVRAPPGTTPPPTPARKRTAAASPLGATPAPAPERKGMAAASLPGATPTPTPATERKGTTAASPRGTQSTTPARKGLAVASPPGKPLPTPGRKRNFVAGDWRGGREKERGNNFPPTRARQRRPRLGRKNGSLQMSNDIYGYGNLDYWDVG

SEQ ID NO: 23959 - protein, 386 aa, Oryza sativa; identical to SEQ ID NO: 16340
  Clone ID: TF_OsC56854_1.pep

SEQ ID NO: 23960 - protein, 370 aa, Oryza sativa; identical to SEQ ID NO: 16344
  Clone ID: TF_OsC191632_1.pep

SEQ ID NO: 23961 - protein, 637 aa, Oryza sativa
  Clone ID: TF_OsC3707_1.pep
MAGSEAAAAQEAEMDPDFSGGGGGGPSFEFAFNSVNFSDRVLRIEVVAGDDDDDDDHAPGSSRDGGAASSSSSSSYRGRRPGSEAAAAQEAEMDPDFSGGGGGGPSFEFAFNSVNFSDRVLRIEVVAGDDDDDDDHAPGSSRDGGAGSLSDWARHRKRRREELLKEKESEAVMPDQINCKVEPEECDAYEENQEEPVAMMDDSPPSVGPDGDDGPSMDSPWSGGVSTPVLRVKNIYISSAILAAKSPFFFKLFSNGMKESDERQATLRITDSEENALMELLSFMYSGKLTSTDPTLLLDILMAADKFEVISCMRYCSQLLTSLTMTTESALLYLDLPCSISMAAAVQPLTDAAKEYLSNKYKDLTKFQDEVMNIPLAGIEAILSSNDLQVASEDAIYDFLIRWARAQYPKSEERREILSSRLLPLVRFSHMTCRKLRKVLICTDLDHEQATKCVTEALLYKADAPHRQRALAADVTTCQKFAERAYKYRPLKVVEFDRPYPQCIAYLDLKREECSRLFPSGRMYSQAFHLAGQGFFLSAHCNMEQQSTFYCFGLFLGMQEKGSMSVTVDYEFAARTRPSGEFVSKYKGNYTFTGGKAVGYRNLFAIPWSTFMADDSLFFLDGVLHLRAELTIKQPTV

SEQ ID NO: 23962 - protein, 605 aa, Oryza sativa
  Clone ID: TF_OsC43419_1.pep
MDPDFSRASRGPSFAFAFNSVNFSDRVLRIEIVAGDDAAGAKGAAGEGCSSLADWAHQRKRRREELRREKAVGKYFGRDPNFDSKKKWATNRDSCFPLRGIALGRPHCRLGASAVRYFRRARSRECESGKYTDLETCKVEAEECDTYEENNEEPVAMIEESPPDIGQDGEDGDSCDSSWSMECTQVLRVKSIYISSAILAAESPFFYKLFSNGMKESDQRHATLRITASDSFYLIIVCLSETEENALMELLSFMYSGKLTTNQPTLLLDILMIADKFEVVSCMRHCSQLLRSLPMTTESALLYLDLPSSISMAAAVQPLTDTAKAFLANKYKDLTKLQDEAMNIPLAGIEAILWSNDLQVASEDAIYDFVIKWARSQYPKLEERREILGTRLLPLVRFCHMTCRKLRKVLACNDLDHEQATKCVTEALLYKADAPHRQRTLAADVLTCRKYAERAYKYRPLKVVEFDRPYPQCIAYLDLKREECSRLFPSGRIYSQAFHLAGQGFFLSAHCNMDQQSAFHCFGLFLGMQEKGSTSVTVDYEFAARTRPSGEFVSKYKGYYTFTGGKAVGYRNLFAIPWSSFMADDSLFFIEGVLHLRAELTIKQP

SEQ ID NO: 23963 - protein, 395 aa, Oryza sativa
  Clone ID: TF_OsC157448_1.pep
MTAAASWSRSVTETVRGSHQYTVKGFSMAKGVGAGRYVSSDTFAVGGYHWAVYLYPDGKNPEDNANYVSVFVALASDGADVRALFELTLLDQSGRGRHKVHSHFDRSLQAGPYTLKYRGSMWGYKRFYRRSLLESSDFLKDDCLVMNCTVGVVKNRLETPKNIHINIPPSDMGRCFNNLLNLRIGCDVSFEVGDERVQAHKWILAARSPVFKAQFFGPIGNPDLHTVIVEDVEPLVFKAMVNFIYSDELPSIHELAGSVSTWTSTVVVQHLLAAADRYGLDRLRLLCEEKLCDELTAETVATTLALAEQHHCTQLKSACLKFTAVRENLGAVMETEGFNYLEETCPSLLSDLLATVAVVDDDAASFNRKRGVGGNEGANPVESVEASDRRIRRRV

SEQ ID NO: 23964 - protein, 451 aa, Oryza sativa
  unsure (1)..(451): unsure at all Xaa locations
  Clone ID: TF_OsC20177_1.pep
HVAVPPPNPRRTTTLSRRASPPPAAAGGGGTGRPVAGHGGAAAPLPRPGGDGAPSPTSSRSVTQTVNGSHRFVIQGYSLAKGMGXCGKHIASETFTVGGYQWAIYFYPDGKNPEDNSAYVSVFIALASEGTDVRALFELTLLDQSGKGKHKVHSHFDRSLESGPYTLKYRGSMWGYKRFFRRTALETSDFLKDDCLKINCTVGVVVSTMDYSKPHSIHVPESDIGYHFGTLLDNQEGVDVICNVAGEKFHAHQLVLAARSSVFRSELFEHESDEEKNEVDTSNEIKEIVIDDMEPKVFKAVLHFMYRDNLVGDDELSASSSDCSIFDTLAGKLLAAADRYELPRLRLLCESYLCKHISVNSVATTLALADRHHAMELKSVCLKFAAENLSAVIRTDGFDYLKDNCPALQSEILRTVAGCEEECSSGGKSQSVWGQLSDGGDTSGRRVRPRV

SEQ ID NO: 23965 - protein, 423 aa, Oryza sativa; identical to SEQ ID NO: 16510
  Clone ID: TF_OsC42903_1.pep

SEQ ID NO: 23966 - protein, 99 aa, Oryza sativa
  Clone ID: TF_13447549.pep
RILANRQSAQRSRVRKLQYISELERSVTTLQMEVSALSPRVAFLDHQRSLLTVGNSHLKQRIAALAQDKIFKDAHQEALKKEIERLRQVYHQQQIKATG

SEQ ID NO: 23967 - protein, 393 aa, Oryza sativa
  Clone ID: TF_OsC728_1.pep
MDDPGAADPGARPHHVSPGQPPVVPRSPTPLDLSSAAAAAAAASYRRLSPSLRPPAHPQARLPSPYPQIPSSSSSAAAGSSGHHARSLSQPLFFSLDSLPPLPYADLAAPPAIPPSPPSSSSDPPPPGLPPRKGGHRRSQSDIPFGFSHLSPPLPPPAPVKREAATAAEGCRSDGDDFALYDLVNSYMDLDGMEALNSSEERHEDRDSRASGTRTGSVADSSENEAESHSTPVERKDGGGKSRHCRSLSVDSFIEKLNFDESPKLPLPSPSGGLSRSGSGSLDGGAASLFGAEFANGEFTEAEKKKIMANERLAEIALTDPKRVKRILANRQSAARSKERKMRYIQKLEHKVQVLQTEASTLSHSLKCCRRTPWTSPQNNELKLGCSMDHSPV

SEQ ID NO: 23968 - protein, 333 aa, Oryza sativa
  Clone ID: TF_OsC593_1.pep
MADASSRTDTSTVLDTDDKNQMVDGQSGAIVPSNSSDRSDRSDKPMDQKVLRRLAQNREAARKSRLRKKAYVQQLESSKLKLASLEQEINKARQQGIYISSSGDQTHAMSGNGAMTFDLEYARWLEEQNKQINELRTAVNAHASDSDLRLIVDGIMAHYDEIFRLKGVAAKADVFHILSGMWKTPAERCFLWLGGFRSSELLKLLVNQLEPLTEQQLLGLSNLQQSSQQAEDALSQGMEALQQSLAGTLAGSLGPSGSSGNVANYMGQMAMAMGKLGTLENFLRQADNLRQQTLHQMQRILTIRQAARALLAIHDYFSRLRALSSLWLARPRE

SEQ ID NO: 23969 - protein, 329 aa, Oryza sativa
  Clone ID: TF_17025921.pep
MADMSPRTDTSTDDTDDNHMLEPGQLALAAASDSDRSKDKHEDQKTLRRLAQNREAARKSRLRKKAYVQQLENSRLKLTQLEQELQRARQQGIFISSSVDQTHSMSGNGALAFDMEYARWLEEHNRQINELRSAVNAHAGDNELRGVVDKIMSHYEEIFKQKGNAAKADVFHVLSGMWKTPAERCFLWLGGFRPSELLKLLSTQLEPLTEQQLSGIANLQQSSQQAEDALSQGMEALQQSLAETLAGSLGSSGSTGNVANYMGQMAMAMGKLGTLENFLRQADNLRQQTLQQMQRILTTRQSARALLVISDYSSRLRALSSLWLARPKE

SEQ ID NO: 23970 - protein, 152 aa, Oryza sativa
  Clone ID: TF_LIB3431-020-P1-K1-E3.pep
PRVRPRVRSKKKRRQMRNRDSAMKSRERKKMYVKDLETKSKYLEAECRRLSYALQCCAAENMALRQSLLKDRPVGAATAMQESAVLTETLPLVSLLWLVSIVCLLPVPGLPNRNPVARSSAGRDLATVTGKKTSSEQQLEETLLLHGRRKGS

SEQ ID NO: 23971 - protein, 544 aa, Oryza sativa
  Clone ID: TF_OsC192_1.pep
MVQGEESSWRMAASTHHERAIPLNQALAYGVQAHASPSVAAAPPASFLDFQPAAAAAAYFGELEEALIHGANAGGVVDPGMIRADVHSKSAAAAATAGYLAARPPTLEIFPSWPMRQQQQLHSGNSQSVGSTTDSSSAQNTMPQMELVSPASIRASSEHQHQQQQPGQEVMMVTTDDYSYKPGLAAASPSFQQQHQLQHHQQQQLHGGGDHDKRKHGSTRKDGKSVDAKTERRLAQNREAARKSRLRKKAYVQNLETSRVRLQQIEQELQRARSQGLFLGGCRAAGDMSSVKSFAGAAMFDMEYARWLDDDSKRLTDLRGGLQAHLLDTNLGLIVEECMQHYDELFQLKAALARSDVFHLLTGTWATPAERCFLWMGGFRPSDLLKILIQQLDPLTEQQMLGIYSLQQSSEQAEEALAQGLQQLHQSLADTVAAGTLNDGPGVPNYMSLMAIALDKLASLESFYQQADNLRQQTLHQLRRILTTRQAARCFLSIGEYYRRLRALSNLWSSRPRENFIGTESVSPTGTELQPMHNQPQQNQYSGF

SEQ ID NO: 23972 - protein, 519 aa, Oryza sativa
  Clone ID: TF_OsC596_1.pep
MEGGRLGGAAASASAAAAADARGGMSGFAAPQHAIVKHGPGSVTHCGGKWTFAELCQSEQIWVLDCYCMQWACKFATNATECHTNLNNVQPTQVTDFGALAQSAGFRIEDLANLSTNGLFNLKSNAHTIINDPLQFENYVKSISPSNITTPPAGSVVDPQTLVPQKGAQLNWVTIRTGNVENWGESTMADTSPRTDTSTDPDTDERNQMFEQGQLAAPTASDSSDRSKDKLDHKTLRRLAQNREAARKSRLRKKAYIQNLESSRLKLTQIEQELQRARQQGIFISTSSDQSHSASGNGALAFDMEYARWLEEHNKHINELRAAVNAHAGDNDLKSTVDSIMAHYNEIFKLKGVAAKADVFHVLSGMWKTPAERCFMWLGGFRSSELLKLLAGQLEPLTEQQLAGIANLQQSSQQAEDALSQGMEALQQSLAETLASGSLGPAGSSGNVANYMGQMAMAMGKLGTLENFLRQADNLRLQTLQQMQRILTTRQSARALLAISDYFSRLRALSSLWLARPRE

SEQ ID NO: 23973 - protein, 362 aa, Oryza sativa; identical to SEQ ID NO: 16453
  Clone ID: TF_OsC100050_1.pep

SEQ ID NO: 23974 - protein, 332 aa, Oryza sativa
  unsure (1)..(332): unsure at all Xaa locations
  Clone ID: TF_OsC239382_1.pep
MAQLPPKIPVAAPGHHQHWASAGGAGDAAWADEFAEFAASRRGAHRRSLSDSVAFVEVAPAGCGAGGEFDRLDDDQLMSMFPDEGGSSAPGSDNGGSDSDGGGDKHAAAQSDDGQHAAGEPTQEQAAATSPTELIRDPKRVKRILANRQSAQRSRVRKLQYISELERSVTTLQKWRQFETDRWTQPHWLAGNSTQCGEEMSESNEVSVLSPRVAFLDQQRTILTVGNSHLKQRIAALAQDKIFKDAHQEALRKEIERLRQAVLACYRLTAPDLLCMIWFPLLGXETTGGEKPAQHIVIVEHRYCSSFKDKSHSVQYNICIIQNLQYMDLDQR

SEQ ID NO: 23975 - protein, 184 aa, Oryza sativa
  unsure (1)..(184): unsure at all Xaa locations
  Clone ID: TF_OsC17917_2.pep
QRPLWKVSSSRLSEYKVEDLAAALLNSFTYNIGQIAYFVANLSGLKRIFFRGAYICGHEKTMDKISHSLXYWSKSQVQTTFLCHEGFLGTLGAFWSYENMGIDGLAAHEVIREVLLGAPYTGQLPSLPLTHQQDNGEDTTIEGEVERLRHDNAVLKAELERLQRENTELKAKLVKSGKPNTFYH

SEQ ID NO: 23976 - protein, 458 aa, Oryza sativa
  unsure (1)..(458): unsure at all Xaa locations
  Clone ID: TF_OsC55794_1.pep
MGEASSSSGHPRQNPHVLGYGFHGAMPNSLPSANLFEQQGGANYFGELEEALMQQVATLRRTQQTATTTSTLHHGDTTPFSTTATAAATARPPPTLDIFPSWPMRSLHTPKEGSNVTADTTDSESSSKNNSNQNASSDQHVLVGDMAGQFDQIPQQEQHKKMATNSPTHSSKTGKALDPKTMRRLAQNREAARKSRLRKKAYIQQLESSKLKLAQMEQDIHRARSQGLLLGAPGGNTSSGAAMFDVDYARWLEEDSQRMAELHGGLHAHLPDSDLRAIVDDTLTHYDHLFNLKGMAAKADVFHLITGMWATPAERCFLWMGGFRPSELLKTLTPQLDPLTEQQVVGICNLQQSSQQAEEALSQGLDQLHQSLAETVAGGSPLDDPNVGSFMGHMAIALGQLSNLEGFVIQIKIGVALSLCXLNFINXVRQAARCFLAIGEYHNRLRALSSLWASRPRE

SEQ ID NO: 23977 - protein, 330 aa, Oryza sativa
  unsure (1)..(330): unsure at all Xaa locations
  Clone ID: TF_OsC594_1.pep
MADASSRTDTSIVVDNDDKNHQLENGHSGAVMASNSSDRSDRSDKLMDQKTIRRLAQNREAARKSRLRKKAYVQQLESSKLKLAQLEQELQKARQQGIFISSSGDQTHAMSGNGALTFDLEYTRWLEEQNKQINELRTAVNAHASDSDLRLIVDGIMAHYDEVFKVKGVAAKADVFHILSGMWKTPAERCFLWLGGFRPSELLKLLANHLEPLTEQQLLGLNNLQESSQQAEDALSQGMEALQQSLADTLAGSLGSSGSSGNVANYMGQMAMAMGKLGTLENFLCQXGQPATADIASNATNSDDPASLACSSCHTRLLFTLACFEFAVAC

SEQ ID NO: 23978 - protein, 480 aa, Oryza sativa; identical to SEQ ID NO: 16457
  Clone ID: TF_OsC65434_1.pep

SEQ ID NO: 23979 - protein, 165 aa, Oryza sativa
  unsure (1)..(165): unsure at all Xaa locations
  Clone ID: TF_LIB3433-057-P1-K1-E1.pep
RTRGGKLLDAKTERRLAQNREAARKSRLRKKAYVQQLETSRIRLQQIEQELQRARSQGLFPGGCSAPGDMSSGAVMFDMDYTRWIDDDSKCMAELQGALQAQLPDGNLGAIVEECMRHYDELFHLRAVLASFRVFHLMTGMWAAPARRCFXXFGAFXPSEILKML

SEQ ID NO: 23980 - protein, 188 aa, Oryza sativa
  Clone ID: TF_LIB4371-001-Q1-K1-H2.pep
MIDATSGVNCNVGAANGTGDTGDAVCHADQEKSLKRRSGQRSRVRKLQYIADLERTVDSLQNIGADLAVRVASLFQLRNALSMENKQLRRQITSLQQAKLIKDGQTQMLKKETERLKQLSVRHRRSRSVTSCFEANSFGGGDPSAINWQMLDMSKLSLNGALLFLLEAATACENLTATTNIACTDLHL

SEQ ID NO: 23981 - protein, 387 aa, Oryza sativa
  Clone ID: TF_OsC739_1.pep
MASSSDEQPKPPEPPAAAAVAGTAVATAAAAVPTHAEWAASLQAYYAAAGHPYAWPAQHLMAAAAAGAPYGAPVPFPMYHPGAAAAYYAHASMAAGVPYPTAEAMAAAAAAAAGAVPEGKGKGKGAAASPEKGSSAAPSGDDASRSGDSGSEESSDTRDDDTDHKDSSAPKKRKSGNTSAEGEPSQATLVPYAAVESPYPLKGRSASKLPVSAPGRAALPNATPNLNIGIDLWSTPPALAVPAGQGEASPGLALARRDGVAHLDERELKRERRKQSNRESARRSRLRKQVGYLYGSGSRWQTWKETLILLGAAIFLAGGIECRIDAYTTDGYDVSTSPDVGLSAHGQYAQQAMLQETDKQHAPHKNTNNNSNGNYVGGSHKPEANSR

SEQ ID NO: 23982 - protein, 150 aa, Oryza sativa; identical to SEQ ID NO: 16459
  Clone ID: TF_OsC207527_1.pep

SEQ ID NO: 23983 - protein, 166 aa, Oryza sativa
  Clone ID: TF_OsC2449_5.pep
MILRMGDRRRWLPLRARRAARPSTTTIGAAAIGNRFDFPPPFFTQNLLVLPKIPKSSGLREAAPTGCGGLREAEGDEQFVLNGFTAANLSFDDMATVTPNGLLMLTNGTNQLKGHAFFPVPLQFHRAPNSTAMQSFSTAFVIGIIGAFEDQGSGNLAAAGGSSRAA

SEQ ID NO: 23984 - protein, 337 aa, Oryza sativa
  Clone ID: TF_OsC2527_1.pep
MSRSPHLPPRCPPLGPQITRRDDSLFTQSCRFPSEDPFVGEPPCWLDDLLADSGKSHTLPPLRRACSDSDAILDVLTSFQSPIYPIDEGDPQPVGEAGESFNAAAEGGGSGAGIEGSCVYGPNSPRQKTRLTSSESSMVNAVLENVPSNPLQYLMIDATSGVNCNVGAANGTGDTGDAVCHADQENEAGWWAVTGRSMGWRRSGQRSRVRKLQYIADLERTVDSLQNIGADLAVRVASLFQLRNALSMENKQLRRQITSLQQAKLIKDGQTQMLKKETERLKQLSVRHRRSRSVTSCFEANSFGGGDPSAINWQMLDMSKLSLNGGAVVPPRGGYGM

SEQ ID NO: 23985 - protein, 419 aa, Oryza sativa
  Clone ID: TF_OsC595_1.pep
MSQLKMLMDVTLHGMMWMKLLVRHTIFEVTMFQGELTIVLGINKLEPGQLALAAASDSDRSKDKHEDQKTLRRLAQNREAARKSRLRKKSRTVPSNSGQLQGIFISSSVDQTHSMSGNGALAFDMEYARWLEEHNRQINELRSAVNAHAGDNELRGVVDKIMSHYEEIFKQKGNAAKADVFHVLSGMWKTPAERCFLWLGGFRPSELLKLLSTQLEPLTEQQLSGIANLQQSSQQAEDALSQGMEALQQSLAETLAGSLGSSGSTGNVANYMGQMAMAMGKLGTLENFLRQVTLIWLSTPQWQYIGFFTVMPAYGLTCTGDPITSIGLWCDWLGYGECAGDDWHVIDCGADCHTSELVIENLKPRCISNARRRAVLRASSSPQWARPSHEKEQQRTDCIESQKSHEYSTKLADFNEIGR

SEQ ID NO: 23986 - protein, 471 aa, Oryza sativa
  Clone ID: TF_OsC1713_5044.pep
EAGQPYQHGGVALRLAEAAPEHARLGVVPRVRAAHGERPPRRGVQPRRQRAPLGAELVRGALQLLHPLPPPRPRPPRRLPVRDLPPQPPPPLLLAVLAAAAAAASAVTVQQHITTTTTPIAGTYHRRQAGGRIRGNTIVSERRRVDAEQAEADVHVREAEVERHGVVEGQHCGDQGPPELLLKIVARSDATTLVCSQTDDATEEADKAAKAGNTDGDGGGGQGGEAGGGIASFRLAVIFPPNVSQSLSSLDRYGHGNSDMKLQKEGDRRLVLGLFLEAFGIDLCICMLTHVFLSVFSLVKRETEQHAYMGVMLRNEDDGSDMQVENGIKVNRSLAIRLAIDELELVVGYTIKLALIEMGQCRMDNAPTAAANRRVHEIAYRFRDADKADGEEIDSSMLCGLEFLFSNNWRPIRFTETVAYAPNYACSFSHLLQQLLRMSIAFFYWEKIFSLAVLLRVRLRKAKIDFHKRFS

SEQ ID NO: 23987 - protein, 163 aa, Oryza sativa; identical to SEQ ID NO: 16487
  Clone ID: TF_OsC2757_1.pep

SEQ ID NO: 23988 - protein, 1437 aa, Oryza sativa
  Clone ID: TF_OsC799_1.pep
TRCKGGQTGVSDKRQELISAVRPEIQSRSDRRQPGDQTGATPSVRLRSVEFEGTNNIKELRRDLFKKEYIKFEMKPGEALDDYLSRFNKILSDLRSVDSSYDVNYTQYEISHHFLNGLDMSIWKMKVTSIQESVDMSTLTLDSLYTKLKTHEMNILSRKVDSNSSVLVSSSTSLDVDSSSSKSSAFALFNAMSDDQLEQFVEEDLVLLSNRLSRAVTNLGRARGEDNGDEKTNDNKPKGTFKGRKIKENLKKAFDQVYTAFEPLSDVDGESGDEDKGNNISGVCFMARGELDSECEDNEVSALEEAINILSAKNMKCEKLYRKQEFIIESLNSEIARLKYLIPNDDDCTNCEVLMNEISKIRDVNAAHDLKNRSSLALSFALHTRTLDELCLTKKLLQKYQIAFHASLMFNMICAKKLKQPHDVLDCSTCTLNKLKLKDALGRVGYMEDVVKTNEVLSCPKCGKSKGVMVDSENCANLEKEVSYLKNSLQRFSDGVGARSGEILVKPDTNKTVFKSAGFVKVNEKFELKNVALVEDLKYNLLSVSQIVDEDFEVHFKKTGSKVFDSCGDSVLNISRYGRVFKADFDNPVSPVITCLVAKFDKDVMFWHRRLGHVGFDYLTRLSSLDLVRGLPKLKKDLDLVCTPCRHAKMVASSHAPIVSVMTDAPGHLLHTDTVGPARVQSVGGKWYVLVIVDDFSRYSWVFFMATKDKAFQHFRGLFLRLNLEFPGSLKRIRSDNGGEFKNSSFEQFCNERGLEHEFSSPRVPQQDGVVERKNRVLVEMTRTMLDEYHTPRKFWAEAVQGEDGHIFEYESDNDDDEVGSAGQTGRQADRTAGTPPVRPAHDVRSDRPGSSGSGTIDADQDGPPEITTSTSTDTERESTSEVAAPLHIQRRHLPEQIIGNIGERTTRSKVMTHDVCANSAFVASFEPKDVSLALTDESWINAMHEELENFEINKVWTLVEPPSRHNIIGTKWIFKNKQNEDGLIVRNKARLVAQGFTKVEGMDFDETFAPVARIEAIRLLLAFAASKGFKLHQMDVKSAFLNGFIQEEVYVKQPPGFENSDFPNHVFKLSKALYGLKQAPRAWYDRLKNFLLTKGFTMGKVDKMLFVLKHGDNQLFVQIYVYDIIFGCSTHTLVVKFAETMRREFEMTMMGELSYFLGLQIKQTPQGTFVHQTKYMKDLLRRFKMENCKPISTPIGSTTVLDPDEDGEAVDQKEYRSMIRSLLYLTASRPDIQFAVCLCARFQASPRASHRQAVKRIMRYLNHTLEFEIWYSTSSSICLSGYSDADFGGCRIDRKSTNGTCHFLGISLIAWSSRKQSSVAQSTAESEYVVAASCCSQILWLLSTLKDYGLTFGKVSLFCDNISAINIAKNPVQHSRTKHIDIRFHVLRDHVEKGDVILQFLDTKLQLADIFTKPLDSNRFAFLRGELGIIHPFGMI

SEQ ID NO: 23989 - protein, 360 aa, Oryza sativa
  Clone ID: TF_OsC411_1.pep
MGNDEAVVTQKMGKAPSPPKDHPALSPYLDWSNMQAYYGPGILPPTFFSPGIAAGHTPPPFILGPQPLVPSAFGKPYAAIYPPGGAFSHPFMPLMVSPLSMEPAKSVNSKDSCSNKKMKEIDGATVSTGSGNSEKTSGDCSLEGSSDGNNQKASGTPKKRSIDDRPKSGVETGGALTPNDRPSEQAALPNLCIPVTAIKPDVSTASDFRVIATPVTEVPTKDDKESKRERRKQSNRESARRSRLRKQAETEELARKVELLTAENTSLRREISRLTESSKKLRLENSALMEKLTETGPDEAQEVPPVKTKAQQARGVENFLSMIDKTGTPRSSGHMDHAIATPKLRQLLGSGLATDAVAAR

SEQ ID NO: 23990 - protein, 753 aa, Oryza sativa
  unsure (1)..(753): unsure at all Xaa locations
  Clone ID: TF_OsC79483_1.pep
MPRTDNAASANSVEPDKSEECLEFDDEEEEVEEEEIEYEEIEEEIEEEEAVEEDEDVVEEVEEVDEEEDEEEDEESDXETEGVSKTXIGVHQKDSYVKRGSDAELLAXLPHGHAPWIAHLTKPPAADKKDDRVPLPSSNGAPLLPSYPPLGYGIMSVPGAYGAAPASTAQPMLYXSKSSSRRSNGSNDVTGWSSRIGNVPHSWTXDDDFRKXVWRNVGPGVLKGALMKVSSANRNRGYGFRQXHARGSAEYARQEMSSPTFKLDSNAPTVSWADPKNNDSGSTSQVKSVYVKNLPKNVTQAQLKRLFEHHGEIEKVVLPPSRGGHDNRYGFVHFKDRSMAMRALQNTERYELDGQVLDCSLAKPPAADKKDDRVPLPSSNGAPLLPSYPPLGYGIMSVPGAYGAAPASTAQPMLYAPRAPPGAAMVPMMLPDGRLVYVVQQPGGQLPLASPPPQQAGHRSGTGGRHGGSGGRYGGGGGSSGSSRPEECVSETRLYLRILPVSQSAESDGALYRQFTPVSHMDYEISGPESEVDSEVWLGWVAQPQIPTSLDDFLPSIRTTCTHTHTCNPPGPSATEHTHTCYHTHTHVFSSDDDSCGGDKAKPKKSRKPLGNREAVRKYRQKKKAHTAHLEEEVKRLRVINQQLVKRLQGQAALEVEVVRLRSLLVDVRSRINGALGSCPIQAQCGVDNVLGCDGMAQCFAGKPELGVRQSCAPSTVNCHISSDSGQNLVVPHALSPSDVIGSFMVSSTSKDE

SEQ ID NO: 23991 - protein, 478 aa, Oryza sativa
  Clone ID: TF_OsC59278_2.pep
MEFGNGGSSSSERRAAAEGATLARQGSVYSLTFDEFQSALAGGGGGGGGGSGFGKDSGSMNMDELLRSIWTAEESQAMASASGSAAGVGVAVGAPPTSLQRQGSLTLPRTLSAKTVDEVWRNLVRDEPPPVGAADGGDMPPQRQSTLGEMTLEEFLVRAGVVRENPPAAPPPVPPPMPPRPVPVVPKTTAFLGNFPGANDAGAAALGFAPLGMGDPALGNGLMPRAVPVGLPGAAVAMQTAVNQFDSGDKGNSDLSSPTEPMPYSFEGLVRGRRNGGGVEKVVERRQRRMIKNRESAARSRARKQAYTLELEAEVQKLKEMNKELERKQADIMEMQKNEVEEMIKDPFGRRKRLCLRRTLTGPWPFTVLHPGLVLWDGTLDFCCRGARTRVSSRNLVSMLSDAGLRQNDVASRGEDWRHARCGRRGFAHACPRSEIQGRNPRYALQIHSHHSKIQGGLAISSDGTAAATRVPDEQGGA

SEQ ID NO: 23992 - protein, 84 aa, Oryza sativa
  Clone ID: TF_OsC59278_5.pep
KVVERRQRRMIKNRESAARSRARKQAYTLELEAEVQKLKEMNKELERKQADIMEMQKNEVEEMIKDPFGRRKRLCLRRTLTGPW

SEQ ID NO: 23993 - protein, 277 aa, Oryza sativa
  Clone ID: TF_OsC78129_1.pep
MGVHAMSCMSCHGGGGGGGEGALSRQGSVYSLTLNEVESHLGEPLRSMNLDDLLRTVLPAAAAAAETAGRKTVDEVWRDIQGASTGRHHATPMGEMTLEDFLSRAGVAVDGAASAAGAHWLRGHYPPPPPPTTTTLQYVGGSGAVVDGVYNRVDGHGVAGFLSQVGVAGRKRGGGVDGVVEKTVERRQKRMIKNRESAARSRARKQAYTNELENKISRLEEENQRLREHKAVADFSTFPSCVDFLKAFLTQKLEPVMQIVPQPEPKQQLRRTTSASF

SEQ ID NO: 23994 - protein, 154 aa, Oryza sativa
  Clone ID: TF_LIB3434-035-P1-K1-D6.pep
EFSTKQAKTAMLHHHYHGEVASLHCLSPASLPFSSHYHSNMITMAPSPFHFPAATCEPIQELLPVVAGNRPAGSGSTDDAYQMAAEEERRRRRMISNRESARRSRMRKQRQLIELRGQVVHLRDANRRLLDELNQAMRGCSDVHCENTLLMKER

SEQ ID NO: 23995 - protein, 389 aa, Oryza sativa; identical to SEQ ID NO: 16498
  Clone ID: TF_OsC11304_1.pep

SEQ ID NO: 23996 - protein, 224 aa, Oryza sativa; identical to SEQ ID NO: 16499
  Clone ID: TF_OsC7199_1.pep

SEQ ID NO: 23997 - protein, 426 aa, Oryza sativa; identical to SEQ ID NO: 16502
  Clone ID: TF_OsC207355_1.pep

SEQ ID NO: 23998 - protein, 390 aa, Oryza sativa; identical to SEQ ID NO: 16503
  Clone ID: TF_OsC1437_1.pep

SEQ ID NO: 23999 - protein, 163 aa, Oryza sativa; identical to SEQ ID NO: 16505
  Clone ID: TF_OsC175078_1.pep

SEQ ID NO: 24000 - protein, 274 aa, Oryza sativa
  Clone ID: TF_OsC21252_1.pep
MASSRVMAAAAASSSSSPPPPPPAAAAAGGAADLARFRSTSSGIGSMNMDDILRNIYGEAAPPPGAAGSAPAPPPAGEAAGAPVGEVDAPRTAEEVWKEISSSGGLSAPAPAPAAGAAGRGGGPEMTLEDFLAREDDPRATAVEGNMVVGFPNVTEGVGTAGGGRGGGGGGRGRKRTLMDPADRAAMQRQKRMIKNRESAARSRERKQAYIAELEAQVAELEEEHAQLLREQEEKNQKRLKEKWHVFMQIKEQAVAVVIRKKTQDLRRTNSMEW

SEQ ID NO: 24001 - protein, 189 aa, Oryza sativa
  Clone ID: TF_OsC15853_3.pep
MLLQDSHSKENDVKEDGSSQNGISHTALNQNMSMAPTQTGVVIGGVAPTTNLNIGMDYWGAAGSSPVPAMHGKASSGSVRGEQWDERELKKQKRKQSNRESARRSRLRKQAECEELSVRADNLRAENSSLRAELERIKKEYEALLSHNASLKEKLEGNSDSIPYMNEQNDTNGTHQKQQDSDAQPNDAP

SEQ ID NO: 24002 - protein, 124 aa, Oryza sativa
  Clone ID: TF_435943.pep
MASTRLSLELGKVGIQSSPPCSSSSSAGHPAMQPAAAATAAPGYGPRPRHMLTEAEKEAKRLRRVLANRESARKTILRRQAIRDELARKVADLSSQNETMKKEKDVVMQEYLSLKETNKQLKEQ

SEQ ID NO: 24003 - protein, 324 aa, Oryza sativa; identical to SEQ ID NO: 16508
  Clone ID: TF_OsC341905_1.pep

SEQ ID NO: 24004 - protein, 318 aa, Oryza sativa
  Clone ID: TF_OsC782_1.pep
MNMDELLRSIWTAEESQAMASASAAAAAAEGGLHKQGSLTLPRTLSVKTVDEVWRDLQREASPGAAAADGGGGGGEHHQPRRQPTLGEMTLEEFLVRAGVVRENTAAAAAMVAAAAAPPVAPRSIPAVNNSSIFFGNYGGVNDAAAAAAGAMGFSPVGIGDPTMGNRLMSGVAGIGGGAITVAPVDTSVGQMDSAGKGDGDLSSPMAPVPYPFEGVIRGRRSGGNVEKVVERRQRRMIKNRESAARSRARKQAYTMELEAEVQKLKEQNMELQKKQEEIMEMQKNFFPEMQKNQVLEAVNNPYGQKKRCLRRTLTGPW

SEQ ID NO: 24005 - protein, 368 aa, Oryza sativa
  Clone ID: TF_OsC1049_1.pep
MNREKSPIPGDGGDGLPPQATRRAGPPAAAAAAEYDISRMPDFPTRNPGHRRAHSEILSLPEDLDLCAAGGGDGPSLSDENDEELFSMFLDVEKLNSTCGASSEAEAESSSAAAHGARPKHQHSLSMDESMSIKAEELVGASPGTEGMSSAEAKKAVSAVKLAELALVDPKRAKRIWANRQSAARSKERKMRYIAELERKVQTLQTEATTLSAQLALLQRDTSGLTTENSELKLRLQTMEQQVHLQDALNDTLKSEVQRLKVATGQMANGGGMMMNFGGMPHQFGGNQQMFQNNQAMQSMLAAHQLQQLQLHPQAQQQQVLHPQHQQQQPLHPLQAQQLQQAARDLKMKSPMGGQSQWGDGKSGSSGN

SEQ ID NO: 24006 - protein, 301 aa, Oryza sativa; identical to SEQ ID NO: 16513
  Clone ID: TF_OsC173090_1.pep

SEQ ID NO: 24007 - protein, 295 aa, Oryza sativa
  Clone ID: TF_OsC1936_1.pep
MMKKCPSELQLEAFIREEAGAGDRKPGVLSPGDGARKSGLFSPGDGEMSVLDQSTLDGSGGGHQLWWPESVRTPPRAAAAFSATADERTPASISDDPKPTTSANHAPESDSDSDCDSLLEAERSPRLRGTKSTETKRIRRMVSNRESARRSRRRKQAQLSELESQVEQLKGENSSLFKQLTESSQQFNTAVTDNRILKSDVEALRVKVKMAEDMVARAAMSCGLGQLGLAPLLSSRKMCQALDMLSLPRNDACGFKGLNLGRQVQNSPVQSAASLESLDNRISSEVTSCSADVWP

SEQ ID NO: 24008 - protein, 409 aa, Oryza sativa
  unsure (1)..(409): unsure at all Xaa locations
  Clone ID: TF_OsC103554_1.pep
MASHAGGSGGGGGGSGRDAGSAQRGPMQGLARQGSLYGLTLNEVQSQLGEPLLSMNLDELLKSVFPDGADLDGGGGGGGIAGQSQPALGLQRQGSITMPPELSKKTVDEVWKGIQDVPKRGAEEGGRWRRVMMSIVNFVDYMGSAHIFRILXAVGKIDXLEIPSSPSSRWWFRACKHQHGQSPSHVAPAADLFGGFVTSQYAYMATHLAPQPLAVATGAVLDPIYSDGQITSPMLGALSDPQTPGRKRCATGEIADKLVERRQKRMIKNRESAARSRARKQAYTNELENKVLRLEEENERLKKQKPTFILSSKVSRKQVTKAMRSATICVLCICILMILQCFASISAVDLGDAAASASGGEGLIRPRKLLQNAPAARSPPSRSAAAVEVEVNASLGKQKPSSKSNPRQN

SEQ ID NO: 24009 - protein, 104 aa, Oryza sativa
  Clone ID: TF_OsC11304_2.pep
PVPYPFDTALRVRKGPTVEKVVERRQSRMIKNRESAARSRARKQAYIMELEAEVAKLKEQKAELQKKQVEMIQKQNDEVMERITQQLGPKAKRFCLRRTLTGPC

SEQ ID NO: 24010 - protein, 425 aa, Oryza sativa; identical to SEQ ID NO: 16516
  Clone ID: TF_OsC405_1.pep

SEQ ID NO: 24011 - protein, 142 aa, Oryza sativa
  Clone ID: TF_OsC65391_1.pep
MAEQLGGVGSPQLSLSSCSSFLSISSAGTSAADGAPHLSLGVGGAEELDLLLQVGIGGGGGGGGDEEEEERKTIRMMKNRESALRSRARKRAYVQELEKEVRRLVNENLKLKRHCKQLKTEMAALIQQPTNKQSSHRRSSST

SEQ ID NO: 24012 - protein, 436 aa, Oryza sativa
  Clone ID: TF_OsC1934_1.pep
MEHVFAVDEIPDPLWAPPPPVQPAAAAGVDDVGAVSGGGLLERCPSGWNLERFLEELDGVPAPAASPDGAAIYPSPMPAAAAEAAARWSRGYGDREAVGVMPMPAAALPAAPASAAMDPVEYNAMLKRKLDEDLATVAMWRASGAIHSESPLGNKTSLSIVGSILSSQKCIEGNGILVQTKLSPGPNGGSGPYVNQNTDAHAKQATSGSSREPSPSEDDDMEGDAEAMGNMILDEEDKVKKRKESNRESARRSRSRKAARLKDLEEQVSLLRVENSSLLRRLADANQKYSAAAIDNRVLMADIEALRAKVRMAEESVKMVTGARQLHQAIPDMQSPLNVNSDASVPIQNNNPMNYFSNANNAGVNSFMHQVSPAFQIVDSVEKIDPTDPVQLQQQQMASLQHLQNRACGGGASSNEYTAWGSSLMDANELVNMELQ

SEQ ID NO: 24013 - protein, 469 aa, Oryza sativa
  Clone ID: TF_OsC1934_2.pep
MEHVFAVDEIPDPLWAPPPPVQPAAAAGVDDVGAVSGGGLLERCPSGWNLERFLEELDGVPAPAASPDGAAIYPSPMPAAAAEAAARWSRGYGDREAVGVMPMPAAALPAAPASAAMDPVEYNAMLKRKLDEDLATVAMWRELLGHIPLEDEIILVEKKKLLYWNLASGAIHSESPLGNKTSLSIVGSILSSQKCIEGNGILVQTKLSPGPNGGSGPYVNQNTDAHAKQATSGSSREPSPSEDDDMEGDAEAMGNMILDEEDKVKKRKESNRESARRSRSRKAARLKDLEEQVSLLRVENSSLLRRLADANQKYSAAAIDNRVLMADIEALRAKVRMAEESVKMVTGARQLHQAIPDMQSPLNVNSDASVPIQNNNPMNYFSNANNAGVNSFMHQVSPAFQIVDSVEKIDPTDPVQLQQQQMASLQHLQNRACGGGASSNEYTAWGSSLMDANELVNMELPRVRHILTT

SEQ ID NO: 24014 - protein, 134 aa, Oryza sativa
  unsure (1)..(134): unsure at all Xaa locations
  Clone ID: TF_OsC12563_1.pep
STHGVRSDGMSAMTHADMMNCIGNGMMIENGTRKRPHREDGCAEKTVERRQRRMIKNRESAARSRARKQAYTVELEAELNYLKQENARLKEAEKTVLLTKKQMLVEKMMEQSKEKMNANRGGSXQLRRSGSCMW

SEQ ID NO: 24015 - protein, 298 aa, Oryza sativa
  Clone ID: TF_OsC1243_2.pep
MKKCPSELNFEAFFHGERGEDDADAAADQKPGGGPHPPPFAMFSAADLSSFGFADSVTSTITGVIPNHIWPQSQSLNARHPAVYTIESQSSICAAASPTSATTLNMKESQTLGGTSGSDSDSESLLDIEGGPCEQSTNPLDVKRMRRMVSNRESARRSRKRKQAHLADLETQVDQLRGENASLFKQLTDANQQFTTAVTDNRILKSDVEALRVKVKMAEDMVARGALSCGLGHLGGLSPALNPRQGACRVPDVLTGLDYAGDDPFTGLSPPEQVQMPGGGEVGDAWGWDNHSNGAMSK

SEQ ID NO: 24016 - protein, 272 aa, Oryza sativa; identical to SEQ ID NO: 16522
  Clone ID: TF_OsC271_2.pep

SEQ ID NO: 24017 - protein, 397 aa, Oryza sativa
  Clone ID: TF_OsC196_1.pep
MELYPGYLEDHFNIHKLSISSASPPEYMTSASTQFAAPVRMGAYDRPPPVGMWSHEQFKVDNGQATSASTIMEAEMKFENRLEEIPQVVLEEGRNVDQEASKPPDKVLRRLAQNREAARKSRLRKKAYIQQLETSRLKLAQLEQELQRARQQAVYANGSLREPNLGFTGPIDPGALGFEIKYSHWVDEQNRNTGELRNALLQGQTTDQDLELKLLVEAGLDNYNRLFEMKEEAANSDVFYIMSGMWKTPTERFFLWIGGFRPSEVLKNLRPQLEPLTDKQVVEVGGLQQTSMQVEDALSQGMDKLKQTIADSLTAADPFDSPEAYMVHMANAVEQLRSLVQFVTQADHLRQQTLQEMHRILTTRQAARGLLALGDYFQRFRALSSLWAARPRDSGIS

SEQ ID NO: 24018 - protein, 182 aa, Oryza sativa
  Clone ID: TF_OsC285906_1.pep
QRRENCGGDAVIIMWRPRASRWSARRRRASAAASARRRAFWHRAARPWRATACSLAASSRFSARRRALSPRSSSSRCCFRARDRRADSRFDTFRRCRLRSSSSSTSPFSSSAAAALSSSDDDGEGDADDAISCSKVGHVSAAHGVNPNPDVIASRSKSSASCTDSIFLTLPSPNTQKRRTRD

SEQ ID NO: 24019 - protein, 167 aa, Oryza sativa
  Clone ID: TF_OsC1713_4810.pep
MANYHHQEYYQMAAAAAVAWPREPDSPQLSIMSGCSSLFSISTLRDDDDGGGVRLAGAALPATPVSLAGIAGGASTPGGDEVDMEVRQQSGGSGDDRRTIRMMRNRESALRSRARKRAYVEELEKEVRRLVDDNLNLKKQCKELKQEVAALVMPTKSSLRRTSSTQF

SEQ ID NO: 24020 - protein, 148 aa, Oryza sativa
  Clone ID: TF_OsC60_1.pep
MSSPSRRSSSPESNTSGGGGGADERKRKRMLSNRESARRSRARKQQRLEELIAEAARLQAENARVEAQIGAYAGELSKVDGENAVLRARHGELAGRLQALGSVLEILQVAGAPVDIPEIPDDPLLRPWQPPFAAQPIVATAMADAFQF

SEQ ID NO: 24021 - protein, 203 aa, Oryza sativa; identical to SEQ ID NO: 16530
  Clone ID: TF_OsC31203_1.pep

SEQ ID NO: 24022 - protein, 180 aa, Oryza sativa; identical to SEQ ID NO: 16529
  Clone ID: TF_OsC32579_1.pep

SEQ ID NO: 24023 - protein, 266 aa, Oryza sativa
  Clone ID: TF_OsC2044_1.pep
MMASRVMASSSPSHTASDLARFAAGRGGGGSAGLGSMNVEEILRGIYADMPTPALPLVGGDRPMSPLPAPDVAAAPRTAEEVWKEITGAGVAAAAGGVVPPAAAAAAAPAVVAGAGAGTGAEMTLEDFLAREGAVKEDEAVVTDPSAAKGQVVMGFLNGAEVTGGVTGGRSRKRHLMDPMDRAAMQRQKRMIKNRESAARSRERKQAYIAELESLVTQLEEENAKMFKEQEEQHQKRLKELKEMVVPVIIRKTSARDLRRTNSMEW

SEQ ID NO: 24024 - protein, 646 aa, Oryza sativa; identical to SEQ ID NO: 16537
  Clone ID: TF_OsC11088_1.pep

SEQ ID NO: 24025 - protein, 360 aa, Oryza sativa; identical to SEQ ID NO: 16531
  Clone ID: TF_OsC2449_1.pep

SEQ ID NO: 24026 - protein, 139 aa, Oryza sativa
  Clone ID: TF_rsiced_11007.y1.abd.pep
STTISKNKSKIITKQQQQQQEIDEEEESEWRGEHPLQSPPHRRRHLHRLPQLLVLDAEHLVLLLELLHLGLPVVDAGLLARAGPRRGLAVLDHPPLAAVPGGGTPAGAADETSSRSVSLPPLSKQARKLSVSVTQTHRE

SEQ ID NO: 24027 - protein, 145 aa, Oryza sativa
  Clone ID: TF_OsC3007_1.pep
MSSSSLSPAGSSDGDSAGVVVAADHRREKRRLSNRESARRSRLRKQQHLDELVQEVARLQADNARVLARASEIAGQYARVEQENTVLRARAAELGDRLRSVNEVLRVVEEFSGVAMDIQEECPPDDPLLRPWQIPCPAAAHMLQY

SEQ ID NO: 24028 - protein, 238 aa, Oryza sativa; identical to SEQ ID NO: 16532
  Clone ID: TF_OsC542_34.pep

SEQ ID NO: 24029 - protein, 368 aa, Oryza sativa; identical to SEQ ID NO: 16535
  Clone ID: TF_OsC359_7290.pep

SEQ ID NO: 24030 - protein, 191 aa, Oryza sativa
  Clone ID: TF_OsC799_2.pep
HASVPDYAKKAMPAERIAELALIDPKRAKRILANRQSAARSKERKIKYTSELERKVQTLQTEATPLSAQLTLLQRDTSGLTAENRELKLRLAVHGKSKLTTVMLWNEALREEVQRLKIAAGQAPNMNGNPFNGGLQQQIPPYYTQQQQQQQQMPYLGGHHAQQRHPSHQQSSSNGGQSLSGQSLNDSMDFM

SEQ ID NO: 24031 - protein, 383 aa, Oryza sativa
  Clone ID: TF_OsC737_3.pep
MGKGEVATRSKSQKSSATQNEQSTPTNPPTAYPDWSQFQAYYNPAGTAPMTPPGFFHPNVAPSPQGHPYMWGPQMMPPYGTPPPYAAMYAQGTPYQQAPMLPGSHPYNPYPGQSPNGTVQTPTSAGGTETDKSGKSKRKTPLKRSKGSLGNLDVVATKNKKAPAKPSASSSNEGSSHSESGSGSSSEGSSTNSKSGSRTKDGSEHGQGNDASNKGATAQSSAVEPVQASTGPVVLNPMMPYWPVPPPMAGPATGVNMGMDYWGTPTSVPMHNKVIAAPASAPSSNSRDVVLSDPAIQDERALAWQKRKQSNRESARRSRLRKQAEWEEVANRADLLKQENSSLKEELKQLQEKCNSLTSENTTLHEKLKELEGEKSNGNWYKE

SEQ ID NO: 24032 - protein, 176 aa, Oryza sativa; identical to SEQ ID NO: 16539
  Clone ID: TF_OsC342012_1.pep

SEQ ID NO: 24033 - protein, 548 aa, Oryza sativa
  unsure (1)..(548): unsure at all Xaa locations
  Clone ID: TF_OsC15853_1.pep
MGFFRRIAGMFGISRDDADHHPHHHHHDGAAGDSAAAAEVPQDKVVAAAAAAAAAGNVQRRGFSVQVPVPVERPGPGPVLVPCPQGDGGVQGFRWYTRKLRIDEDGDVADEFLDEVVPEISINNDSTPAGRYQVKYNTKSAALAMRKQISVIDGDICHSLEYQGRLRWNCQSLLAKGLQEFDMRVCLGASQECGSVEFLVDASFLNLSVLGCLMGTNDPGTPSKATKASEPEQSPATTSGTTAPVYPEWPGFQAYSAIPPHGFFPPPVAASPQAHPYMWGAQGVHPFNHYPMLANGNVETAGTAPGASEINGKNELGRTSGPSANGITSHSESGSESESEGSDANSQNDSHSKENDVKEDACSQYQIIHTAFTKKILMAPSQPEAVMGGVAPTTNSNIPTEXSGAAGSAPFPAMQCKATSASVRGEQWDETELKKQTRKXSNPALARRSRLRKQNIMDRLIEAPNYLSQPECEELSVRADNLRAENSSLRAELERIKKEYEALLSHNASLKEKLEGNSDSIPYMNEQNDTNGTHQKQQDSDAQPNDAP

SEQ ID NO: 24034 - protein, 406 aa, Oryza sativa
  unsure (1)..(406): unsure at all Xaa locations
  Clone ID: TF_OsC1438_2.pep
MPPRSVLPSPASVCSDPPRRAVDPTPMRPPAPATTAGAGGKVTPNLAMDAEGTRLLNLTVLQRLDPAVEDILITAAHVTLYDFNIELNQWSRKDVEGSLFVVKRNKQPRFQFIVMNRRNTDNLVEDLLSDFEFELQPPYLLYRNAAQEVNGIWFYNQQDCDAVAGVFGRILNAYAKVXKSPKYLSTKSEFEELEAVPTSAAIDGPLEPSSSSTVLVSNAPDESLTDYFSGAVNVGNVSITPMVGRTHQPIESVASSHVPLIIPSAAPTHQMGVPSGAASAPPLPVIDTNVHSSHSTNLVTPAFFAPPSSSSASLVAPASSFMPTASPFHPTSADAHRPAYGHGTPLLQPLPPPTPPASLTPVHNDEPVISRDKVKDALLRLVQLWLLFISDVREEIVQLCLDALLM

SEQ ID NO: 24035 - protein, 156 aa, Oryza sativa
  Clone ID: TF_OsC7438_1.pep
EVTMSSGTSSGSSQGTRSSRSEDDLNLQAQMEKKRKRRKESNRESARRSRMRKQQHLDELTSQVNQLKNQNQQLSMALSLTTQNLVAVQAQNSVLQTQELELQSRLCALTDILMCMNNTSATPTPTIPATTTSACDIFGASSWNQPPIDLYQYQCF

SEQ ID NO: 24036 - protein, 177 aa, Oryza sativa
  Clone ID: TF_OsC1517_1366.pep
FVLAQFLVETGLSSHQGSGGVSRQGSLCGLALSEVEGQLHGVNLDDLLRTGGGGAGAGAAAAGRKTVDVGLGAGPVLDALYHDGPVSGSKRAPAAGEGAAAEKTVERRKKRMIKNRESAARSRARKQAYTNELENKISRLEEENKRLRMHKAPEPVVQYVPQQEPKNQLRRVNSADF

SEQ ID NO: 24037 - protein, 330 aa, Oryza sativa
  unsure (1)..(330): unsure at all Xaa locations
  Clone ID: TF_OsC20200_1.pep
MQEPKHTDPAAMRGAHHRRARSEVAFRLPDDLDLGGGGAGAFDEIGSEDDLFSTFMDIEKISSGPXPRGAPTGTAPRETSSPPRPKHRHSSSVDGSGFFAAARKDAAASLAEVMEAKKAMTPEQLSELAGIDPKRAKRILANRQSGARSKERKARYITELERKVQTLQTEATTLSAQLTLFQRDTTGLSAENAELKIRLQAMEQQAQLREPLNDALKQELERLKLATGEMTNSNETYSMGLRHLTSTHPFLPSXPSIMQPARTVEPSCHHNVQPPRPNVPNHMLSHPNGLQDIMQQDPLGRLQGLDISKGPLVVKSESSSISASESSSTF

SEQ ID NO: 24038 - protein, 469 aa, Oryza sativa; identical to SEQ ID NO: 16493
  Clone ID: TF_OsC340_1.pep

SEQ ID NO: 24039 - protein, 935 aa, Oryza sativa; identical to SEQ ID NO: 16494
  Clone ID: TF_OsC1713_5475.pep

SEQ ID NO: 24040 - protein, 278 aa, Oryza sativa; identical to SEQ ID NO: 16477
  Clone ID: TF_OsC1243_1.pep

SEQ ID NO: 24041 - protein, 363 aa, Oryza sativa
  unsure (1)..(363): unsure at all Xaa locations
  Clone ID: TF_OsC14251_1.pep
MDFPGGSGRQQQQQQLPPMTPLPLARQGSVYSLTFDEFQSTLGGVGKDFGSMNMDELLRSIWTAEESHAVGAATTTTATTASVAAAEHAAVGAPPVQRQGSLTLPRTLSQKTVDEVWRDMMCFGGGGASTAPAAAEPPPPAHRQQTLGEITLKEFLVRAGVVREDMSVPPVPPAPTPTAAAVPPPPPPQQQTPMLFGQSNVFPPMVPPLSLGNGLVSGAVGHGGGGAASLVSPVRPVSSNGFGKMEGGDLSSLSPSPVPYVFKGGLRGRKAPGIEKVVERRQRRMIKNRESAARSRQRKQAYMMELEAEVAKLKELNDELQKKQDEMLEQQKNEXVRWQHLMSRQVGPTAKRICLRRTLTGPW

SEQ ID NO: 24042 - protein, 154 aa, Oryza sativa; identical to SEQ ID NO: 16480
  Clone ID: TF_OsC1713_4787.pep

SEQ ID NO: 24043 - protein, 380 aa, Oryza sativa; identical to SEQ ID NO: 16481
  Clone ID: TF_OsC87823_1.pep

SEQ ID NO: 24044 - protein, 195 aa, Oryza sativa
  Clone ID: TF_435945.pep
MSDDHSGGGGEQRQCRRGFAVDVVELGAALALADMAGAAVKPAMQLQLQPTAAQEEDEEMATTRLSLQLGNNVGSIIQSSSCSSSGSSAGLPAPPAAAAAPATAYGTKPLHMLTEEEKEAKRLRRVLANRESARQTILRRQAIRDELARKVADLSTQNESMKKERETVMQEYLSLKETNKQLKEQAQHHLSLSLF

SEQ ID NO: 24045 - protein, 442 aa, Oryza sativa
  Clone ID: TF_OsC39545_1.pep
MEQTLDVPRSLRLLAPKAQQQMDEFWRDRQKEIETTKDFSEHAIPMARLKKIVSSQKGNMMMTFDMPAFLSKMCELFVQELAVRAWASAQSHNRCIILDTDIAKAIASTESYDFLVDILHNHRVKHKSTPCSTLTTKRCRLVDQPSTSHMPYQHQLPQFAPTYTPAIPITPSLMPPISHYIPFQYPSLSQEVSPMMASAPIVNRSMLLIHNIARGLGLQGNNISTFANNNIPDNIVGCSSPTVLASMMSPALLEVAGTSLNPPNSHSICTMNMINSSDPSGSSIGDINVANQASLAPSGRFNPAILRESSCPSFLYSNNDTIVAIPEGVDISGTMDVASDVAAIVINGQEEHERETNVEHHQQNEIYESIDIGIINASVADDNKYSISWDELGMADDSLLDKFLEEFQVRNDGVLRTGIELHEDPFLGDVMLANPSTSNANK

SEQ ID NO: 24046 - protein, 223 aa, Oryza sativa
  Clone ID: TF_LIB4830-003-R1-N1-A5.pep
MKQTLDVHRSLRPPMPMAQQQMDESWRDRQKEIEMTKDFSEHMIPMARLKKIVSSQKGNMMMTFDMPAFLSKMCELFVQELAARAWACAQSHNRCIILDMDIAEAVASTESYDFLVDILHNHSVKQKSTPCSSTKRCRLVDQPSTSHIPHRHLLPQFAPTYTLAIPITPSLMPLISQCTPSSFPSLPQEKFPLMAPTPIVNRSMLFINNIARGLGLQGNNINA

SEQ ID NO: 24047 - protein, 335 aa, Oryza sativa; identical to SEQ ID NO: 16542
  Clone ID: TF_OsC36885_1.pep

SEQ ID NO: 24048 - protein, 289 aa, Oryza sativa; identical to SEQ ID NO: 16544
  Clone ID: TF_OsC321147_1.pep

SEQ ID NO: 24049 - protein, 150 aa, Oryza sativa; identical to SEQ ID NO: 16552
  Clone ID: TF_OsC353113_1.pep

SEQ ID NO: 24050 - protein, 259 aa, Oryza sativa
  Clone ID: TF_OsC44121_1.pep
MEPSSQPQPVMGVATGGSQAYPPPAAAYPPQAMVPGAPAVVPPGSQPSAPFPTNPAQLSAQHQLVYQQAQQFHQQLQQQQQQQLREFWANQMEEIEQTTDFKNHSLPLARIKKIMKADEDVRMISAEAPVVFAKACEVFILELTLRSWMHTEENKRRTLQKNDIAAAITRTDIYDFLVDIVPRDEMKEEGLGLPRVGLPPNVGGAADTYPYYYVPAQQGPGSGMMYGGQQGHPVTYVWQQPQEQQEEAPEEQHSLPESS

SEQ ID NO: 24051 - protein, 250 aa, Oryza sativa; identical to SEQ ID NO: 16556
  Clone ID: TF_OsC179782_1.pep

SEQ ID NO: 24052 - protein, 285 aa, Oryza sativa; identical to SEQ ID NO: 16550
  Clone ID: TF_OsC117223_2.pep

SEQ ID NO: 24053 - protein, 177 aa, Oryza sativa; identical to SEQ ID NO: 16558
  Clone ID: TF_OsC91871_1.pep

SEQ ID NO: 24054 - protein, 530 aa, Oryza sativa; identical to SEQ ID NO: 16557
  Clone ID: TF_OsC210306_1.pep

SEQ ID NO: 24055 - protein, 241 aa, Oryza sativa; identical to SEQ ID NO: 16559
  Clone ID: TF_OsC265473_1.pep

SEQ ID NO: 24056 - protein, 205 aa, Oryza sativa; identical to SEQ ID NO: 16560
  Clone ID: TF_OsC68950_4.pep

SEQ ID NO: 24057 - protein, 185 aa, Oryza sativa
  Clone ID: TF_OsC26303_1.pep
MADGPGSPGGGGGSHESGSPRGGGGGGGGGGGGGPRVRQDRFLPIANISRIMKKAIPANGKIAKDAKETVQECVSEFISFITSEASDKCQREKRKTINGDDLLWAMATLGFEDYIEPLKVYLQKYREMEGDSKLTAKAGDGSVKKDVLGSHGGSSSSAQGMGQQAAYNQGMGYMQPQYHNGDVSN

SEQ ID NO: 24058 - protein, 250 aa, Oryza sativa; identical to SEQ ID NO: 16562
  Clone ID: TF_OsC83094_1.pep

SEQ ID NO: 24059 - protein, 186 aa, Oryza sativa; identical to SEQ ID NO: 16564
  Clone ID: TF_OsC1960_1.pep

SEQ ID NO: 24060 - protein, 254 aa, Oryza sativa; identical to SEQ ID NO: 16566
  Clone ID: TF_OsC197894_1.pep

SEQ ID NO: 24061 - protein, 296 aa, Oryza sativa; identical to SEQ ID NO: 16547
  Clone ID: TF_OsC712_1.pep

SEQ ID NO: 24062 - protein, 900 aa, Oryza sativa
  Clone ID: TF_OsC1528_1899.pep
MIDAGLITPSMSPYASPVLLVKKKDGSWRFCVDYRRLNALTIKSKFPMPVVDELLDELSGTKFFSKLDLKAGYHQIRMVETDEAKTAFKTHHGQFQFRVMPFGLTNAPSTFQCLMNSVLAPFIRKFVLVFMDDILVYSPDLDSHLHHLQQVFVILRQHQLFARRSKCSFACTQLEYLGHIISDKGVSTDPEKTAAMLAWPVPTSVTELRGFLGLTGYYRKFVQGYSIIARPLTLLLKKKAFLWTDAAQLAFDQLKTAMSNTPMLALPNFQLPFTLETDACAYGLGAVLSQQGHPIAYYSKTLGPVNQKLSIYEKEFLAIMMAVDKWRCYLQRGPFIIKTYHKILCHLDDQILGTELQQKAMTKLMGLQYSFQYKRGVNNIVADALSRMPSSSQFCAFSVVQPIWIQEMINSYTVDPQAQQLLAELAVHSPNSQGYSLTQGIIRFQNKIWIGSNAGLHTKLIQAFHASALGGHSGIAATYHRIKKLFAWPGLKLDVENFVKQCQVCQQAKHEHCRLPGLLAPLPIPKEAWQDISMDFIEGLPRSDGYNAILVVVDRFTKYANFIPLRHPFTASQVAHLVDKTVFKTHGIPRSIVSDRDRLFTSKFWTTLFATWDTQLQMSTAYHPQTDGQIERVNQCLEMYLRCMTQANPKKWSHWIHLAEFWYNTNYHTYLGCSPHKALFGVDPHYSQVPDLTLATLPDVVDVQTERQHLSEFLQQQLTRAQLRMKNKVDKGRSDRVFAVGDAVFLKLQPYAQSSVVNRPYPKLAYKFFGPFTVLERIGVAAYRLDLPASSTVHPVFHVSQLKAQVPDHTPVYTSLPSQVVLDAADVVPEAILERRLVKRSNAAHVQVLLKWSSLPADHATWEDYHVVKTRFPDAPAWGQAETPAGGTVMTGNGDTEKEV

SEQ ID NO: 24063 - protein, 1141 aa, Oryza sativa
  unsure (1)..(1141): unsure at all Xaa locations
  Clone ID: TF_OsC351798_1.pep
MPPARGGRRGRGRGRRGGRGGAASRARGENVVDVEPIKLGDDDAKVDPQTKSPNEEITSAEVCEVETSEASPLGAPEEDEGKPGSTRNLKRLRKTITIDSAAAEEHGAESDDEEFDVLATASCQELAPCRRSKRLRCKPTRKRSKPTGKRDLGGKESEDDVFANSSSSSQDDAGKLASRRSKRLRERLTSDYFDGDXENCSAPRRGSKRLRNRLGPRNISYADDDSDTDDTYRKKIVPCRRTSKRLQEKRKAHDVSEESYTEASSCMLSTSSSSDDELLHNSIKPGRRNSGGPSCSICKIGIACSFLIKCKNSTCSRSFHTFCLDPPLQEIIGTWECSWCKSNAAPAVKVTEVLTSKKIQRLVGHRRILQEADFQYQFLVKWQSLSHHHDCWVPLEWLHVSDPLRVQSYLNKNCLPKEVYSEDQRKLEWFEVDHAIACRRKFHHEGLCDVLATFQDNQDFDGYEFLVKWKGLDYCEATWEPCCTDGVQQAVSMLVRRHKNASKRVNISQTCLDGSKIEEVHCGALYDYQLQGLQWLIDNFKTRRSVILADEMGLGKTVQVVCFLYHIIKESLTASPALILAPKSILLQWEKEFCQWASDLNVIVYQGDRDSRKCIQVHEMYSSDGKPLFDALVTSYEFVQIDKAVLQKFKWSTIVIDEAHRMKKLDCNLAACLKRYCSEFRLLLTGTPLQNNIMELFSLLHYIDPDEFSDPKADGLFSPIESGRDLTMDEKVARIHNILKPRMLRRMKSDVLTDSMPVKKWVEVPCALADSQRELYINILERNYSKLNSAIRNGRKLSLNNILMELRKCCNHPVGLEVGQQATEDVFLSLIASSGKLQLLHKLLPRLKERGNRVLIFSQMTRMLDILEDFLCSLGYKYARIDGQTSLSARQESIEEYKNIDSETFIFLMSTRAGGMGVDLPGADRVIIYDPDFNPFMDLQAQSRAHRIGQTRPVVVYQLITKCSVEEKILQKSKQKLAIENMLMNSSKKPSADELQSILLHGAKTIVDRKISATSIHYDNEAIENLLKLDPSTGEKCSSDDNGYLGSIVSFAHGVEDEAPSSPKVEDLKVLKPATPKVDLGRGKRQRKVVNYADEVENEDSDDMYAPEGSSTSEFSSSSSDDETDSALQLQIVTVPDIDAD

SEQ ID NO: 24064 - protein, 1391 aa, Oryza sativa; identical to SEQ ID NO: 16570
  Clone ID: TF_OsC113064_1.pep

SEQ ID NO: 24065 - protein, 1058 aa, Oryza sativa; identical to SEQ ID NO: 16571
  Clone ID: TF_OsC321575_1.pep

SEQ ID NO: 24066 - protein, 1288 aa, Oryza sativa
  unsure (1)..(1288): unsure at all Xaa locations
  Clone ID: TF_OsC136280_1.pep
MPARTRSVNSLDSVDGFDARAEILQLRREMTDLSNLRGEMGEIKDLLKSICTALPGFHSAGASTSGTAGAGGSAGTQAMAGASVSAGAQAATGTGALIAPLVPPGFSSVAPILSTGGMQSGVALPQTADETQVNSTNAIPSSQIHAGMGSVFPSTSLPPIFPIHMSGAVPSVGHVNFSIEPNTVNPNFAPIFTSAPIFTSATRTQAGHLPGGLNIHGVESQEDVGMNHYGIETNQPWRYPQMQPTARPHLNATGIHMANGGGPVWPEGPRHLFGGMPNPYADMTLRSQRLELTIFNGEDAIGWLQQCEKFFEMTGTPVEQWVNLATGHLVGRAGKWFRNLGIPWHYINWPQFYLMISDRFTEANAHEAVEQLQNVRQTGSVMHYIDKFEDSVALVKRDHPYLIEYYILSCFIGGLRADIKHDHKCRTGKVIHMMEEVEDEEEESGSPEENQEGEYQTAPGSPAKKEDDNEEQLMQISTHAIQGTYGINTFSLITYVKGRKVVALVDSGSTNTFMNYEFALRSGCEIIEFDHNRVMVAGGGILNSTAKTEVIQYKTLEMENVPVPDSVATILAGFAEVFAEPKGLPPRRECDHAIPLKMGAEPPNQRPYRVPHQQKNAMEEIIKELLESEEIRPNLSPYSSPAVMVRKRDGSWRMCVDYRQLNARTIKNKFPMPIVEDLLDELNGAKVFSKLDLRSGKNLEEHEKQLQCVLSILRSHKLYAKRSKCTFAAPSVEYLGHIVSGEGVATKPSKIKDVLEWAVPVNITKLRGFLRLTGYYRRFVQGYGAICRPLHDLLKKDNFHWGPEQQKAFDQLKKIMTTCPVLALPDFSKPFVLETDACGSSIGAVLIQEGRPIAYYSKALGQRAAGSSTYEKEAIAILEALKKWRHYLLGNQVIIRIDQQSLKYMATHKLSEGIQHKLLLKLLELDYNIEYKKGKENAAADALSRRDTKEVEEKEKCYAITLVYPEWIEDVKSSYLNDAQYMKLVDGEELNEEXQFFFGCWNTKIQKQDIFKVTYHRIKKIFYWPQLKKEVEKIVSECPTCQITKAEHVHSPGLLDPLQIPEMAWTHISMDFIEGLPKSQGKDVTPYEALYGVHPPQNGEQAIPGNVTEEIRITAQQREELMLRLKDNLLRAQNRIRKFADRLRSERSFQEGDMVYLKMQPYRQNAFGLRGSLKFRAQFCGPFRILKRIGKVAYHLQLPEEAGIHPVFHVSQLKKHVGNLVVPLPNLPLVDEDGNIKTEPVAVLARRVVPRRNEPVTQWLVHWENLSPEDATWEDSAFIQATFPHFRP

SEQ ID NO: 24067 - protein, 1463 aa, Oryza sativa; identical to SEQ ID NO: 16577
  Clone ID: TF_OsC22007_1.pep

SEQ ID NO: 24068 - protein, 504 aa, Oryza sativa; identical to SEQ ID NO: 16579
  Clone ID: TF_OsC448_2.pep

SEQ ID NO: 24069 - protein, 1268 aa, Oryza sativa
  unsure (1)..(1268): unsure at all Xaa locations
  Clone ID: TF_OsC346257_1.pep
MAALKKQVADLKGVRMLDQQRNIYLGQAGEGNQYAEAVLKGPRLEIPLFSGEDPIDWLKQCEKFFEITGTPLDQWVNLAVAHLNGRALKWFGGIGLPWQVIAWPQWCSMVCTRFSAASEHEAIELFQNVKQFGTTVEQYIDKGVLXVDLVKRDHPYLQEQYLTSCFIGGLRADIKYDVXWAANARKMVGNFNRNRNQNPLGGNQGRNANHRGQNRGEGDRREEKKCWFCKEPWFPRHQXYALRNSYPLKNTDTKKVVVAGGGELKTDVMVPDISYEIQGECFTNQFKLLPLKGYDIIWGADWIYNYSPISLDLKQRILGITKGNKVILLQDFTKPNKHFQISGKRLEKMLKKGALGMVIQVNVMSETVEEEGHVIPEDISDIIQQFPAVLKEPKGLPPKRECDHVINLQSGAVPPNIRPYRVPHYQKEAMENIINELIESKEIQTSDSPYSSPAVMVRKKDGSWRMCVDYRQLNAQTVKNKFPMPIIEDLLDELNGARIFSKLDLRSGYHQIRMAEKDVHKTAFRTHLGHYEYQVMPFGLTNDPATFQSLMNHVLAPFLRRFVLVFFDDILIYSKTRAEHLEHVKLVMQALQDNHLVIKLKKCAFGLASVSYLGHVISQDGVATDPKKVGKIKNWPTPKDVTDVRKFLGMTGYYRRFIQGYGTICRPIHDMLKKNGFQWGADQTTAFETLKHKLRTSPVLALPDFDQAFTIEADACGVGIGAVLMQGGRPIAFFSKALGPKAAGQSIYEKEAMAILEALKKWRHYVLGSKLIIKTDQQSLKFMMGQRLVEGIQHKLLLKLMEYDYTIEYKSGKENLVADALSRLPQKEAVADRCHPMTVVIPEWIVDIQRSYENDVQAHKILSLIGTAADPDREYKLEAGXAKIQREDLCGRSHGYQKAIDHNXHSSSFGGHSEIPDMAWTHITMDFIEGLPKSQGKDVILVVVDRLTKYAHFIALAHPYDVEQVVEAFMNNIHKLHGMPMVIITDRDRIFTSSLFQEIFKAMKVKLRFSTAYHPQMDGQTERVNQCLESYLRNMTFQEPHKWYSWLALAEWWYNTTFHTAIQMTPFKAMYGYSPPQINEFSVPCNISEEARVTIEEKEAILNKLKNSLADAQHRMKYFADKNRTERNLEVGDMVYLKLKPYRQSAFGIRGSLKLRSKFYGPFKVLQKIGQLAYKLQLPDDAQIHPVFHVSQLKKHLGKHAIPMSNLPSVGPDGQIKTEPLAVLQRRMVPRKGVAVTQWLILWQNLSPAEATWEDASVIQAMFPSFNP

SEQ ID NO: 24070 - protein, 1370 aa, Oryza sativa; identical to SEQ ID NO: 16586
  Clone ID: TF_OsC15548_1.pep

SEQ ID NO: 24071 - protein, 1347 aa, Oryza sativa
  Clone ID: TF_OsC65320_1.pep
MSIAEGEVVNLNQKVVDLSTNLDRILGSLKGVEAWIPSVDAGMQGLRRSVEGIKARVIKLEAQSSTATPPPNGHRVDNKYQGEATAAESAQERTLVKSKIQIPQSAVNFEVGESSEWGIGNSQFGTQGPRLPKTEFPKFDGDNPKLWKKKSEKYFDMYQVPYATWASFATLHFVGNAALWLQTYEELHAVESWSGVCVAVNGKFGRDRYQQFLEKLDNLKQEGTIEEYYSRFEELMHKVLVYNRGYDETFFVTKFLGGLKTEIKAAIKLHRPGTVDAALSLAKTQEELLMEVNLKAYHKTTIKESFKNNFKVPSLAKGILGPPPDEIKKTEERPKWEEQYDSLNAARRARGECFKCGEKFGPGHKCPKAVQLHVLDELLEVFQFSDEPGQVEESSSDEELLLSENALFGTEGKRTIWLQGLIQQVLILIDSGSSSSFMASHLVDRLHLVPNSIPSALVMIIDGGKLFCDEMAEQVEWWCQGNTFSSNFKILGLGGYDLILGMDWLEAHSPMWIHWGRKTGMHKKGVISQLIQLCSIQEIAANQEAIPREIEAVLQHYQGLFQEPTELPPHRTFDHEIPLLDGAKPVNIKPYRYAPKQKDEIEKQVTQMLQHGVIQPSHSPFASPVLLVKKKDGTWRFCVDYRGLNDITVKNKYPMPVVDELLDELSGLKWFTKLDLRSGYHQIRLVEKDEFKTAFKTHQGHYKFRVMPFGLTNAPATFQGLMNTIFAHAIRKFVLVFVDDILIYSKTLAEHVCHLKSVLTVLQQHQLYIKRSKCSFSQPSLEYLGHIIGAIGVATDPQKVQAIRDWPVPKNLKQLRGFLGLAGYYRKFIRNYGVITKPLIELLKRGTFFFWSTLEHTAFQEVKQCLQQAPVLAMPDFNQQFVIETDASDKGIGAVLMQAGHPIAFLSKALGPKAQGFSTYEKECLAILMAVDKWHQYLQYAEFAILTDHRSLTHLCDQKLSTPMQQKAFLKLLGLQWMEVVVDGYHHDPATKQLLVELSLHPDGVNNFTLVNGIIKFKGRIWLGKHVEAQQAVLLSLHNSGVGGHFGIAATYQRIKSMFAWPGLKRDVKAYVQSCAICQQAKAIISDRDRIFTSALWQELFRLSDVKLNMSSSYHPQTDGQTERLNQCLEAYLHCAVYSSPALFARKPTSFGVIDMGQSTIPDVQQLLVNRAKLNELLHHHLVRAQQRMKAQADKHRSKRQFAPGDMVYLRLQPYVQLTMAKRSCHKLSFRYFGPYKVLERIGAVAYRLALPAGSLIHLVVHISLLKKAVQPDTPVSSDLPLTCSTDEVEVYPKAILRRQLIKRGGSSIPSVLVRWSGLPDTLATWENLADLWRRFPSALAWGQASP

SEQ ID NO: 24072 - protein, 1353 aa, Oryza sativa
  Clone ID: TF_OsC355669_1.pep
MSSTVTNVADDWKKGLAEVLDRLDSIRGKLSDLDNEQQAHHIAIQRLERAGRDRSPRRNNRDRDDDHDNDGRRGDRPPRYHKIDFPKFNGQGDPLHFLNRCEQFFQGQRTPEEEKVWLASYHLLDGARQWYMRIERDLGTPTWRRFSDLLNLHFGPPLRQAPLGKLAACRRKTKVAAYIDRFLDLLARAGPLTEEQQVDLFTTGLQEPLSIDASSSAAPTPSQPDAASSVGQASTQVAGRTVRRLSQSEMDERRRKGLCFNCDELYARGHKKVCKRLFLLDLAYDDDDDEVEGAAPAVEPETLRISLHAVTGVRPSNAMHLHVRLGDATLHALVDTGSTHNFLSQEAAARVHLPLVQRAGLRVTVANGDKVPSPGMFQDARISIDTEVFITDLYVLPLGGYDLVLGMQWLSTLGQILWDFGQLTMSFWHKDHMVLWRGLPTGASPAAHVATTRDLLDDLLTEFADVFATPSGLPPPRHQDHRITLLPDTAPVAVRPYRYSARHKDELERQCRDMEAQGIIRRSSSAFSSPVLLVKKADGSWRFCVDYRALNSRTVKDKFPIPVVDELLDELHGARFFSKLDLRSGYHQVRMRDADVEKTAFRTHDGLYEFLVMPFGLTNAPATFQSLMNEVLEPFLRRFVLVFFDDILIYSPSWSSHLQHLRAVFNTLRAHKLFVKRSKCSFGDTSVAYLGHVVSGQGVAMDASKVQAVVDWPRPCSARALRGFLGLAGYYRKFINDFGAVAAPLTRLLKKDGFLWSPEAEVAFGRLKKALTTAPVLALPDFDQPFIVECDASGTGFGAVLHQDGGPIAYFSRAFAPRHHALAAYERELIGLVQAVRHWRPYLWGRRFVVKTDHFSLKYLLDQRLATLPQHHWVGKLLGFDFEVAYKPGRQNTVADALSRRDEPAASLCAITTPVFDWLQDLHTANDTDPALVALRDQILAGNRTAPWALTDGIVTFKQRMYIPPASALLQTALAMVHDDKHEGIQKTLHRLRREFHTPGDRRVVQEFVKACAVCQRNKTEHLHPAGLLLPLPVPSAVWSDVSMDFVEGFPRVAGKSVILTVVDRFSKYAHFITLSHPYSAESVARAFYTDIVRLHGIPTSIVSDRDPVFTSTFWNALFAATGTKLHMSSAFLDDIRYRLEQAQQHAKKFYDRHHRELQFVVGDWVWLRLRHRVPASLATPVKGKLGPRYYGPYKVLEIINKVAYRLALPAGARLHDVFHVGLLKPFVGTPPTSPPALPSTLHGAALPQPAQVLKSRMARGVHQLLVRWDGLPASATSWEDLDDFRTRYPAFQLADELFVEEGRDVMWGIQYQRRNRRQQPEQAPWDTKEELGVNGFKKGEVNPVCSFLIYGN

SEQ ID NO: 24073 - protein, 2192 aa, Oryza sativa; identical to SEQ ID NO: 16600
  Clone ID: TF_OsC4120_1.pep

SEQ ID NO: 24074 - protein, 1413 aa, Oryza sativa
  unsure (1)..(1413): unsure at all Xaa locations
  Clone ID: TF_OsC25749_1.pep
MAFFSNSGSRADSGGYNLNEKAEDEAAYESVGDRDVDLNSRQWNLNEKAEDAYHSDEEQYDGGRSGPNSSENKSVQNARKINGPSGPWGTNFLKDCGPTQTAKEEQLTSNRGMEYGSAASSHDDMDASGEDDELNRGHGEVPAEEMLSDDYYEQDGEEQSDSLLRGGMRRPSCSTSGAAAESVSSRQKKKPTKYNAYEDEDDDEYNDENDDEDDDDADEDDPDDVDFEPESDTEKAADKDKFVDSENSDEEEDDELELSDDDEDDFVENKRQCKRLKVGGTKTSKGRKLPVQVQRKRGVSFTDEDSSGKDSDAPSDTDISHRAKKPDKLHQKTVGRKDVFSNVDSHEVRTSGRRRTARNISYAESEESDDSEEKLAKQQKVLKEDPEEEEGETIERILWHQPKGVAEEALRNGQSTQPTVISFTSDVDQSWDDVEFYIKWKGQSFLHCQWKTLSELQNVSGFKKVLNYMKRVTDELRYKRSLSREEVEVHDVGKEMELDLIKQYSQVERIFADRVSKVDGDDLVPEYLVKWQGLPYAESTWEKDTDIEFAQDAIDEYKAREAATSILGKTVDFQRKKSKASLRRLDDQPEWLKGGKLRDYQLEGLNFLVNGWRNDTNVILADEMGLGKTIQSVSMLGFLHNAQEINGPFLVVVPLSTLSNWAKEFRKWLPDMNVVVYVGNRASREICQQHEFFTNKKGGRHVKFHTLITTYEVILKDKAALSKIKWNYLMVDEAHRLKNCEASLYTTLLEFSTKNKLLITGTPLQNSVEELWALLHFLDPSKFNSKDIFVERYKNLSSFNETELANLHKELRPHILRRVIKDVEKSLPPKIERILRVDMSPLQKQYYKWILERNFQNLNKGVRGNQVSLLNIVVELKKCCNHPFLFESADHGYGGDSIGDRNKVERIVMSSGKLVLLDKLLMVRMLDILAEYLSLRGFQFQRLDGSTRADLRHQAMEHFNAPGSDDFCFLLSTRAGGLGINLATADTVIIFDSDWNPQNDLQVLDHLVIQKLNAEGRLEKKESKKGGSMFDKNELSAILRFGAEELFKEDKTDEETKKKLESMDIDEILERAEKVETKGGEGEEGNELLSAFKACSVHYHMTCDSDIMLKFYTSVANFSSGEDDATFWSRLIQPDASDMVEETLAPRAARNKKSYVEDHQLDKNSNRKRRGIDAQEKPRRRSSRTMDTAVSLPLIDGSAHQVREWSFGNLSKKDATRFVRAVKKFGNPSQIGLIVDDVGGAIAKSSVDQQLELFTLLIEGCQDAVKNNMDAKGTVLDFFGVAVKAHELIARVEELQFLARRIARYKDPVRQYRIQAPYKXPQWSASCGWTETDDARLMVGIHWYGYGNWEKIRLDPKLSLTAKIAPATLGERETFLPRAPNLDNRASALLQKEFANLRGKSSKAKGGPRQSIG

SEQ ID NO: 24075 - protein, 2630 aa, Oryza sativa
  Clone ID: TF_OsC7793_1.pep
MWKTQPGGTSRDGRGGGSTARANAGTGYPTRSRTSGNPQFSAPTNGANQRAMASLRSPLRGGPDMPTSRRCSPRLSGTQQDEVAEVARVGMLKRASNNASNSSTSRAPTRSSSTTTASSKDVAEEHSSGVGSTSSLSKKRKRMTAKSYRSLFKRSKKASSTERARKILPMGMWQRATLVHQHISIETCPQNKVAESRLEVEGRDRPTGHSRQNSISSLQSAPIPPIHYEEPESGHGDGEPLSIQKEVASSQFKVTASDEMEGNSNICVACGTPGDLNRVCDSGPVMEKAAKEATMFLVWIIGWNICLLRLLFGIHSVADGIESLWNVKEGMQNGKQYLVKYKNLAHVHNRWVPEGVINDTPGGCDLLSLFNKRDHKEKTNWKKEWTEPHHLLRKRPLMPPKEADDFFCSSRANIEHCNVEWLVKWRDLGYEHATWELETACFLRTPQADELKRKYENRRKAAKQSSIPVETKVKHKTFQKLQRLPDEWPPGFDNDHLFSINQLLEFWCKSHGAVLVDDKEYVTKTILFTLTVLPDVCQPLLIVTTPASLSAWEIQFNHLAPFINVVVYDGQKDTLKLIQDLEFYDNRRCMMLQVLLSHPDAILEDIETIERIRWEAVIVDYYENSAFKYFEQLKKISTDFRMVLLGSPIKDNVPEYMNLLAFLNSEDKGYSDYVNADDALVMSKARFTHHIAYERKTDSSKFLEYWVPSCISQPQLEMYCSILLSKSSVLRSEMETDSVGALHDIYLSLKKCCDHPYIVNEFLRSSLSNNSNVTENIDTVVHASGKLLVLDKMLNEIKKKSLRVILLFQSDRAGGNKMGNILEDLMHHRFGPESYERVEYRAVLSRKQAAIDKFNNKTNGRFVFLIENRACLPSIKLSSIDAIIIYGSDNNPLNDLKALQKIKIESQFERVSIFRLYTPFTVEEKSLVLARQGIVIDNNIQDLRTSLKHSLLRWGAAFLFSRLDEVQQDDHASKSSEMERHFIDEVIVEFLTKLSTTVEDSTEVHRKSISKANMSGELYSRNITLMGEKEGISVLEDNPAEFWLNLLDGRSPHVSCISEPLQSRVTKSQTMDEVNAPAEEINEARKKHRKVGEIMGSSSKVVSDKSNDDALPDICTTSGPALQPVDVTQQKSVQSEGSESLMSTPKNLHAQMKQELSKLIKVLQLPNTIQFNGAKIAGQVLIEVDNVTLLVEQFFEYLLNNHVVVQEPKYIFHALNIALCWRVASIHNFKVDHKESLALAEKRLKYECNEELARLVYDSLKRKFPKKAGATGSNCQSTSVEKTKPSQQETSNILRNDHIFPKQRMDLHDNFMNGALQEGSFVAAQMVSEEQELIAVPGTHMECHFSTDELPDIVEKRINLIDNVFSVREYRIFDKQQSQISELEKYTQNKTARLKTVCNLVLEHICRSHADVETRNDTIKQTVQWFTMLMYAFLEHMRLQHSKLESLQSNTWAEERQLKEKLCLEAKSGQLDHTFDQQIALPDSNFVMQEFIHLKEQSSNSHVSGSAVSDCQQLCHDRLKMVNTLVRNVVPSEPISAQTVRNGSVEVVMVAGQPAPEVVDFPENNTCYSPDGIGLQKAKSPSIRPSNDDSINQESSASEYTSTENVERDNANPSTLPGVATSPAIGIYANLESTMVASTQNLTIFPASKEVATQSNLSTLPGSQTVETSQQPPAEAKLTENLGVTAWDVQPEMQTTTSTLDSPSARMCPDNNNQTVHQPDTSTSPLQEGSTSCHLTSVDATAGVTAKVDDTAAADPLDSETQSYTAAHKPAALLVSTEVETQTDQSSMLERQSISVPLVQSSLSSQNPPAEAEPASTLSRETARDVQPERQQSASVLETSLQRMHPDDDSQTKHQLETVLSQRGETCGHLGDAREIVDANDSNTVCDVRAHLESPIFATPQSLVICQGLSEVGSQGNISNMSSQQSTDLSAQQNLAPSPLPPAEAERTGLLTTQPAQNFQPELQPSTSLFDASLESNNISQTDCQSDRAVVFLQEGATTQQHLLDTGVVVDDIVAEEPSHSESPTYIIHETAALVVSTEVETQTCQSNIPIQQNTSHPAQQSPETSRHSIASPVGLEATQEFQPEMQPSTSGQDQSEELEQEGMSSSAIQDLQPEMQPPNSVQGQYPGAVLCIAAAEDLQPLMQSSTPVPNQLAEANQEGMLSAAAAQNLQCETQRLTSTQDAPFERTDLSGIPVPRSITTAHQSVVPSWDLQTGVEPTGALCMETTHERQSELPSGSMQERSAETRANLVQRSCTTETCDLQPQLDLSSTIQTVQLEGIRSEDMNQIGVQSNSALSSEQLTQPLPVAPLVFNYQRFSDEPLKNELERLKHTSNVLSKVHEQKRKQLLVEYNQEMEKLKQKYDSLLQKEDSFYAQKEAELDTIYRKVFINQSLAENFRRKFLPLSAAQGGSTRPTIGQLVQSSQEPSARIVAEQVTASPVTLSSAVRPQVLHSSGPYVQPSLVVQPSSQATQPQSILPGNMYRAMSSSPFSSTPMPMPHGTYRAAGAQPHAPSPHLQQLRMPSPYATSHGNQHQRPSILASLLPFVLPSSSNPSLTAPLSLNTVVHRTSGPLNAGAGSQHAGSQISGVNPSGSSASASLNTWLTARLALTSEARGTVSSTEVVCLSDDES

SEQ ID NO: 24076 - protein, 1364 aa, Oryza sativa; identical to SEQ ID NO: 16615
  Clone ID: TF_OsC18281_1.pep

SEQ ID NO: 24077 - protein, 84 aa, Oryza sativa
  unsure (1)..(84): unsure at all Xaa locations
  Clone ID: TF_uC-osflm202108f08b1.pep
MASVRVKGTVKWFYSTKGFGFITLDDGGXDLLVHQFSLKFDGYRNLNDRYLRVFFAXSGNYGRSNAVDVTEPVGGALSGRSRAS

SEQ ID NO: 24078 - protein, 90 aa, Oryza sativa
  Clone ID: TF_LIB4370-046-R1-K1-B2.pep
HGLGAAVVAGSDGELDDVAVVEAAVAVGLERGLVDEEILAAVVGGDEAEPLGGVEPLHRPLHPLRRHLDLALALSPPPPPQPKTLETLDR

SEQ ID NO: 24079 - protein, 241 aa, Oryza sativa; identical to SEQ ID NO: 16617
  Clone ID: TF_OsC50687_1.pep

SEQ ID NO: 24080 - protein, 197 aa, Oryza sativa
  Clone ID: TF_OsC951_11.pep
MASERVKGTVKWFDATKGFGFITPDDGGEDLFVHQSSLMPRGFPRLNDGDVVEFSVGSGNDGRTKAVDVTAPGGGALTGGSRPSGGGDRGYGGGGGGGRYGGDRGYGGGGGGYGGGDRGYGGGGGYGGGGGGGSRACYKCGEEGHMARDCSQGGGGGGGYGGGGGGYRGGGGGGGGGGCYNCGETGHIARECPSKTY

SEQ ID NO: 24081 - protein, 87 aa, Oryza sativa
  Clone ID: TF_LIB4309-007-Q1-K1-F2.pep
MMAGAPPMHICMDSDWLKGIVPEEHGMGSSSPSAELIACPRAPMQAAAAAADRRLRPQHDQPLKCPRCESTHTKFCYYNNYSLSQPR

SEQ ID NO: 24082 - protein, 431 aa, Oryza sativa; identical to SEQ ID NO: 16629
  Clone ID: TF_OsC69565_1.pep

SEQ ID NO: 24083 - protein, 375 aa, Oryza sativa
  Clone ID: TF_OsC1630_4.pep
MWGLGLVKPMEEMLMGANPNPNGSSNQPPPPPSSAASAQRPIAPPAAGAAAGAGAAGAGAGTERRARPQKEKALNCPRCNSTNTKFCYYNNYSLQQPRYFCKTCRRYWTEGGSLRNVPVGGGSRKNKRSSSSVVPSAAASASTSAAVSGSVPVGLAAKNPKLMHEGAQDLNLAFPHHHGRALQPPEFTAFPSLESSSVCNPGGNLAAANGAGGRGSVGAFSAMELLRSTGCYVPLPQMAPLGMPAEYAAAGFHLGEFRMPPPPQQQQQQQAQTVLGFSLDTHGAGAGGGSGVFGACSAGLQESAAGRLLFPFEDLKPVVSAAAGDANSGGDHQYDHGKNQGGGGGVIGGHEAPGFWNSSMIGNGSSNGGGGGGSW

SEQ ID NO: 24084 - protein, 452 aa, Oryza sativa
  Clone ID: TF_OsC1630_7.pep
MAVLPPSLWASPCPNHRTFSSLSPFCSRNPPAAASGGGARSSSSSSLRFVSSGARRSKNCWGGSEVDAVGEPSCMDAAHWHQGLGLVKPMEEMLMAANAAAGANPNPAATAPSSVTGGALRGGGGGGAPPVAGGAGAGSTERRARPQKEKALNCPRCNSTNTKFCYYNNYSLQQPRYFCKTCRRYWTEGGSLRNVPVGGGSRKNKRSSSSAASASPASASTANSVVTSASMSMSMASTGGGASKNPKLVHEGAQDLNLAFPHHGGLQAPGEFPAFPSLESSSVCNPGGPMGTNGRGGGALSAMELLRSTGCYMPLQVPMQMPAEYATPGFALGEFRAPPPPPQSSQSLLGFSLDAHGSVGGPSAAGFGSSAGLQGVPESTGRLLFPFEDLKPTVSSGTGGGGASGGGAGVDGGHQFDHGKEQQAGGGGGGPGGHDTPGFWNGMIGGGSGTSW

SEQ ID NO: 24085 - protein, 276 aa, Oryza sativa; identical to SEQ ID NO: 16628
  Clone ID: TF_OsC4233_1.pep

SEQ ID NO: 24086 - protein, 175 aa, Oryza sativa; identical to SEQ ID NO: 16630
  Clone ID: TF_OsC373348_1.pep

SEQ ID NO: 24087 - protein, 371 aa, Oryza sativa; identical to SEQ ID NO: 16632
  Clone ID: TF_OsC340203_1.pep

SEQ ID NO: 24088 - protein, 206 aa, Oryza sativa; identical to SEQ ID NO: 16633
  Clone ID: TF_OsC23687_1.pep

SEQ ID NO: 24089 - protein, 493 aa, Oryza sativa; identical to SEQ ID NO: 16637
  Clone ID: TF_OsC265407_1.pep

SEQ ID NO: 24090 - protein, 441 aa, Oryza sativa
  unsure (1)..(441): unsure at all Xaa locations
  Clone ID: TF_OsC50405_1.pep
MGECKVGGGGGCGVCLIKLFGETIPVPEPGACARGDXVDKDLQHSGSSTTEPKTQENTVQDSTSPPPQPEVVDTEDSSADKNSSENQQQQGDTANQKEKLKKPDKILPCPRCSSMDTKFCYYNNYNINQPRHFCKNCQRYWTAGGAMRNVPVGAGRRKSKSVSAASHFLQRVRAALPGDPPLYAPVKTNGTVLSFGSDLSTLDLTEQMKHLKDKFIPTTGIKNTDEMPVGLCAEGLSKTEESNQTNLKEKVSADRSPNVAQHPCMNGGAMWPFGVAPPPAYYTSSIAIPFYPAAAAAVAAYWGCMVPGAWNAPWPPQSQSQSVSSSSAASPVSTMTNCFRLGKHPRDGDEELDSKGNGKVWVPKTVRIDDVDEVARSSIWSLIGIKGDKVGADHGRGCKLAKVFESKDEAKASTHTAISSLPFMQGNPAALTRSVTFQEGS

SEQ ID NO: 24091 - protein, 263 aa, Oryza sativa
  Clone ID: TF_OsC1634_3.pep
MSYMCSDVSMSFFFHRAAGLLGEFGKVIMQCGVSEGTQDKAQGFVVAREKVEPEEEEEEEQRVPAAATSGQRASIKREAADRDEEQRQGGGDAAGQPTQRRLQDSAEARAAAAAPLPCPRCRSRDTKFCYFNNYNVNQPRHFCKACHRYWTAGGALRNVPVGAGRRKNRPLGPLAVAHHNHHHRAAAGFVLGFPNPSSPTSPSPGITNTDRLPTAFFLYTDRWPTPESRRVRNLPWGDLEDHLGRDFLLFACSLSAGFLNLKH

SEQ ID NO: 24092 - protein, 320 aa, Oryza sativa; identical to SEQ ID NO: 16640
  Clone ID: TF_OsC1630_5.pep

SEQ ID NO: 24093 - protein, 403 aa, Oryza sativa; identical to SEQ ID NO: 16636
  Clone ID: TF_OsC66169_1.pep

SEQ ID NO: 24094 - protein, 359 aa, Oryza sativa
  Clone ID: TF_OsC197627_1.pep
MIQELLGGTTMDQLKGASALNHASLPVVLQPIVSNPSPTSSSSTSSRSSAQATQQRSSSATSSPHGQGQGGGAAEQAPLRCPRCNSSNTKFCYYNNYNLTQPRHFCKTCRRYWTKGGALRNVPIGGGCRKPRPMPAPVAKPPMSCKAAPPLGLGGGPVSWASGQQAATAHLMALLNSARGVQGHGGSNVHRLLGLDTMGHLQILPGAPNGAGAGTAASLWPQSAPRPVTPPPPHMDSQLGMGTLGHHDVLSSLGLKLPSSASSSPAASYYSDQLHAVVSNAGRPQAPYDVATASLPCTTAVTSLPSALSSVSAAAPTSNTVGMDLPPVSLAAPEMQYWNGPAAMSVPWPDLPTPNGAFP

SEQ ID NO: 24095 - protein, 230 aa, Oryza sativa
  Clone ID: TF_OsC4233_2.pep
MQEAGRRPAPQFAGVDLRRPKGYPAAAQLTPAAEEAAAGVGDPCPRCESRDTKFCYYNNYNTSQPRHFCKSCRRYWTKGGSLRNVPVGGGSRKSSTSSSSAAAAAASSSSSPSSPAKSPKRSKNSKRRRVSPPPPQPVPAPPPPTTADAADVAAPTAPEATTKKAPEDLTAAAATQPAVALGLGVADGGGGGKEHLDTSPFEWPSGCDLGPYWPTGVFADTDPSLFLNLP

SEQ ID NO: 24096 - protein, 320 aa, Oryza sativa; identical to SEQ ID NO: 16644
  Clone ID: TF_OsC191412_1.pep

SEQ ID NO: 24097 - protein, 647 aa, Oryza sativa
  unsure (1)..(647): unsure at all Xaa locations
  Clone ID: TF_OsC8761_1.pep
MVGVRRRASGFEAFPPLPGKVFVEEAIGAEYGEGFETFRMDGPLKVDVDYLNEKLQECFLQRIRHAMKPDEACGLIFSWDNVIADTDSLKLDAWRQLALEEDSQWYIVCKVCVYLTARDATLILLINLFHAGKDIPNAGHVQKSILHGAADHVLRKVLCWAKDESQMERLKARLIELYYENLFKLDTPVNGLREWLDAVQTAGIPCAVASSLDRRCMIEALDRMELSKYFKAIVTDEDDMESIAHRFLSAAMKACFCSASKYLAVFXDILLTCLSNVSLRGVTAAHNXTMMAVALIGAHPAYELVQADLAIAKVQGALGHHIAKYSELSVINLRRLFAHKGLSFMDLQKQIIERYRQELELAEQLEQIFQRSPPSRLVFLQWEICSGPAKSISRRRIRRDVEIESVADDSANSVQNIRLVIDIGDRTIQVPLNGHTVAQNIGRQAAAAVAGDSSAGGVSEKAGGGGEEWLQEQDGLLSMRGWLMAVATLFAAMAFQAALQPPGWMPRPRDWFAALLAADPAAAAVTRDQAGKAMLYLIVNTCTFATSLAVLLMLLAVGDAGGGGGGCASRRVTARLIANMMTAVALFAAATFALCAADDYRLMAFVGTVVAVYAAVTVVFVRCNLALPFRRGGGGGGHGCCSWVSRL

SEQ ID NO: 24098 - protein, 136 aa, Oryza sativa
  unsure (1)..(136): unsure at all Xaa locations
  Clone ID: TF_LIB4309-022-R1-K1-F5.pep
MQDIHDFSMNGVGGGGXRRGRFXXGXIXXGGGGDRRMRAHXNNILNHHQSLKCPRCNSLNTKFCYYNNYNLSQPRHFCKNCRRYWTKGGVLRNVPVGGGCRKAKRSKTKQVPSSSSADKPTTTXDDHHGEEKSSPG

SEQ ID NO: 24099 - protein, 282 aa, Oryza sativa
  Clone ID: TF_OsC1633_1.pep
MQEFQSIPGLAGRLFGGAAAADIRRAQAQQGPASRCGGIPSPEAVKCPRCESTNTKFCYYNNYNLSQPRHFCKSCRRYWTKGGVLRNVPVGGGCRKTKRSGSSSAASSAPSTPTAATDNAKNQRRASASSPRSSSGGSGNTSPTAAAATTPTTPATPSSNTIAVINHATTTTTTTNPFPTDVPPPAPIFADQAAALASLFAPPPPPPLPVFSFAAQAKTEDGIASVLLAGQTTAPTAATVADMTPFTSLDAGIFELGDVPPAAYWNAGSCWTDVPDPNVYLP

SEQ ID NO: 24100 - protein, 82 aa, Oryza sativa
  Clone ID: TF_LIB3434-040-P1-K1-B11.pep
VVVVTVAELGLPAPAPRARQRLSPSSPSSATATARRLQSLRRPRRRRRRLHHRRRRRMRMRWRLRRRALFHAPLSVGLDHLL

SEQ ID NO: 24101 - protein, 371 aa, Oryza sativa
  unsure (1)..(371): unsure at all Xaa locations
  Clone ID: TF_OsC1630_1.pep
MASGGALSPVEEKPTVVKTTKAEQHEEEAAVAVKSAAEMMKKSSPCCPRCNSIKTKFCYYNNYSMAQPRYFCRECRRYWTQGGSLRNVPVGGGCRKSKRSSASSASASAASPPAPAVGAAPPVVPALSSAISKLLQSEPMAAPCADFPNVLPTFVSTGFELPAAAGDRLSLGSFGAFGNLSAAVAAPGGGGGSSTTTSFMDMLRGVGGLFDGVGNSHQMGGNGGGGGSYYAPLITGAGNGMLMPPPPLPPFSGSLMQHGMQGLFANHAMGGGGGGVMNAGEDGSVMAGLGGGQWPPALGGADEQQGGGDGGEAVMTKDTGGGASSSASRPDYFYGWNXPPAASSLEAASAATPPLPPEQRHGRASSTAARP

SEQ ID NO: 24102 - protein, 476 aa, Oryza sativa
  Clone ID: TF_OsC44472_1.pep
MDDLAAASPPHPPPPPPESHVPPPPQTPEKDSCEDTGDMRISEEKPCTDQELDADQMNSSSFNSSSECENQTPSNDEMTGSESKSEAAQTEGGGSSEEKVLKKPDKILPCPRCNSMDTKFCYYNNYNINQPRHFCKSCQRYWTAGGSMRNLPVGAGRRKSKSSTANYRSILITGSNLAAPAGDAPLYQLSIKGDQTATAVKFAPDSPLCNSMASVLKIGEQSKNAKPTSTAQPRNGETQTCPASGTTSDSPRNEPVNGAVSGHQNGIVGHSGVPPMHPIPCFPGPPFVYPWSPAWNGIPAMAPPVCTAPAEPANSSDNGSTASVQWSMPPVMPVPGYFPVIPSSVWPFISPWPNGAWSSPWIQPNCSVSASSPTSTSTCSDNGSPVLGKHSRDSKPQGDDKAEKNLWIPKTLRIDDPDEAAKSSIWTTLGIEPGDRSMFRSFQSKPESREQISGAARVLQANPAALSRSQSFQETT

SEQ ID NO: 24103 - protein, 485 aa, Oryza sativa
  unsure (1)..(485): unsure at all Xaa locations
  Clone ID: TF_OsC161689_1.pep
MAGSPHLAGFGREGRRKGSGAADSPPSCRAPPCLWWPPPSPSCRLHCYCRRRPVPLFRLDLEGREESAAGHRPPPFLLGPDLGGREGSHSQEQQPPPPLPSPLPPATAPGCATTATGGRGEGRTGGRGGERREEXSSWLGGGRRRRVFDRRRRRLTGPTCAGVHRGTTTTTPRRRRRRRPRRGASARRRSSSSSSPPPARSYPGPRRGVAGAMSSPFLGSSSSSASSPLSYLTPPRPPPPPPPLLMVRHGLARWLTDLDDELMVFDDDLGVQGQGYAAAANGGIGGGGVEAVNAAAAPRQGGRHAGHPPLPRPPPRQCPRCGSANTKFCYYNNYSRTQPRYLCKACRRHWTEGGTLRDVPVGGGRKNSKRAAGGGKAGATASTAASAHVVAPAAAPPTSSSFPDLLRQMLMAPATAGGGGGYSIDLTAWQQMAAFAAPPQAATGDVGGAVGAASTAAPDANCGGGGVQYWNGWLQDDMPGLDGSC

SEQ ID NO: 24104 - protein, 318 aa, Oryza sativa; identical to SEQ ID NO: 16623
  Clone ID: TF_OsC69565_2.pep

SEQ ID NO: 24105 - protein, 493 aa, Oryza sativa; identical to SEQ ID NO: 16660
  Clone ID: TF_OsC7030_1.pep

SEQ ID NO: 24106 - protein, 427 aa, Oryza sativa; identical to SEQ ID NO: 16662
  Clone ID: TF_OsC200145_1.pep

SEQ ID NO: 24107 - protein, 262 aa, Oryza sativa; identical to SEQ ID NO: 16648
  Clone ID: TF_OsC75556_1.pep

SEQ ID NO: 24108 - protein, 294 aa, Oryza sativa
  Clone ID: TF_OsC44865_1.pep
MLHEQHAPPPQPEPEVSLQLSAPATAADDVAAGDDEEVTVVTTYRDIHPLTPPSPTTTTTPPTRLGSAAYSWDTASSHRSVSSEEQFMTMSREFTAMVAAGTTMQTGPNDGNNGGDQLTSIGEDELEETNPLAIVPDSHPIATPARSRASQLEVVPAAGPSPAPPVEARQVKKEEVETKVSAWQTAEVAKINNRFKREEVVINGWETEQVEKASAWLKKIEIALARHQKIERKLDEQRAKALERTQNDIAKARRKAEEKRASAEAKRGLKLAKVLELANFMKAVGRVPTKRSFF

SEQ ID NO: 24109 - protein, 466 aa, Oryza sativa
  unsure (1)..(466): unsure at all Xaa locations
  Clone ID: TF_OsC1311_1.pep
MESKGGKKKSSSSRSLMYEAPLGYSIEDVRPAGGVKKFQSAAYSNCAKKPSXDSPFGFSILCSDQPAPMGVLSAADPPPVSAIGFEGYEKRLEITFSEAPVFADPDGRGLRALSRAQIDSVLDLARCTIVSELSNKDFDSYVLSESSLFIYSDKIVIKTCGTTKLLLTIPRILELAEGLSMPLAAVKYSRGMFIFPSAQPAPHRSFSEEVAVLNRYFGHLKSGGNAYVIGDPAKPGQKWHIYYATQHPEQPMVTLEMCMTGLDKEKASVFFKTSADGHTSCAKEMTKLSGISDIIPEMEICDFDFEPCGYSMNAIHGSAFSTIHVTPEDGFSYASYEVVGFDASTLAYGDLVKRVLRCFGPSEFSVAVTIFGGHGHAGTWAKELNADAYKCNNMVEQELPCGGLLIYQSFDATEDVPVAVGSPKSVLHCFEAENMVNPAPVKEGKLGNLLPWGEDALEENDGVFDE

SEQ ID NO: 24110 - protein, 316 aa, Oryza sativa; identical to SEQ ID NO: 16652
  Clone ID: TF_OsC349_2.pep

SEQ ID NO: 24111 - protein, 130 aa, Oryza sativa
  Clone ID: TF_LIB3432-006-P1-K1-C11.pep
PRVRPRVRGRVGAAKDVAEEKAVIPAPAPPAEEEKPPVDDSKALAIVEKVADEPPAEKPAQGGSNDRDVALARVETEKRNSLIKAWEENEKTKAENKASKKLSAILSWENTKKANIETQLKKIEGQLVKK

SEQ ID NO: 24112 - protein, 203 aa, Oryza sativa; identical to SEQ ID NO: 16654
  Clone ID: TF_OsC339202_1.pep

SEQ ID NO: 24113 - protein, 92 aa, Oryza sativa
  Clone ID: TF_LIB3474-009-P1-K1-H6.pep
RHPDVALARVETEKRNSLIKAWEENEKTEAENKASKKLSAILSWENTKKANIEAQLKKIEVYSCFCYFCFPSERYSFQLAHYLKVTNILSYQ

SEQ ID NO: 24114 - protein, 92 aa, Oryza sativa
  Clone ID: TF_OsC84854_2.pep
MAEVAPPAPAPEPTKDIAEERAAVPAPEESKAMTVVDDAEKAAATGGSHERDALLTTVATEKRISLIKAWEENEKAKADNKAVKKVADIASW

SEQ ID NO: 24115 - protein, 510 aa, Oryza sativa; identical to SEQ ID NO: 16657
  Clone ID: TF_OsC92114_1.pep

SEQ ID NO: 24116 - protein, 208 aa, Oryza sativa
  Clone ID: TF_OsC84854_1.pep
MPRKQAREEADTAEADTRRGTPRGGGHRRPTRAELLEMAEVAPPAPAPEPTKDIAEERAAVPAPEESKAMTVVDDAEKAAATGGSHERDALLTTVATEKRISLIKAWEENEKAKADNKAAKKLADIASWENSKVAEIEAEIKKYQEYLERKKAEQVEKLMNGVAKVHRAAEEKRAATEARRGEEVVKAEEAAAKYRAKGEPPKKLLFG

SEQ ID NO: 24117 - protein, 122 aa, Oryza sativa
  Clone ID: TF_jC-osleLIB3474039a12a1.pep
FFLFRNPRFFPPGPTFFGPTNPLPPWGGERSQPPPGEPFPVCLLGIENFFRPQNTPLFFWEHGRGPRTWVPFPWPLGLSCPPLPQPLVFFPQLSWGPTRLLSLFFLAIPPFFFFKGSSIFFR

SEQ ID NO: 24118 - protein, 426 aa, Oryza sativa
  Clone ID: TF_OsC151462_1.pep
MLLGLEKNQHNGEDTSPEANDSGELDDQSKSTTPEMVLHSSIILIYGFTISLIPSTWGMECSTPTEVSSNSGHGSINRAQDDDRFGSQGGSWVPPLEQKPEAVTALIPPLSRPTRSIWDDAEKWISSPTANRGGRVGSAAGAAPKKSALAFPEHVSRPPAVAKVVAEVPINTGTLVKNSVALAQPISFNPAQSASIVDEPAPAVRSVSMRDMGTEMTPIASQEPSRTGTPIIASSPTSSRTPTPQRNAEISIGEFGPNKMEMSEEELQMNTRKEIMDLGQRLGKTTIAAWASKEEKSTTSFANVITDKAVEIDREARAADWEEAEKAKYLARFQREEVKIQAWENHQKAKIEAEMKRMEAKIEIKRAREQDRLSSKLAAARHKAEARREAAESRKNQEAARTEEQAAQIRKTGHIPSSISCWCWCL

SEQ ID NO: 24119 - protein, 130 aa, Oryza sativa
  unsure (1)..(130): unsure at all Xaa locations
  Clone ID: TF_8954457.pep
ICREHEEQSRDRXXGXLXRRXXWSRXNAARKSXRPRRWQXXXVXPAMLPXNSXGALGPKKIFDSQRXXVKXFXPGCFASFTPPXAXCVCXCXKSPARCVXSGVAVYNILLPXTYVWGXXCLMXDXRPSYV

SEQ ID NO: 24120 - protein, 206 aa, Oryza sativa; identical to SEQ ID NO: 16661
  Clone ID: TF_OsC1311_2.pep

SEQ ID NO: 24121 - protein, 531 aa, Oryza sativa; identical to SEQ ID NO: 16653
  Clone ID: TF_OsC299804_1.pep

SEQ ID NO: 24122 - protein, 175 aa, Oryza sativa
  Clone ID: TF_OsC102438_1.pep
MAEEAKKVEVTKDIAEEKAVVPLPTPPATEHDDSKAIVLVKEAEATGGSAERDAYLAKIVSEKRLVLINAWEESEKARAENRAAKKLSYITSWENAKKAEMEAELKRIEQELEKKKAAYEEKLKNKLALLHKTAEEKRALTTAKRGEELIMAEEMAAKYRAKGEAPTKLFGLLKA

SEQ ID NO: 24123 - protein, 997 aa, Oryza sativa; identical to SEQ ID NO: 16665
  Clone ID: TF_OsC9553_1.pep

SEQ ID NO: 24124 - protein, 149 aa, Oryza sativa
  Clone ID: TF_LIB3433-031-P1-K1-B2.pep
HAGAHCTSDNQGYIDRSGFKRKDSDCSDQQKTGGALWDIFRREDSEKLQDYLRKHASEFRHIHCNPVKNVSHPIHDQTFYLTVEHKRKLKEEHGVEPWTFEQKLGDAVFIPAGCPHQVRNLKSCIKVALDFVSPENVGECVKLTGEFRR

SEQ ID NO: 24125 - protein, 872 aa, Oryza sativa
  Clone ID: TF_OsC160889_1.pep
MRPDEEGRGVATRPGALWERKPPANAFNAPDDDEDVEKTDQLLEPLNKPKRRDAGKKKRPRKKKVDQENIKTHRHNANAVKGKMLVNDKVSKTEKKQREENVDRYPDLPENEFAAKCPYCRKNCNCKACLRMRGVEEPPRKEISKENQIRYACHVLRLLRPWLIELRQEQMAEKELEAKIQGVSVDQIKVEQAELRKGEIPGGEEVEILDPEERDKDYAFGKILSDGENQRDSLKCRSDTQNSESNKGMASDENQKKALLLWKANSNGSIPCPRKEKEDCSFSSLDLKCLFPEKLLPELEDRSEKVFWSETFAKELGRTSELCPCFDHSGKIRSDSKKLRQAANREDSSDNYLYCPVATDIQDADLLHFQMHWAKGEPVVVSDTLKLTSGLSWEPMVMWRAVRERTKGKAEDEQFAVRAVDCLDWCEVEINIHMFFMGYTRGRTHPRTYWPEMLKLKDWPPSSSFDQRLPRHGAEFISALPFPEYTDPRYGPLNLAVKLPGGVLKPDLGPKTYIAYGFSEELGRGDSVTKLHCDMSDAVNILTHTAEVPCETYDAVQIKNTQKKMKMQDDMEIYGMIESGSELKPSACPVELGNKAVGEAPKASCSKENVHTLKDKSNGWWRKYTFGLDINASPPDDAGGDARDEALSYESVVHSDVAQCPNHNHETNNSDDARIGAQRCQKKAKGRPPKTGSGVSEHQESGGALWDIFRREDSEKLQDFLRKHAPEFRHIHCNPVKQVIHPIHDQAFYLTAEHKRKLKEEYGVEPWTFEQKLGEAVLIPAGCPHQVRNLKSCIKVALDFVSPENVGECVRLTKEFRRLPSSHRAKEDKLEIKKMAFHALNEVLNFLDPPSSEGSKEAAEKPRRGRGRPRKH

SEQ ID NO: 24126 - protein, 913 aa, Oryza sativa; identical to SEQ ID NO: 16669
  Clone ID: TF_OsC145726_1.pep

SEQ ID NO: 24127 - protein, 874 aa, Oryza sativa
  unsure (1)..(874): unsure at all Xaa locations
  Clone ID: TF_OsC98891_1.pep
MGLSDYDLMGVAVPGTGVGGPHPEALKERMLCNLWEVYTLAQRNRKFNELLNDEAIMMKPSKESKKRGAGKKQEEEENNTISIEDEMCDANNKKGKKMLTGENALMCHQCQRNDKGRVIWCKSCNNKRFCEPCMKRWYPGLSEVDFAAKCPYCRKNCNCKACLRMIGVEKPPEKKISEENQRRYAFRIVDLLLPWLKELQQEQMKEKELEGRLQGIGGFSNCLFTFLFAGVSMDEVKLEQADCDMDERVYCDRCKTSIVDFHRSCKACSYDLCLACCWELRKGEIPGGEEAKSVQWEERGQKYDTLQSSEKCFSPNSXPDFLLTPSTETCNDMAVAGDPNNPLLLWKGNSDGTSWMSTPSEKFKVLHQGCSXTLFPLKMLVSVLXDRRVVIKREAFDKAINETSDQCPCFYHTSKIRTNATREAANRKGSSDNYLYCPDANNIQEDDLSPEEWGRXPIDESIXKGSLNSEGDLNGDLXLKRALREKKTNGDVEDEHFAVKAVDCLDWNEVEIISLWDRIKVSTVQESPQTSSWXDFVHMWGDCPSLKXCDCLLLIVAIXLGLPFPEYTDPRYGPLNLAVRLPAGVLKPDLGPKTYIAYGCYEELGRGDSVTKLHCDMSDAVNILMHTAEVSYDTEQLDKIAKIKMKMREQDLHELFGVSESGAKGKADDEASKISCNMENKHTSNQSTKGLDINALPPDDSGSDIGDKPSFCQSEVSHPIHDQTFYLTVEHKRKLKEEHGVEPWTFEQKLGDAVFIPAGCPHQSCIKVALDFVSPENVGECVKLTGEFRRLPSDHRAKEDKLEIKKIALNALKEVVNFLDPLPKGSKNRDEVVEVTKPKRKYGNRRGDLKSGEDQPIDESIEERKPKKRGRSKR

SEQ ID NO: 24128 - protein, 308 aa, Oryza sativa; identical to SEQ ID NO: 16686
  Clone ID: TF_OsC80971_1.pep

SEQ ID NO: 24129 - protein, 1441 aa, Oryza sativa
  Clone ID: TF_OsC32958_1.pep
MTMMTPPPLEPEEDEMLVPHQELVAADAAQPMEVVAQTEAASTAESQPAEDPQTSRFTWTIENFTRINAKKHYSDAFVVGGYKWRVLIFPKGNNVDHFSMYLDVADSANLPYGWSRYAQFSLAVVNQIQQKYTIRKDTQHQFNARESDWGFTSFMPLSELYDPSRGYLVDDTVVVEAEVAVRKMVDYWTYDSKKETGYVGLKNQGATCYMNSLLQTLYHIPYFRKAVYHMPTTENDMPSGSIPLALQSLFYKLQYSDNSVATKELTKSFGWDTYDSFMQHDVQELNRVLCEKLEDKMKVTNLRTVVEGTIEKLFEGHHINYIECINVDYKSNRKESFYDLQLDVKGCRDVYASFDKYVEVERLEGDNKYHAENHGLQDAKKGVLFLDFPPVLQLQLKRFEYDYMRDTMVKINDRYEFPLQLDLDRDDGKYLAPDADRSIRNLYALHRYKFDDERVTKEDTKKALEEQYGGEEELPQINPGFNNAPFKFTKYSNAYMLVYIRESDKDKIMCNVDEKDIAEHLRVRLKKEQEEKEHKKKEKAEAHLYTIIKVARDENLKEQIGKDIYFDLVDHEKVRSFRIQKQLLFTTFKEEVAKEYGIPVQFQRFWLWAKRQNHTYRPNRPLSPHEETQSVGQLREVSNKAHNAELKLFLEVELGPDLRPLPPPEKSKEDILLFFKLYNPEKEELCFVGRLFVKALGKPSEILTKLNEMAGFVPNEEIELYEARAKFMMLYLWDNLEEIKFEPNVMCEHIDKKATFRASQLEDGDIICFQKSPIPDSDTQMRYPDVPSYLEYVHNRQVVHFRLLEKPKDDDFSLELSKLHTYDDVVERVARQLGVDDPAKIRLTSHNCYSQQPKPQPIRYRGVEHLLDMLIHYNQTSDILYYEVLDIPLPELQGLKTLKVAFHHATKDEVVIHSIRLPKNSTIADVINDLKTKVELSSPSAELRLLEVFYHKIYKIFPLHEKIENINDQYWTLRAEEIPEEEKNLGPNDRLIHVYHFMKDPLQNQQIQNFGDPFYLAIREGETLAEVKERIQKKLQVPDEEFCKWKFAFISMNRPDYLQDSDVVSARFQRRDVYGAWEQYLGLEHADTAPKRAYTANQKKLTRITAAVSAALGSVIVIADEIFASTYILTILSKKLYLMSRIKFGVTRSIFFSRHYDLNKAPVHLTLQLPTSPMDNPTPSSSSGGGGAAAAANASSDEHRKTSPATAADFFDEEHTFDDILLPVDLFDFTHGLDAGDGCYVDDQAAIGQKPLSPAPEPAAEQQPSPAPEHGDDERLVMYYQGQEYIFDPVQPQKIENIFHHLNGQEMIPQSIRPQPTNLVRPITVPEDFDRFAALTRYREKKRNIKFIKKADYSARKEVALRMKRSKGKFAPRVQTSENSLAHRKGITFCTNCGESSDATPMMRHAPNGTKSFCNACGLMWANSRKIRKIRNPTSGEQEDQ

SEQ ID NO: 24130 - protein, 295 aa, Oryza sativa; identical to SEQ ID NO: 16674
  Clone ID: TF_OsC297303_1.pep

SEQ ID NO: 24131 - protein, 173 aa, Oryza sativa
  unsure (1)..(173): unsure at all Xaa locations
  Clone ID: TF_OsC353595_1.pep
SSAHAAMAAAAAPASAANNGGGNWPGQDSCLTAAPGRGAHSKRSCATAATAAAWHTLGPHPTFXSSLSSSRPSSDFPSSKKLSATRLNGSSGSRGKKSPGPAGVKVGMEAGVXWRCMHCASEKTSXLLTGPLGPKTLCNACGLRFMSGRLMPEYKAAAMPPLWLTTSGGDHSS

SEQ ID NO: 24132 - protein, 353 aa, Oryza sativa; identical to SEQ ID NO: 16682
  Clone ID: TF_OsC179266_1.pep

SEQ ID NO: 24133 - protein, 387 aa, Oryza sativa; identical to SEQ ID NO: 16684
  Clone ID: TF_OsC25297_1.pep

SEQ ID NO: 24134 - protein, 219 aa, Oryza sativa; identical to SEQ ID NO: 16687
  Clone ID: TF_OsC154673_1.pep

SEQ ID NO: 24135 - protein, 309 aa, Oryza sativa; identical to SEQ ID NO: 16690
  Clone ID: TF_OsC84482_1.pep

SEQ ID NO: 24136 - protein, 222 aa, Oryza sativa; identical to SEQ ID NO: 16681
  Clone ID: TF_OsC86749_1.pep

SEQ ID NO: 24137 - protein, 418 aa, Oryza sativa; identical to SEQ ID NO: 16692
  Clone ID: TF_OsC45687_1.pep

SEQ ID NO: 24138 - protein, 136 aa, Oryza sativa; identical to SEQ ID NO: 16693
  Clone ID: TF_OsC98722_1.pep

SEQ ID NO: 24139 - protein, 231 aa, Oryza sativa
  Clone ID: TF_OsC144448_1.pep
PPQDGAYRALPPASYPVRTPTICALSTEALVPVKAKRSKRSRATAWSLSGAPPFSDSTSSSSTTTTSSCSSSASFSSFSPLLKFEWHPLGGTSDLPDDHLLPPGKKSKHGKNGKNKPKKRGRKPKQLPPHPSGAAASAPAPGDRRCSHCGVQKTPQWRAGPEGAKTLCNACGVRYKSGRLLPEYRPACSPTFVSAIHSNSHRKVLEMRRKKEVGSGLLTAAAAAAPAVASF

SEQ ID NO: 24140 - protein, 386 aa, Oryza sativa; identical to SEQ ID NO: 16697
  Clone ID: TF_OsC54448_1.pep

SEQ ID NO: 24141 - protein, 387 aa, Oryza sativa; identical to SEQ ID NO: 16696
  Clone ID: TF_OsC54448_2.pep

SEQ ID NO: 24142 - protein, 659 aa, Oryza sativa
  Clone ID: TF_OsC155692_1.pep
MSLRPSERMGIRQKGYKASMDAAEGRRRREDITVILRKADRDRALKEKRRRPTATAAAEGLPQAAHSSAIEKKLESLPMMVQGLYSDDSSMQLESTTQFRKLLSVDHCPPIDEVIRSGVLPRFVEFLTREEYPQLQFEAAWALTNIASGTAANTMAVIEHGAVPIFVKLLSSPREDAVWALGNVAGDSTKCRNLVLMHGAMLPLLQQLNEHAKLSMLRNSAWTLSNFCRGKPQPDFKHVEPALPVLRELILSQDEEILTDSCWALSYLSDGSNDNIQAVIETGVCDWLVELLSHPSPVVLIPALRTVGNIVTGDDAQTQSKLTKTADTGQNYLQNYGFNPQYYGTTDLVLTLSMCIVGHPQALPCLFNLLTTTQKKSVKREACWTISNITAGTKEQIQAVIDSNIIAPLLHLLQHAEFDVKKEAVWAISNATSGGTFNQIEYLVSQGCIKPLCDLLVHQDSKTVLTCLEALDNILRVGEAKKNLGACNMNIFVPMVDEADGLDKIEDLQNHDNVEIYNKAVYVLESYWVQEDDQQPFLIPSVSESESDNEMFQFGSFGKVSVKCPIWMEMHRSCLFRGLSRIGESSYPSHGLVLLTCYEAAVRRLVHMDYGSPHKGVGTGNWSVGEGHTLACVVGLAISFAFLPLARTRLPVLLYSQPP

SEQ ID NO: 24143 - protein, 450 aa, Oryza sativa
  Clone ID: TF_OsC52874_1.pep
MGKQGPCRHCGVTSTPLWRNGPPDKPVLCNACGSRWRTKGSLTNYTPMHARDDIDAEEPRASKLKPPTLKLKEQKQLKKNPSHITMENGPFSDQNFRKMGDPDLSNRSGSGSALSYSESCAPYGTADASEMTASAQSHAWESLVPSKRRSCVTRPKPSQMEKLAKDLNSIMHEEQLLYLSGSSEEDLIYHSATPVDSFEMGYGSMLLRPNSKSLEEESEASSIPADNKSYITSESYSGSVSFVYSESKATSNQNVITEQPKKFLVQTSDNARRANLHTENQDTLENANSPLVSLHMEGKDSEETRVKTSASNRLTKSTMNPLKRPHDTHFQSSVELRGTMRSPKRVSKYGDAMGLKCQASFMPKPGNGKDLACSDRALNLFMLPPDKLSMLVPPQYANTDSDQDLLLDVPLNARHPEAELLCQPSQLSSVAHSSTSEAGNAGGEGRLKQP

SEQ ID NO: 24144 - protein, 95 aa, Oryza sativa
  Clone ID: TF_uC-osflcyp057d06b1.pep
SEEGRPPYAFECHHCGVNAKATPMMRRGPDGPRTLCNACGLMWANKGMLRDLSKAPPTPIQVVALVNDGNGSAAAPTTELEIPAPATVNGHESST

SEQ ID NO: 24145 - protein, 332 aa, Oryza sativa; identical to SEQ ID NO: 16700
  Clone ID: TF_OsC51531_1.pep

SEQ ID NO: 24146 - protein, 284 aa, Oryza sativa
  unsure (1)..(284): unsure at all Xaa locations
  Clone ID: TF_OsC204425_1.pep
SVAGFGTSFSFFLSFLHNYSLLFSPLLLPFAPRNAAKLRFACLHATICARHSDRSIDRSMGSSDQXGDRDRRGGSGGGGGGWEAVLRRMRRHHHAHVARRPDRPXSLCNACGIRYRKKRRQELGLDKKQQQEHHPHHHQQQQQQYQRQQQQQQQEDHSDAASSVKDSSSSSSNKSSSLQVISEIVISRSKSDCEGAMEGNCVPLKRLVQQVDFLLSSTGITESCQCVAVSCANQMGLQKAANVLLFLVPIRVLTMENNSCDILHIIRIIGRGCGIESKTRIIDR

SEQ ID NO: 24147 - protein, 375 aa, Oryza sativa; identical to SEQ ID NO: 16677
  Clone ID: TF_OsC140039_1.pep

SEQ ID NO: 24148 - protein, 327 aa, Oryza sativa
  Clone ID: TF_OsC156502_1.pep
MSGHHEAKPYQPRRGPAPADEEAAPAAAADEAEAEAEVEAMERYEQEQEYEEGEEGEEEEYEGGEGVPMDADASAAAVAGMDPHGEMVPVAGGEAGGGYPHVASNTLTLSFQGEVYVFESVSAERVQAVLLLLGGRELAPGSGSVPSSSAAYSKKMNFPHRMASLMRFREKRKERNFDKKIRYTVRKEVALRMQRNRGQFTSSKSKAEEATSVITSSEGSPNWGAVEGRPPSAAECHHCGISAASTPMMRRGPDGPRTLCNACGLMWANKGTMREVTKGPPVPLQIVPAATNDVNGIVEATGVEQHNSAVEEAVSAANGHESQSGVA

SEQ ID NO: 24149 - protein, 1484 aa, Oryza sativa; identical to SEQ ID NO: 16679
  Clone ID: TF_OsC64218_1.pep

SEQ ID NO: 24150 - protein, 129 aa, Oryza sativa
  Clone ID: TF_OsC64218_2.pep
ESLSPGCELASQGSGQDFLSRESKCQNCGTSEKMTPAMRRGPAGPRTLCNACGLMWANKGTLRNCPKAKVESSVVATEQSNAAVSPSGIDNKELVVPNPENITASHGEVMGDSTPANEAEIGAPKAQSQ

SEQ ID NO: 24151 - protein, 271 aa, Oryza sativa; identical to SEQ ID NO: 16680
  Clone ID: TF_OsC406373_1.pep

SEQ ID NO: 24152 - protein, 368 aa, Oryza sativa
  Clone ID: TF_OsC321679_1.pep
MEELLGLVRGFVDVLVLAGGRTSSGAAATWRSGDVKKALQWALFFEEVFKNLRDDGQYDESASELDAALVQLASSPNFPKGIEDIRSKTLAMARELVVKHFLKTTNAENLGAVLQAVVEMDMDGISASGECNVCQEYKLDSGSCISLAERELNTLLKSMKKDSFDSAGSTLCTSATAQKTQIIDKFILWKQWKAKCLSYLLDERTIRIMSGTNMIFNAPKEQWMGLFEPLKVSADSSQSGIIEVMELCLLGLVARQWNSLIESIMSHTFSSFPISKQYADLHQLLQGTTQDECQDKLLGFKEMDICEYARQSLESEPYILWLLPPVLTAAAMPPRSSLFKIYLVEIDKQLGEAASKDRKCNCRADVID

SEQ ID NO: 24153 - protein, 291 aa, Oryza sativa; identical to SEQ ID NO: 16702
  Clone ID: TF_OsC95862_1.pep

SEQ ID NO: 24154 - protein, 307 aa, Oryza sativa
  Clone ID: TF_OsC159_1.pep
MYQPNPISSSGQTHGNPTAHEQMELGNNAIVPSNGGNNNPNMAARQRLRWTNELHDRFVEAVTQLGGPDRATPKGVLRIMGVPGLTIYHVKSHLQKYRLAKYIPDPSADDNKDEDKDPRNLLSALEGSSGMQISEALKLQMEVQKRLHEQLEVQRQLQLRIEAQGKYLQKIIEEQQRVIGAGASRATSSEQLPDSEKTNPPTPVPISESPVQGAPHSKNSQSQVEPTKSPSHDDALPCGEPLTPDSSCRPGSPTLSPKHERAAKRQRGSDAGDVTAFADGEFVLPPGIFESSTGSEFQECSMPYSGH

SEQ ID NO: 24155 - protein, 293 aa, Oryza sativa
  Clone ID: TF_OsC159_2.pep
VPSNGGNNNPNMAARQRLRWTNELHDRFVEAVTQLGGPDRATPKGVLRIMGVPGLTIYHVKSHLQKYRLAKYIPDPSADDNKDEDKDPGNLLSALEGSSGMQISEALKLQMEVQKRLHEQLEVQRQLQLRIEAQGKYLQKIIEEQQRVIGAGASRATSSEQLPDSEKTNPPTPVPISESPVQGAPHSKNSQSQVEPTKSPSHDDALPCGEPLTPDSSCRPGSPTLSPKHERAAKRQRGSDAGDVTAFADGEFVLPPGIFESSTGSEFLQAYAHLDAPIFGTKKSLQPCQYVNL

SEQ ID NO: 24156 - protein, 691 aa, Oryza sativa
  Clone ID: TF_OsC19751_1.pep
MAPVEDGGGVEFPVGMKVLVVDDDPTCLAVLKRMLLECRYDATTCSQATRALTMLRENRRGFDVIISDVHMPDMDGFRLLELVGLEMDLPVIMMSADSRTDIVMKGIKHGACDYLIKPVRMEELKNIWQHVIRKKFNENKEHEHSGSLDDTDRTRPTNNDNEYASSANDGAEGSWKSQKKKRDKDDDDGELESGDPSSTSKKPRVVWSVELHQQFVNAVNHLGIDKAVPKKILELMNVPGLTRENVASHLQKFRLYLKRIAQHHAGIANPFCPPASSGKVGSLGGLDFQALAASGQIPPQALAALQDELLGRPTNSLVLPGRDQSSLRLAAVKGNKPHGEREIAFGQPIYKCQNNAYGAFPQSSPAVGGMPSFSAWPNNKLGMADSTGTLGGMSNSQNSNIVLHELQQQPDAMLSGTLHSLDVKPSGIVMPSQSLNTFSASEGLSPNQNTLMIPAQSSGFLAAMPPSMKHEPVLATSQPSSSLLGGIDLVNQASTSQPLISAHGGGNLSGLVNRNPNVVPSQGISTFHTPNNPYLVSPNSMGMGSKQPPGVLKTENSDALNHSYGYLGGSNPPMDSGLLSSQSKNTQFGLLGQDDITGSWSPLPNVDSYGNTVGLSHPGSSSSSFQSSNVALGKLPDQGRGKNHGFVGKGTCIPSRFAVDEIESPTNNLSHSIGSSGDIMSPDIFGFSGQM

SEQ ID NO: 24157 - protein, 257 aa, Oryza sativa
  Clone ID: TF_OsC60587_1.pep
MMYHAKKFSVPFGPQSTQSNDHMSNIGAFGGSNMGSPANPAGSGKQRLRWTSDLHNRFVDAIAQLGGPDRATPKGVLTVMGVPGITIYHVKSHLQKYRLAKYIPESPAEGSKDEKKDSSDSLSNTDSAPGMQINEALKMQMEVQKRLHEQLEVQRQLQLRIEAQGKYLQMIIEEQQKLGGSLKACEEQKLPHSPPSLDDYPDSMQPSPKKPKMDNLSPDSVRDVTQSDFESHLIGPWDQEAAFRVDEFKADPGLNKS

SEQ ID NO: 24158 - protein, 552 aa, Oryza sativa; identical to SEQ ID NO: 16728
  Clone ID: TF_OsC14889_1.pep

SEQ ID NO: 24159 - protein, 852 aa, Oryza sativa; identical to SEQ ID NO: 16727
  Clone ID: TF_OsC77895_1.pep

SEQ ID NO: 24160 - protein, 331 aa, Oryza sativa; identical to SEQ ID NO: 16729
  Clone ID: TF_OsC847_5.pep

SEQ ID NO: 24161 - protein, 432 aa, Oryza sativa
  Clone ID: TF_OsC353740_1.pep
MLQRNLPNLSLRISPPAVSSAAAPVSSGTPTTAARTTLPTGVITDAEGGGEVAAFFGNPSSGSEPPGLSLGLGPTTPAHADAGGGRHGDHHLQPQGCAPFKRAAARASQLPAGSKRSVRAPRMRWTTALHARFVHAAAPPGGRGGATPKSVLELMNVKDLTLAHVKSHLQMYRTVKSTDRSSHIASGEAQLQQQAGMEVAMEAAAGGGGNGGGGGGGVVLPMMPACDDMVGICSSPAPPAAATSSAAAYFLCATTTSTATAPLAVVPSPPAPTIPTRFHECIYGDVDVVIQSISMLINVLLHGIDKSCLALTFLEHRRTDQTPALEKGVAIVDSLHRCQKHNYSPVLQDALHQGAEEDHLITGNLPMGGASAQASIEAMATTNSSSPASSSPSLASLEQLLPEDSFAPNLEISLGRHNWNMDHPEELSLKYL

SEQ ID NO: 24162 - protein, 432 aa, Oryza sativa; identical to SEQ ID NO: 16731
  Clone ID: TF_OsC140091_1.pep

SEQ ID NO: 24163 - protein, 143 aa, Oryza sativa
  Clone ID: TF_jC-osleLIB3474027c12b1.pep
MFPSSSPSPSPSSSKKQQQLSGGVGVGGAAAAASSNDRPPLCVQGDSGLVLTTDPKPRLRWTVELHDRFVDAVTQLGGPDKATPKTIMRVMGVKGLTLYHLKSHLQKFRLGKQHKDFNDHSVKDAMDMQRNATSSLGHYGKEA

SEQ ID NO: 24164 - protein, 235 aa, Oryza sativa
  Clone ID: TF_OsC282077_1.pep
MGARGRRDRMGSAGGCGGSPPVVVRRYNRSEAPRMRWPEELHRRFVHAVRRLGGCHEATPKRIMQLMGAKGVSISHVKSHLQMYRNSNNSSNVNRRHPVTPQIDWTTTAQQDEQQRRQMSSFSFLATRTVPAAGIGSHSHQRPHRRQALHAGDDDGCELTLSISGGAAEESKDGGSSITDDDDELLIQPPAPNIINDDGSTRHGHRHPFACSTQPLPPAAINLELTISSPCCWLT

SEQ ID NO: 24165 - protein, 556 aa, Oryza sativa; identical to SEQ ID NO: 16732
  Clone ID: TF_OsC50227_1.pep

SEQ ID NO: 24166 - protein, 107 aa, Oryza sativa
  Clone ID: TF_OsC11289_2.pep
MSAAAGGGSSAGLVLTADPKPRLRWTADLHDRFVDAVAQLGGPDKATPKTIMRTMGVKGLTLFHLKSHLQKYRLGKQSGQEMAEPSKDASYIFGRSWGRGNTRSRGT

SEQ ID NO: 24167 - protein, 246 aa, Oryza sativa
  Clone ID: TF_OsC11289_3.pep
MFPGLIHHHRLLDADVGGGGGGSSAGLVLTADPKPRLRWTADLHDRFVDAVAQLGGPDKATPKTIMRTMGVKGLTLFHLKSHLQKYRLGKQSGKEMAEQSKDASYILGAQSGTNLSPTVPTPDLKESQELKEALRAQMEVQRKLHEQVEVQRHVQIRMEAYQNYIDTLLEKACNIVSEQLNGFSISDHDLTSAGVMLSSSDTLSPSIFHQLSVSSISLHSPGGKSSPFAADADLFFQKAPEKRKSY

SEQ ID NO: 24168 - protein, 455 aa, Oryza sativa
  Clone ID: TF_OsC1962_1.pep
MLAVSPAMCPDIEDRAAVAGDAGMEVVGMSSDDMDQFDFSVDDIDFGDFFLRLEDGDVLPDLEVDPAEIFTDFEAIATSGGEGVQDQEVPTVELLAPADDVGVLDPCGDVVVGEENAAFAGAGEEKGGCNQDDDAGEANADDGAAAVEAKSSSPSSTTSSSQEAESRHKSSSKSSHGKKKAKVDWTPELHRRFVQAVEQLGIDKAVPSRILEIMGIDSLTRHNIASHLQKYRSHRKHMIAREAEAASWTQRRQIYAAGGGAVAKRPESNAWTVPTIGFPPPPPPPPSPAPMQHFARPLHVWGHPTMDPSRVPVWPPRHLVPRGPAPPWVPPPPPSDPAFWHHPYMRGPAHVPTQGTPCMAMPMPAARFPAPPVPGVVPCPMYRPLTPPALASKNQQDAQLQLQVQPSSESIDAAIGDVLSKPWLPLPLGLKPPSVDSVMGELQRQGVANVPPACG

SEQ ID NO: 24169 - protein, 623 aa, Oryza sativa
  Clone ID: TF_OsC50788_1.pep
MSRPQPPPLLPVLPELGGLQALTSSSASLATWLRGGGREEVAAINLDGGDAVILVVVPPHLAGHGGQGRPPHYSIERRRSQPQFECHAYVKGVKYLVFEFRGVIRLTAIAHGVVGDVFLGSEAPVVTSSISKYAGLVFGGAHRDVSALGEEKLSFFGKSSQQKRISTNQLYNSGIPVTVPSPLPAIPATLDENIPRIPDGQNVPRERELRSTPMPPHQNQSTVAPLHGHFQSSTGSVGPLRSSQAIRFSSVSSNEQYTNANPYNSQPPSSGSSSTLNYGSQYGGFEPSLTDFPRDAGPTWCPDPVDGLLGYTDDVPAGNNLTENSSIAAGDELAKQSEWWNDFMNYDWKDIDNTACTETQPQVGPAAQSSVAVHQSAAQQSVSSQSGEPSAVAIPSPSGASNTSNSKTRMRWTPELHERFVDAVNLLGGSEKATPKGVLKLMKADNLTIYHVKSHLQKYRTARYRPELSEGSSEKKAASKEDIPSIDLKGGNFDLTEALRLQLELQKRLHEQLEIQRSLQLRIEEQGKCLQMMLEQQCIPGTDKAVDASTSAEGTKPSSDLPESSAVKDVPENSQNGIAKQTGARMFLLELNIQTTVPQTRQRRFRVNGMIFRFQKAAQANLH

SEQ ID NO: 24170 - protein, 233 aa, Oryza sativa; identical to SEQ ID NO: 16736
  Clone ID: TF_OsC245016_1.pep

SEQ ID NO: 24171 - protein, 539 aa, Oryza sativa
  Clone ID: TF_OsC1963_1.pep
MLEVSTLRSPKADQRAGVGGHHVVGFVPAPPSPADIADEVDAFIVDDSCLLEYIDFSCCDVPFFHADDGDILPDLEVDPTELLAEFASSPDDEPPPTTSAPGPGEPAAAAGAKEDVKEDGAAAAAAAAAADYDGSPPPPRGKKKKDDEERSSSLPEEKDAKNGGGDEVLSAVTTEDSSAGAAKSCSPSAEGHSKRKPSSSSSSAAAGKNSHGKRKVKVDWTPELHRRFVQAVEQLGIDKAVPSRILELMGIECLTRHNIASHLQKYRSHRKHLMAREAEAASWTQKRQMYTAAAAAAAVAAGGGPRKDAAAATAAVAPWVMPTIGFPPPHAAAMVPPPPHPPPFCRPPLHVWGHPTAGVEPTTAAAPPPPSPHAQPPLLPVWPRHLAPPPPPLPAAWAHGHQPAPVDPAAYWQQQYNAARKWGPQAVTPGTPCMPPPLPPAAMLQRFPVPPVPGMVPHPMYRPIPPPSPPQGNKLAALQLQLDAHPSKESIDAAIGDVLVKPWLPLPLGLKPPSLDSVMSELHKQGIPKVPPAASGAAG

SEQ ID NO: 24172 - protein, 155 aa, Oryza sativa
  unsure (1)..(155): unsure at all Xaa locations
  Clone ID: TF_OsC1713_3708.pep
PCHRHGRRRRRRLPQPPRQHIGRRCTALLLLLRRRQKCKFHKYKCDNQMRQGDERFFTEVRKLAGFLLPVEASQTLPLNHEATARPLRQGVGKMDEHKAQVGGRSDRACAASQTGLMXGQTAVVAPVRPARARRSDCQCGRSGCPCSGRTQWLHR

SEQ ID NO: 24173 - protein, 885 aa, Oryza sativa
  Clone ID: TF_OsC7848_1.pep
MATRGEAAAAAAADRDMELFRSGSAPPTVEGAMASAAAAAGDVFLDDELRADPVYQSYYYSNAHLNPRLPPPLLSKEDWRSAQHRLRSSALGGIGDGRRQPAAAAQGDGLVGLPGIDLDRQGSFSSIFQFHLIQSKESSYQLDMGKQGADRNISDFLDSSRPQYALHRETSRAMGGLQSDSNIQSLAEVQNNDSSAHTYASLLGSSLSRSASPDPELVRRVPSPCLPPIGVKVSADDKKNNGGSSSFRRSSSAIGESDNLIAALSGMNLSSSGAASGQQTVTQSELYQDVDNVRKFLFDRQGDQSNGNQQHSYMKHPEQGHFKAPDGYSANSPNSSMIRNQINAASFTSFDNLSAGSGFASPRIGSRSPGGTLSSRQNLVGGSNFLNYNGIGSPNAATSLQTAIDPSYIQYLQAAEIAAQLAASCDDPLMASGHLGSSYMDLLGPQKAYASPLLQSQKNCGYYGNLGFGLGYSGSPLMSPVLPSSPAAPGSPLRHGERSMRMQSGIRNFGGSFGSWNPDLGGKMNINMMPSLLEEFKSNKSKSYELSEIAGHVVEFSADQYGSRFIQQKLETASTEEKDMVFSEIMPQALTLMTDVFGNYVVQKFFEHGSPTQIKELADQLIGRVLALSLQMYGCRVIQKAIEVVGLDQQTKMVAELDGHVMRCVRDQNGNHVIQKCIECIPQHAIQFIVSTFYGQVVMLSTHPYGCRVIQRVLEHCDDPTTQQIMMDEILQSVCLLAQDQYGNYVVQHVLEHGKPHERSAIIEKLIGQIVQMSQQKFASNVIEKCLAFGNPVERQILISEMLGSTNESEHLEVMMKDQFANYVVQKVLETCDDQQREAILTRIKAHLNTLKKYTYGKHIVARVEKLVAAGEKRLGLQPACTSAA

SEQ ID NO: 24174 - protein, 322 aa, Oryza sativa; identical to SEQ ID NO: 16739
  Clone ID: TF_OsC47644_1.pep

SEQ ID NO: 24175 - protein, 253 aa, Oryza sativa; identical to SEQ ID NO: 16740
  Clone ID: TF_OsC12030_2.pep

SEQ ID NO: 24176 - protein, 84 aa, Oryza sativa
  unsure (1)..(84): unsure at all Xaa locations
  Clone ID: TF_LIB4370-035-R1-N1-F12.pep
NDEVKSHLQKYRLHNRKSPGTASASHSIVLVGDLWASQEVSCSQSGSPQGPLQLSGSGVAVSAATRPXXSCCEDDDKSEGYVRK

SEQ ID NO: 24177 - protein, 1153 aa, Oryza sativa
  Clone ID: TF_OsC7848_2.pep
MAMRGEPWRRQEGEQAQAEADRERELDLFRSGSAPPTVEGSMGALHAAAAADVFLEDELRADPAYHSYYYSNGNINPRLPPPLLSKEDWRSAQRLRPGLGGIGDGRKPRGGGGGRGGGGAGGMGPGDGLIGMPGLEIGRQNSFSGFGTIKRLSVAKVLVLKLLIILFKAKEITSDLYMLQDDSYQHDTDRQGANCNGTDLLSSSKVQYGLHRETGAISGLHSDSKAPCLPENQNESSHSYASIIGSSLSRSASPDPELVRRVPSPCLPPIGVKLGATDKKNNVGSSSFNCSSPNIIESDDLVSALSGMNLSSSRAMNGNTMDQSKLHQDVDDVRKFLFDQYMDQTNGNQRHSYMKRSEQGHVKVPQEYSGASMNPSVMRSQINAGGFTSFNNSSVGSGFASPRLGSRSPGGSLSSRQNLTGASNLPNYVGIGSPTAASAHQMPVDPLYVQFLRAAEIAALAANCEDPLMDRANLGGSYMDLFGPQKAYLSPLLQSQKQYSYYGNLGVGLGYAGNSLTSPILPSSPGGPGSPLRHGDRSMRYPSGMRNFGGSFGSWNSDLGGKMEANLVPSLLEEFKSNKSKSYELSEIAGHVVEFSADQYGSRFIQQKLETASTEEKDMVFAEIMPQALTLMTDVFGNYVVQKFFEHGSSAQIKELADQLIGRVLALSLQMYGCRVIQKAIEVVDLDQQTKMVAELDGQVMRCVRDQNGNHVIQKCIECIPQHAIQFIVSTFYGQVVMLSTHPYGCRVIQRVLEHCDDPKTQQIMMDEILQSVCLLATDQYGNYVVQHVLEHGKPHERSAIIEKLIGQIVQMSQQKFASNVIEKCLAFGNPVERQVLIGEMLGSSNESEHLEVMMKDQFANYVVQKVLETCDDQQREMILTRIKAHLNTLKKYTYGKHIVARVEKLVAAGENPSIMGEEAPEEYELGGGEDERVMEWETGLPGADELTPLSQPLVPAGLAAAFRIPPEPGRTLLDVHRASAATVSRLRRASSSSSSSFPAFASKGAGTGADEAESGGGADGGNGNTNNSSSKRARLVWTPQLHKRFVEVVAHLGMKNAVPKTIMQLMNVEGLTRENVASHLQKYRLYVKRMQGLSNEGPSPSDHIFASTPVPHASLHDQVPSPYHPHPHHHSYNNAAYAATVSSYHHYHHANH

SEQ ID NO: 24178 - protein, 136 aa, Oryza sativa
  unsure (1)..(136): unsure at all Xaa locations
  Clone ID: TF_uC-osflcyp085b05b1.pep
MYEPKPFSSIVLAHNDPVSHNQQIERINNNVVSNSGGNSSNSNFAARQRLRWTDDLHDRFEDAVTQLGGPDRATPKGILRIMGVQGLTIYHVKSHLQKYRLAKYIPDPTADGAKSDXKDLGDLLADIESSXGMDIG

SEQ ID NO: 24179 - protein, 86 aa, Oryza sativa
  Clone ID: TF_uC-osrocyp028f03b1.pep
MSNIGAFGGSNMGSPAHSAGSGKQRLRWTSDLHNRFVDALAQLGGPDRATPKGVLTVMGVPGITIYNVKSHVQKYRPAKYIPQSSG

SEQ ID NO: 24180 - protein, 324 aa, Oryza sativa
  unsure (1)..(324): unsure at all Xaa locations
  Clone ID: TF_OsC102690_1.pep
FPSYGKCRQGGGGGGRRRRCTGGGGQQLRELDDEQXTEEEGSGESRRRTSSSSSVRPYVRSKNPRLRWTPELHLSFVRAVDRLGGQDRATPKLVLQLMNVRGLSIGHVKSHLQMYRSKKIDESGQVIGGESWRSDDHLQMQGGGHGGQAYNLGHLSLPALHHRSITAGSGTIFQSRFGNSWSPWRCHGSYWLPAGHHLLVGSKPYYPPAAEAEAPFRRSSARYVARANTSNHPDFVQGSSSSPDDNIMNHQRPVLKEMICSEGSNHQEGPLNLDLSLDICPRGEKRKRECSWRKQEEDHDHATVAIGADQEAESCATGLSLSLF

SEQ ID NO: 24181 - protein, 166 aa, Oryza sativa
  Clone ID: TF_jC-osroLIB3475017g11b1.pep
PTRPKNPRLRWTPELHLSFVRAVDRLGGQDRATPKLVLQLMNVRGLSIGHVKSHLQMYRSKKIDESGQVIGGESWRSDDHLLVGSKPYYPPAAEAEAPFRRSSASEGSNHQEGPLNLDLSLDICPRGEKRKRECSWRKQEEDHDHATVAIGADQEAESCATGLSLS

SEQ ID NO: 24182 - protein, 355 aa, Oryza sativa; identical to SEQ ID NO: 16745
  Clone ID: TF_OsC43828_1.pep

SEQ ID NO: 24183 - protein, 507 aa, Oryza sativa; identical to SEQ ID NO: 16750
  Clone ID: TF_OsC331400_1.pep

SEQ ID NO: 24184 - protein, 400 aa, Oryza sativa; identical to SEQ ID NO: 16756
  Clone ID: TF_OsC143589_1.pep

SEQ ID NO: 24185 - protein, 543 aa, Oryza sativa; identical to SEQ ID NO: 16757
  Clone ID: TF_OsC226770_1.pep

SEQ ID NO: 24186 - protein, 1196 aa, Oryza sativa; identical to SEQ ID NO: 16758
  Clone ID: TF_OsC4702_1.pep

SEQ ID NO: 24187 - protein, 2135 aa, Oryza sativa
  Clone ID: TF_OsC206290_1.pep
MAPPRELDLSDEVEGEEDGTTDFVFRLAGDPIPLLPTTSSPLPLFDLQSPPSRPLAVSNRRAAVFLAHPNGFMAATTKALIEASKEAREKGKSTTRCARDCCVADIPLPGVSLLELSRDESVLAACAGSVIHFFSASSLLTDKDVEPLSSCTLEGSSTVKDFKWLNHASKAFIVLSKDGLLSQGSLGEGLKDIMENVDAVDCCKEGTHIVLSKKNTLNILSSDFKEICCMPLLFQLWSDDSDSDDASIKVDSIGWVRDDSIVVGSVRLNEEGNEEGYLVQVIRSGGNTFFENSSKSVVFTYVDFFRGIMDDVLPSGVGPNLLLGYLHRWDLMVTSNKKSIDEHISLLKWSSATDDKKTVVYLEMLEDKYSPRIDLQENGDDNVILGFGVENVSLFQKITVTVGPEQKEVAPQHILLYLTGEGKLNIYYLARISDPSELPQTKLSAIEDSDVMKEISPVTVSGKEFTPSATSSLDKSIRPDGAELSSVQPDRDLHGSTDMKNSSPVSKAKEIVASSPAPASFLAPASNLKPGISFSFSTANSVSLSPAGSNTSSELGSSWQQSSSSNFVNNQLGKGSIPSTQPVGAFGGSQNSKKDGNLSFNKSSVFTSDGSTLVKPGERNEPGFGSHPLQSSYTTDKKVPSSVGLSSKSSPSISPIKPSSAGPSSTGFRTGNLEAFPTSRGSPLPQESIDKPHDRTHAVVDHSKNFKLGAMFDTEQDLSKKFYSINDMTKELDTLLSYIEKDGGFRDACITFQERPLSMFEGDLQNFLELLQIFKNKIAEQCSRVEDLRNKMFQGTSTTRVSARQAYMKGIVDQSSDTQYWDIWNRQKLSPEFEAKRQNILKANQNLTNQLVELERHFNNLEMNKFGETGRVASSRRAIYSSKARSSQTQISSVYNALNSQLAAAEQLSDCLSKQISALNISSPSTKRGSVAKELFESIGLDHTMDAAKFSGGTPSKSVKRYPSTREHITSISGPSKTAEPETARRRRESLDRSLASLEPQKTTVKRIAQQQRLKISSDLPFRSNKKIFDSQMAAMSQEKSSSSPTSSIVESYANKLHYPSEVLHEKTKPSGPQHNTLFKWVKESAGPSQGPQHKYPELPGQLKSSDQTPKLGSSSPLSFSYSHKDVWDNISSSNVPSSGTTHTMPKSSTLTFKTTVIPKTNTSTLPDLSPLMTGSKFSLSPLTVKTLSGDSGGASSIITKNKQGGQAMPYLGTTKGLDVSPQNMGGAFRDLNKPSLSPEPPKSALLQGKTVQLGKITETVQSPVKAKPEVAFQPPAFPPTPVAQSSPCSIKPTVPSSATSSSSTMQESAAKTSDVLSPTGPSILPSKESMTKPSSPLPDGTISSSLLSIPMPVKESSTGLNKIVSKPEVVTSEVTGTTVSASTSSSVPITEGKPSSIPATSGSLPSIPVSAPKVVPVSAESVVVTSTGKDVGPSNPSSDEDDMEEEVPSASSDLNLGALGGFGLGSVPSSSPPKSNPFGNSFTTSDNKSSGSSFTLTTSPGQLFRPASLSIPSSQPAQSSQSTSSSTFSSAFSSGLSGFGQSAQIGSAQQSGFGQPSQIGAGQQAGFGQPAQIQSGFGQPAQVGVAQQSGFGQPAQIGTAQQSGFGQPAQFGAQQALGSVLGSFGQSRQLGSFGAGGFGGFASASASGGFSSNSGFAGGATGGGFSAAAAPAGGGFAAAATGGGFAALASKGGGFAAAASSGGGFGGAAQGSGFSSVALMHAPKIVLRALAVAIVELPAPGIDTISQEHFAYLSTSDIRTWVSHQDSLTNLDEIVSNHPTTSRQTFQCWPRSGQMMYHQQQVQSDSQHLSSRPGLPPEKQFLLQGGADSSSGLVLSTDAKPRLKWTSELHERFVEAVNQLGGPDKATPKTIMRLMGIPGLTLYHLKSHLQKYRLSKNLQSQANASRAQGVLGCSTTEIDKPCEGNGSPASHLDLETQTNSSSMHINEALQMQIEVQRRLHEQLEVQRHLQLRIEAQGKYLQSVLEKAQEALGTIAVAETAATANASSSKRLQNEHTQLHHHQQQQQVGDGSVDSCLTACDCEGSHHSRSHGHRGEQDILSIGLPPFEPAAARSGKEHHYLLFPNEPSRRRSCSDERRREMSTLQASELDLSINGRSSSHSHRRENIDLNGAGWS

SEQ ID NO: 24188 - protein, 417 aa, Oryza sativa; identical to SEQ ID NO: 16753
  Clone ID: TF_OsC359_6631.pep

SEQ ID NO: 24189 - protein, 296 aa, Oryza sativa
  Clone ID: TF_OsC14903_1.pep
MSSQQQHAGEAPASAAAAARARLRWTGQLHERFVLAVAELGGADRATPKSVLRAMAVPGLTLYHLKSHLQKYRQAVSRGGNGGGGGSGSLNDRSSSSERQPADHDGDSAADEPRTIAYDGDSDGDAKEGLRDSSRSMVQMQREVQRKLQEQIEVKRHLQLRMEAQGRYLQSVLRRAQQVLADHSLASSPEAATAELSELASAVDIECMSSSSPPRHHRQSAATDSCVTTTSSSEAESKAAGSKRLHTSDCTVEQPVQGKRAFNFLQRHNQADQEEEQEEEYAGAEDGSSSEIDLNS

SEQ ID NO: 24190 - protein, 642 aa, Oryza sativa; identical to SEQ ID NO: 16751
  Clone ID: TF_OsC147013_1.pep

SEQ ID NO: 24191 - protein, 111 aa, Oryza sativa
  Clone ID: TF_rsicek_6595.y1.abd.pep
MGSGGGGCGRNGAVRQYIRSKVPRLRWTGELHCSFVQAIEFLGGQDKATPKLILQLMGVKGLTISHVKSHLQMYRCSRLVSHGTGRRSEMQPQLQRKHSCGADEQVPREFL

SEQ ID NO: 24192 - protein, 181 aa, Oryza sativa
  Clone ID: TF_LIB3434-018-P1-K1-D7.pep
VLQLMNVRGLSIGHVKSHLQMYRSKKIDESGQVIGGESWRSDDHLLVGSKPYYPPAAEAEAPFRRSSARYVARANTSNHPDFVQGSSSSPDDNIMNHQRPVLKEMICSEGSNHQEGPLNLDLSLDICPREKRKRECSWRKQEEDHDHATVAIGADQEAKSCATGLSLSWSDHVPVERCTIT

SEQ ID NO: 24193 - protein, 348 aa, Oryza sativa
  Clone ID: TF_OsC16131_1.pep
MGLDVGEIGMGLDLSLDLKMFAARSAVRMAAAAAKEATGVEACIRSLEEERRKIEMFRRELPLCARLLADVIELMKEEAGKRRKDGDDAEAKAEDGDKTKWMSTAQLWVDSRGSDADSENDRRSGSTSPASRLLGGAEESSSRAVAPPPYFRREERVVLRPAMPLLPPASHRSPPPAAAAAATAAGDDHRHVVASSFATAVPSPVPAALSLQAQAQQQQQQARKSRRCWSPELHRQFVAALQQLGGPQVATPKQIREVMKVDGLTNDEVKSHLQKYRLHNRKSPGTASASHSIVLVGDLWASQEVSCSQSGSPQGPLQLSGSGVAVSAATAGDSCCEDDDKSEGYVRK

SEQ ID NO: 24194 - protein, 130 aa, Oryza sativa
  Clone ID: TF_OsC53221_1.pep
MYHHQQQLQSHNQLLPSRQSFPSERHLLMQGGSVSGESGLVLSTDAKPRLKWTPELHERFVEAVNQLGGPEKATPKTIMRLMGVPGLTLYHLKSHLQKYRLSKNLHAQANAGNVKNALVCTTATEKPSEA

SEQ ID NO: 24195 - protein, 300 aa, Oryza sativa; identical to SEQ ID NO: 16707
  Clone ID: TF_OsC98613_1.pep

SEQ ID NO: 24196 - protein, 696 aa, Oryza sativa
  Clone ID: TF_OsC8440_1.pep
MLLGPRVMEERRGLMGRERDQFPVGMRVLAVDDDPVCLKVLETLLRRCQYHVTSTNQAITALKLLRENRDMFDLVISDVHMPDMDGFKLLELVGLEMDLPVIMLSVNGETKTVMKGITHGACDYLLKPVRIEELRNIWQHVVRRKFGNRERNNLDFSKECNKPQSADTDHGPYQPTCGSSDQNGRSSRKRKELHGEDDDEGDDNDYQENDEPSAAKKPRVVWSVELHRKFVAAVNQLGIDKAVPKRILELMNVEKLTRENVASHLQKYRLYLKRLGAVASQQASIVAAFGGRDPSFLHIGAFEGLQSYQPFAPSAALPSFNPHGLLTRTSAAAAFGLQELAAPSSTIQTSTGNVTVGHCLEENQQANLAQGLTAAIGQPQLQQNWIHQEGNGLSDVFSGSSLTNTLSSTLQRVPSSSLPPQELLECKQAKVSMPPSIRIPPSSSALLERTLGVSTNLGDSSISQQGALPIDGGFSADRLPLHSSFDGAVATKLDTSLAASQREIGQQGKFSVSMLVSPSDNLALAKNAKTGASSSGSTIILPLDTARHSDYLQFGGASNSLQKMDGQKQDHIQSSNIIWSSMPSTQLPSDTQIHNTQNQRLDSGSFNHNIGAHLADQTNASASILPQMKFDTRISEEKMKQKNTYDLGSSKLQGGFNSSGCNFDGLLNSIIKVEKDDLPFMDNELGCDLFPLGACI

SEQ ID NO: 24197 - protein, 231 aa, Oryza sativa
  Clone ID: TF_OsC263764_1.pep
WIPGLQESIGANRNKRQSRKSRDENGDDGDDSGGNSARGGDSSTQKKPRVVWSVELHRKFVAAVNQLGIEKAVPKKILDLMNVENITRENVASHLQKYRLYLKRLSTDASRQANLAAAFGGRNPAYINMNSFGNYNAYGRYRTVPTAGHTQANNILTRMNSPSAFGVHGLLHSQPIQLGHAQNNLSTSLNDLGGLNNGNMIRGAQMSTILTGPSGNSFPNISNGAPLATAN

SEQ ID NO: 24198 - protein, 153 aa, Oryza sativa
  Clone ID: TF_rsicen_8566.y1.abd.pep
MVDAAAASGDACGRVTEWETGLPAPGEMTPVSHQLVPPALAAAFGIDLAAVGVLLPSPSVDSPVSHLFFPVDEDDDEDEEGEGEGGNDDAPAAAAAGGGGGRCGKKARMVWTPELHHRFVEAVAHLGEKGAVPKAIVRLMNVDGLTRENVASH

SEQ ID NO: 24199 - protein, 467 aa, Oryza sativa; identical to SEQ ID NO: 16715
  Clone ID: TF_OsC138612_1.pep

SEQ ID NO: 24200 - protein, 88 aa, Oryza sativa
  Clone ID: TF_LIB3474-012-P1-K1-E2.pep
SGGCQISNSNFAARQRLRWTDDLHDRFVDAVTQLGGPDRATPKGILRIMGVQGLTIYHVKSHLQKYRLAKYIPDPTADGAKSDKERSR

SEQ ID NO: 24201 - protein, 350 aa, Oryza sativa; identical to SEQ ID NO: 16717
  Clone ID: TF_OsC72070_1.pep

SEQ ID NO: 24202 - protein, 194 aa, Oryza sativa
  unsure (1)..(194): unsure at all Xaa locations
  Clone ID: TF_LIB4309-004-Q1-N1-F10.pep
KSRDENGDDGFFFISPVIXNGASSPPKKPRVVWFVXLPPKFVAAVYPLGLEKAVPKKILGFLNVETLPRGNVFCLFQKDRLSLXRLGPYASRRGTLAAAFGGRNPAFINMNSFGNSPAYGXFRPVPTAGHTPANNLFFRMDPPFGFGVHGLLPSPPIPFGHAPNNLGPSLNDLGGGAFPLGKRFPLPWDLPIEA

SEQ ID NO: 24203 - protein, 377 aa, Oryza sativa
  unsure (1)..(377): unsure at all Xaa locations
  Clone ID: TF_OsC25944_1.pep
MATAAATQSQPVRVVLRVRPHLPSEANSAEAPCVGLLGSHPGGEVTVQLKDQYTSRNECYKLDAFFGQESRVCEIFDQEVSAVIPGIFEGTNATVFAYGATGSGKTYTMQGTEDLPGLMXSTVLALCTGTWCSVEISYYEVYMERCYDLLEPKAREIMVLDDKDGNLQLKGLAWVPVRSLEEFHEIYSIGVQRRKVAHTGLNDVSSRSHAVLSIRITTDVVKGKLNLITSXDLAGNEDNRRTCNEGIRLQESAKINQSLFALSNVISALNKKEPRIPYRESKLTRILQDSLGGNSHAVMIACLNPVEYQEAVHTVSLAARSRHVTNHMSSASKXKDKVDMEAKLRAWLESKGKTKSIQRMDGLLSPNAIKTPLSMSQ

SEQ ID NO: 24204 - protein, 339 aa, Oryza sativa
  Clone ID: TF_OsC747_1.pep
MSTSAAAAAAAEQQQEEGEHGPFPIEQLQASGIAALDVKKLKDSGLYTVESVAYTPRKDLLQIKGISEAKVDKIVEAASKLVPLGFTSASQLHAQRLEIIQVTTGSRELDKILDGGIETGSITEIYGEFRSGKTQLCHTLCVTCQLPLDQGGGEGKALYIDAEGTFRPQRLLQIADRFGLNGADVLENVAYARAYNTDHQSRLLLEAASMMIETRFALMIVDSATALYRTDFSGRGELSARQMHMAKFLRSLQKLADEFGVAVVITNQVVAQVDGSAMFAGPQIKPIGGNIMAHASTTRLALRKGRGEERICKVISSPCLAEAEARFQIASEGVADVKD

SEQ ID NO: 24205 - protein, 341 aa, Oryza sativa
  Clone ID: TF_OsC748_1.pep
MSSSGAAAAAAATAEEAAAGGEHGPFPIEQLQASGIAALDVKKLKDAGLCTVESVVYSPRKDLLQIKGISEAKVDKIIEGASKLVPLGFTSASQLHAQRLEIIQVTTGSRELDKILDGGIETGSITEIYGEFRSGKTQLCHTLCVTCQLPLDQGGGEGKALYIDAEGTFRPQRLLQIADRFGLNGADVLENVAYARAYNTDHQSRLLLEAASMMVETRFAIMIVDSATALYRTDFSGRGELSARQMHLAKFLRSLQKLADEFGVAVVITNQVVAQVDGAAMFGPQIKPIGGNIMAHASTTRLFLRKGRAEERICKVVSSPCLAEAEARFQISPEGVTDVKD

SEQ ID NO: 24206 - protein, 339 aa, Oryza sativa; identical to SEQ ID NO: 16762
  Clone ID: TF_OsC83381_1.pep

SEQ ID NO: 24207 - protein, 231 aa, Oryza sativa
  Clone ID: TF_OsC477_7.pep
RATTTSAASTPTTQQDQIRALKHFNVGEDYPVFDGLYSFCQSYAGGCVKLNHSHDIAINALELARTATPPPSSSPGGCRPRQAPSRRPRTSPPPTAAHCSAPHGRCPAPPRQLPPAPSSTPRRRRLPLGPLPLMPPSCPPRRRRGMAELKDGEDGAASWAGAGWRNSRTARAARRWGGGRWRRPRRGGLITRRGCHRCLVGRRSQPCHAARGRPLQPVTGVGITGGGDRGH

SEQ ID NO: 24208 - protein, 129 aa, Oryza sativa
  unsure (1)..(129): unsure at all Xaa locations
  Clone ID: TF_OsC151927_1.pep
MAAATTAAAARXVGLLYDERMCAHATPDGEEHPENPERLRAIWRKXSADGFASRCMIMKAKEAEDKYIASVHSQNHIKLMRSISSKEYDSRRNKIARKFNSIYFNKGSSESAFLAAGSGIEVTXKLLQE

SEQ ID NO: 24209 - protein, 392 aa, Oryza sativa
  unsure (1)..(392): unsure at all Xaa locations
  Clone ID: TF_OsC19780_1.pep
MESSASSSAAVAAEGAPATGEQLAVFWHEGMVAHDAGRGVFDSGRDPGFLDVLDQHPENADRVRNMVSILRRGPIARFISWHSGRPAHAAELLSFHSAEYIEELVQANAVGAKKLCEGTFLNPGSWGAALLAAGTTLSAMKHILDGHAKIAYALVRPPGHHAQPDRADGYCFLNNAGLAVKLALDSGRRKGAGVDIDVHYGNGTAEGFYHTDSVLTISLHMKHGSWGPSHPQSGSVDEIGEGXGSGYNLNIPLPNGSGDAGYEYAMNELVVPAIEKFRPELLVFVVGQDSSTFDPNGRQCLTMDGYRKIGQIMRGMADQHSNGQILIVQEGGYHISYSAYCLHATLEGVLNLQAPLLDDPIAYYPEDEKYTMKVVDIMKKCWKESIPFLKDI

SEQ ID NO: 24210 - protein, 486 aa, Oryza sativa
  unsure (1)..(486): unsure at all Xaa locations
  Clone ID: TF_OsC79201_1.pep
FTPLHSTAVAAALELVDPPGCTNSARVNVPWEHGKCGDAHYIAAWDHVLLPVAEAFNPDILLVSAGFDAALGDPLGGCCITPNGYALLLTKLLXFAQGRILMALEXGYNLRSIPNSVSACAKVLLGDKFRFDTPDMQPFESSWRVIQAVRDELKTSWPVLSNRLPDNISMRSRPSQIGLYPSGSDCXVEDLPDAIASVNIIQITYGIISESLSKLNLDEDKIATKTTSSNVMVEGPTDSVEPQNDGSAAVSTEGISSLSSTWRSELSKVYVWYASFGSNMWTPRFLCYIQGGKAEGMNIPCFGSHDTSPPRGSMWKTVPHRLFFGRSSTPCWGTGGVAFLNPEINHTENSYVCMYKITLEQFNDVLFQENRLVKENGESGKTESPDSPLIGLSEIEFVSRNKGVHLAPIKDSWYSNVLYLGEEDNLPILTMTCPSSDVERCRSGELPLCPPSKTYSATLIRGLMEGKHLDADAAASYINTAATRGL

SEQ ID NO: 24211 - protein, 623 aa, Oryza sativa; identical to SEQ ID NO: 16766
  Clone ID: TF_OsC17811_1.pep

SEQ ID NO: 24212 - protein, 99 aa, Oryza sativa
  Clone ID: TF_13447556.pep
RIAYFYDGDVGNVYFGPNHPMKPHRLCMTHHLVLSYDLHKKMEIYRPHKAYPTELAQFHSADYVEFLHRITPDTQHLYENELRRYNLGEDCPVFDNLFE

SEQ ID NO: 24213 - protein, 384 aa, Oryza sativa; identical to SEQ ID NO: 16767
  Clone ID: TF_OsC8271_1.pep

SEQ ID NO: 24214 - protein, 635 aa, Oryza sativa
  Clone ID: TF_OsC477_3.pep
MDASAGGGGNSLPTVGADGAKRRVCYFYDAEVGNYYYGQGHPMKPHRIRMTHALLAHYGLLDQMQVLKPHPARDRDLCRFHADDYVAFLRSVTPETQQDQIRALKRFNVGEDCPVFDGLYSFCQTYAGGSVGGAVKLNHGHDIAINWAGGLHHAKKCEASGFCYVNDIVLAILELLKYHQRVLYVDIDIHHGDGVEEAFYTTDRVMTVSFHKFGDYFPGTGDIRDIGHSKGKYYSLNVPLDDGIDDESYQSLFKPIMGKVMEVFRPGAVVLQCGADSLSGDRLGCFNLSIRGHAECVRFMRSFNVPLLLLGGGGYTIRNVARCWCYETGVALGHELTDKMPPNEYFEYFGPDYTLHVAPSNMENKNTRQQLDDIRSRLLDNLSKLRHAPSVQFQERPPEAELPEQDEDQEDPDERHHADSDVEMDDVKPLDDSGRRSSIQNVRVKRESAETDAADQDGNRVAAENTKGTEPAADGVARRQRRGNDGSTDLMVVLVHHQAYWSNLPNEDAMVLQDGSTNTKHVKTDLIGCIGDGCSHADVFLPSCVVLMDTNAARDCDLRLLRSDDYVASLPAVLPELWICSLCRFNVDEDCPIFHGFYIYCQTCAGDCARAIIDRYHGAQNVVINKALDGNMADK

SEQ ID NO: 24215 - protein, 528 aa, Oryza sativa
  Clone ID: TF_OsC477_4.pep
MDASAGGGGNSLPTAGADGAKRRVCYFYDAEVGNYYYGQGHPMKPHRIRMTHALLAHYGLLDQMQVLKPHPARDRDLCRFHADDYVAFLRSVTPETQQDQIRALKRFNVGEDCPVFDGLYSFCQTYAGGSVGGAVKLNHGHDIAINWAGGLHHAKKCEASGFCYVNDIVLAILELLKYHQRVLYVDIDIHHGDGVEEAFYTTDRVMTVSFHKFGDYFPGTGDIRDIGHSKGKYYSLNVPLDDGIDDESYQSLFKPIMGKVMEVFRPGAVVLQCGADSLSGDRLGCFNLSIRGHAECVRFMRSFNVPLLLLGGGGYTIRNVARCWCYETGVALGHELTDKMPPNEYFEYFGPDYTLHVAPSNMENKNTRQQLDDIRSRLLDNLSKLRHAPSVQFQERPPEAELPEQDEDQEDPDERHHADSDVEMDDVKPLDDSGRRSSIQNVRVKRESAETDAADQLLWSTCAARWDGNRVAAENTKGTEPAADGVGSSKQTVPTDASAMAIDEPGSLKVEPDNSNKLQDQPSVHQKT

SEQ ID NO: 24216 - protein, 539 aa, Oryza sativa
  Clone ID: TF_OsC477_2.pep
MDPSSAGAGGNSLASASCGDAQKRRVCYFYDPEVGNYYYGQGHPMKPHRVRMTHALLAHYGLLAPAKMQVLRPLPARGRDLCRFHSDDYVAFLRAVTPETQLGQVRALRRFNVGPDCPVFDGLYAYCQTYAGASVGAAVKLNHGTHDIAINWSGGLHHAKKSEASGFCYVNDIVLAILELLKLHERVLYIDIDIHHGDGVEEAFYTTNRVMTVSFHKFGDYFPGTGDIRDIGYSEGKYYCLNVPLDDGIDDDSYQSIFKPIISKVMEMYRPGAVVLQCGADSLSGDRLGCFNLSGKGHAECVKFMRSFNVPLLLLGGGGYTIRNVARCWCYETGVALGEELREKLPYNEYYEYFGPEYSLYVAASNMENRNTNKQLEEIKCNILDNLSKLQHAPSVQFEERIPETKLPEPDEDQDDPDERHDPDSDMLLDDHKPMGHSARSLIHNIGVKREITETETKDQHGKRLTTEHKVPEPMADDLGSSKQVPATSSYATDSCMLLVTYSEVLYDCFFCRSLQITTVSFVEEFQSVQAILDVETLV

SEQ ID NO: 24217 - protein, 456 aa, Oryza sativa; identical to SEQ ID NO: 16773
  Clone ID: TF_OsC56939_1.pep

SEQ ID NO: 24218 - protein, 493 aa, Oryza sativa
  Clone ID: TF_12698879.pep
MDASAGGGGNSLPTAGADGAKRRVCHFYDAEVGNYYCGQGHPMKPHRIRMTHALLAHYGLLDQMQVLKPHPARDRDLCRFHADDYVAFLRSVTPETQQDQIRALKRFNVGEDCPVFDGLYSFCQTYAGGSVGGAVKLNHGHDIAINWAGGLHHAKKCEASGFCYVNDIVLAILELLKYHQRVLYVDIDIHHGDGVEEAFYTTDRVMTVSFHKFGDYFPGTGDIRDIGYSEGKYYCLNVPLDDGIDDDSYQSIFKPIISKVMEMYRPGAVVLQCGADSLSGDRLGCFNLSGKGHAECVKFMRSFNVPLLLLGGGGYAIRNVARCWCYETGVALGHELTDKMPPNEYFEYFGPEYSLFVAASNMENRNTNKQLEEIKCNILDNLSKLQHAPSVQFEERIPETKLPEPDEDQEDPDERHDPDSDMVLDDHKPMGHSARSLIRNIEVKREITESEAKDQHGKRLTTEHKGPEPMADDPGSSKQAPVSRRLLYPSANP

SEQ ID NO: 24219 - protein, 166 aa, Oryza sativa; identical to SEQ ID NO: 16776
  Clone ID: TF_OsC82111_2.pep

SEQ ID NO: 24220 - protein, 413 aa, Oryza sativa
  Clone ID: TF_OsC90813_1.pep
VDPRAAGDNGTSISDTNGVRKDLALPDNLLRDAHILYCTSPAMGHNKEAHPETNKRVPAIVDALEKLELTSKHRGSQVLEIQDFQPASLDDIALVHSRSYITGLEKAMSRASDEGLIFIEGTGPTYATQTVMIYAHSLLFLFPQCFSRWKTFQECLLSAGAGITLVDSVVAASKLGPKPPLGFALVRPPGHHAVPEGPMGFCVFGNIAVAARYAQNQHGLKRVMIIDFDVHHGNGTCDAFYEDPDIFFLSTHQLGSYPGTGKIHQVGQGNGEGTTLNLPLPGGSGDYAMRCAFDEVIAPAAQRFKPDIILVSAGYDAHALDPLAGLQFTTGTFYMLAARIREVAAELCGGRCVFFLEGGYNLESLSSSVADTFRAFLGEPSLAARFDDPAMLYEEPTRKIREAIDKAKHLHSL

SEQ ID NO: 24221 - protein, 179 aa, Oryza sativa
  Clone ID: TF_OsC477_17.pep
HGEQKYKQAHPARDRDLCRFHADDYVAFLRSVTPETQQDQIRALKRFNVGEDCPVFDGLYSFCQTYAGGSVGGAVKLNHGHDIAINWAGGLHHAKKCEASGFCYVNDIVLAILELLKYHQRVLYVDIDIHHGDGVEEAFYTTDRVMTVSFHKFGDYFPGTGDIRDIGHSKGKYYSLNVP

SEQ ID NO: 24222 - protein, 189 aa, Oryza sativa
  Clone ID: TF_LIB4309-015-Q1-K1-H3.pep
MVTNRVDVFWHEGMLRHDAVEGVFDTGYDPGFLDVLEKHPENADRVRNMLSILRRGPIAPHVNWFTGLPAIVSELLMFHTSEYIEKLVEADKSGERCEIAAGTFMSPGSWEAALLAAGTTLSAMQHILDCHGKIAYALVRPPGHHSQPTQADGYCFLNNAALAVKLALNSGSCSRVAVIDIDVHYGNGT

SEQ ID NO: 24223 - protein, 352 aa, Oryza sativa; identical to SEQ ID NO: 16764
  Clone ID: TF_OsC136700_1.pep

SEQ ID NO: 24224 - protein, 161 aa, Oryza sativa
  unsure (1)..(161): unsure at all Xaa locations
  Clone ID: TF_LIB3432-035-P2-K1-D11.pep
SQVLEIQDFQPASLDDIALVHSRSYITGLEKAMSRASDEGLIFIEGTGPTYATQTTFQECLLSAGAGITLVDSVVAASKLGPKPPLGFALVRPPGHHAVPEGPMGFCVFGNNAVAARYAQNQHGLKRVMIIDFDVHHGNGTCDAFYEDPDIFXLSTHQLGS

SEQ ID NO: 24225 - protein, 353 aa, Oryza sativa; identical to SEQ ID NO: 16765
  Clone ID: TF_OsC82111_1.pep

SEQ ID NO: 24226 - protein, 78 aa, Oryza sativa
  unsure (1)..(78): unsure at all Xaa locations
  Clone ID: TF_uC-osrocyp027g06b1.pep
KRLSNCKMPDLKIARMTQSEIQSDLCYQSQAVLDLXKSXETYLVGLLEDTNLCAINDNRVPIFFQVIQLARRICGERS

SEQ ID NO: 24227 - protein, 906 aa, Oryza sativa
  Clone ID: TF_OsC1528_2133.pep
MEMETLQLRAGTGCLWVCLLLCVAPSLVDYSIPLASVHRRSGEQVSGTSAFDVLHREKAAIRFLGSASCDCSLFNRDGSPSSPLACCTPSSTLATASSSCRATGLSATSIRVNLWLTAMKCFWVSTGKPMGVLNADQQKEFDEATTLFVGCILSVLGDRLVEVYMHMTDATELWDALNTKFGATDASNDLYIMEQFHVYKMADNRSVVEQAHKIQTMAKELKLLKCVLPDKFVAGCIIAKLSPSWRGFGTALKHKRQEYFVEGLIASLDVEEKAREKDVASKGDGGQSSTNVVHKAQNKSKGKYKAQQTTNFNKKKKNNNPNQDERTCFVCGQPGHLARKCPQRKGMKAPAGQTSKSANVTIGNTGDGSGYGRTGFHRPNGEWVTCFCSWCWHGRSEVYFGKDRAAEECAAYYWKEDVRSEMDSIIANGTWEVTERPYGCKPVGCKWVFKKKLRPDASHGLLIHQMDVKTTFLNEELDEEIYMDQPDGFVVEGFAVNEADKYVYYRHGGGEGVILCLVCLLLCVASSLVDYSIPLASVHRRSGEQVSGISAFDVLHWEKAAIRFLGSASCDCSLFNRDEGDAADRASNLTDATVDSLIESIIIKDGVKAKFFFNIMSLANSAGEKLLAFSQYILPMKFLERLLVKRLGWHVGKEIFMISGDTSADDREVAMDQFNNSADAKVLFGSIKACGEGISLVGASRVIILDVHLNPSVTRQAIGRAFRPGQQKKVFVYRLVAADSPEVKFHETAFKKEVIPKLWFEWSELCTTEDFKLNQVDIDDSEDELLEANAIRQDIKALYRRVGKGLSAAAAASKRRWTLALAAKKVVGRKLGGPKKPVPRSVKAGLQFLVSRYLENGRHAQRVGTGTPVYLAAVLGVAVAAAARRREGSSSSAGTPMAVAATAARW

SEQ ID NO: 24228 - protein, 99 aa, Oryza sativa
  unsure (1)..(99): unsure at all Xaa locations
  Clone ID: TF_uC-osrocyp032h06b1.pep
MAPKADKKPTAXNPAEEEPVGENAPSAXKKPKAVKRLGGEKGKKGGARXGKKDGRKKGKKSVDTYKSYIRKEMKEDPPIIWICSKAMYIMKSLINDMLE

SEQ ID NO: 24229 - protein, 1116 aa, Oryza sativa; identical to SEQ ID NO: 16782
  Clone ID: TF_OsC1517_1666.pep

SEQ ID NO: 24230 - protein, 46 aa, Oryza sativa
  unsure (1)..(46): unsure at all Xaa locations
  Clone ID: TF_uC-osrocyp032a11b1.pep
PWHGRGKAIGXDAGKKAMSRSSKGSLQHPVGRIARFLKAGKYPERV

SEQ ID NO: 24231 - protein, 79 aa, Oryza sativa
  unsure (1)..(79): unsure at all Xaa locations
  Clone ID: TF_2310729.pep
RQFGRSRFRFPPNPPQEKAKSPPRSEEEMARTKQTXRKSTGGKAPRKXLATKAARKSXPTTXGVKKPHXYRTGTVALRR

SEQ ID NO: 24232 - protein, 101 aa, Oryza sativa
  unsure (1)..(101): unsure at all Xaa locations
  Clone ID: TF_428926.pep
KPKAEKRLPAGKGEKGGAGEGKKAGXEXGXEDLGDXXVLNFXVFXEVXHPXXGXSSXXFSXMDSXINDIFEKLAAEAAKLARYNKKPTITSREIQTSVRLV

SEQ ID NO: 24233 - protein, 105 aa, Oryza sativa
  unsure (1)..(105): unsure at all Xaa locations
  Clone ID: TF_LIB3433-030-P1-K1-H8.pep
FVDINHPGKGGMSLHKXAPRRNRKVLPDNIQGITKPDILMLTRRGCVNRICRLIYKETRGVLKILLENVIRNAGNYTKHARHKTVTDMDVDYALKRAGRTLYSFS

SEQ ID NO: 24234 - protein, 81 aa, Oryza sativa
  Clone ID: TF_LIB4834-009-R1-M1-A11.pep
MSGRGKGGKGLGKGGAKRHRRVLRDNIQGITKPAIRRLARRGGVKRISGLIYEETRRKTVTAMDVVYALKRQGRTLYGFGG

SEQ ID NO: 24235 - protein, 47 aa, Oryza sativa
  Clone ID: TF_OsC724_9.pep
MARTKQAAEAYLVGLFEDTNLCAIHAKRVTIMPKDIQLARRIRGERA

SEQ ID NO: 24236 - protein, 128 aa, Oryza sativa
  Clone ID: TF_rsicef_6944.y1.abd.pep
TRIRNTLASPPFARFVQHQHHHLPISDGAHRGRAMKPAEKKPAEEKAGEKAPAAGKKPKAEKRLPASKGEKGGEGKKERGRKKAQKSVETYKIYIFKVLKQVHPDIGISSKAMSIMNSFINDIFEKLA

SEQ ID NO: 24237 - protein, 168 aa, Oryza sativa; identical to SEQ ID NO: 16805
  Clone ID: TF_OsC408256_1.pep

SEQ ID NO: 24238 - protein, 133 aa, Oryza sativa
  Clone ID: TF_LIB4309-013-Q1-K1-B4.pep
MAPKAEKKPAAKKPAEEEPAAEKAEKAPAGKKPKAEKRLPAGKGEKGSGEGKKDRAGRKKAKKSVETYQIFLFKGLKPVHPDIGIFFKGLFIMDFFINHLFEKVGRQGRQVGRFHQKATLTFREIQNFGRLVL

SEQ ID NO: 24239 - protein, 146 aa, Oryza sativa; identical to SEQ ID NO: 16795
  Clone ID: TF_OsC106861_1.pep

SEQ ID NO: 24240 - protein, 153 aa, Oryza sativa; identical to SEQ ID NO: 16786
  Clone ID: TF_OsC631_9.pep

SEQ ID NO: 24241 - protein, 154 aa, Oryza sativa
  Clone ID: TF_OsC3753_2.pep
MEGLTSEQMVAFQEAFLLFDKNGDGCITLEELAAVTRSLGLEPTDQELNDMMREVDTDGNGIIDFQEFLSLIARKMKDGDGDEELKEAFEVLDKDQNGFISPTELRTVMTNLGEKMTDEEVEQMIREADTDGDGQVNYDEFVIMMKNAERKISG

SEQ ID NO: 24242 - protein, 107 aa, Oryza sativa
  Clone ID: TF_uC-osrocyp002h02b1.pep
VPVRDPGRRPTRAVIFRPEREREDRRPAATFLGRALTKQTGRKSTGGKAPRKQLATKAARKSAPATGGVKKPHRFRPGTVALREIRKYQKSTELLIRKLPFQRLVRE

SEQ ID NO: 24243 - protein, 136 aa, Oryza sativa; identical to SEQ ID NO: 16804
  Clone ID: TF_OsC41976_1.pep

SEQ ID NO: 24244 - protein, 115 aa, Oryza sativa
  unsure (1)..(115): unsure at all Xaa locations
  Clone ID: TF_2442299.pep
AEKSSGEGKKAGRKKAKKSVETYKIYIFKVLKQVHPDIGISSKAMSIMNSFINDIFEKLAGESAKLARYNKKPTITSREIQTSVXLVLPGELXKHXVSEGTKXLTKFTPLDSIYL

SEQ ID NO: 24245 - protein, 139 aa, Oryza sativa
  Clone ID: TF_OsC631_2.pep
MAPKAEKKPAEKKPVEEKAEKKPKAEKRVPGAKEGGGEKKGKKKAKKSVETYKIYIFKVLKQVHPDIGISSKAMSIMNSFINDIFEKLAQEAARLARYNKKPTITSREIQTSVRLVLPGELAKHAVSEGTKAVTKFTSS

SEQ ID NO: 24246 - protein, 132 aa, Oryza sativa
  unsure (1)..(132): unsure at all Xaa locations
  Clone ID: TF_LIB4371-057-QB-K6-B3.pep
THAALLTKKPRDRRRAAAAARXGRGKGGKGLGKGGAKRHRKXLRDNXQGXTKPAIRRLARRGGXKRXXGLXXEETRGXXKXXXENXXRDAXTXTEHARRKTXTAXDXXXAXKRQGRTXXGXGGARREATRGR

SEQ ID NO: 24247 - protein, 159 aa, Oryza sativa
  Clone ID: TF_LIB4371-021-R1-K1-B4.pep
SVQAKYCGRDEARGGSSPRHENADKAPARCKSQAAKRLPAVRSRLAGLMVIRRADDGKKTAIPFDLLFKVLNQVHPDIVIPSTAMCIVNSFMIDFFDMLAGESDMLARYIENPAITFREIHTSVRLVLPGELADHAVSEGTNAVTTFTSAYADCLALTG

SEQ ID NO: 24248 - protein, 159 aa, Oryza sativa
  Clone ID: TF_LIB4371-037-R1-K1-F6.pep
MKRAASMAPKAEKKPAAKKPAEEEPAAEKAEKALAGKKPKAEKRLPAGKAEKSSGEGKKAGRKKAKKSVETYKIYIFKVLKQVHPDIGISSKAMSIMNSFINDIFEKLAGESAKLARYNKKPTITSREIQTSVRLVLPGELAKHAVSEGTKAVTKFTSA

SEQ ID NO: 24249 - protein, 702 aa, Oryza sativa
  Clone ID: TF_OsC631_3.pep
MAALTEDILLQIFSRVGSIKDLFKFAVTCRRWLRRFTDPAFLRGLCLDSGEGHRARLLGFFFQQTRFYRCEKMIKMRVTQQSSVCPPTFLPAPWSPLGLTDRTLTSFLAADDDTFNYAEPLAARCGIVLMRLVPRTALMIACSHLLGVCNPITGECHVLPPLNLSGLHRYLTSYAIITSTDSDLDGKQPPSSSSSGRSTFSQLYLVVQHKKDCNEYFYSYSAATCSWSAPTMCVDGRRFSLVGERSAVVHKGAAHWLFIDRVSSATQDDILYKLTAAVDTSEISLTRLPFGAGGSPLLCVSGDGKLSVACVFPIHMRVWTQQDDTPATWLRTVIRIPLAVPYPDYSHICQPREKWFNFNRGSMLVLYRSNGVFILDLEKKVMEKVMDCLLPLFSDKLNRTAVAYEMDLVEFFVLQLSGYIWKLSLLVITVTGLTPWQKAQNLNPKKEQPTTTALQKRGPLHIFLCNVSDPHGNASQPSNRKGTGRHTFIHVIDPRDKPLHQSAPTFTHYKLTAPVSSFHTAISQHISTHRSKAKPTDPLPLPEKKRAASMAPKAEKKPAAKKPAEEEPAAEKAEKAPAGKKPKAEKRLPAGKGEKGSGEGKKAGRKKGKKSVETYKIYIFKVLKQVHPDIGISSKAMSIMNSFINDIFEKLAGESAKLARYNKKPTITSREIQTSVRLVLPGELAKHAVSEGTKAVTKFTSA

SEQ ID NO: 24250 - protein, 132 aa, Oryza sativa
  unsure (1)..(132): unsure at all Xaa locations
  Clone ID: TF_286949.pep
MARTKQTARKSTGGKAPRKQLATKAARKSAPATGGVKKPHRFRPGTVALREIRKYQKSTELLIRKLPFQRLVREIAQDFKTDLRFQSSVVGALQEAAEATSVVXFEDNNLLAIMARCVTLWPRTIQLACESG

SEQ ID NO: 24251 - protein, 112 aa, Oryza sativa
  Clone ID: TF_OsC1067_12.pep
AARKSAPTTGGVKKPHRYRPGTVALREIRKYQKSTELLIRKLPFQRLVREIAQDFKTDLRFQSHAVLALQEAAEAYLVGLFEDTNLCAIHAKRVTIMPKDIQLARRIRGERA

SEQ ID NO: 24252 - protein, 146 aa, Oryza sativa
  unsure (1)..(146): unsure at all Xaa locations
  Clone ID: TF_4878685.pep
MAPKAEKKPAXKKPAEEEPAAXKAEKALAGKKPKAEKRLPAGKAEKSSGEGKKAGRKKAKKSVETYKIYIFKVLKQVHPDIGISSKAMSIMNSFINDIFEXLAGESAKLXARYNKKPTITSREIQTSVXLVLPGXELAKHXVLRAP

SEQ ID NO: 24253 - protein, 137 aa, Oryza sativa
  unsure (1)..(137): unsure at all Xaa locations
  Clone ID: TF_OsC724_1.pep
MARTKQTARKSTGGKAPRKQLATKXAARKSAPTTGGVKKPHRYRPGTVALREIRKYQKSTELLIRKLPFQRLVREIAQDFKTDLRFQSHAVLALQEAAEAYLVGLFEDTNLCAIHAKRVTIMPKDIQLARRIRGERA

SEQ ID NO: 24254 - protein, 138 aa, Oryza sativa; identical to SEQ ID NO: 16546
  Clone ID: TF_OsC11983_1.pep

SEQ ID NO: 24255 - protein, 136 aa, Oryza sativa; identical to SEQ ID NO: 6937
  Clone ID: TF_OsC1067_10.pep

SEQ ID NO: 24256 - protein, 136 aa, Oryza sativa; identical to SEQ ID NO: 6937
  Clone ID: TF_OsC1067_3.pep

SEQ ID NO: 24257 - protein, 136 aa, Oryza sativa; identical to SEQ ID NO: 6937
  Clone ID: TF_OsC1067_4.pep

SEQ ID NO: 24258 - protein, 136 aa, Oryza sativa; identical to SEQ ID NO: 6937
  Clone ID: TF_OsC1067_7.pep

SEQ ID NO: 24259 - protein, 136 aa, Oryza sativa; identical to SEQ ID NO: 6937
  Clone ID: TF_OsC1067_8.pep

SEQ ID NO: 24260 - protein, 136 aa, Oryza sativa; identical to SEQ ID NO: 6937
  Clone ID: TF_OsC1067_9.pep

SEQ ID NO: 24261 - protein, 122 aa, Oryza sativa
  unsure (1)..(122): unsure at all Xaa locations
  Clone ID: TF_LIB3434-033-P1-K1-D2.pep
MAPKAEKKPAAKKPAEEEPAAENAEKAPAEKKPKAEKRLLVGKGEKGSDEGKKAGRKKGKTSVETYKIYILKVLKQVHLYIDVFSKVMSIMNSFINDIFEKLADEAGXLARYNMKSTMTYRE

SEQ ID NO: 24262 - protein, 276 aa, Oryza sativa; identical to SEQ ID NO: 16808
  Clone ID: TF_OsC1018_13.pep

SEQ ID NO: 24263 - protein, 223 aa, Oryza sativa
  Clone ID: TF_OsC1018_5.pep
MRGLGNRARLPEPRNFQSLPTPQNAKFSTAPARGLHSTENPAKRARSAPPPLTRGSLPDPTAGAAPPHHSRGSLPDPTAAHSPPNSIYIHPSQTNRPPHPNLATKKIPNSAVVFVAVAARMSGRGKGGKGLGKGGAKRHRKVLRDNIQGITKPAIRRLARRGGVKRISGLIYEETRGVLKIFLENVIRDAVTYTEHARRKTVTAMDVVYALKRQGRTLYGFGG

SEQ ID NO: 24264 - protein, 163 aa, Oryza sativa
  Clone ID: TF_LIB4371-007-R1-K1-B9.pep
MAPKAEKKPAAKNPAEEEPAAEKAEKAPAGKKPKAEKRLPAGKAEKGSGEGRKAGRKKANKSVETYKIYIFKELKQVHPDIGISSKAMSIMNSFINDIFEKLAGESAKLARYNKKPTITSREIQTSVRLVLPGELAKHAVSEGTKAVTKFTSAYASPLHLSMC

SEQ ID NO: 24265 - protein, 91 aa, Oryza sativa
  unsure (1)..(91): unsure at all Xaa locations
  Clone ID: TF_2311071.pep
MARTKQTARKSTGGKAXXKQLATKARAXSAXAXGVKKPHRFXPGTXXLREIRKYQKSTXLLIRKLPFQXLVRXEIAQDFKTDLRFQSSAVA

SEQ ID NO: 24266 - protein, 153 aa, Oryza sativa
  unsure (1)..(153): unsure at all Xaa locations
  Clone ID: TF_LIB4309-032-R1-K1-G12.pep
MAPKADKKPAEKKPAEEEPAADKAEKAPAAKKPKAEKRLPAGXGEKGRGEGRRAVRXMGKKSVETYKIYIFKVLKQVHPDIGMSSKAMCIMNSFINDIFEKLAGESAKLARYNKKPTITCREIQTCVRLILPGELAKHAVSQGTKADAKFTHA

SEQ ID NO: 24267 - protein, 326 aa, Oryza sativa
  Clone ID: TF_OsC1067_2.pep
PNPVFTLINRPNPITKLLMKTRSKTRKREGNQQVDHVTSSSLIPPDRFGATQRNRVEGGGLRALAADAAGELDVLGHDGDALGVDGAEVGVLEETDEVGLGGLLEGEHRVALEAEVGLEVLRDLADEALEGELADQELRALLVLADLAERHRPRPVAVGLLHAAGGRSRLPRRLGGELLPRGLAAGGLAGGLLRTGHLLFASRRRLGFLLRWIWGKSKSRATKLAWKGEQSAPEVGLDREGAARSTRRPDCQMAGRLSAGGKTVPGRKRWGFFTPPVAGADLRAAFVASCFLGALPPVDFLAVCLVRAIGDEEERLGLLLQASNAT

SEQ ID NO: 24268 - protein, 153 aa, Oryza sativa; identical to SEQ ID NO: 16809
  Clone ID: TF_OsC631_7.pep

SEQ ID NO: 24269 - protein, 136 aa, Oryza sativa; identical to SEQ ID NO: 6802
  Clone ID: TF_OsC724_3.pep

SEQ ID NO: 24270 - protein, 122 aa, Oryza sativa
  Clone ID: TF_LIB4371-038-R1-N1-A3.pep
KAPRNQLATKGGGKLAPAPGGVKKPPRFRAGPVALRGIPKSQKSPELFIRKLPFQGLVRGIAQGFKTALRFQSSPVPALQGAPEGSLVGLFGAPPLCAIPAKGVPFMPKDIQLGGRIPGGGV

SEQ ID NO: 24271 - protein, 148 aa, Oryza sativa
  unsure (1)..(148): unsure at all Xaa locations
  Clone ID: TF_8334787.pep
MAGRGKAIGSSAAKKATSRSSKAGLQFPVGRIARFLKAGKYAERVGAGAPVYLAVVLEYLTTEVLELAGNAARDNKKTRIGPRYIQVXVRNDEELRGLVGAPSIVKRVRRAEYGGAVPCASRPCLGLLARLVAPWLCIKRTMAVPPRE

SEQ ID NO: 24272 - protein, 140 aa, Oryza sativa
  unsure (1)..(140): unsure at all Xaa locations
  Clone ID: TF_3759981.pep
APKAXKKPAAKKPAEEEPAQEKAEKXXAGXKPKAXKRLPAGKGEKGSGEGKKAGRKKGKKSVETYKIYIFKVLKQVHPDIGISSKAMSIMNFFINDIXFEKLAGESAKLAXYNKXPTXTSGEIQTSVXRLVLPXELSKHA

SEQ ID NO: 24273 - protein, 106 aa, Oryza sativa
  unsure (1)..(106): unsure at all Xaa locations
  Clone ID: TF_uC-osroM202014h03b1.pep
MAPKAEKKPAAKKPAEEEPAAENAEKAPAGKKPKADKRLPAGKAXKSSGEGXKALRKKAKKSVVTYKIYIFKALMQVHPDIWIYSKAMSIMNFFMNDILEKLAGEF

SEQ ID NO: 24274 - protein, 237 aa, Oryza sativa
  Clone ID: TF_OsC1018_3.pep
MSGRGKGGKGLGKGGAKRHRKGLRDNIQGITKPAIQRLARRGGVKRISGLIYEETRGVLKILVASHPRESPPTGQQQSRGEGKKKKKKRRRRRPWRGVRTPPGATPITTTSSPIPLAFLSLSCVEPPESSSSAAMSGRGKGGKGLGKGGAKRHRKVLRDNIQGITKPAIRRLARRGGVKRISGLIYEETRGVLKIFLENVIRDAVTYTEHARRKTVTAMDVVYALKRQGRTLYGFGG

SEQ ID NO: 24275 - protein, 135 aa, Oryza sativa
  unsure (1)..(135): unsure at all Xaa locations
  Clone ID: TF_OsC20534_1.pep
KKAGSRSVKAGLQFPLGRIGRYXLKKGRYAQRIGTGAPVYLAPVLEYLPAKGLELPGNPAKGTKKNRIIPPPVLLGIRKNKELGKLLAGVTLAHGGGLPNNNPGVLPKKTAEKAPPPGKKAKSPKKAPGKSPKKA

SEQ ID NO: 24276 - protein, 494 aa, Oryza sativa
  unsure (1)..(494): unsure at all Xaa locations
  Clone ID: TF_OsC1141_1.pep
KANLLKSKKKKKKKTAKNLRPXXXKKSLSSCQMERAAADRSGAEEGESEWREELRQQQSQVDALRERLVEVKVGMKCSEEDSRKELDHLCRRVKTIATLLAYLKSKARIMAIPHLAHTSCGIRHQDGVGYVDRNGVPLADWSKGGESASCEGLDDETSADSSRVAEHGDANEGDVDVEDILKSIHVVTDVMETLVKRVIVAESEAANEKEKVRMGLEEIRRKTIQVESMSAKVEEMEKFAVGTNGMLNEMRQRVEDMVLETTRQRQRAAENEQELSRVKHDFESLRTYVGTLVNVRETLLSSEKQFETMEKLFDRLVARTNQLESEKAQKEAEVQKVVEENVRLRAMIDKKEAQLQAMSEQCKFMALSQEELQIDVAKQRMVPTAGDLRGHAAQRPTQVVDLVVVKGSRRRLHYYPAGTCTASHTPRPGKTHATPSSSASTRSDLSQSQPWRRLGFGSPPSSSPSSSPPPPSSKLPELSPRKKLLQLKLLMGLI

SEQ ID NO: 24277 - protein, 438 aa, Oryza sativa; identical to SEQ ID NO: 16816
  Clone ID: TF_OsC12950_1.pep

SEQ ID NO: 24278 - protein, 152 aa, Oryza sativa
  Clone ID: TF_jC-osflLIB3479022d02b1.pep
MLGRSRFRFTPTPPKEIAKSALISVEEMAGSKQTDRMYTGGKASRMQLATIVERKSVTTTGGVKKPHRYMPGTVALREIRKYQMSTELLIQKLRLQLLVREIAHDFKTVLLFQSHAVLVLQEAVKAYLFGLFEDTNLCVMHSKRVTIMPNDI

SEQ ID NO: 24279 - protein, 156 aa, Oryza sativa
  Clone ID: TF_OsC3999_2.pep
MDVGVGGKAAKKAVGRKLGGPKKKPVSRSVKAGLQFPVGRIGRYLKKGRYAQRVGTGAPVYLAAVLEYLAAEVLELAGNAARDNKKNRIIPRHVLLAIRNDEELGKLLAGVTIAHGGVLPNINPVLLPKKTAEKADKPAKASKDKAAKSPKKQARS

SEQ ID NO: 24280 - protein, 650 aa, Oryza sativa
  Clone ID: TF_OsC631_4.pep
MAALTEDILLQIFSRVGSIKDLFKFAVTCRRWLRRFTDPAFLRGLCLDSGEGHRARLLGFFFQQTRFYRCEKMIKMRVTQQSSVCPPTFLPAPWSPLGLTDRTLTSFLAADDDTFNYAEPLAARCGIVLMRLVPRTALMIACSHLLGVCNPITGECHVLPPLNLSGLHRYLTSYAIITSTDSDLDGKQPPSSSSSGRSTFSQLYLVVQHKKDCNEYFYSYSAATCSWSAPTMCVDGRRFSLVGERSAVVHKGAAHWLFIDRVSSATQDDILYKLTAAVDTSEISLTRLPFVLEAHRSSAIPLAVPYPDYSHICQPREKWFNFNRGSMLVLYRSNGVFILDLEKKVMEKLLSRHGKATAERPSSSEGYIWKLSLLVITVTGLTPWQKAQNLNPKKEQPTTTALQKRGPLHIFLCNVSDPHGNASQPSNRKGTGRHTFIHVIDPRDKPLHQSAPTFTHYKLTAPVSSFHTAISQHISTHRSKAKPTDPLPLPEKKRAASMAPKAEKKPAAKKPAEEEPAAEKAEKAPAGKKPKAEKRLPAGKGEKGSGEGKKAGRKKGKKSVETYKIYIFKVLKQVHPDIGISSKAMSIMNSFINDIFEKLAAEAAKLARYNKKPTITSREIQTAVRLVLPGELAKHAVSEGTKAVTKFTSS

SEQ ID NO: 24281 - protein, 133 aa, Oryza sativa
  Clone ID: TF_OsC1021_2.pep
PTRPKAPAGKKPKAEKRLPASKASSKEGGAGDKKGRKKAKKSVETYKIYIFKVLKQVHPDIGISSKAMSIMNSFINDIFEKLAQEAARLARYNKKPTITSREIQTSVRLVLPGELAKHAVSEGTKAVTKFTSN

SEQ ID NO: 24282 - protein, 99 aa, Oryza sativa
  unsure (1)..(99): unsure at all Xaa locations
  Clone ID: TF_287205.pep
MARTXQTARKSTGGKXPRKQLATKAARKSAPATXGVKKPHRFRPGTVALREIRKYQKSTELLIRKLXFQRLVREXAXDFKTDXXFQSSAXXXLQEAAEA

SEQ ID NO: 24283 - protein, 136 aa, Oryza sativa
  Clone ID: TF_uC-osrocyp016d02b1.pep
MARTKQTARKSTGGKAPRKQLATKAARKSAPTTGGVKKPHRYRPGTVALREIRKYQKSTELLIRKLPFQRLVREIAQDFKTDLRFQSHAVLALQEALEAYLVGLFEDTYLCAIHAKRVTIMPQDIQLARRIRGERA

SEQ ID NO: 24284 - protein, 155 aa, Oryza sativa; identical to SEQ ID NO: 16791
  Clone ID: TF_OsC631_5.pep

SEQ ID NO: 24285 - protein, 153 aa, Oryza sativa
  unsure (1)..(153): unsure at all Xaa locations
  Clone ID: TF_LIB4831-018-R1-N1-F7.pep
MAPKAEKKPAAKKPAEEEPAAEKAEKAPAGKRPKAEKRLPAGKAEKGSGEGKKAGRKKAKKSVETYKIYIFKVLKQVHPDIGISSKAMSIMNSFINDIFEKLAGESAKLARYNKKPTITSREIQTSVRLVLPXELAKHAVSEGTKAVTQFTSV

SEQ ID NO: 24286 - protein, 135 aa, Oryza sativa
  unsure (1)..(135): unsure at all Xaa locations
  Clone ID: TF_23513677.pep
MTGGGKSGGKASSGKNAXSRSSKAGLAFPVGRVHRLLRKGNYAQRVGAGAPVYLAAVLEYLAAEILELAGNAARDNKKTRIIPRHLQLAIRNDEELNKLLGHVTIAQGGVLPNIHQNLLPKKTGGKGGKNASQEL

SEQ ID NO: 24287 - protein, 171 aa, Oryza sativa
  unsure (1)..(171): unsure at all Xaa locations
  Clone ID: TF_rsiceg_9458.y1.abd.pep
GLQEFGRGHSKRTTTVSLPEKKRAASVGPKAEKKPAAKKPAEEEPAAEKAEKAPAGXRSPRLEKRLPAVQGREGLRXRGEKDRAGRKKAKKSVETYKIYIFKVLKQVHPDIGISSKAMSIMNSFINDIFEKLAAEAAKLARYNKKPTITSREIQTSVRLVLPGELAKHAVS

SEQ ID NO: 24288 - protein, 126 aa, Oryza sativa
  unsure (1)..(126): unsure at all Xaa locations
  Clone ID: TF_8954983.pep
IRPEPRGRTKRRTSPRRQRKRHGEGXKRGGXKRKTLQTYXIYIFKVLKQVHPDXGISSKAMSIMNSFINDIFXKLAGXSAKLARYNKKPTITSREIXTSVRLVLPGELAKHAVSXGTXAVPKFTSA

SEQ ID NO: 24289 - protein, 154 aa, Oryza sativa
  Clone ID: TF_OsC631_6.pep
MAPKAEKEPAAKKPAEEEPAAEKAQKAPAGKKPKAEKRLPAGKGEKGGAGEGKKAGRKKGKKSVETYKIYIFKVLKQVHPDIGISSKAMSIMNSFINDIFEKLAAEAAKLARYNKKPTITSREIQTSVRLVLPGELAKHAVSEGTKAVTKFTSA

SEQ ID NO: 24290 - protein, 152 aa, Oryza sativa
  Clone ID: TF_OsC631_8.pep
MAPKAEKKPAAKKPAEEEPAAEKAPAAGKKPKAEKRLPAGKGEKGGAGEGKKAGRKKGKKSVETYKIYIFKVLKQVHPDIGISSKAMSIMNSFINDIFEKLAAEAAKLARYNKKPTITSREIQTSVRLVLPGELAKHAVSEGTKAVTKFTSA

SEQ ID NO: 24291 - protein, 59 aa, Oryza sativa
  Clone ID: TF_LIB3432-001-P1-K1-F5.pep
MAETMQTGRLSTGLMAPRKQLATKVASKTVPTIEGVTKPNRYRPGTVLLLEIRKLHKST

SEQ ID NO: 24292 - protein, 155 aa, Oryza sativa
  unsure (1)..(155): unsure at all Xaa locations
  Clone ID: TF_OsC631_1.pep
MAPKAEKKPAEKKPAEEKAGEKAXRAGKKPKAEKRXLPASKGEKGGEGKKERGRKKAXKKSVETYQDIHPSKVLKQVHPDIGISSKAMSIMNSFINDIFEKLAGEXAAKLARYNKKPTITSREIXQTSVRLVLPGELAKHAVSEGTKAVTKLTSS

SEQ ID NO: 24293 - protein, 71 aa, Oryza sativa
  Clone ID: TF_OsC631_11.pep
ISSKAMSIMNSFINDIFEKLAGESAKLARYNKKPTITSREIQTSVRLVLPGELAKHAVSEGTKSVTKFTSA

SEQ ID NO: 24294 - protein, 127 aa, Oryza sativa
  unsure (1)..(127): unsure at all Xaa locations
  Clone ID: TF_uC-osflM202054d03b1.pep
MARTKQTARKSTCGKVPRKLLATKAAWKSAPTTGWCXKSHRYRPGSVVLRXSACTQKSTELLIRKLPFERLVREIAQDCKTDLRFQSHAVLRLHEGRLAYLVGLLEDTNLCAMHAKRVIIMPKDMQL

SEQ ID NO: 24295 - protein, 117 aa, Oryza sativa
  unsure (1)..(117): unsure at all Xaa locations
  Clone ID: TF_OsC1021_1.pep
MVSGEEGGGGDKKGRKXAKNSVETYKICIFEVLRQVHPHIGISCKAMSIMNSFINDIFEKLAQEAARLHRYNKKPNVTPRENQTSVRLVLRGGLAKHAVSEGTKAVTKFTEQEGLSL

SEQ ID NO: 24296 - protein, 105 aa, Oryza sativa
  Clone ID: TF_LIB4833-031-R1-N1-C8.pep
RDCSPCTPVWSLSISISPKSTARAKSPPRSEGEMARTKQTARKSTGGKAPRKQLATKAARKSAPTTGGVKKPHRYRPGTVALREIRKYQKSTELLIRKLPFQRLV

SEQ ID NO: 24297 - protein, 90 aa, Oryza sativa
  Clone ID: TF_LIB3431-006-P1-K1-G6.pep
VLDNGGSNRHRKVLLDNIQGITKPAIRRLARRGGVKRIFALIYEETRGVLKIFLENVIRDAVTYTEHARRKIVTAMDVAYSFNARPYSLR

SEQ ID NO: 24298 - protein, 126 aa, Oryza sativa
  unsure (1)..(126): unsure at all Xaa locations
  Clone ID: TF_2442431.pep
LPXELLERFRLXKEFMMDMALEXDADXXVDLLEHLEDVDLVGLNALLRLLPPRLLPLAAALLGLAGXXTLLRLGLLPRQGLLGLXRRGLLLRGLXCRRLLLRLGRHGCRSLLLGEGKGETKXXXHV

SEQ ID NO: 24299 - protein, 257 aa, Oryza sativa
  Clone ID: TF_OsC1067_5.pep
KSKEITRRRRLAFSAAPSSPLLLLADPHEADGVQVRDSRKQLATKATCKSAPATGGVKKPHRFRPGTVALREIRKYQKSTELLIRKLPFQRLVREIAQDFKTDLRFQSSAVAALQEAAEAYLVGLFEDTNLCAIHAKRVTIMPKDAARKSAPATGGVKKPHRFRPGTVALREIRKYQKSTELLIRKLPFQRLVREIAQDFKTDLRFQSSAVAALQEAAEAYLVGLFEDTNLCAIHAKRVTIMPKDIQLARRIRGERA

SEQ ID NO: 24300 - protein, 136 aa, Oryza sativa
  unsure (1)..(136): unsure at all Xaa locations
  Clone ID: TF_jC-osflLIB3477P002f05a1.pep
MARTKQTARLPTXGKAPRKQLATKAARKSAPATGGVKKPHRFRPGTVALREIRKYQKSTELLIRKLPFQRLVREIAQDFKTDLRFQSSAVSALQEAAEAYLVGLFEDTNLCAIHAKRVTIMPKDIQLARRIRGERA

SEQ ID NO: 24301 - protein, 312 aa, Oryza sativa; identical to SEQ ID NO: 16895
  Clone ID: TF_OsC200302_1.pep

SEQ ID NO: 24302 - protein, 202 aa, Oryza sativa
  unsure (1)..(202): unsure at all Xaa locations
  Clone ID: TF_OsC149298_2.pep
RRRGQGADVESSRGFRHMMRERQRREKLSQSYADLYAMVSSRSKGDKNSIVQSAAIYIHELKVARDQLQRRNEELKAQIMGHDEQQPCVTVQFEVDEPSSSIDSMIAALRRLKGMSVKARGIRSSMSGNRLWTEMNVETXQIAACEVEKAVEEALKEVERNQPDSDAPFPFFCPCRYNHTNNSFLSFPLPTSTLALPFSLSH

SEQ ID NO: 24303 - protein, 313 aa, Oryza sativa; identical to SEQ ID NO: 16822
  Clone ID: TF_OsC359_6144.pep

SEQ ID NO: 24304 - protein, 383 aa, Oryza sativa; identical to SEQ ID NO: 16823
  Clone ID: TF_OsC281849_1.pep

SEQ ID NO: 24305 - protein, 85 aa, Oryza sativa
  Clone ID: TF_OsC133207_2.pep
SVRQDALTAILQPHFYQSETKLNASAIFSIIQTSMIYLLTCTWSCSCFRYSMASSSMDALSVCNPQNQHTNTDKFPAQTQQNPSS

SEQ ID NO: 24306 - protein, 412 aa, Oryza sativa
  Clone ID: TF_OsC56584_1.pep
GSEKEMNEKDATDLEERSEASEHGQALSFHGGAMFLQEAQIASPAAANNALTSMANPFPIPPGLWNSTFTQHGSAGAPPPFVATPGFVDSTAGFPCYNGGNLGAMINHPFPGIHQPLGDFQNGVEPCREIEDIEIEGSKNVSQTGEKQQGDGETTHAVDSSSKELSMPGRNGGAGHDEGTRVSCSKKRKRSGQDGGVKHAEGGEQLATVGSAQKNEDDEKGEPKRSSVASGKSSGKQIKDNAGSPKEDYIHVRREKISERMKYLQDLVPGCSKVTGKAVMLDEIINYVQSLQRQVEFLSMKLASVNPTLDFNIERILSKDIFQCRGTTASSAFGFFPDIVHPRLHPPKYTQVGMPSIVNPTDAFGRVIHAPLGTNSAFKEPKHQMPNNLNGEFQDVIEMPFTHDHHGSNDQP

SEQ ID NO: 24307 - protein, 167 aa, Oryza sativa
  Clone ID: TF_OsC260146_1.pep
LSQRFIALSKIVPGLKKMDKASVLGDAIKYVKQLQDQVKGLEEEARRRPVEAAVLVKKSQLSADDDDGSSCDENFDGGEATAGLPEIEARVSERTVLVKIHCENRKGALITALSEVETIGLTIMNTNVLPFTSSSLDITIMATAGENFSLSVKDIVKKLNQAFKLSL

SEQ ID NO: 24308 - protein, 330 aa, Oryza sativa; identical to SEQ ID NO: 16827
  Clone ID: TF_OsC3973_1.pep

SEQ ID NO: 24309 - protein, 88 aa, Oryza sativa
  Clone ID: TF_OsC19797_1.pep
MSSRRSSRGSISEEEINELISKLQSLLPNSRRRGSSQASTTKLLKETCNYIKSLHREVDDLSDRLSDLMATMDHNSPGAEIIRSILRS

SEQ ID NO: 24310 - protein, 317 aa, Oryza sativa; identical to SEQ ID NO: 16829
  Clone ID: TF_OsC76770_1.pep

SEQ ID NO: 24311 - protein, 323 aa, Oryza sativa; identical to SEQ ID NO: 16831
  Clone ID: TF_OsC43374_1.pep

SEQ ID NO: 24312 - protein, 368 aa, Oryza sativa
  unsure (1)..(368): unsure at all Xaa locations
  Clone ID: TF_OsC43754_1.pep
MVPRDRVNAAAAGGGGEGRLVQSGIVNKKCDKKAPKRIHKSEREKLKRDKQNDLFNELGNLLEPDRQNNGKACVLGETTRILKDLLSQVESLRKENSSLKNESHYVALERNELHDDNSMLRTEILELQNELRTRMEGNPVWSHVNTRPALRVPYPTTGVFPVQHLPHLPVTTTAAFPQQLPVIIEQHYAATPRELQLFPESATSEDSEPSQEHGISDHVTRPQPSKDAWQNRSRDAPTVAARESSLNRKIGYKVTLFVLTVFSEMGKSLYSVLXKTIVFKNGMAKSIHHARVLIRQHHIRVGRQLVNIPSFIVRLESEKHIAFSLTSPLGGSPAVRVKRKNQKASGGGGDGEEEEEKELGHRNLSNMI

SEQ ID NO: 24313 - protein, 327 aa, Oryza sativa
  Clone ID: TF_OsC149298_1.pep
MESYYGAFHADEAAFFFPHHVPASPELPFGLIASPEPEPEPEQAAAEARQSAFQEYGGAVHAGAPAAAGAVTTGGTNIHRRVMDVLGRMGGGGGGGEKGEGEEMEEEEEVPQRRRRGQGADVESSRGFRHMMRERQRREKLSQSYADLYAMVSSRSKLQNVRNPPLIPLKWSVYYTGADTKPFSPLQGDKNSIVQSAAIYIHELKVARDQLQRRNEELKAQIMGHDEQQPCVTVQFEVDEPSSSIDSMIAALRRLKGMSVKARGIRSSMSGNRLWTEMNVETTIAACEVEKAVEEALKEVERNQPDSDAPFPGSKGWTQTSHVQNVF

SEQ ID NO: 24314 - protein, 254 aa, Oryza sativa
  Clone ID: TF_OsC51580_1.pep
MQGDHGYYGGRDSPPQGYGYGGGYGYGGGYGYDAGGYYSGGGGGYPSAGAAAAAYEDPMVGRRTHDFPAPMNELEFQPSATCPKNYVIFDQTCTKSRVMFHPSLAHKFGGGSSAYDNNVYGGGGAHDAAKGAYRDSVGYDDDDSCSVRQKEDTDEIDALLSSEDGDEDDVVSTGRTPGYRDGSSPDSTCSSSYGGGQARPGRKKERMKKMVRTLKGIIPGGNQMDTPAVLDEAVRYLKSLKVEVKKLGVRGSDN

SEQ ID NO: 24315 - protein, 466 aa, Oryza sativa
  Clone ID: TF_OsC21243_1.pep
MIVGAGYFEDSHDQSLMAGSLIHDSNQAPASSENTSIDLQKFKVHPYSTEALSNTANLAEAARAINHLQHQLEIDLEQEVPPVETANWDPAICTIPDHIINHQFSEDPQNILVEQQIQQYDSALYPNGVYTPAPDLLNLMQCTMAPAFPATTSVFGDTTLNGTNYLDLNGELTGVAAVPDSGSGLMFASDSALQLGYHGTQSHLIKDICHSLPQNYGLFPSEDERDVIIGVGSGDLFQEIDDRQFDSVLECRRGKGEFGKGKGKANFATERERREQLNVKFRTLRMLFPNPTKFISMMASIVGDAIEYIDELNRTVKELKILVEQKRHGNNRRKVLKLDQEAAADGESSSMRPVRDDQDNQLHGAIRSSWVQRRSKECHVDVRIVDDEVNIKLTEKKKANSLLHAAKVLDEFQLELIHVVGGIIGDHHIFMFNTKVSEGSAVYACAVAKKLLQAVDVQHQALDIFN

SEQ ID NO: 24316 - protein, 100 aa, Oryza sativa; identical to SEQ ID NO: 16845
  Clone ID: TF_OsC341353_1.pep

SEQ ID NO: 24317 - protein, 450 aa, Oryza sativa
  Clone ID: TF_OsC99421_1.pep
MQLFQGEEPAHDFLSLRAGGGSTSSPPFQHREEQHSSHSSRGYGMEIRRSLRPLDLAKQRGRSSGNGTAAGSAVDGASPAGSDSEEHVLPGGVGTFSIRHASGTPSREEAGSHGGVRRSAFAFAPALHGARMENAHETGGRSGSRAHRAPSTMWQDSAIDQRSIGQTPYEAFNSKTISYKYMVQEMCSKMQFFMLSFRLEILRELLPHTDQKRDKASFLSEVIEYIRFLQEKVQKYEEADPERNHEDSKSMPWAKVYYRSCWRNTKNTSQVQGEDLSPSTQDMNNEQYGPKHISAAQPALFNTQSVTSTTTSSSHMATGTPQNLEKNSTPSNQPPWLSMSTMRQESEPGNKMPNKHEKQTLHDENHSISSAYSQGLFNRLTEALKKSGLDPSQANIAVEINLAKRARDNTSDNSKIVCLIIILYLCPDFTSQINEDEEPIQITKRRCNKS

SEQ ID NO: 24318 - protein, 484 aa, Oryza sativa; identical to SEQ ID NO: 16891
  Clone ID: TF_OsC194068_1.pep

SEQ ID NO: 24319 - protein, 256 aa, Oryza sativa
  unsure (1)..(256): unsure at all Xaa locations
  Clone ID: TF_OsC255497_1.pep
MEEHDHQYATPPSPSSSSFRSFSAGTTTTTTSRDDNSSLMLAAAAASCHHQTTEVSSQILLPRPXKQHGGAAAAMAPPPPPPRSGRTPGTXGPKKHLLRRPGAATTATGGGGGQRAFKKAISVLSKIHAARLAQYYQIMEMAARASPAATAGGGGGENQQLQLQHVLSERKRREKLNDSFKALRDVLPPATKKDKASVLMRAKDYVNVLKARIAELEEKNRKLSESQQLQAADPISVCTPTTASTFSLSLPSAAEE

SEQ ID NO: 24320 - protein, 237 aa, Oryza sativa
  unsure (1)..(237): unsure at all Xaa locations
  Clone ID: TF_OsC217180_1.pep
RQPPRLPFWTAGEIDGDGRGVLGGGGEEXGSPAVRSHSEAERKRRQRINAHLATLRTLVPSASRMDKAALLGEVVRHVRELRCRADDATEGADVVVPGEGDEVGVEDEDDDEGERDEGCYVVGGGDRRWRRRVRAWVCCADRPGLMSDLGRAVRSVSARPVRAEVATVGGRTRSVLELDVVVASDAADNDRAVALSALRAALRTVLLNREELLAAAAAAATDGYKRPRFSPRCSSLT

SEQ ID NO: 24321 - protein, 345 aa, Oryza sativa
  Clone ID: TF_OsC2385_1.pep
MGLHGNQRRHDFLSPYDAAATATDYSPLPRHPDSKPSAPAPPPAQDFFLKTHDFLPQVEKRADQTPPPPPPPPPHAAVTAEKQLLHQHALAAAGAFTINHAVAAAATAVKQEPPFAPWCQPVAAVDPRGHQWSLPFAARAVAVASSRPQQQQQQPPPPERKGGGGFMDAGSRSSGGAGFDDDDGHAARREVSSSLKELTVRVEGKGGSCSGSAGTDQMPNTPRSKHSATEQRRRSKINDRFQLLRDLLPHNDQKRDKASFLLEVIEYIRFLQEKVQKYEVSYPEWNQENAKVVPWTNIYFRSSWKNAQNKGQVPADHSPDPPSPFKELSDPASNSQAMGRQLRVG

SEQ ID NO: 24322 - protein, 654 aa, Oryza sativa
  unsure (1)..(654): unsure at all Xaa locations
  Clone ID: TF_OsC252614_1.pep
MPGSREMSIISGGMWSDGNDFAELLWENGQAVVHGRKKHPQPAFPPFGFFGGTGGGGGGSSIRAQERQPCGIDASAKAGGGCSAEVIAPSVHGCGAGFGATMRDNGDLDTVRRIHYPTFVDEDAVAPPAPAVSDEHIISMGTGQCVPAVVVATAMQPXQASPPAHFPHGAIGFGYGMGVIAMSRNPALQMPPVPGAPTTRAEPQPQPQLAAGKLGTSTMPMFGVPVQTIPSSASSVPPFASLAGLPVRPSGVPQVSGAMANMSARPATGVSESTAAMSEQGSYTGSKSRXFTNADHHAGAYTEFAHMVPGVNQNHXMFSDWPGRAKPVHKTEARKAPEATVATSSVCSGNGAGSDELWRQQKRKCQAQAECSASQDDDLDDEPGVLRKSGTRSTKRSRTAEVHNLSERRRRDRINEKMRALQELIPNCNKACYVLQIDKASMLDEAIEYLKTLQLQVQMMSMGTGLCIPPMLLPTAMQHLQIPPMAHFPHLGMGLGYGMGVFDMSNTGALQMPPMPGAHFPCPMIPGASPQGLGIPGTSTMPMFGVPGQTIPSSASSVPPFASLAGLPVRPSGVPQVSGAMANMVQDQQQGIANQQQQCLNKEAIQGANPGDSQMQIIMQNVPVLKRSMAEEFHMVEDATRLQAVILDFQCSFL

SEQ ID NO: 24323 - protein, 475 aa, Oryza sativa; identical to SEQ ID NO: 16902
  Clone ID: TF_OsC101165_1.pep

SEQ ID NO: 24324 - protein, 320 aa, Oryza sativa
  unsure (1)..(320): unsure at all Xaa locations
  Clone ID: TF_OsC51267_1.pep
MMDGRMGLDRCESEVGVRCPRLIRSDAGGDLAALGSSESEQPTRPARPRGKRSRAAEVHNLSEKRRRSRINEKMKALQSLIPNSSKTDKASMLDDAIEYLKQLQLQVQMLSMRNGLYLPPVNLSGAPEHLPIPQMSAALDQNSAKASDPSVVLQPVNQTSGALLPFELASQHKPLFLPGVPNATALEPRFLVESSRSNLQSLRFTEPAEMIYPDEMMLKHRLTSASESTIVPGTDEKSVRQNTYMMNADRFDRYALSKDQLQHIMPKNTESVLDMPHLQRIXAEDSVSSVGQLTIQLPLLDRLQTSDTKVRVEGRIKVNP

SEQ ID NO: 24325 - protein, 253 aa, Oryza sativa; identical to SEQ ID NO: 16901
  Clone ID: TF_OsC21348_1.pep

SEQ ID NO: 24326 - protein, 121 aa, Oryza sativa
  Clone ID: TF_1086541.pep
MSERRRREKLNEMFLILKSLVPSIDKVDKASILAEPIPYLKDLERRFQELESGKKMSSPPKRNPCSETIIGGAARAGPGAVKGHHHWVLSESQEGTPSDVRVIIMDKDELHLEVHCRWKEL

SEQ ID NO: 24327 - protein, 365 aa, Oryza sativa; identical to SEQ ID NO: 16903
  Clone ID: TF_OsC308912_1.pep

SEQ ID NO: 24328 - protein, 236 aa, Oryza sativa; identical to SEQ ID NO: 16909
  Clone ID: TF_OsC6539_1.pep

SEQ ID NO: 24329 - protein, 447 aa, Oryza sativa; identical to SEQ ID NO: 16910
  Clone ID: TF_OsC348863_1.pep

SEQ ID NO: 24330 - protein, 473 aa, Oryza sativa; identical to SEQ ID NO: 16914
  Clone ID: TF_OsC359_7148.pep

SEQ ID NO: 24331 - protein, 567 aa, Oryza sativa; identical to SEQ ID NO: 16913
  Clone ID: TF_OsC2018_9.pep

SEQ ID NO: 24332 - protein, 348 aa, Oryza sativa; identical to SEQ ID NO: 16918
  Clone ID: TF_OsC91_2671.pep

SEQ ID NO: 24333 - protein, 483 aa, Oryza sativa
  unsure (1)..(483): unsure at all Xaa locations
  Clone ID: TF_OsC38156_1.pep
MNCGPPDQLPPATAPSCFLNLNWDQSMDAAAGGHLDPALSSMVSSPASNSTGALHGISPQPHYGGGTPLSSPPKLNLSMMGQFHHYAAPPQVGGGGGGGGGLPILENLMPMGHLDQFLADPGFAERAARLSGFDARGGGGGGGYGGAGPAQFGLPDAGAAGASKEMELGNTRDESSVSDPAPGGAEIPPKGASDGNARKRKASGKGKGKDSPMSTSAAKEDSSGKRCKSTEESNAAAEENSGKGKAAQSNSENGGGKKQGKDSSSKPPEPPKDYIHVRARRGEATDSHSLAERVRREKISQRMKLLQDLVPGCNKVVGKAVMLDEIINYVQSLQRQVEFLSMKLATVNPQLDFNNLPNLLAKDMHQSCSPLQSSHFPLETSGAPLPYINQPQQGNPLGCGLTNGMDNQGSMHPLDPAFCRPMGSHHPFLNGVSDAASXRLVLSGKMISKVLFRWIWGKVRRSPPLPIATMXVANSPHENGALT

SEQ ID NO: 24334 - protein, 323 aa, Oryza sativa; identical to SEQ ID NO: 16922
  Clone ID: TF_OsC156944_1.pep

SEQ ID NO: 24335 - protein, 410 aa, Oryza sativa
  Clone ID: TF_OsC7742_1.pep
MRWHWVIASTCARTTAASGAVEGFWDQRPYPVSSPPAAPTPAASGGGGGHAKAAARRRRRRPKVVKNKEEAESQRRNHIAVERNRRRQMNEYLAVLRSLMPPSYAQRGDQASIVAGAINFVKELEQLLQSLEAQKRRAEHAPPAPPFAGFFTFPQYSTTVGDNNAAGSGAADGEGGCGARPGAADIEVAMAESHANVRVLAPRRPRQLLRMVVALQCLGLTVLHLNVTTTADHLALYSFSLKMEDECRLSSVDEIAGAVNQMMSESEDEKSLSDEITDTSHLPWDPFWTRKCKYPSGGRSDNGWQRTEGWRAVGGASAGRRRGAAGGSEASAGRWVEQWGGRWKWSVGGAVGRATAGTRGGGRSERSGARRREIGETAGGREEHRAVGLPSSPSVIRGEEMGWKRGRSEQ

SEQ ID NO: 24336 - protein, 331 aa, Oryza sativa
  Clone ID: TF_OsC64413_1.pep
MAICSTDNELVELLWHNGGVVAQPQAAQARVVSSSGRGQSASVLTGDDTETAAWFPDTLDDALEKDLYTQLWRSVTGDAFPAAAAAGPSSHHAPPPDLPPPAARPPMRSGIGSSWTGDICSAFCGSNHIPETAAQRCRDAGAALPPERPRRSSTHDGAGTSSSGGSGSNFGASGLPSESASAHKRKGREDSDSRSEDAECEATEETKSSSRRYGSKRRTRAAEVHNLSERRRRDRINEKMRALQELIPHCNKTDMASILDEAIEYLKSPQMYIQIMWTTTRMEPVMVPCAHLFKPPIPLRRNLACMPAPLLRTICFWASSSTAKPDTESVS

SEQ ID NO: 24337 - protein, 267 aa, Oryza sativa; identical to SEQ ID NO: 16926
  Clone ID: TF_OsC547_362.pep

SEQ ID NO: 24338 - protein, 405 aa, Oryza sativa
  Clone ID: TF_OsC71941_1.pep
MDGGRVGGDYISSLLSSSPRLDFGVPVLDAIVAPGGGGGGGDCGLDKLCGDPGFAERAARLSSFNNGGGGVGQRYGGAGAGLFGMPPPAPGDFAGGGSREASSVSDPASSAMKDAAANAKNRKSTAAAAAAAKGKGKEPPVGEEKESDGKRCKTGNGEKESSVKPKAEQAGSDSSVEDGGGGGQKQGKGKNAKPVEPPKDYVHVRARRGQATDSHSLAERVRRERISQRMKVLQDLVPGCNKVIGKALMLDEIINYVQSLQRQVEFLSMKLATVNPLDFSNLPTLLQKDMFQACGPSASSVFSLESSNSAFRFAEQGDVFQQFAQNSMESQCTLNQLDLALSQATNAAQYAFQDGTAGANLQQRNFWEDDLQSVFHIENGQSQENGVSAPNFHGWQQAGHMKMEF

SEQ ID NO: 24339 - protein, 324 aa, Oryza sativa; identical to SEQ ID NO: 16930
  Clone ID: TF_OsC52485_2.pep

SEQ ID NO: 24340 - protein, 90 aa, Oryza sativa
  Clone ID: TF_rsicef_8683.y1.abd.pep
LPTATATTNASPKRSKVAAGAGDDGDADADAAEEKPEPAKDYIHVRARRGQATDSHSLAERVRRERISERMKLLQSLVPGCNKITGKALM

SEQ ID NO: 24341 - protein, 463 aa, Oryza sativa; identical to SEQ ID NO: 16938
  Clone ID: TF_OsC50284_1.pep

SEQ ID NO: 24342 - protein, 891 aa, Oryza sativa
  Clone ID: TF_OsC366116_1.pep
MVSKRCSASTGNRIGRYRIKRRYILVLSSCQARVKNSKLLPYKDGVQNTAIVSINWADLVRSHQLGRYDTSSAYRSIGYRVLTSFYYLSLLVAESNQLSHEHTRTHERRLVLKYKSARRQGLTCRARVYSSSTHQPLGDNTSIIVPRDATYISKSTRDTLHPCARNDRSSCCAAGALRVCRTRSYYVVKHGSSARRDAWELAPRHACTAMENDDDVEHPFYYFVHDDAAAGVDDHEELLASLGFLLPPPPPPPPPPQPDQGRSAFAAYQSTAAMASSSSSSESLSRRYHSSASNVHRRMHRFLRSIYDDAGDDAGATAEMQPAEGEQQQAAPSGGSARFRHIMRERLRRERLSQGYADLQAILPTGASSSKVLVKSLIRNYMSGGKNTIVAAAANYIRELEGRKGWLCAQNELLERTTPKPGAGMVVKVRAESELGSTVDVFEAVLRRLKAMDELQVTAIQSWFGAGGMWMDVAVESKRRAACTYAPPRWKLLRETRRVKRGRSSRIVKLIFLQLSVASTSANDSPIASRHAICTTEYSAFQLDRPPTSRPRHGHAPCSHRPSHARGHGRKIKGSQRFGAFLRGVRACSRLAGGARHVDAHVRTYVYARRYTVGSSNGPTDTCHVRADGAAVDRVRPIAAVSSSCPMHTARGVTPAGESGEGGGQGRDAARRRTHARTPGEQWTAGRHVISHMSPDIRAVVDRETQLLVCFRRRAVRYVLYRNEHDCSIVAGRQDDDGKRQRRDDNVCRGVVGRAGMQSGGGEYVRSSGGPSSPHRRGDAMDELDCGEHQLNGTTSVEIHLEDGPRVCACTALASALRLPALHPLPLHPAQVPIEVGGVEGGDGGKVEAGAVEDVTKEVKGEEEHEEVANGDKESVVDPFLDVEVGGDYRY

SEQ ID NO: 24343 - protein, 243 aa, Oryza sativa
  Clone ID: TF_OsC43939_1.pep
MSCGGAGQSGWLLEYGLVEEEIQGSDFIYMVDDPAAVSSVLLGFDVPRKEDGSGGQDNSASKKRSRPESSAPPGTKACREKLRRDRLNERFNELSAILEPGKPPRADKVSILSDAARLLSQLRAEAQKLKSSNESLQDSIKSLKAEKSELRDEKTRLKAERERLEQMLKGVGAATPAAPAPFVPHHAAAVAAAPAYHPAAFAQAGGKYVPYATSYAPPAAFWQWIPPTSLDTSKDPVMWPPVA

SEQ ID NO: 24344 - protein, 303 aa, Oryza sativa; identical to SEQ ID NO: 16931
  Clone ID: TF_OsC83673_1.pep

SEQ ID NO: 24345 - protein, 149 aa, Oryza sativa
  Clone ID: TF_OsC798_1.pep
MSSGWEESSLMSDTNISGVKRQRDSSEPSQNGGGGGGLAHQFSLPKTSSEMAAIEKFLQFQDAVPCKIRAKRGCATHPRSIAERVRRTRISERIRKLQELVPNMDKQTNTADMLDLAVDYIKDLQKQVKGLNDSRANCTCSAKHQQYSG

SEQ ID NO: 24346 - protein, 161 aa, Oryza sativa
  Clone ID: TF_rsicee_12437.y1.abd.pep
MAACQQQIWQEGKQQQHLHHGGYDDLSSVYRGTVVLPRRQGGLAREPPPPRPSSSSGRSAAAQATAMRIHSEAERRRRERINAHLATLRRILPDAKQMDKATLLASVVNQVKHLKTRATEATTPSTAATIPPEANEVTVQCYAGGEHTAAARTYVRATVSC

SEQ ID NO: 24347 - protein, 451 aa, Oryza sativa
  Clone ID: TF_OsC2018_11.pep
MASAPPVQEEALQPGTNHFRSRLAAAVRSISWSYTIFWSTSTSLPGVLTWNDGFYNGEVKTRKISNLEDLTADQLVLRRSEQLSELYYSLLSGECDHRARKPVAALSPEDIADTEWYYVVCMTYAFRPGQGLPGRSYASNRSVWLCNAQSADSKTFLRALLAKSASIQTIVCIPFMSGVLELGTTDPVSEDPNLVNRIVAYLKELQFPICLEVPSSTPSPDETEDADTVFDGLIEEDQMVILQGEDELGDVVVAECETNGANPETITMETDEFYSLCEELDLDLGSYQLVPTSARETVAAAAAAANDVDGVAYSHASCFVSWKRANPAEKVVAVPMTAGIESQKLLKKAVGGGTAWMSNIDDRGSVAITTTPGSNIKSHVMSERRRREKLNEMFLILKSLLPSVRKVDKASILAETITYLKVLEKRVKELESSSREPSRWRPTEIGQGKAP

SEQ ID NO: 24348 - protein, 205 aa, Oryza sativa
  Clone ID: TF_LIB4370-003-R1-K1-G9.pep
ASLGLDQLAAIGSLYQFIRGGGEGKEAASQEEEQTPKLRKFHNFSERRRRDRINEKLKALQELLPNCTKTDKVSMLDEAIDYLKSLQLQLQMLVMGKGMAPVVPPELQQYMHYITADPSQIPPIRPSEPRPFQITHATQQRQSNVESDFLSQMQNLHPSEPPQNFLRPPKLQLYTPEQQRRGLASSSGHNSGWITERNSSYNFLE

SEQ ID NO: 24349 - protein, 478 aa, Oryza sativa; identical to SEQ ID NO: 16937
  Clone ID: TF_OsC173150_1.pep

SEQ ID NO: 24350 - protein, 589 aa, Oryza sativa
  unsure (1)..(589): unsure at all Xaa locations
  Clone ID: TF_OsC377_1.pep
MEETPLPSGKNFRSQLAAAARSINWTYAIFWSISTSRPGVLTWKDGFYNGEIKTRKITNSMNLTADELVLQRSEQLRELYDSLLSGECGHRARRPVAALLPEDLADTEWYYVVCMTYAFGPRQGLPGKSFASNEFVWLTNAQSADRKLFHRALIAKSASIKTIVCVPFIMHGVLELGTTDPISEDPALVDRIAASFWDTPPRAAFSSEAGDADIVVFEDLDHGNAAVEATTTTVPGEPHAVAGGEVAECEPNADNDLEQITMDDIGELYSLCEELDVVRPLDDDSSSWAVADPWSSFQLVPTSSPAPDQAPAAEATDVDDVVVAALDGSSIDGSCRPSPSSFVAWKRTADSDEVQAVPLISGEPPQKLLKKAVAGAGAWMNNGDSSAAAMTTQGSSIKNHVMSERRRREKLNEMFLILKSVVPSIHRVDKASILAETIAYLKELEKRVEELESSSQPSPCPLETRSRRKCREITGKKVSAGAKRKAPAPEVASDDDTDGERRHCVSNVNVTIMDNKEVLLELQCQWKELLMTRVFDAIKGVSLXCPLGAGINIGWSPWTEDTSQVCLICCRRTWDDYRSSPESYSKLAS

SEQ ID NO: 24351 - protein, 263 aa, Oryza sativa; identical to SEQ ID NO: 16941
  Clone ID: TF_OsC374879_1.pep

SEQ ID NO: 24352 - protein, 485 aa, Oryza sativa; identical to SEQ ID NO: 16942
  Clone ID: TF_OsC1427_102.pep

SEQ ID NO: 24353 - protein, 361 aa, Oryza sativa
  Clone ID: TF_OsC58664_1.pep
MPRLAKKPVRTFPAAPQFGHQNRLFLSPGAVRMALEAVVFPQGHFGYGCGRDSPAYGMPWCDVLAAAGGGGGFGEFYGVDEWDDQLQVASVDEWEVASKDNSDASTEGKAAAAERAEPVAAGRRKRRRTKVVKNKEEIECQRMTHIAVERNRRRQMNEYLAVLRSLMPASYSQRGDQASIVGGAINYVKELEQLLQSLEVQKSLKNRSGAMDAAGDSPFAGFFSFPQYSTSPRTGCSAAASAGSSGSASSVVMDDTAGSAESGRQSAAIADIEVTMVEGHASLKVLARRRPKQLLKLVVGLQQLRIPPLHLNVTTVDAMVLYSFSLKVEDDSKLGSVEDIATAVHQILGSIQQQEAVLSIS

SEQ ID NO: 24354 - protein, 139 aa, Oryza sativa
  Clone ID: TF_OsC264262_1.pep
MFPVEVAAAAAAAGRMQGEAVVPMMLPPFFMDSGIWPAAAGVVDVAASAEEEAAAAAAAQDRALAASRNHREAEKRRRERIKSHLDRLRAVLACDPKIDKASLLAKAVERVRDLKQRMAGIGEAAPAHLFPTEHDEIVV

SEQ ID NO: 24355 - protein, 401 aa, Oryza sativa; identical to SEQ ID NO: 16944
  Clone ID: TF_OsC798_2.pep

SEQ ID NO: 24356 - protein, 555 aa, Oryza sativa
  unsure (1)..(555): unsure at all Xaa locations
  Clone ID: TF_OsC8564_1.pep
MQRYFHGQTDHAVRVRKIHKVKVILDNTLVAMYFACGDVQRARLVFEGMCDRDVISWTSLISGLVQNGSPLQGIQLXRDKKLAGVRPNDVTFLGLLSACNHAGAVEKGWSYFHSMKPDYGIEPQHQHYACVVDLLSRAGQLDRAYQFILNMPIKPEMTVWGALLHGCKMHGHSNMAMAECAAQHIFELEQSNAGHYVQLANMYASAGMWSQVAGMRVTMRERGVTKATGFSFIEVDGEMHSFHAWDHSHPRATEIFAMLCLLSPTPTGVGGVDSEGGWEGWELQWKWFQILRELLPHSDQKRDKATFLLEVIEYIRFLQEKVQKFEASVPEWNQENAKILPWSNIYFRSFWKNSQSKGQNPGDDLPDPSQFIRNGSSSGYNFTGKPDDNHNMVTSAAASGAQELVETDHAASVSYRSAETPTNITNNVTSQAQAQWASPAGVDDCAMNSEMLNNQQLAIDEGTISLSSQYSQQLLGTLTHALESSGVDLSQSSISVQINLGKRAVKRPGADGSSSSKELPSTSANNENMGHQLTMLGGGTEELPHPTKRHKSGNS

SEQ ID NO: 24357 - protein, 70 aa, Oryza sativa
  Clone ID: TF_rsicee_15174.y1.abd.pep
ARGLSSSQRRRDRINEKMRALQELIPNCNKIDKASMLEEAIEYLKTLQLQVQMMSMGTGMFVPPMMLPAA

SEQ ID NO: 24358 - protein, 610 aa, Oryza sativa
  Clone ID: TF_OsC9971_1.pep
MVMKMEADEDGANGGTGGTWTDEDRALTASVLGTDAFAYLTKGGGAISEGLVAASLPVDLQNRLQELVESDRPGAGWNYAIFWQLSRTKSGDLVLGWGDGSCREPHDGEMGPAASAGSDEAKQRMRKRVLQRLHSAFGGVDEEDYAPGIDQVTDTEMFFLASMYFAFPRRAGGPGQVFAAGVPLWIPNTERNVFPANYCYRGYLANAAGFRTIVLVPFETGVLELGSMQQVAESSDTLQTIRSVFAGAIGNKAGVQRHEGSGPTDKSPGLAKIFGKDLNLGRPSAGPGTGVSEADERSWEQRTGGGSSLLPNVQRAPPLQKLPQLQKSHQLVKPQQLVSQQQLQPQAPRQIDFSAGTSSKPGVLTKKPAGIDGDGAEVDGLCKDEGPPPALEDRRPRKRGRKPANGREEPLNHVEAERQRREKLNQRFYALRAVVPNISKMDKASLLGDAITYITDLQKKLKEMEVERERLIESGMIDPRDRTPRPEVDIQVVQDEVLVRVMSPMESHPVRAIFQAFEEAEVHAGESKITSNNGTAVHSFIIKCPGAEQQTREKGRISWGVGATGRGSFTSFAGCRQAASSRLDGHPSTHLSALLIEEVCRQRKKAQILT

SEQ ID NO: 24359 - protein, 406 aa, Oryza sativa
  Clone ID: TF_OsC50455_1.pep
MSDKDIKVALSGPPNILVTTPACVASCISKGIIRGSSIKESLSMMILDEISCDAKDKMLYILVLLKLELIQKKVLIFVNSIDSAFKLRLFLEKFGIRSSVLNAELPQNSRLHIIQAFNARLFDYLIATDDNKSKEERQANKGNKKDSRVSRKQLQQTLDAEFGVVRGIDFKNVFTFPFDLLFLKQVVNYDMPPDPAGYVHRVGRTGRANKTGASISLVSPKENGIFEDIENMLKDVENRDTSCISPFPLLTKNAVESLRYRAQDVARSVTTRDIKEARRQDIKNEILNSEKLKAHFDENPRDLDLLKHDKLLSNKEIPAHLRDVPEYLIDPTTKEASNVVKLSRAAMDIDKPRRRKRMGFKGGSGRSSDPLKTFSADVLFVGKSRRRGRKERDGEQDRRKRKKVES

SEQ ID NO: 24360 - protein, 294 aa, Oryza sativa; identical to SEQ ID NO: 16951
  Clone ID: TF_OsC105357_1.pep

SEQ ID NO: 24361 - protein, 401 aa, Oryza sativa; identical to SEQ ID NO: 16955
  Clone ID: TF_OsC340364_1.pep

SEQ ID NO: 24362 - protein, 236 aa, Oryza sativa
  Clone ID: TF_OsC83673_2.pep
MDFDLFNSYPESQLDLMSTMLQLEQLTALSDQSLFMAAPTSPPVSPMGTPSPQFSPPPQMSVTTTTAGGGYQDQYNSMPATYGAGAGVHQLDFAMSSPGSDSGAPQGSSSSSSSEAMREMIFHIAALQPVEIDPEAVRPPKRRNVRISKDPQSVAARLRRERISERIRILQRLVPGRTKMDTASMLDEAIHYVKFLKSQVQSLERAAAATGAAAHRAAAFGAAYPAALPMQHHAPW

SEQ ID NO: 24363 - protein, 387 aa, Oryza sativa
  Clone ID: TF_OsC134315_1.pep
MNRMTAPHGGMPPPPMPAAGGLARYGSAPGSLLASIADSVIRGRGVGVVDQLHHHQHQHQLPPPPPPQQQQMVGRYFSAESSGLTSCESSCRTTTTTSTAAAADVGRHPLERAYGGSGEIHVDASSAAVPLFRHSSSPAGLLSRLMADPHGNGMAATRGMGGYSGGGGDAGAMAHRRLSSQWSFSRQDLPQISEMGGLIPDIGESIVTGGGGNSSSDGAGHGAQSSSFLSSRNFSMSSWDDTNSIMFSPPSSSKKARVAAAAAGDHGDDMVSSFSNIDSQFGLSKQSSLEMAGMDDFLQLQPDSVACRARAKRGCATHPRSIAERERRTRISKRLKKLQDLVPNMDKQTNTSDMLDIAVTYIKELQGQVEKLKHDQANCTCSGKHDC

SEQ ID NO: 24364 - protein, 310 aa, Oryza sativa
  Clone ID: TF_OsC159138_1.pep
MDAEMAMGESFAYYWETQRYLESEELDSMYLPTQDDSNYESSSPDGSHSSSAPAPAAVGGDAAAAVAGSGGGMTTMMMGGGGGGGDDAGGANKNILMERDRRRKLNEKLYALRSVVPNITKMDKASIIKDAIEYIQRLQAEEQQMLREVAALESAAAASAAPAAANPFAGLGADEEHEYGHHHPSSSSERTKKVKRALSVSSISDALLAAAAPAPPVEIQELRVSEVGDRVLVVSVTCSKRRDAMARVCRALEELRLRVITANITSVAGCLMHTLFVEVDHMDSVQMKQMVEAALSQLVATGSPLSSMSY

SEQ ID NO: 24365 - protein, 279 aa, Oryza sativa; identical to SEQ ID NO: 16950
  Clone ID: TF_OsC335639_1.pep

SEQ ID NO: 24366 - protein, 367 aa, Oryza sativa; identical to SEQ ID NO: 16961
  Clone ID: TF_OsC371684_1.pep

SEQ ID NO: 24367 - protein, 688 aa, Oryza sativa; identical to SEQ ID NO: 16959
  Clone ID: TF_OsC113490_9.pep

SEQ ID NO: 24368 - protein, 351 aa, Oryza sativa; identical to SEQ ID NO: 16963
  Clone ID: TF_OsC58664_2.pep

SEQ ID NO: 24369 - protein, 248 aa, Oryza sativa; identical to SEQ ID NO: 16964
  Clone ID: TF_OsC81947_1.pep

SEQ ID NO: 24370 - protein, 430 aa, Oryza sativa; identical to SEQ ID NO: 16965
  Clone ID: TF_OsC47357_1.pep

SEQ ID NO: 24371 - protein, 338 aa, Oryza sativa; identical to SEQ ID NO: 16958
  Clone ID: TF_OsC3016_1.pep

SEQ ID NO: 24372 - protein, 361 aa, Oryza sativa
  Clone ID: TF_OsC5214_1.pep
MAQCGGGDVSRHRKGHLDTVESLCQGLLDDVMLDDDKCRAMFGYLQEWQDLASMCYGSLGGEPPLAPEASNGSGSSGGGGSFRKRRPDDAKGESNSICKRQRGKQQQQQQPCHPDQMAAAVGKGRPERARPGAKKKAEVASPKDSPATSASTVTAGQKTDYIHVRARRGQATDSHSLAERVRRERISERMRYLQELVPGCNKVTGKAGMLDEIINYVQSLQKQVEFLSMKIAASNPVVNFNIVEDLFGRQLSQAACNPAALPAMALPMAQVEPSCLQMSPLQQMQTSAGSSGYGLEMVVSNQYSPPGGPMSVPAGASVEPCLNVNGAAGWDIGSHGLFSGFDAPFQSVQSDCLLDNLKMEM

SEQ ID NO: 24373 - protein, 836 aa, Oryza sativa; identical to SEQ ID NO: 16854
  Clone ID: TF_OsC340653_1.pep

SEQ ID NO: 24374 - protein, 233 aa, Oryza sativa
  Clone ID: TF_OsC359492_1.pep
MEMTSYNDVDAGDMFAAADYYSAGAGGDLFDMVWPGRRRREEDNTSGCLPLSPPPPPELAVDDQLLAGGDGGGGKPVAVAVAEDDDSGERWTEDQVPTDEGICVMEKRRCKINENLKTLQQLVPVCDKSNNQASTLDKTIRYMKSLQQHAQAMSVGCSMKTAEAAGVTCPFLPPPPSSALLVIVEEGPTRPWDATARSTSAAATSFDHHHHGALIEKLLQVVQCSFAALHAVA

SEQ ID NO: 24375 - protein, 191 aa, Oryza sativa; identical to SEQ ID NO: 16856
  Clone ID: TF_OsC115381_1.pep

SEQ ID NO: 24376 - protein, 347 aa, Oryza sativa
  unsure (1)..(347): unsure at all Xaa locations
  Clone ID: TF_OsC217101_1.pep
GGWIVHGYTNGATATGAGNHGFTCGYAASSYVYGYSCGSWEFEQREQQFISSQIQHXSMHLSMDDDDDQSAGYGVAMVDDLLTPSPSTHHAVAAAAGSFPSSSSSSASFRSASVSYSPDTSSSAAAAAATGFYPELSSQVAPLLPPPPLVRNEPQPGRYTAGLPPPPPPPVTGGAFRRYARHLGPRRAPKPGACGQRMFKTAMSALAKMHMETTYRRRQYYYQQAAAAAEAAPPPPSGNNQLQHTMSERKRREKLNDSFVALKAVLPPGSKKDKTSILIRAREYVKSLESKLSELEEKNRELEARLSTRPDDTKNDEEEVAAPPEAGGEVKREDPVEIEALDNFFIR

SEQ ID NO: 24377 - protein, 291 aa, Oryza sativa; identical to SEQ ID NO: 16865
  Clone ID: TF_OsC80863_1.pep

SEQ ID NO: 24378 - protein, 282 aa, Oryza sativa; identical to SEQ ID NO: 16866
  Clone ID: TF_OsC80863_2.pep

SEQ ID NO: 24379 - protein, 258 aa, Oryza sativa
  Clone ID: TF_OsC123144_1.pep
MAECQPLQLQEGKKLQELQPYDGCNPSVYRGPILLPRQANSAPPAVPPEMSSSSGSGRSATEARALKIHSEAERRRRERINAHLTTLRRMIPDTKQMDKATLLARVVDQVKDLKRKASEITQRTPLPPETNEVSIECFTGDAATAATTVAGNHKTLYIKASISCDDRPDLIAGITHAFHGLRLRTVRAEMTSLGGRVQHVFILCREEGIAGGVSLKSLKEAVRQALAKVASPELVYGSSHFQSKRQRILESHCSIMSI

SEQ ID NO: 24380 - protein, 272 aa, Oryza sativa; identical to SEQ ID NO: 16868
  Clone ID: TF_OsC14042_1.pep

SEQ ID NO: 24381 - protein, 292 aa, Oryza sativa
  Clone ID: TF_OsC10538_1.pep
DVQKKKKKKKKKGRSGGAKRQQCKNLEAERKRRKKLNGHLYKLRSLVPNITKMDRASILGDAIDYIVGLQKQVKELQDELEDNHVHHKPPDVLIDHPPPASLVGLDNDDASPPNSHQQQPPLAVSGSSSRRSNKDPAMTDDKVGGGGGGGHRMEPQLEVRQVQGNELFVQVLWEHKPGGFVRLMDAMNALGLEVINVNVTTYKTLVLNVFRVMVVRDSEVAVQADRVRDSLLEVTRETYPGVWPSPQEEDDAKFDGGDGGQAAAAAAAAGGEHYHDEVGGGYHQHLHYLAFD

SEQ ID NO: 24382 - protein, 117 aa, Oryza sativa
  Clone ID: TF_LIB4830-002-R1-N1-A10.pep
PPPLPARAQPRPKVRARRGQATDPHSIAERLRRERIAERMRALQDLVPNTNKTDRAAMLDEILDYVKFLRLQVKVLSMSRLGGAGAVAQLVADIPISVKLFLHCTLPVITRNVQGFS

SEQ ID NO: 24383 - protein, 293 aa, Oryza sativa; identical to SEQ ID NO: 16870
  Clone ID: TF_OsC33145_1.pep

SEQ ID NO: 24384 - protein, 477 aa, Oryza sativa; identical to SEQ ID NO: 16871
  Clone ID: TF_OsC16721_2.pep

SEQ ID NO: 24385 - protein, 777 aa, Oryza sativa
  unsure (1)..(777): unsure at all Xaa locations
  Clone ID: TF_OsC8567_1.pep
MKLRLRSMDQRGGAGGAAETHRVQLPDTATLSDVKAFLATMLSAAQPVPAESVRLTLKGIEELLTPDPSARLPALGLASGVLLYFTLSPLPSPSPPPPPQPQAQPLPRNPNPDVPSIAGAXADPTKSPVESGSSSSMPQALCTNPGLPVASDPHHPPPDVVMAEAFAVIKSKSSLVVGATKREMENVGGADGTVICRLVVALHAALLDAGFLYANPVGSCLQLPQNWASGSFVPVSMKYTLPELVEALPAVEEGMVAVLNYSLMGNFMMVYGHVPGATSGVRRLCLELPELAPLLYLDSDEVSTAEEREIHELWRVLKDEMCLPLMISLCQLNNLSLPPCLMALPGDVKAKVLEFVPGVDLARVQCTCKELRDLAADDNLWKKKCEMEFNTQGECGCVVWKCIYSDQRKDIVLADKYTCGNYMQKPVTQPGRWLIILVYHSLLCQYITIGLSLLWYHLVDLVQDAPAAGIHFDCIIPLPINPYQLPPSAGACCSTTQASASAKDGGNMYSPPCSAAASSQGHCFAVGANQLASLDLAMDFDEPILFPVHNASLQEGIQFYNPTGDTQLSRNMSIDKCLKGSKRKGSGEGSSSLHSQEETGEMPQRELSMEHAGEKAGDADASREEYVHVRAKRGQATNSHSLAERFRREKINERMKLLQDLVPGCNKITGKAMMLDEIINYVQSLQRQVEFLSMKLSTISPELNSDLDLQDILCSQDARSAFLGCSPQLSNAHPNLYRAAQQCLSPPGLYGSVCVPNPADVHLARAGHLASFPQVYI

SEQ ID NO: 24386 - protein, 361 aa, Oryza sativa; identical to SEQ ID NO: 16876
  Clone ID: TF_OsC349240_1.pep

SEQ ID NO: 24387 - protein, 412 aa, Oryza sativa; identical to SEQ ID NO: 16879
  Clone ID: TF_OsC14034_1.pep

SEQ ID NO: 24388 - protein, 492 aa, Oryza sativa; identical to SEQ ID NO: 16878
  Clone ID: TF_OsC352120_1.pep

SEQ ID NO: 24389 - protein, 494 aa, Oryza sativa; identical to SEQ ID NO: 16886
  Clone ID: TF_OsC189424_1.pep

SEQ ID NO: 24390 - protein, 424 aa, Oryza sativa; identical to SEQ ID NO: 16885
  Clone ID: TF_OsC731_1.pep

SEQ ID NO: 24391 - protein, 363 aa, Oryza sativa; identical to SEQ ID NO: 16882
  Clone ID: TF_OsC150404_1.pep

SEQ ID NO: 24392 - protein, 139 aa, Oryza sativa
  Clone ID: TF_LIB4309-014-Q1-K1-A3.pep
MKGAKSKGAAKPDAKLAVKSKGAEKPAAKGRKGKGGKDPNKPKRAPSAFFVFMEEVRKGVKGKNPKNKSGAGVGKAPRDRWETLARADKGSYVAQGHQLKGGFHKGLGGSLQGGSAAHKGPPPGGEGGLGGICPGSLSR

SEQ ID NO: 24393 - protein, 74 aa, Oryza sativa
  Clone ID: TF_uC-osflcyp019f08b1.pep
MKGAKCKGADKPDAKLAAKSKDAETPAAKGRKGKASKDPNKPKRNPSAFFGFMEEFRKESKERNPKNKSVAAAR

SEQ ID NO: 24394 - protein, 50 aa, Oryza sativa
  Clone ID: TF_2280684.pep
KAPYVAKANKLKAEYNKAIAAYNKGETLPRRTRKEERRREEDLQVQVRVI

SEQ ID NO: 24395 - protein, 112 aa, Oryza sativa
  unsure (1)..(112): unsure at all Xaa locations
  Clone ID: TF_2800810.pep
WIPRAARIRHDVFMDHFTNDYNDNHPNVTHVSVIGNAGGDNWNSMTDADKAPFVTNADKLNADYTNNIDAYNNKHAXGPATSGDSDKSNSDVNTTTTASVTRGGPVPNSPYS

SEQ ID NO: 24396 - protein, 138 aa, Oryza sativa
  unsure (1)..(138): unsure at all Xaa locations
  Clone ID: TF_LIB4833-020-R1-N2-D9.pep
MRHKPARQGDEGDRPLSDPNKSKRTPSAFFSFMEEIRKEFKENNPXKNKSVADAXKADGDMCESLTEADKDPYVAXDNKLKDEYNKGIAVYYKGESAAKNAPDKEEEEDDDERSDESKSEVIDEDDDECIEEDVHDDE

SEQ ID NO: 24397 - protein, 90 aa, Oryza sativa
  unsure (1)..(90): unsure at all Xaa locations
  Clone ID: TF_473985.pep
GSYKPNSPAVRSRSRGEXKARSRSXNCXXXXXVRKXXAEKDPNKPKRPPSAFFVFXEQFXKXFKEXXPNVKXVLVICKACGDKWKSMTYA

SEQ ID NO: 24398 - protein, 151 aa, Oryza sativa
  unsure (1)..(151): unsure at all Xaa locations
  Clone ID: TF_LIB4831-025-R1-N1-E10.pep
MKGVKSKGAIKSDAMLCVKSKGVDNAAAKGRKGKAGKDPNXFKRAPSAFFDFMEEFRKEFQENNPMNKSVAGVGKTTGDRSKSLIEVHKAPYVYXPTSLKAEYNXAIAAYDKGVEHCTRRYPTKXNRIDHEEESDKLKSEVIDEYDDEVSA

SEQ ID NO: 24399 - protein, 92 aa, Oryza sativa
  unsure (1)..(92): unsure at all Xaa locations
  Clone ID: TF_8334942.pep
VVVLEEFLWEFNDNIPTDXAVGAVGKAASDRXKYLTEADNDPYVAXANKLKAEYNKAIAAYKQGREHCXKAPPKEEEDDHQXEFDKSKSEVY

SEQ ID NO: 24400 - protein, 146 aa, Oryza sativa
  unsure (1)..(146): unsure at all Xaa locations
  Clone ID: TF_8955664.pep
MKGAKSKGAAKPDGKLAVKSKGAEKPAAKXRKGKADKDPNKPKRAPSXFFVFIEEFRXEFTEKNPKNXSVAAXGKAAGDRWKSXPQQTRLXYVAKANKLKAEYTKAIAAYNKGESTAXKAPAKEEEEDDEEDLQSKSEVIIRMTTR

SEQ ID NO: 24401 - protein, 641 aa, Oryza sativa
  Clone ID: TF_OsC922_1.pep
MTDGHLFNNILLGGRAGSNPGQFKVYSGGLAWKRQGGGKTIEIEKSDLTSVTWMKVPRAYQLGVRTKDGLFYKFIGFREQDVSSLTNFMQKNMGLSPDEKQLSVSGQNWGGIDINGNMLTFMVGSKQAFEVSLADVSQTQMQGKTDVLLEFHVDDTTGGNEKDSLMDLSFHVPTSNTQFLGDENRTAAQVLWETIMGVADVDSSEEAVVTFEGIAILTPRGRYSVELHLSFLRLQGQANDFKIQYSSIVRLFLLPKSNNPHTFVVVTLDPPIRKGQTLYPHIVIQFETEAVVERNLALTKEVLAEKYKDRLEESYKGLIHEVFTKVLRGLSGAKVTRPGSFRSCQDGYAVKSSLKAEDGLLYPLEKGFFFLPKPPTLILHEEIEFVEFERHGAGGASISSHYFDLLVKLKNDQEHLFRNIQRSEYHNLFNFINGKHLKIMNLGDGQGATGGVTAVLRDTDDDAVDPHLERIKNQAGDEESDEEDEDFVADKDDSGSPTDDSGGEDSDASESGGEKEKLSKKEASSSKPPVKRKPKGRDEEGSEKRKPKKKKDPNAPKRAMTPFMYFSMAERGNMKNNNPDLPTTEIAKKLGEMWQKMTGEEKQPYIQQSQVDKKRYEKESAVYRGAAAMDVDSGSGGNESD

SEQ ID NO: 24402 - protein, 112 aa, Oryza sativa
  unsure (1)..(112): unsure at all Xaa locations
  Clone ID: TF_8955997.pep
MKGAKSKGAAKPDAKLAVKXXGAXKPAAKGRKGKAGKDPNXPKXAPSAFFVFMXEFRKEFKEKNPXNKSVAAXGKAXGDRWKSLTEXDXAPYVPSXQAQXRXQQAIAAYNKG

SEQ ID NO: 24403 - protein, 146 aa, Oryza sativa; identical to SEQ ID NO: 16974
  Clone ID: TF_OsC1457_5.pep

SEQ ID NO: 24404 - protein, 242 aa, Oryza sativa
  unsure (1)..(242): unsure at all Xaa locations
  Clone ID: TF_OsC1301_1.pep
IVSKKKKKKKKKKKQKKKKKVTIHHTTTTLKADAAXSKDEIQARVAQLKKELSETDSIYDTEKLAERIAKLSGGVAVIKVGAATETELEDRQLRIEDAKNATFAAIEEGIVPGGGTAYVHLSTTVPAIKETIEDHDERLGADIIQKALVAPASLIAHNAGVEGEVVVEKIKDGEWEVGYNAMNDKYENLIEAGVIDPAKVTRCALQNAASVAGMVLTTQAIVVEKPKPKAPVAEPAEGTLTV

SEQ ID NO: 24405 - protein, 83 aa, Oryza sativa
  unsure (1)..(83): unsure at all Xaa locations
  Clone ID: TF_3763394.pep
KGGATADPNRPKKPASSFLLFSKEARRXLAEERPGXASSXLTALXSVKWKELGEAEKQAXNXNAAEAXAAYKRDXEEYTKAAA

SEQ ID NO: 24406 - protein, 132 aa, Oryza sativa
  Clone ID: TF_OsC90143_1.pep
MGKADADAEFKAAGKRKKAGGAGKPKRGLTPFFAFLAEFRPQYMEKHPNTKGVAAVTKAAGEKWRAMSDEEKAQYGGKKPDGESKPAAASKKKESTSSKKAKTDGAEQEGEGSDKSKSDVEDDENDGSGEDE

SEQ ID NO: 24407 - protein, 116 aa, Oryza sativa
  unsure (1)..(116): unsure at all Xaa locations
  Clone ID: TF_LIB4506-025-R1-K1-B4.pep
MKGAKSKGAAKPDAKLAVKSKGAEKPAAKGRKGKAGKDPNKPKRAPSAFFVFMEEFRKEFKEKNPKNKSVAAXGKAAGDRWKSLAEAXKAPYXAXALLLKAEFLLALAASXXGGST

SEQ ID NO: 24408 - protein, 129 aa, Oryza sativa
  unsure (1)..(129): unsure at all Xaa locations
  Clone ID: TF_uC-osrocyp031b01b1.pep
YKGAAKANTKLAEKSKGAEKPGGKGRKGKAGKDPNKPKRAASAFFAVMEEFRKEFKEKNPKNKSVAAVGKAAGDRRKSLTEADKAXPNXAQGHKLKAEYNKAIAAYNKGESTAKKAPAXEEEEDDQEES

SEQ ID NO: 24409 - protein, 448 aa, Oryza sativa
  Clone ID: TF_OsC85710_1.pep
MSAAAEEAAAAAAAEEVEGVEAGKKGVADAKGKGKEKVVVAEEDSAVAAGSGGSGGGRRTLVAYPARVAGYKDVVADAAVFRRALEGLHAQMGTKLKVPIIGGKDLDLHQLFKEVTSRGGIDKKYYMSLLYHFERLYLFEAQGWYQETADSRSISCIEMKAEGQASRKRKRGSNSCSSDPPINLEWTLSASLDNDVQVIIDGKFEHGYIVTVIMGSKSTKAVLYNCTEEPAVPTAVPHVAIDSAEGIRPRRRRRRKKLSTTDPNHPKPNRSGYNFFFQDQHRKLKPEYPGQDRLISKMIGERWNNLGPEDKAVYQEKGVEDKARYQRQLALYREQRTGQPISNAVPIQQRLPQKEVTIDEVDSKVSEGDILLSNQGYSSSTSSSDETADSGEKNVEDDEEFNTETSPEPSMETTDSHGQPDPSADGERFELRRRENPKIDEKRDMPPN

SEQ ID NO: 24410 - protein, 158 aa, Oryza sativa
  unsure (1)..(158): unsure at all Xaa locations
  Clone ID: TF_LIB4832-017-R1-N1-H2.pep
MKGGKSTGAAKPXSKVVCEYNRXEKPAEKGKNIKAAKDPNKPKRAPXGFFHFMQEFRKELKENNPKNTTVAAAGKEAXDRSKSLTEADNAPYVAKANKLKAEYNKDIAAYNKVYSTAKNAPDKEEEEDDEEESDKSKSHVXNDEEDDQGSEEDEDYDY

SEQ ID NO: 24411 - protein, 646 aa, Oryza sativa
  unsure (1)..(646): unsure at all Xaa locations
  Clone ID: TF_OsC206808_1.pep
MTDGHHFNNISLGGRGGNNPGQFKLYSGGLAWKRQGGGKTIEVEKSDITSVTWMAIPRSYQLGVSTKEGLFYRFFGFREQDISSLTNFMEKNMRITPEEKQLSVGGHNWGGIEINGNMLSFNVGSKEAFEVSLADVAQTQMQGKTDVVLEFHVDDTTGGNEKDSLMDLSFHVPTSNTQFPGDENRPSAQVLWQAILNKADVGSSEEAVVTFDGIAILTPRGRYSVELHLSFLRLQGQANDFKIQYSSILRLFVLPKSNNPHTFVVITLDPPIRKGQTLYPHIVIQFETEAVVQRDLTLSDEVLAEKYKDRLENSYQGLIHEVFSKVLRGLSGAKVTRPSTFRSCQDGYAVKSSLKAEDGXLYPLEKGFFFLPKPPTLILHEELXSLWQIEYVEFERHGAGGASISSHYFDLLVKLKNDQEHLFRNIQRNEYHNLFNFISGKHLKILNLGEAQGRAGGVTAVLQSTDDDAVDPHLERIRNQTGDDESDEEDEDFVADKDDSGSPTDDSGEEGSDASLSGGEKEKSSKKEASSSKAPLKKRKPKGGDAAEGSEKRKPKKKKDPNAPKRAIAPFMYFSKAERANLKNSNPELATTEIAKKLGERWQKMTAEEKQPYVEQSQVDKKRYAEESAAYRGAAAMDVDSGPASD

SEQ ID NO: 24412 - protein, 117 aa, Oryza sativa
  unsure (1)..(117): unsure at all Xaa locations
  Clone ID: TF_uC-osflcyp054d10b1.pep
MKGAKSKGAAKPDAKMAVKSKGAEKPAAKGRKGKAGKDPNKPKRAPSALFGFMEELRXEFKEKNPKNKSVAACGKAPGDRWKSLTEADKAASVAQANTLKAVYNMAIAAXYNQGEST

SEQ ID NO: 24413 - protein, 504 aa, Oryza sativa; identical to SEQ ID NO: 16977
  Clone ID: TF_OsC5000_2.pep

SEQ ID NO: 24414 - protein, 108 aa, Oryza sativa
  unsure (1)..(108): unsure at all Xaa locations
  Clone ID: TF_2311851.pep
MKGAKSKGAAKPDAKLAXKSKGAEKPXAKGRKGKAGKDPNKPKRAPSAFFVFMEEFRKEFKEKNPKNKSVAAVGKAXGDRWKSLDRXRTRXPMXQRXTSFKXVYNKGI

SEQ ID NO: 24415 - protein, 114 aa, Oryza sativa
  Clone ID: TF_LIB4833-008-R1-N1-G8.pep
MKGAKSKGAAKPDAKLAVKSKGAEKPAAKGRKGKAGKDPNKPKRAPSAFFVFMEELRKEFREKNPNNKSAAAVGKAPADSRKSLTEAHKAPYVAKANTLRAEHTRAIAAYNKGQ

SEQ ID NO: 24416 - protein, 264 aa, Oryza sativa
  Clone ID: TF_OsC1457_1.pep
RSGTIPCSLSSDSSISSKYSSDSPSLSPSTSSPTSLGLSPASSNFSHTLVPSSRSPLHQSSNEEPSKSGLGSIRSPSKTSSIAERRGGFSSLKLPSFQKDLVLPPRVPTSLRREEEVTDKSNNNSVKQLTGVCCPEKCTGNTSTVHTKTGITERTDSISEACGNLQLLVYRWPSKEKLTTFTRKDLDPKSVLIFVTPEDSRSEAVKTVHIWVGGEYESSKCVDTVDWQQVVGDFFHLKELGNTLPVKVFKEHETENLLEVLNAR

SEQ ID NO: 24417 - protein, 101 aa, Oryza sativa; identical to SEQ ID NO: 7649
  Clone ID: TF_LIB4833-024-R1-N1-F8.pep

SEQ ID NO: 24418 - protein, 158 aa, Oryza sativa
  unsure (1)..(158): unsure at all Xaa locations
  Clone ID: TF_3548937.pep
MKGAKSKGAAKPDAKLAVKSKGAXXPAAKGRKGKAGKDPNKPKXAPSAFFVFMEXFRKEFKXXNPKXNKSVAAVGKAAGDRWKSLTEADKAPYXXKANKLKAXXNKAIAAYNKGXSTAKXAPAXEEEEDDXXESDKSXSEVHDEDDDXGXEXDEXXDX

SEQ ID NO: 24419 - protein, 203 aa, Oryza sativa; identical to SEQ ID NO: 16970
  Clone ID: TF_OsC4387_1.pep

SEQ ID NO: 24420 - protein, 145 aa, Oryza sativa; identical to SEQ ID NO: 16971
  Clone ID: TF_OsC742_1.pep

SEQ ID NO: 24421 - protein, 361 aa, Oryza sativa
  Clone ID: TF_OsC1450_1.pep
MEEISHHFGVVGASGVHGGHQHQHHHHPWGSSLSAIVAPPPPPQLQQQQTQAGGMAHTPLTLNTAAAAVGNPVLQLANGSLLDACGKAKEASASASYAADVEAIKAKIISHPHYSSLLAAYLDCQKVGAPPEVAARLTAVAQDLELRQRTALGVLGAATEPELDQFMEAYHEMLVKYREELTRPLQEAMEFLRRVETQLNTLSISGRSLRNILSSGSSEEDQEGSGGETELPEIDAHGVDQELKHHLLKKYSGYLSSLKQELSKKKKKGKLPKDARQQLLNWWELHYKWPYPSESQKVALAESTGLDLKQINNWFINQRKRHWKPSDEMQFVMMDGYHPTNAAAFYMDGHFINDGGLYRLG

SEQ ID NO: 24422 - protein, 90 aa, Oryza sativa
  Clone ID: TF_uC-osflM202042d03b1.pep
RAFHHMGIMGQEAWRPQRVLPERSVNILRSWLLEHLLHPYPSDADKHLLARQTGLSRNQVSNWFINARVRLWKPMIEEMYQQECKELEGS

SEQ ID NO: 24423 - protein, 603 aa, Oryza sativa; identical to SEQ ID NO: 16979
  Clone ID: TF_OsC147537_1.pep

SEQ ID NO: 24424 - protein, 150 aa, Oryza sativa
  unsure (1)..(150): unsure at all Xaa locations
  Clone ID: TF_OsC1713_5465.pep
DGGGEPCPGVGSGFCSLSHSRRRCWWCSASGSSGKVKRIMKTPYQLEVLKRTYXLGLTDKQLQMWFCHRRLKDRKPPPKRQQLEEEVHVPVMAPPPVLSPPLPHRELTMAPGGMYGEQLLPSSSRRGTGRASAILDMSDLQCLPLLTSHG

SEQ ID NO: 24425 - protein, 612 aa, Oryza sativa
  Clone ID: TF_OsC796_1.pep
MSSAAGGGGYGGGQGGGAEHHHHHHGHAGHLLLHHHPQHVAGAAVAAAAAAAGGQMYHVPQHSRREKLRFPPDAGDSPPPHGHGHGHAPQQQQQHGSWPPPPAFYSYASSSSSYSPHSPTLAQAQLVAHGLAPPLPQIPTQNFSLSLSSASSNPPPPQAQPRRQLGGLAQATGPFGPFTGYAAVLGRSRFLGPAEKLFEEICDVGGAASHVDRTISDEGLLDADPMDGVDHDVVDHDLGGADRAAADAGPISGAEQQWKKTKLISMMEEVCKRYRQYYQQVQAVMASFETVAGFSNAAPFAALALRAMAKHFKCLKSMILNQLRNTSNKVAVKDGLNKEIAVFGLAGGSSGGAGLQRANSASAFGQPHNIWRPQRGLPERAVSVLRAWLFEHFLHPYPTDGDKQMLAKQTGLTRNQVSNWFINARVRLWKPMVEEIHNLEMRQMHKHSVVDKGQHSVHHQAQHSSQCSGNPSVPSDSHPGQSSSITRNHNTAASQGFPDELSQMSQSIQGQVSFAYNGLTSQHNIASPHHQHQQVGGVGIGGGNGGVSLTLGLHQNNRVCIAEPLPAALPANLAHRFGLEEVSDAYVMSSFGGQDRHFGKEIGGHLLHDFVG

SEQ ID NO: 24426 - protein, 109 aa, Oryza sativa
  unsure (1)..(109): unsure at all Xaa locations
  Clone ID: TF_OsC244_6.pep
RRRASRRSTLSSLSGKRGAPSAPAAVAXEDSGGGSRKKLRLSKDQAAVLEDTFKEHNTVNPISKQTNNXKQKAALARQLNLKPXQVEVWFQNRRARTKLRQTEVDSELL

SEQ ID NO: 24427 - protein, 341 aa, Oryza sativa
  Clone ID: TF_OsC1648_1.pep
MESFASLAGGGSSSTTARLPELISPENPDHISPPPLLYQLLAGPASSARQHGHDGHHHGGGGGEAAAAAVQGQVSPAGAEAAVKAEIMSHPQYSALLAAYLGCKKVGAPPDVLTKLTAVPAAQQLDEADGHPRRRHEPRRDDDPDQLDQFMVSTCSMLTRYREELERPILEAAEFFSRVETQLDSLAESNCEGTGSSEEEQDPSDKQLKHQLLRKYGGSLGDLRQVFSKRTKKGKLPKEARQKLLHWWELHYKWPYPSEMEKMTLAQTTGLDQKQINNWFINQRKRHWKPTPVAGTAFPTMEAAGGGFRHSGHGGGLAAAAALPLYMGRPFVVDGMYRLGS

SEQ ID NO: 24428 - protein, 678 aa, Oryza sativa; identical to SEQ ID NO: 16982
  Clone ID: TF_OsC49147_1.pep

SEQ ID NO: 24429 - protein, 238 aa, Oryza sativa
  Clone ID: TF_10504981.pep
KRERFFLTRELNARRRARARNLVPHPPAADLLARPPRRRPRVGGGGGGRGPRKRRRRLRRIICSPRRCRRRRPPPTGCPPRRGPWGPSRSRGTRPRPGSTTPRCCPRRRDAAGRTRPPVARPCPPPRSRRCPVLSLSSAFTCCSCCSSKAAAASSNARCPPAFRDGELQFGARRAARGRLRPAPGVPSVVVSFSGSFSFKEHDLTAQDHHEFSQNQGARPNRIEDNARLGGGAGGGRS

SEQ ID NO: 24430 - protein, 647 aa, Oryza sativa; identical to SEQ ID NO: 16983
  Clone ID: TF_OsC48414_1.pep

SEQ ID NO: 24431 - protein, 642 aa, Oryza sativa; identical to SEQ ID NO: 16984
  Clone ID: TF_OsC17293_1.pep

SEQ ID NO: 24432 - protein, 884 aa, Oryza sativa; identical to SEQ ID NO: 16985
  Clone ID: TF_OsC61454_1.pep

SEQ ID NO: 24433 - protein, 1123 aa, Oryza sativa; identical to SEQ ID NO: 16987
  Clone ID: TF_OsC47330_1.pep

SEQ ID NO: 24434 - protein, 330 aa, Oryza sativa
  unsure (1)..(330): unsure at all Xaa locations
  Clone ID: TF_OsC85922_1.pep
MAFHGHLPHEMTMQALGADDAAVAAAAAAXTTSDSSASPSGAAAAAARVRXGGDAVAAAMGGGGEADAARCKAEILAHPLYEQLLSAHVACLRIATPVDQLPRIDAQLAQSQGVVAKYSALAAAAAGDDGRELDQFMTHYVLLLCSFKEQLQQHVRVHAMEAVMACWELEQNLQSLTGASPGEGTGATMSDGEDDQADSEANMYDPSLDGADNMGFGLPTESERSLMERVRQELKHELKQGYKEKLIDIREEILRKRRAGKLPGDTTSTLKAWWQSHAKWPYPTEEDKARLVQETGLQLKQINNWFINQRKRNWHSNPSSSTSVKTKRKR

SEQ ID NO: 24435 - protein, 318 aa, Oryza sativa
  unsure (1)..(318): unsure at all Xaa locations
  Clone ID: TF_OsC1970_2.pep
MAFHYQDHALAMDAAAAAAXTGGHHHPGFVGAGGVVGGGGGGGWEREKAAIAAHPLYERLLEAHVACLRVATPVDQLPRIDAQIAARPPPLAAASAAAAPPGPSAREELDLFMTHYVLLLCSFKEQLQQHVRVHAMEAVMGCWELEQSLQSLTGASPGEGTGATMSDDEDNQVDSEANMFDGNDGSDGMGFGPLMLTEGERSLVERVRHELKNELKQGYKEKLVDIREEILRKRRAGKLPGDTASILKAWWQAHSKWPYPTEDDKARLVQETGLQLKQINNWFINQRKRNWHSNPASSGEKTKKKRNVTGDGGAEQSW

SEQ ID NO: 24436 - protein, 357 aa, Oryza sativa; identical to SEQ ID NO: 16989
  Clone ID: TF_OsC175523_1.pep

SEQ ID NO: 24437 - protein, 1227 aa, Oryza sativa; identical to SEQ ID NO: 16988
  Clone ID: TF_OsC2791_1.pep

SEQ ID NO: 24438 - protein, 218 aa, Oryza sativa
  unsure (1)..(218): unsure at all Xaa locations
  Clone ID: TF_OsC1970_1.pep
MTIFLRQFFLLNKKMFFFSRTTQQLLRTHYVLLLCSFKELLQQYERVHAMEAVMAXSPREGSGATMSDDEDNQVDSESNMFDGNDGSDGMGFGPLMLTEGERSLVERVRQELKHELKQGYREKLVDIREEILRKRRAGKLPGDTASTLKAWWQAHSKWPYPTEEDKARLVQETGLQLKQINNWFINQRKRNWHSNPASSSSDKSKRKSAGDGKAEQSW

SEQ ID NO: 24439 - protein, 262 aa, Oryza sativa
  unsure (1)..(262): unsure at all Xaa locations
  Clone ID: TF_OsC1621_1.pep
MQGGDHGGMEMGVGSFTGGGGGGECSSSSATAAAAAAAAAAAAAAEAEERQLLKGEIAVHPLCEQLVAAHVGCLRVATPIDHLPLIDAQLAQSSGLLHSYAAHHRPFLSPHDKQELDSFLAQYMMLLCSFREQLQQHVRVHAVEAVMANWHNNSQTSTLKSKRKRXRAEKNVYLTYSLIKSKEDMFLRKRRAGKLPGDTTTILKQWWQQHSKWPYPTEDDKAKLVEETGLQLKQINNWFINQRKRNWHNNSQTSTLKSKRKR

SEQ ID NO: 24440 - protein, 196 aa, Oryza sativa
  Clone ID: TF_OsC1621_2.pep
MQAQYMMLLCSFREQLQQHVRVHAVEAVMACREIEQSLQDLTGATLEEGTGATMSEDEDETAPMLEGPMDMGSDGHDLMGFGPLMPTDSERSLMERVRQELKIELKQGFKSRIEDVREEILRKRRAGKLPGDTTTILKQWWQQHSKWPYPTEDDKAKLVEETGLQLKQINNWFINQRKRNWHNNSQTSTLKSKRKR

SEQ ID NO: 24441 - protein, 594 aa, Oryza sativa; identical to SEQ ID NO: 16994
  Clone ID: TF_OsC72309_2.pep

SEQ ID NO: 24442 - protein, 618 aa, Oryza sativa; identical to SEQ ID NO: 16997
  Clone ID: TF_OsC72309_1.pep

SEQ ID NO: 24443 - protein, 289 aa, Oryza sativa; identical to SEQ ID NO: 17000
  Clone ID: TF_OsC354772_1.pep

SEQ ID NO: 24444 - protein, 200 aa, Oryza sativa; identical to SEQ ID NO: 17001
  Clone ID: TF_OsC91731_1.pep

SEQ ID NO: 24445 - protein, 140 aa, Oryza sativa
  Clone ID: TF_LIB3475-008-P1-K1-B6.pep
PRVRQTEVLCSNSNGSTAKNRHFGPAINQKLKAHFKEDPYPSRATKENLAQELGLTFNQVTKWFSSTRHYARVAATKKENNIENHTAENNNNTNTVDSIQLRGSNDIVSVDRNDMVSEERTGQSNLNEGTPLRSDTSCGQ

SEQ ID NO: 24446 - protein, 365 aa, Oryza sativa
  Clone ID: TF_OsC520_1.pep
MEELEGHRGEGRLPPPPPLLPFPKVSVQVYTVPSSSTAASAAAAGGARQAVAPATRDGGDGGGRAAGVLDDPVKARIVSHPRYHRLLAAFLDCHKVGCPAEAAEEIAAAARVREARQRAAAAASRMPPAPEDPELDQFMEDYCKLLVECKEELSRPLQEAEEFLRTVESELNSINSGPPLTALISESKAGLDSSDDDEHEDGSGMEMMEAAEDEDLGIIDPRSDDKALKRHLLRKYSGYLGGLRKELSKKRKKGKLPKEARQKLLTWWELHYRWPNPSEMEKIALAESTGLEQKQINNCFINQRKRHWKPTEEMEFAVMEAYHHQSTDAAAAFYVDVDARLVGATAAAPASAVYTARPDHGVWRA

SEQ ID NO: 24447 - protein, 601 aa, Oryza sativa
  Clone ID: TF_OsC95162_1.pep
MAHDPSLGYADYFAAEVDGTGSSELYGLQQHQQVVGVAEMFGVRGLMPAAHAHEQSKGVGALVVGGGGVDDGGATTLPTVHFGGLGELHQHQHRQSQAPLSLSLHRPEAAATSLLMQQQQQHLHHQPSPPAGAASTWQLQQGAWHLRGSRFLLPTQQLLQEFCSLPVKSTTSPSSASKATKPPQEEAASGGGSSSWTAPTQIQSMDAAELQRLKGKLYTMLEEVDRRYRRYCEQMRALAASFEAVAGERAAASYTRLASRTISRHFRSLRDGVVAQLQAVRKQLGEKDTAVPGMTKGETPRLRVLDQCLRQHKAYQAGMLESHPWRPQRGLPERAVSILRAWLFEHFLHPRMFAGFVTMLKLSPRYPSDVDKHILARQTGLSRSQVANWFINARVRLWKPMVEEMYAEEMKDEEGSGQSTQASNPQNPNPSSYTSEVRGGGGGGEDRGEQKPSRAQLLHDAGSLASVVSIGHGGAGRTMVDHHHHQSLNFGTMDQLDFDAYEAAGGGQGFGAGGGVSLTLGLQQQHADPHDGVNVAFAAAAAPPNSSGVAAEYLFMGGGEHQQQLPQTAQFGAVMEGDAASHYRGLSATAAGFHLLHDLAG

SEQ ID NO: 24448 - protein, 77 aa, Oryza sativa
  Clone ID: TF_5103730.pep
ELKSHLLNKYSGYLSSLWRELSKKKKKGKLPRDARQKLLHWWQLHYRWPYPSELEKAALAESTGLDAKQINNWFINQ

SEQ ID NO: 24449 - protein, 311 aa, Oryza sativa; identical to SEQ ID NO: 17032
  Clone ID: TF_OsC244_4.pep

SEQ ID NO: 24450 - protein, 311 aa, Oryza sativa
  Clone ID: TF_OsC1190_1.pep
MEDLYSIHPGISRGGGGGGGGAASEASGVAGGGSSPPHPPPPATTAAAADLTELMKAQIAGHPSYPSLLSAYIECRKVGAPPEVTTLLEEIGREGRGGGGGATAGGEIGLDPELDEFMETYCRVLERYKEELTRPFDEAASFLTGIHTQLASLCGGAPPPTDNSDEMVGSSEDEPCSGDADAADFGQEHSSRLADHELKEMLLKKYSGCLSRLRSEFLKKRKKGKLPKDARSALMDWWNTHYRWPYPTEEDKVRLAAMTGLDPKQINNWFINQRKRHWKPSEDMRFALMEGVTGGSSSGTTLYFDTGTIGP

SEQ ID NO: 24451 - protein, 268 aa, Oryza sativa; identical to SEQ ID NO: 17040
  Clone ID: TF_OsC244_2.pep

SEQ ID NO: 24452 - protein, 321 aa, Oryza sativa; identical to SEQ ID NO: 17041
  Clone ID: TF_OsC2119_1.pep

SEQ ID NO: 24453 - protein, 973 aa, Oryza sativa
  Clone ID: TF_OsC23897_1.pep
MGMVRKIGRAGREADASSSPELLPGPAQPASLTSEDAFVARTGTALKHLNIGVEDAVDAAPAVGSADGSDIRRAVNRRTLRPRRGLWVRSGVAAGSISSPDLSPDVRVPGEIDNDREAFAHHGAHRPGLPRVVGSESGCEACGRGGVDPRKRTFSSLRRGVLLRRGGGGMSFGGLFDGGGGGGMQFPFASGFASSPALSLALDNAGGGIGGRMLGGGAGAGSSAGGAMTRDTEAENDSRSGSDHLDAISAAGEDDVEDAEPSNSRKRKKRYHRHTPQQIQELEALFKECPHPDEKQRAELSRRLSLDARQVKFWFQNRRTQMKTQLERHENALLKQENDKLRAENMTIREAMRSPMCGSCGSPAMLGEVSLEEQHLRIENARLKDELNRVCALATKFLGKPISLLSPPPLLQPHLSLPMPNSSLELAIGGIGGLGSLGTLPGCMNEFAGGVSSPMGTVITPARATGAAIPSLVGNIDRSVFLELAISAMDELVKMAQMDDPLWVPALPGSPSKEVLNFDPCVRSFLPCIGMKPAGYVSEASRESGLVIIDNSLALVETLMDERRWSDMFSCMIAKATVLEEVSTGIAGSRNGALLLMKAELQVLSPLVPIREVTFLRFCKQLAEGAWAVVDVSIDGLVRDHNSGTAPTGGNVKCRRVPSGCVMQDTPNGYCKVTWVEHTEYDEASVHQLYRPLLRSGLAFGARRWLATLQRQCECLAILMSSATVTANDSTAISQEGKRSMLKLARRMTENFCAGVSASSAREWSKLDGATGSIGEDVRVMARKSVSEPGEPPGVVLSAATSVWVPVAPEKLFNFLRDEQLRAEWDILSNGGPMQEMTQIAKGQRDGNSVSLLRASAVSANQSSMLILQETCTDASGSIVVYAPVDIPAMQLVMNGGDSTYVALLPSGFAILPDGPRIGATGYETGGSLLTVAFQILVNNQPTAKLTVESVETVNNLISCTIKKIKTALQCDA

SEQ ID NO: 24454 - protein, 855 aa, Oryza sativa; identical to SEQ ID NO: 17034
  Clone ID: TF_OsC434_1.pep

SEQ ID NO: 24455 - protein, 785 aa, Oryza sativa
  Clone ID: TF_OsC775_3.pep
MMIPGRNMSPAMIGRPNGGGGGGGVAYASSSSALSLMQSLLDGHHHQLPSLLQQHHNGHHLLDQHQQHQHQLPPQATTTSESDGRAPRDELEMSKSGGSDNLESGGGGGGGGSGGDQDPNQRPRKKRYHRHTQHQIQELEAFFKECPHPDDKQRKELSRELGLEPLQVKFWFQNKRTQMKTQHERHENNALRAENEKLRAENMRYKEALANASCPNCGGPAAIGEMSFDEHHLRLENARLRDEIDRISAIAAKYVGKPAAAVSAAYPPLPPSNRSPLDHMGIPGAGADVFGADFDKPLVIELAVAAMEELVRMAQLGEPLWAPALGGEALGEEEYARTFPRGLGPKSPELRSEASRETAVVIMNHVSLVEMLMDVGQWTALFSSIVSRAATLEVLSTGVAGNHNGALQLMSAEFQMPSPLVPTRETQFLRYCKQHPDGTWAVVDVSLDGLRAGAGGGCQPAAARGHRRRPSGCLIQEMPNGYSKVTWVEHVEADDQMVHNLYKPVVNSGMAFGARRWVATLERQCERLASAMASNVASSGDAGVITTSEGRRSMLKLAERMVASFCGGVTASTTHQWTTLSGSGAEDVRVMTRKSVDDPGRPPGIILNAATSFWLPVPPSRVFDFLRDDSTRSEWDILSNGGVVQEMAHIANGRDHGNAVSLLRVNNANSNQSNMLILQECCTDATGSYVIYAPVDVVAMNVVLNGGDPDYVALLPSGFAILPDGPDGGGGSLLTVAFQILVDSVPTAKLSLGSVATVNSLIACTVERIKAAITGDNGVAPPCPR

SEQ ID NO: 24456 - protein, 239 aa, Oryza sativa; identical to SEQ ID NO: 17037
  Clone ID: TF_OsC155919_1.pep

SEQ ID NO: 24457 - protein, 872 aa, Oryza sativa
  Clone ID: TF_OsC8602_1.pep
MAMAHMLGWAGPSLHASDHHCLRPRRRTPPPEPLPPLGRRGGDRGSPRPCAVLAIPLVSLCPHPDDFRFTSLALLVFFHSTEVMNGELKLMASYVSKLKFILQKDQQQEPHTANLLVLLGSSNQDKRNGLSQGENRMDTCTRKKPRRYQLLTMQQKETLNRAFQSCPNPDRNDLKKLAKELNMTETQIKYWFQNCRTKMKKFKNNEERKLLQKENEELKKENAELRNRMKNSTCRACDLPLFHIDCRHWENPMLNKGNHGVTSNLIPQAVSSLLPSSSGFVASGSNLSSNAVLMPVSAMPSSVLQPAPAVSGANFPILHNLSANANDGYTEKNVLDLANRAMEEFFSLMKENESLLVKKKENGPLWLPHMDILGVESLNYQEYLAKSRTIGQKPVDFKVVVTRDTAIVNGSCVDLVKSLLDANRWRELFPGIVASANTTKIISTGPSNLHDGLLQLKNLQMRAELQVMSPEVPVCDVTFLRQSVQFGSGLWCVVDVSIDTILPGESKTAQSSVQTSSTAARRMEVRLLPSGCVIEEMENGYSKVTWMVHAAYDERAVPVLYHSLLRSAKALGACRWVASLQRHSQFLSGLHKYIFCPDSTMTEVVMRRKVLYLVKQMTSSFTGLFASMSKATLQDGDDTHFAHQIVGGATGEPAGLLLSATTTIWLPGVNPRHVYDHLRDEQCHGEWRCLLGEQLHQGNALPYGAPLNGETVPEFYRMVNGLHEGHAISLISPREMGGNISNTLLLQEARTDLSGSLIVYARTDVNTVHSIMNSGLNPATVFLVSSGCAILPDCLESFPLHPAATADQAGTSSAAIASRSETGGSFVTVTYQMFFSSQGGAAPASSSIHQGRDALKKATDIFKVVLDTLTVA

SEQ ID NO: 24458 - protein, 305 aa, Oryza sativa
  Clone ID: TF_OsC230307_1.pep
MKRPSCRGSSMAIIHDTSDQQEDNMRSYMDGGGAAAYEEEEEEVEDDDGGGGGGGGGGGGGLGEKKRRLAAEQVRALERSFEADNKLDPERKARIARDLRLHPRQVAVWFQNRRARWKTKQIERDFAALRSRHDALRLECDALRRDKDALAAEIADLRDRVDGQMSVKLEAVAADEHQPPPPPPPPPLAYNSKVVDGSTDSDSSAVFNEEASPYSGAAIDHHHHQTPASYDTAGFTSFFAPSTTLTSSLSFPSMFHASSHFDGHQELLVGGGGAGAVADADLGGAGFFAGDEHAGGLSWYGAEGW

SEQ ID NO: 24459 - protein, 889 aa, Oryza sativa
  Clone ID: TF_OsC25864_1.pep
MISPAGHMRRMLGDCQVLSSMAAMAGAASSADALFASPLIPNPALAGFMSSSAAMPFHHFSNAAATLIPKEEGLMGGLHVAKDEGMDLEMDMELSGGSGSAHLDGLLSFADVDDDHKPQHSGHDQPPDAAQPSGAAGGNAKKKRYHRHTAHQIQQMEALFKECPHPDDKQRLKLSQELGLKPRQVKFWFQNRRTQMKAQQDRADNVILRAENENLKSDNFRLQAAIRNVVCPNCGHAAVLADMSYEEQQLRIENARLKDELDRLACIATRYGGGGGRQPVLSTSALSCISAPPPVLMPPLDLDMNVYSRHFAEQAPVMGCGDLIPPPVVPQHDGAAAYMGAMMAPVQEQDKQLVVDLAATAADQLARMCRAGEPLWVRQRGAEVMAVEEHARMFSWPVDGAKQGDGGAVARAEGTRDNAVVIMNSINLVDAFLDANKWMELFPSIVCKARTIQIINHGAASGHLGSGTLLLMQAEVQFLSPLVAAREVVFFRYCVHNADEGSWAIVDFPAEGFEEGLLQASVVRCRRRPSGCIIQDMPNGYSRVVWVEHMEMVGEEKPLQPVFRDYVASGAAFGATRWLSILQRQCERLASELARNIADLGVIRTPEARTNMMKLSQRMITTFCANISASGTQSWTALSDSTQDTIRVTTRKNTEPGQPSGVILTAVSTSWLPFTHQQVFELLADEQQRCQLEILSNGGSLHEVAHIANGSHPRNCISLLRINAASNSSQNVELLLQESSTHPDGGSLVVFATVDVDAIQVTMSGEDPSYIPLLPLGFAIFPATSPSPAAAPTISSSTTTTTGNGNGETSSTPPRNSSSNNNNADELLPPNGCLLTVGMQVLASAVPSAKLNLSSVTAINSHVCNAIHQITAALKSSAGGAGGEPASDQ

SEQ ID NO: 24460 - protein, 129 aa, Oryza sativa
  Clone ID: TF_LIB3432-004-P1-K1-G7.pep
VHLLERSFEEENKLEPERKTELARKLGLQPRQVAVWFQNRRARWKTKQLERDFDRLKASFDALRADHDALLQDNHRLHSQVMSLTEKLQEKETTTEGSAGAAVDVPGLPAAADVKVAVPDAEEPALEEA

SEQ ID NO: 24461 - protein, 125 aa, Oryza sativa; identical to SEQ ID NO: 17043
  Clone ID: TF_OsC330010_1.pep

SEQ ID NO: 24462 - protein, 851 aa, Oryza sativa; identical to SEQ ID NO: 17044
  Clone ID: TF_OsC23897_2.pep

SEQ ID NO: 24463 - protein, 277 aa, Oryza sativa
  Clone ID: TF_OsC2116_1.pep
MKRPGGAGGGGGSPSLVTMANSSDDGYGGVGMEAEGDVEEEMMACGGGGEKKRRLSVEQVRALERSFEVENKLEPERKARLARDLGLQPRQVAVWFQNRRARWKTKQLERDYAALRHSYDSLRLDHDALRRDKDALLAEIKELKAKLGDEEAAASFTSVKEEPAASDGPPAAGFGSSDSDSSAVLNDVDAAGAAPAATDALAPEACTFLGAPPAAGAGAGAAAAASHEEVFFHGNFLKVEEDETGFLDDDEPCGGFFADDQPPPLSSWWAEPTEHWN

SEQ ID NO: 24464 - protein, 196 aa, Oryza sativa; identical to SEQ ID NO: 17054
  Clone ID: TF_OsC2116_6.pep

SEQ ID NO: 24465 - protein, 292 aa, Oryza sativa; identical to SEQ ID NO: 17055
  Clone ID: TF_OsC224908_1.pep

SEQ ID NO: 24466 - protein, 713 aa, Oryza sativa; identical to SEQ ID NO: 17056
  Clone ID: TF_OsC64951_1.pep

SEQ ID NO: 24467 - protein, 857 aa, Oryza sativa; identical to SEQ ID NO: 16460
  Clone ID: TF_OsC42451_2.pep

SEQ ID NO: 24468 - protein, 886 aa, Oryza sativa; identical to SEQ ID NO: 17051
  Clone ID: TF_OsC1713_3804.pep

SEQ ID NO: 24469 - protein, 1108 aa, Oryza sativa; identical to SEQ ID NO: 17062
  Clone ID: TF_OsC81847_1.pep

SEQ ID NO: 24470 - protein, 199 aa, Oryza sativa
  unsure (1)..(199): unsure at all Xaa locations
  Clone ID: TF_LIB3598-004-P1-K1-B9.pep
RSQLASWARMGVGRGDHHHLQQQHQFLMPPPAPVVPPQLCMPAMMADEQYMDLGGGGAXAARGGGGAGERKRRFTEEQIRSLESMFHAHHAKLEPREKAELARELGLQPRQVAIWFQNKRARWRSKHFEHDYAALRSKYDALHSRVESLKQEKLALTVQLHELRXRLREREERSGNGGAATTAASSSSCNGSGSEEVDD

SEQ ID NO: 24471 - protein, 235 aa, Oryza sativa
  Clone ID: TF_OsC52478_2.pep
WYGRAQLASWARIAMDRGDHHHLQQQHQFLMPPPAPVVPPQLCMPAMMADEQYMDLGGGGAAAAPGRGGAGERKRRFTEEQIRSLESMFHAHHAKLEPREKAELARELGLQPRQVAIWFQNKRARWRSKQLEHDYAALRSKYDALHSRVESLKQEKLALTQRRELIMLPGGEDGGKHRGATADEEAAATAASLNDLCATAGDAGGLPALAPFPRAAARPRRRAQRRTARGGRAPL

SEQ ID NO: 24472 - protein, 1156 aa, Oryza sativa
  unsure (1)..(1156): unsure at all Xaa locations
  Clone ID: TF_OsC42451_1.pep
MAAAVAMRSGSGSDGGGGGYDKAGMDSGKYVRYTPEQVEALERVYAECPKPSSSRRQQLLRDCPILANIEPKQIKVWFQNRRCRDKQRKEASRLQAVNRKLTAMNKLLMEENERLQKQVSQLVHENAYMKQQLQNPSLGNDTSCESNVTTPQNPLRDASNPSGLLTIAEETLTEFLSKATGTAVDWVPMPGMKVDCQLLRFTLPASNDPGPDSFGIVAVSHGCRGVAARACGLVNLEPTKIVEILKDRPSWFRDCRSLEVFTMFPAGNGGTIELVYMQMYAPTTLVPARDFWTLRYTTTMEDGRLVVPVLADDDAAVARHAPLVMRSNRKAGIDFVDPRATFCPEAAMLVLSVPTPAGVRVLREHGSEWADYKTDADLASALKTSACSPPGLRPRRFSGSRSLSGSGGGLSTASVQEVVRVEMLPSLYMVRPCDRGGSIVHIVDQQQPGRWWDPPFRLALHRLMISQMKLHXISSGFRVIPLDMKTDGASSGRTLDLASSLEVGSATAQASGDASADDCNLRSVLTIAFQFPYELHLQDSVAAMARQYVRSIVSAVQRVSMAISPSQTGLNAGQRIISGFPEAATLARWVCQSYHYHLGVELLSQSDGDAEQLLKMLWHYQDAILCCSFKEKPVFTFANKAGLDMLETSLVALQDLDLEALFVPDVLRPLFESFRVVAQKMTTAALRHIRQIAQETSGEVVYALGRQPAVLRTFSQRLSRGFNDAISGFNDDGWSVMGMDGIEVVIIACNAKKVRNTSTSANAFVTPGGVICAKASMLLQSVPPAVLVRFLREHRSEWADYNFDAYSASSLKTSSCSLPGLRPMRFSGSQIIMPLAHTVENEEILEVVRLEGQALTHDDGLMSRDIHLLQLCTGIDEKSMGSCFQLVSAPIDELFPDDAPLISSGFRVIPLDMKTDGTPAGRTLDLASSLEVGSTAQPTGDASMDDCNLRSVLTIAFQFPYEMHLQDSVATMARQYVRSIVSSVQRVSMAISPSRSGLNAGQKIISGFPEAPTLARWICQSYQFHLGVELLRQADDAGEALLKMLWDYEDAILCCSFKEKPVFTFANEMGLNMLETSLVALQDLSLDKIFDEAGRKALYNEIPKLMEQGYVYLPGGVCLSGMGRHVSFEQAVAWKVLGEDNNVHCLAFCFVNWSFV

SEQ ID NO: 24473 - protein, 228 aa, Oryza sativa
  unsure (1)..(228): unsure at all Xaa locations
  Clone ID: TF_OsC2118_1.pep
TTLLLLPLHPSTHSTISSSSSSISHGFRPSIIRARSGAMDGEEDSEWMMMDVGGKGGKGGGGGGAADRKKRFSEEQIKSLESMFATQTKLEPRQKLQLARELGLRPRQVAICFRSKRARWKSRELERAYFPLRDAYDALLWTYESLNKEKLALIKQVGKLVEKLEEARGKHGDRAGDDARSGGLAGIQKQELVPPDGAASLHXSAEGGGTSSTEQTCSSTPWWEFESE

SEQ ID NO: 24474 - protein, 301 aa, Oryza sativa; identical to SEQ ID NO: 17067
  Clone ID: TF_OsC1620_1.pep

SEQ ID NO: 24475 - protein, 709 aa, Oryza sativa
  Clone ID: TF_OsC1034_1.pep
MEMNQQHNEGNESFVALMNGFAGDGTATLPNDGEQRMSIPARELFAAIEADSGLLPVNSSNTNEKRKRRLQRLTGKQSEVLEGFFSICGHPDDGQKRHLSETTGLGLDQVKFWFQNKRTQVKTMCWKEENYKLSVENEILRDENRRVKIAHCTAVCLTCCNSSVQNQLAVEMERLMGQSEWLQQEIARSNGTPPAANLAFQLNSSADYVFSGQHDQQMIAELAKNAMHALIILAESHVALWFPVPGCSYEVLNKMAYDQAYPGDNSANAIGFKTEATRAVSMVMMDYKSVVDFLMDPYNYRTFFPEVISGAVTNRIYTWPTSDGYNGVIQLMTVEMMFPSPLVPARKCTFLRYCNVLNEGLVVVIDVSLDDGSIFSKCRKMPSGFLIQSIRPNSCKVTAIEHVLADDTGVHELYQPRVNGLVFGARRWVATMARQSARMRDVHHNKTAPQVSTKGRKNLMKLADDLLASFAGGIAATGGGTWTVVIGAGTEKDIRVAYRRTTEGSSSYNAILSVTASLRLPLPMRKTFDLLRNLTHRCKWDVLVHGSVVKEEVTIARGVGNDDTVTVLHCKRAGREDRGRTMILQNNGYDASGSFMVYSQIDSELMNTMVLSPSDLPPGRGGPSLYPTGFSLLPDVEAAQDSSGIALGEVGGTLMTMGFQIPVKLASGDRMYSRSAASAIRLMTDTIALVKKTLMNEHSGIYGVSPFHP

SEQ ID NO: 24476 - protein, 726 aa, Oryza sativa; identical to SEQ ID NO: 17059
  Clone ID: TF_OsC1034_2.pep

SEQ ID NO: 24477 - protein, 307 aa, Oryza sativa; identical to SEQ ID NO: 17060
  Clone ID: TF_OsC244_3.pep

SEQ ID NO: 24478 - protein, 342 aa, Oryza sativa; identical to SEQ ID NO: 17058
  Clone ID: TF_OsC157633_1.pep

SEQ ID NO: 24479 - protein, 781 aa, Oryza sativa; identical to SEQ ID NO: 17068
  Clone ID: TF_OsC775_2.pep

SEQ ID NO: 24480 - protein, 350 aa, Oryza sativa
  Clone ID: TF_OsC1920_2.pep
MDPGRVVFDSGVARRACPGGAQMLLFGGGGSANSGGFFRGVPAAVLGMDESRSSSSAAGAGAKRPFFTTHEELLEEEYYDEQAPEKKRRLTAEQVQMLERSFEEENKLEPERKTELARRLGMAPRQVAVWFQNRRARWKTKQLEHDFDRLKAAYDALAADHHALLSDNDRLRAQVISLTEKLQDKETSPSSATITTAAQEVDQPDEHTEAASTTGFATVDGALAAPPPGHQQPPHKDDLVSSGGTNDDGDGGGAAVVVFDVTEGANDRLSCESAYFADAAEAYERDCAGHYALSSEEEDGGAVSDEGCSFDLPDAAAAAAAMFGAAGVVHHDAADDEEAQLGSWTAWFWS

SEQ ID NO: 24481 - protein, 108 aa, Oryza sativa
  Clone ID: TF_OsC434_3.pep
MAAAMVAAVHGVGRQDRSSPGGGGAPQVDTGKYVRYTPEQVEALERVYGECPKPSSLRRQQLIRECPILSNIEPKQIKVWFQNRRCREKQRKEASRLQTVNRKLTAMN

SEQ ID NO: 24482 - protein, 275 aa, Oryza sativa
  unsure (1)..(275): unsure at all Xaa locations
  Clone ID: TF_OsC52478_1.pep
MEMSDRHRRRQPHKFXTTRPAPVEQPQFCMRPMMAAEQHAALGGGGATAAPAXGGGGERKRRFTEEQVRSLETTFHARRAKLEPREKAELARELGLQPRQVAIWFQNKRARWRSKQIEHDYAALRSKYDALHARVESLRQEKLALADQVRAPLPTNHQLRERLREREERSGNGGAATTAASSSSCNGSGSEEVDDDKRNSVMNASSSGLVEEDYVSCLAVPVVDVSEDGSAACGGSSYEYDHHLDYLGGGQLPDPFCGMPDLWEIWPMVEWNAVA

SEQ ID NO: 24483 - protein, 351 aa, Oryza sativa; identical to SEQ ID NO: 17022
  Clone ID: TF_OsC1920_3.pep

SEQ ID NO: 24484 - protein, 373 aa, Oryza sativa
  unsure (1)..(373): unsure at all Xaa locations
  Clone ID: TF_OsC1920_1.pep
MASNGMASSPSSFFPPNFLLHMAQQQAAPPHDPQEHHHHHHHGHHGHHHEQQQQQQHHHHLGPPPPPPPHPHNPFLPSSAQCPSLQEFRGMAPMLGKRPMSYGDGGGGGDEVNGGGEDELSDDGSQAGEKKRRLNVEQLCLFKLYVLEMTFEHGNKLEQERKMKLARKLGLQPRQVAVWFQNRRARWKTKQLERDFDRLKRPLDAVRADNDALLEDNENLHAEVMSXALKGREAASELINLNKETEASCSNRSENSSEINLDISRTPPPDAAALDTAPTAHHHHHGGGGGGGGGGGMIPFYTSIARPASGGGVDIDQLLHSSSGGAGGPKMEHHGGGGNVQAASVDTASFGNLLCGVDEPPPFWPWPDHQHFH

SEQ ID NO: 24485 - protein, 767 aa, Oryza sativa
  unsure (1)..(767): unsure at all Xaa locations
  Clone ID: TF_OsC2076_2.pep
ALSTNVKSSAVRNSYKQIVKRGRKGSEISPSKTYPLRSTHSNVMMLRGASKRNXSXPNVPTNENTGIQRVAXKGVQANXLTPSPCRALRXTWKSKNXTHNKLRNDGAGVQPAEKKRKVGRPPKGGTPKDDYLMIRKRVRYVLNRMNYEQSLIQAYASEGWKGQSLEKIRPEKELERAKVEILRCKSRIREAFRNLDSLLSEGKLDESMFDSAGEISSEDIFCAACGSKDVTLKNDIILCDGICDRGFHQYCLNPPLLAEDIPQGDEGWLCPACDCKIDCIDVLNELQGVKLSIHDSWEKVFPEAASFLNGSKQIDASDLPSDDSADNDYDPTLAQGHKVDEEKSSGEDGGEGLDSDDSSSEDSESSEKEKSKTSQNGRTVDDLGLPSEDSEDGDFDPAGPDSDKEQNDESNSDQSDESDFTSDSDDFCAEIAKSCGQDEISGPSSSQIRTVDRTDGSGFDGEPNAENSNLAFMETELEQDMVLPISSKRQVERLDYKKLYNEAYGKASSDSSDDEEWYGNSTPEKGNLEDSETDSLAESPQGGKGFSRRAPVRYHNNEHTPQNVRPGGSVSDQQTEVLCSNSNGSTAKNRHFGPAINQKLKAHFKEDPYPSRATKENLAQELGLTFNQVTKWFSSTRHYARVAATKKENNIENHTAENNNNTNTVDSIQLRGSNDIVSVDRNDMVSEERTGQSNLNEGTPLRSDTSCGQSVAVTPMVHPENQGNDSSSNVRTPNAKSAEKLIPGLENSDEARRKAVQRELRKMKTGR

SEQ ID NO: 24486 - protein, 355 aa, Oryza sativa
  Clone ID: TF_OsC1191_1.pep
MDQSFGNLGGGGGAGGSGKAAASSFLQLPLSTAAAATAYYGTPLALHQAAAAAGPSQYHGHGHPHHGGGHHHSKHGGAGGGEISAAEAESIKAKIMAHPQYSALLAAYLDCQKVGAPPEVLERLTATAAKLDARPPGRHDARDPELDQFMEAYCNMLAKYREELTRPIDEAMEFLKRVESQLDTIAGGAHGGGAGSARLLLADGKSECVGSSEDDMDPSGRENEPPEIDPRAEDKELKFQLLKKYSGYLSSLRQEFSKKKKKGKLPKEARQKLLHWWELHYKWPYPSETEKIALAESTGLDQKQINNWFINQRKRHWKPSEDMPFVMMEGFHPQNAAALYMDGPFMADGMYRLGS

SEQ ID NO: 24487 - protein, 344 aa, Oryza sativa
  Clone ID: TF_OsC1920_5.pep
MESGRLIFSTAGSGAGQMLFLDCGAGGGGVGGGAMFHRGARPVLGMEEGGRGVKRPFFTTPDELLEEEYYDEQLPEKKRRLTPEQVHLLERSFEEENKLEPERKTELARKLGLQPRQVAVWFQNRRARWKTKQLERDFDRLKASFDALRADHDALLQDNHRLHSQVMSLTEKLQEKETTTEGSAGAAVDVPGLPAAADVKVAVPDAEEPALEEAAAAFEEQQEQQVKAEDRLSTGSGGSAVCGHGRANWVVGCGRQHLAAVDSSVESYFPGGDEYHDCVMGPMDHAAGGIQSEEDDGAGSDEGCSYYADDAGVLFADHGHHHHHQHADDDEEDGQQISCWWMWN

SEQ ID NO: 24488 - protein, 229 aa, Oryza sativa
  Clone ID: TF_OsC2115_1.pep
MMGATSPSGLELTMAVPGLSSSGSEGAGCNNNNAGGGCNMRDLDINQPASGGEEEEFPMGSVEEDEEERGVGGPHRPKKLRLSKEQSRLLEESFRLNHTLTPKQKEALAIKLKLRPRQVEVWFQNRRARTKLKQTEMECEYLKRCFGSLTEENRRLQREVEELRAMRVAPPTVLSPHTRQPLPASALTMCPRCERITAATGPPAVRPPPSSAAAAAPSPFHPRRPSAAF

SEQ ID NO: 24489 - protein, 871 aa, Oryza sativa; identical to SEQ ID NO: 17021
  Clone ID: TF_OsC310466_1.pep

SEQ ID NO: 24490 - protein, 278 aa, Oryza sativa
  Clone ID: TF_OsC244_8.pep
MRAEHALCNHAVHPQVRQQPCLAPALVFEGAMMERAEDLRLSLSLSSPLIAPRTHHVAMLFHAPPEKRFLEMPLLPAAKRSEVVAAEEERAGLRGGGGSDEEDGGCGIDGSRKKLRLSKDQSAVLEDSFREHPTLNPRQKATLAQQLGLRPRQVEVWFQNRRARTKLKQTEVDCEFLKRCCETLTEENRRLQKEVQELRALKLVSPHLYMNMSPPTTLTMCPSCERVSNTNNNSSAAAAADRRGIRTTTAAGGGSVVDTAADGGILCHRPIAVRPQQS

SEQ ID NO: 24491 - protein, 1226 aa, Oryza sativa
  Clone ID: TF_OsC36_9.pep
MAGNEWINGYLEAILDSGGAAGGGGGGGGGGGGGGGGGGGGGGGGVDPRSPAAGAASPRGPHMNFNPTHYFVEEVVKGVDESDLHRTWIKLELEGILRISARRKEQEQVRRETSEDLAEDLFEGEKADTVGELAQQDTPMKKKFQRNFSELTVSWSDENKEKKLYIVLIRSYTAYFTHWCHSVYATKLQNFTEFLYSLFYFSLHGLVRGDNMELGRDSDTGGQVKYVVELARALAMMPGVYRVDLFTRQVSSPEVDWSYGEPTEMLTSGSTDGEGSGESAGAYIVRIPCGPRDKYLRKEALWPYLQEFVDGALAHILNMSKALGEQVSNGKLVLPYVIHGHYADAGDVAALLSGALNVPMVLTGHSLGRNKLEQIMKQGRMSKEEIDSTYKIMRRIEGEELALDAAELVITSTRQEIDEQWGLYDGFDVKLEKVLRARARRGVSCHGRFMPRMVVIPPGMDFSSVVVPEDTSDGDDGKDFEIASPRSLPPIWAEVMRFLTNPHKPMILALSRPDPKKNITTLVKAFGECRPLRELANLILIMGNRDDIDEMSAGNASVLTTVLKLIDKYDLYGSVAFPKHHKQSDVPEIYRLTGKMKGVFINPALVEPFGLTLIEAAAHGLPIVATKNGGPVDIKNALNNGLLVDPHDQHAIADALLKLVADKNLWQECRKNGLRNIQLYSWPEHCRTYLTRIAGCRIRNPRWLMDTPADAAAEEEEALEDSLMDVQDLSLRLSIDGERGSSMNDAPSSDPQDSVQRIMNKIKRSSPADTDGAKIPAEAAATATSGAMNKYPLLRRRRRLFVIAVDCYGDDGSASKRMLQVIQEVFRAVRSDSQMSRISGFALSTAMPLPETLKLLQLGKIPPTDFDALICGSGSEVYYPSTAQCVDAGGRLRPDQDYLLHINHRWSHDGAKQTIAKLAHDGSGTNVEPDVESCNPHCVSFFIKDPNKVRTIDEMRERVRMRGLRCHLMYCRNATRLQVVPLLASRSQALRYLFVRWGLSVGNMYLIVGEHGDTDHEEMLSGLHKTVIIRGVTEKGSEQLVRSSGSYQREDVVPSESPLIAFTKGDLKADEIMRALKEVTKAASGMDWQRPLCKTAYWFQSRVYTNMEEKEEMTMLSLGVGAASKHSISNRKFRLKEVTDHKFNLGDQDHNSGHVRKKLRLSEEQLTVLENMYEAGSNLDQALKQGLAEKLNIKPLQVEVWFQNRRARTKHKQIEEECKNRGGWRA

SEQ ID NO: 24492 - protein, 250 aa, Oryza sativa; identical to SEQ ID NO: 17029
  Clone ID: TF_OsC139567_1.pep

SEQ ID NO: 24493 - protein, 320 aa, Oryza sativa; identical to SEQ ID NO: 17030
  Clone ID: TF_OsC267403_1.pep

SEQ ID NO: 24494 - protein, 302 aa, Oryza sativa
  Clone ID: TF_OsC10707_1.pep
MAAAEAAAAVGKQQQKGGGGRGGGGGGPAPFLTKTNQMMEESAHVLGVFWGKTCPYCLVLIRTETCYDCPSIRSHDLTGANERWRLFMQGFRKVVPDRWEFANGNFRRGEQGLLSGIRRRKATTPQSSKSCGSGVNVAFPPPLPPLPPEPSATTSSGNDRSSSSASSPPRADITSENEQLRKDNQTLTMELARARRHCEELLGFLSRFLDVRQLDLRLLMQEDMRAAAGGVGGEQRVQEHAREEKCVKLFGVLLDDTHGAATRKRARCEEAAASERPIKMIRIGEPWVSVPSSGPARCGGDN

SEQ ID NO: 24495 - protein, 527 aa, Oryza sativa
  unsure (1)..(527): unsure at all Xaa locations
  Clone ID: TF_OsC165344_1.pep
MDHNTDPPPTTMVDAAAALLLEPKLEGYDDDGGGEPLQPAPFVSPLDQLMQPPRPLEALLQGPHLPPFLSKTYDLVCEPELDXVISWGPRRLQRRRPGHLRLRAEPHVSPDLVLQRLHQRNNVYRLVCPLSTYXKKKIGHDEIPGHSKHWLMKIVRRRYSPTQQSGLQHGSSVESGLDPELNTLRREKSALLQEVTRLKQEHLQTIEQMSTLNQRLESAEDRQKQMVSFLAKLLQNPTFLRQLKMHRQQKEIDSTRVKRKFLKHVPHGNIDSGESSSQHTGESNLDFSPTSLDLPATHSDILDLQNFLLEDGDLNLAMLPENIGLDGIEAPDDIGALVQGFDTQEELELGSGVELLEIPPASGPRGQDPTIGRSKGKNVLSPGLDATSSEADCLGSFSDNMGMLSDSMLQTAGKLMDADDDERIWGVDASSALQSSCSGTSQQAYGSLVSDPYLMEMANKPEKFWELDFQALDDGDLQLDNPEKVLDTGVVAQAQALELGGLTQATELKKACFFLRLITQGTNQTGP

SEQ ID NO: 24496 - protein, 95 aa, Oryza sativa
  unsure (1)..(95): unsure at all Xaa locations
  Clone ID: TF_LIB3433-009-Q6-K1-C9.pep
NLQGFRKVDPDRWEFAXNEGFLRGQRHLLKTIKRRKPPSNAPPSQQQSLTSCLEVGEFGFEEEIDRLKRDKNILITEVVKLRQEQQATKDHVKAM

SEQ ID NO: 24497 - protein, 156 aa, Oryza sativa
  Clone ID: TF_LIB3599-044-Q1-K1-G1.pep
PRVRWGKGNNSFVVADPFVFSQTLLPAHFKHNNFSSFVRQLNTYVSLVTPSSISSSHHTPPLSALHIMLPWILSGTQLKVSSEGLRPWPMDLSYMVLEFVCACVLGDSLEDEIKNCCGGWHVDFVDLERQEVRGEDNRVWDPSFIGVALNCTYALL

SEQ ID NO: 24498 - protein, 497 aa, Oryza sativa; identical to SEQ ID NO: 17085
  Clone ID: TF_OsC98500_1.pep

SEQ ID NO: 24499 - protein, 206 aa, Oryza sativa
  Clone ID: TF_OsC255623_1.pep
MPTTTTARGGGGVAPFVAKTYRMVDDPATDGVIAWGRDSNSFVVADPFAFSQTLLPAHFKHSNFSSFVRQLNTYGFRKVDPDRWEFAHVSFLRGQTHLLRRIVRRSSGGGGAKRKEEAGGCGGGGEAAAGDVDEESAVVAMEVARLRREQREIEGRVAAMWRRVQETERRPKQMLAFLVKVVGDPQLVTIFRVLAYISPSSGFLSI

SEQ ID NO: 24500 - protein, 249 aa, Oryza sativa; identical to SEQ ID NO: 17086
  Clone ID: TF_OsC278100_1.pep

SEQ ID NO: 24501 - protein, 406 aa, Oryza sativa; identical to SEQ ID NO: 17088
  Clone ID: TF_OsC108229_1.pep

SEQ ID NO: 24502 - protein, 469 aa, Oryza sativa
  unsure (1)..(469): unsure at all Xaa locations
  Clone ID: TF_OsC8038_3.pep
MAEQGAGEADAGGGEPPPAAVMTAAAEALAGQRSLPTPFLTKTYQLVEDPAVDDVISWNEDGSTFVVWRPAEFARDLLPKYFKHNNFSSFVRQLNTYGFRKIVPDRWEFANDCFRRGEKRLLCDIHRRKHRQASGSGSAPGGGGGGSASGGDMGEENERLRRENARLTRELGHMKKLCNNILLLMSKYAATQHVEGSAGISSIANCSGESSEAVPPPPPLPPAILDLMPSCPALATAAAAAGLAIDGEPDPSARLFGVSIGLKRTRDDAAAAADEDGGGEDQAEHGGADVKPEAADPHPAGGGGGSSTEASPESHPWPIYRPTPMYHAVRPTCNGPDRAGSDQDGTSTSCAESPPIPQMHSRVDTRAKVSEIDVNSEPAVTETGPSRDQXPAEEPPAVTPGANDGFWQQFLTEQPGSSDAHQEAQSERRDGGNKVDEMKSGDRQHLWWGKRNVEQITEKLGLLTSTEKT

SEQ ID NO: 24503 - protein, 357 aa, Oryza sativa; identical to SEQ ID NO: 17083
  Clone ID: TF_OsC68408_1.pep

SEQ ID NO: 24504 - protein, 459 aa, Oryza sativa; identical to SEQ ID NO: 17092
  Clone ID: TF_OsC561_1.pep

SEQ ID NO: 24505 - protein, 379 aa, Oryza sativa; identical to SEQ ID NO: 17093
  Clone ID: TF_OsC84754_1.pep

SEQ ID NO: 24506 - protein, 380 aa, Oryza sativa; identical to SEQ ID NO: 17098
  Clone ID: TF_OsC8038_8.pep

SEQ ID NO: 24507 - protein, 539 aa, Oryza sativa; identical to SEQ ID NO: 17076
  Clone ID: TF_OsC8038_2.pep

SEQ ID NO: 24508 - protein, 384 aa, Oryza sativa; identical to SEQ ID NO: 17078
  Clone ID: TF_OsC106512_1.pep

SEQ ID NO: 24509 - protein, 247 aa, Oryza sativa
  unsure (1)..(247): unsure at all Xaa locations
  Clone ID: TF_LIB4506-021-R1-K1-D9.pep
TRPGGGSLPPFLSKTYEMVDDPSTDAVVGWTPAGTSFVVANQPEFCRDLLPKYFKHNNFSSFVRQLNTYGFRKVDPEQWEFANEDFIKGQRHRLKNIHRRKPIFSHSSHSQGAGPLTDNERKDYEEEIERLKSDNAALSSELQNNTLKKLNMEKRMQALEEKLFVVEDQQRSLISYVREIVKAPGFLSSFVQQQDHHXKKRRLPIPISFHEDANTQENQIMPCDLTNSPAQTFYRESFDKMESSFEL

SEQ ID NO: 24510 - protein, 221 aa, Oryza sativa
  Clone ID: TF_OsC211574_1.pep
MLYAGIRLPPADRAAPAPRPPRIIISTDLTIGSPGKPDDAACSPSSGGEKIDDTKPRGFLLFGQAILTEEQIKNGNSDGRPASPNWDAEKAPNTSEGSDSGVTQGSPTKNTTPSWSLPYFGGNNISRASEYELNPGQCKVFVESETVGRSLDLSALSSFEELYACLSDMFSIGSDELRSHLVYRSPAGEVKHAGDEPFCAFVKSARKLRILTDAGSDNLGD

SEQ ID NO: 24511 - protein, 183 aa, Oryza sativa; identical to SEQ ID NO: 17103
  Clone ID: TF_OsC109_3.pep

SEQ ID NO: 24512 - protein, 69 aa, Oryza sativa
  Clone ID: TF_uC-osflcyp128d03a1.pep
MLHIRAQAVGWPPVRSFRRNIMTVQSVKSKKEEEADKQQQQPAANASGSNSSAFVKVSMDGAPYLRRGT

SEQ ID NO: 24513 - protein, 225 aa, Oryza sativa
  unsure (1)..(225): unsure at all Xaa locations
  Clone ID: TF_OsC6551_1.pep
MKSSSVAPRLKQERQDDCKFQEGDVNSLELRLGISSDNDQISGGGAASPWLGVLVHPWSLAARQGKAALEQAHQRPNECAVQRENRAASSAQLVGWPPVRAFRKNLSTPKPADADDLMNKVKLCSDEGHGSRCAAQERRSSSTMFVKVNLEGYAVGRKIDLKAHRSYDSLSQALQSMFHGFLXQMALQLRDNELQQMEEGSKKRYVLVYEDNEGDRMLVGDVPWE

SEQ ID NO: 24514 - protein, 89 aa, Oryza sativa
  Clone ID: TF_LIB4370-026-R1-N1-D11.pep
SPGHVHRCFIESDTVGRNLDLSSLASFEQLYGRLSEMFCIDSAELRSRVLYRGATGEVRHAGDEPFSEFIKLARRLTILTDAGSDNLGS

SEQ ID NO: 24515 - protein, 32 aa, Oryza sativa
  Clone ID: TF_jC-osroLIB3475019d07a1.pep
VTYEDGEGDWMQVGDVPWEAFAKSVKRLKILV

SEQ ID NO: 24516 - protein, 95 aa, Oryza sativa
  unsure (1)..(95): unsure at all Xaa locations
  Clone ID: TF_LIB3479-005-Q6-K1-H6.pep
MNTDGYALHLKAITEAYLRPQQDQGLLYLKVSMDGXAPYLRNIDLKTYTNYKDLSTGLDKMFRGLSTGTDGLSDYRKDGEYVXLTYDDIDADCML

SEQ ID NO: 24517 - protein, 196 aa, Oryza sativa; identical to SEQ ID NO: 17120
  Clone ID: TF_OsC185566_1.pep

SEQ ID NO: 24518 - protein, 280 aa, Oryza sativa
  Clone ID: TF_OsC20595_1.pep
MRGGVAGPTAGEPPGTEAEAEEVEESSAGDDEELELGLSLGSKKQQQQQHAPCRILTARDLQPAAALSPDSSVSSSSPAAAAAAGGKRAEGPTATTSPGTVASGHPHSFGVVGWPPIRQFRMNSLFNQAKENTSETDTKKTATNESDVQKDKEEGEKKGRVAGWVKVNMDGEVIGRKVDLNAHRSYKTLALALELMFTKPSIGLCASHNTNSLKLLDNSAEYQLTYEDRDGDWMLVGDVPWEMFVSSVKRLRIMRTSDANGLGQRYQGIHRTIASTRGRS

SEQ ID NO: 24519 - protein, 194 aa, Oryza sativa
  Clone ID: TF_OsC16890_1.pep
SRPLAGELERRMELELGLRLALPSPSPSPATATAAGSELDLLNSAPGSCRKRGFEEALGGFKTDDDNDDGNGRGGDGDSDGEMGNKRRKLVGWPPVKCLHRRRDGGCGGGYVKVKMEGLAIGRKLDLSILGSYAELLDTLHLMFPSTNQEDGHDRRRRHPYAVTYEDGEGDWMQVGDVPWEAFAKSVKRLKILV

SEQ ID NO: 24520 - protein, 238 aa, Oryza sativa; identical to SEQ ID NO: 17113
  Clone ID: TF_OsC165755_1.pep

SEQ ID NO: 24521 - protein, 197 aa, Oryza sativa
  Clone ID: TF_OsC72583_1.pep
MENLKATELRLGLPGTEEEAAPPPSTPRAGSKRALAGEPDQAKIKPAAAAKAQVVGWPPVRSYRKSCLQPTTTTTKSKPPPAAAAAETQQKEDVAGAGGLFVKVSMDGAPYLRKIDLKVYKGYRELREALEAMFLCFSGGAAADAAVNPSDFAVTYEDKDGDLMLVGDVPFEMFISTCKRLRIMKGSEARGLGATRG

SEQ ID NO: 24522 - protein, 569 aa, Oryza sativa
  Clone ID: TF_OsC109_1.pep
MGAASSRLEKALGEQFPEGERYFGLENFGNTCYCNSVLQALYFCVPFREQLLEYYANYKSTGDSEDNLLTCLADLFSQITLAKKKTGVLAPKRFVQRVRKQNELFRSYMHQDAHEFWNFLVNDIIDILEEDCRTANSSPETTPEEVSNGAANALANGARERPLVTLVHRTFQGILTNETKCLMCDTITAKDETFFDLSIDVEQNSSLTSCLKSFFSTEILNGEDKFFCDKCSSLQEAHKRMKIKKAPHVLVIHLKRFKYVEQLSRHKPLPPPPPPPPLHTLLISSPSFPPIGIQTRRIPVHVLPLPMSPPLELDYIGLSPPPPPPSSSSAAAARADDVDLKGTELRLGLPGSESPDRRPAAIAAAAATATTLELLPAKGAKRVFPDEAALTPPTAAAGKGKAAREGEEVGAEEEDKKVAAPPQPAAKAQVVGWPPIRSYRKNTMATNQIKSNKEDVDAKQGQGFLYVKVSMDGAPYLRKVDLKTYKNYKDMSLGLEKMFIGFSTGKEGAENQKDGEYVLTYEDKDGDWMLVGDVPWEMFTDSCRRLRIMKGSDAIGLAPRAGEKSKNRN

SEQ ID NO: 24523 - protein, 105 aa, Oryza sativa
  unsure (1)..(105): unsure at all Xaa locations
  Clone ID: TF_OsC28546_1.pep
KVDLSKYTTAXQKLSSAVEELFRGFLEAQKDLFFAESGEQGAEDKIFSGLLDGTGVYTLVYEDNDGDRMLAGDIPWKVFVSTVKRLRVMRRSELPHDMIGADPVK

SEQ ID NO: 24524 - protein, 266 aa, Oryza sativa; identical to SEQ ID NO: 17116
  Clone ID: TF_OsC109_10.pep

SEQ ID NO: 24525 - protein, 226 aa, Oryza sativa; identical to SEQ ID NO: 17118
  Clone ID: TF_OsC157662_1.pep

SEQ ID NO: 24526 - protein, 271 aa, Oryza sativa; identical to SEQ ID NO: 17122
  Clone ID: TF_OsC125_1.pep

SEQ ID NO: 24527 - protein, 355 aa, Oryza sativa
  unsure (1)..(355): unsure at all Xaa locations
  Clone ID: TF_OsC20552_1.pep
MMNLISFETPPLGRRSQDGGSSSSSITAATTTINKAKEAASHLDLSLGISLSPGGGGGDAGTKASSCCYGGGGDGGGCMGSGMLTAGVLGVGHGGSSHDNTTTSSGGVAAGVLGVGHGGSSHDNTTASSGGGGSWTAAFMPSPTGFMHPWSLAARQQKAAAEQERSGVARLPPATTTYMPRAAATVISLPAAVGWPPVHTSRRNLTDTSNGDVRRRRNHGAPAKERGGGDRGQQDIEXMFAKVHMDGYKVGRKINLRAHRNYDSLRRVLTKMTHNFFCPADYSSTNKGEEDCAKSDEFIFLYEDFEGDRMLVGDVPWELFLASAKRLYIAKNPAPRNKEHAEIAKRKETEDAIDN

SEQ ID NO: 24528 - protein, 197 aa, Oryza sativa
  Clone ID: TF_OsC17802_1.pep
MAMAAESIDAELRLGLPGSGGGDGVAAKKRRSASSTVKSEASGTACCGGAGARDVEDGASPASKVQVVGWPPVGSYRRSTFQSSSSSTAAAAKGKGGGETDQGRKNKGGGLYVKVSMDGAPYLRKVDLRMYGGYRELRDALDALFGCFSADASASAAHFAVAYEDKDGDLMLAGDVPWDMFISSCKKLRIMRGSEAR

SEQ ID NO: 24529 - protein, 219 aa, Oryza sativa
  Clone ID: TF_OsC13832_1.pep
MASSSSLRSTSCLASAAETDADNLCLRLGPPGSSITTTTTTGGADPAAKRSLGAKRSLESTDSMASGTGTSAAGDEHDDDTAAPAKAQVVGWPPVRAYRRNTFHQAAAAAAATKKGGDEKQKQQQQGGGLYVKVSMDGAPYLRKVDLKMCKGYRELREALDLLFTKCFSATASDGCSDGQFAIAYEDKDGDLMLVGDVPWEMFISSCKKLRIMKGSEAR

SEQ ID NO: 24530 - protein, 203 aa, Oryza sativa; identical to SEQ ID NO: 17133
  Clone ID: TF_OsC34707_2.pep

SEQ ID NO: 24531 - protein, 297 aa, Oryza sativa
  Clone ID: TF_OsC123_1.pep
PPGAHTHTHSLLLSRCGSLDTTHTHTHSPTLSPVHVLLLPMSPPLELDYIGLSPPVPAAADAAADNDLKGTELRLGLPGSHSPDRSPPAATLDLLPAAKGAKRGFSDEARPLPASAAAAAAAGKGKKAAAGEEDEDAEEEDKKVAAAPQAPAAKAQVVGWPPIRSYRKNTMATNQLKSSKEDAEAKQGQGFLYVKVSMDGAPYLRKVDLKTYKNYKDLSTALEKMFIGFTTGKDGLSESRKDGEYVLTYEDKDGDWMLVGDVPWEMFANSCRRLRIMKGSDAIGLAPRAVDKSKNRN

SEQ ID NO: 24532 - protein, 321 aa, Oryza sativa
  Clone ID: TF_OsC436_2.pep
LNTINVHYPDQNANHNMYPGTWSLMPPNTGFGVNQQNYLMTPDITLPQRSLNAKFGGNGAFTSLRAHGIDQRSSGWLGHIEPSSHIDDASSSLIKPQPLVIDHNVQNAKGGSCMLFGISLDSPAKPELLISPPSVAFDGKLQQDALEEDECSDPSKTVKPLDGAQHDSAREKHQSCPDGTKNIQSKQQNGSSRSCKKVHKQGIALGRSIDLTKFTCYDELIAELDQMFDFNGELNSSSKNWMVVYTDNEGDMMLVGDDPWNEFCNMVHKIFIYTREEVQKMNPGALNSRSEDSRSTSVERGLVGEGLQGGLSTPSLNSENC

SEQ ID NO: 24533 - protein, 236 aa, Oryza sativa
  Clone ID: TF_17154532.pep
MAGADVDVGTELRLGLPGGGGGAAEAAAKAAKRGFEETIDLKLKLPTAGMEEAAAGKAEAPAAEKAKRPAEAAAADAEKPPAPKAQAVGWPPVRSFRRNIMTVQSVKSKKEEEADKQQQQPAANASGSNSSAFVKVSMDGAPYLRKVDLKMYNSYKDLSLALQKMFGTFTATGNNMNEVNGSDAGTTYEDKDGDWMLVGDVPWQMFVESCKRLRIMKGSEAIGLAPRAKDKYKNKS

SEQ ID NO: 24534 - protein, 128 aa, Oryza sativa
  Clone ID: TF_uC-osflcyp010g02b1.pep
SFAPQAPAAKAQVVGWPPIRSYRKNTMATNQLKSSKEDAEAKQGQGFLYVKVSMDGAPYLRKVDLKTYKNYKDLSTALEKMFIGFTTGEMSRVTLLAFLFVIAFPFDVDALTITSSRMPVTRNQYMLD

SEQ ID NO: 24535 - protein, 65 aa, Oryza sativa
  Clone ID: TF_uC-osflcyp159g02b1.pep
EQARIFAIEILVQGEILFCLFYLALQVSVDVLAYQARMAYLRAARMGEFVLTYEDKGGDWMLVGD

SEQ ID NO: 24536 - protein, 243 aa, Oryza sativa; identical to SEQ ID NO: 17129
  Clone ID: TF_OsC217831_1.pep

SEQ ID NO: 24537 - protein, 249 aa, Oryza sativa
  Clone ID: TF_OsC45780_1.pep
MAADLAFEATELRLGLPGGGGDGDAAAAAARSSSGKRGFAETIDLKLKLEPAAAAVDDDDDKEEAAADDREKKSSVVTAAADPEKPRAPKAQVVGWPPVRSYRKNILAVQADKGKDAADGGGDKSGAGAAAAAFVKVSMDGAPYLRKVDLKMYKSYLELSKALEKMFSSFTIGNCGSHGVNGMNESKIADLLNGSEYVPTYEDKDGDWMLVGDVPWEMFVESCKRLRIMKGSEAIGLAPRAMEKCKNRS

SEQ ID NO: 24538 - protein, 335 aa, Oryza sativa
  Clone ID: TF_OsC81650_1.pep
MEEGSNKREGLPPQLLDLIPDEKEWKLREALGLGRSRNAGFDGEEDKKLDLKLGLPGFIEDDEAETLRDYRLQQESPSLSLSFFPKHSKTTSSTTTTTGAKRGFIDTVEDKTEGYNDQKQQARAGCGKELAVEEMIAAVSERKKGCCPPPPPPHGAPATPARNRPQTQGRGAAAPVVGWPPIRSFRRNLASSSSSKHSPEPQNDNANAKVTLTCKKNPLVKINMDGIPIGRKIDLAAYNSYDGLSSAVKQLFHGFLQAQKDQTNAQIAQQGADDKIFYQLLDGSGEYTLVYEDSEGDRMLVGDVPWKVFVSTAKRLRVLRSSELSHTLIGATARV

SEQ ID NO: 24539 - protein, 281 aa, Oryza sativa
  Clone ID: TF_OsC86592_1.pep
MPPPLEARDYIGLAASPASSSSSCCASTPVAEVVGAHLALRLGLPGSESPARAEAEAVVVDAALTLGPAPPPRGGAKRGFVDSLDRSEGRRAAATAGDDERGVREEEEEEKGLGEAAAGAPRAAKAQVVGWPPVRSYRKNTLAASATKTKGEDQGKSEVGCCYVKVSMDGAPYLRKVDLKTYSSYEDLSLALEKMFSCFITGRSSSHKTSKRDRLTDGSRADALKDQEYVLTYEDKDADWMLVGDLPWDLFTTSCRKLRIMRGSDAAGMAPRSLEQTGQNK

SEQ ID NO: 24540 - protein, 100 aa, Oryza sativa
  unsure (1)..(100): unsure at all Xaa locations
  Clone ID: TF_LIB3431-001-P1-K1-G12.pep
VAVDRAPYXLRKVDLEAYPGYYQMLASLQDKILCHFTIPKLGNEETKLLXTASGDEYMPTYEDNDSNLMLPGDVPWKMKGETRPRLRLKKSSEADNLAPR

SEQ ID NO: 24541 - protein, 64 aa, Oryza sativa
  Clone ID: TF_LIB4370-006-R1-N1-H5.pep
GVIMHLCRATYSKFSSMLPDKKAWTHAILQYCTTWDLYLPRPTASDPFIILSLLQLSVNILQYN

SEQ ID NO: 24542 - protein, 210 aa, Oryza sativa
  unsure (1)..(210): unsure at all Xaa locations
  Clone ID: TF_OsC4615_1.pep
MSVETERSSTESSAASGLDFEDTALTLRLPGSLAAAAAPDPDRKRSSPSSSDAADAADNSSPLAAAADAPPAPKARVVVGWPPVRSFREDPAGGQVSGWFPWDGVPXLRKVDLDGXTSGYDQLLRALQDKFFSHFTILLXSSPYAGSSPDDERKLVDAVNGTEYVPTYEDKDGDWMLVGDVPWKMFVETCQRLRLMKSSEAVNLAPRAAQ

SEQ ID NO: 24543 - protein, 173 aa, Oryza sativa
  Clone ID: TF_OsC2423_2.pep
MSCTSPDPPDYCSAASPELKLYQAFIFSVPVFFTFVLLLFFYLFYLRRRRANWQSLRMRTNNLIRGDNPRLECGIKKEMREMLPVVVFKESFLIRETQCSVCLADYQPDERLQRIPPCGHTFHIDCIDHWLSTNTTCPLCRVSLLPSPKTASIDPVDLEAQTVEENSSLDEKR

SEQ ID NO: 24544 - protein, 300 aa, Oryza sativa
  Clone ID: TF_OsC2849_2.pep
MGEASESMKKISRGRLGGSWMGEPSDHHRHGDEQEEEEKTLELSLGLPGGGWRAACRDKGTTTKHSIAAAAAADDDDGDKSSMLSLGYSTLVSHSQGKANKNKGSPEEEEAHPPPATGNNALASNNNGCFQTRSPSTPVVGWPPVRTFRRNLATSSKASLELQNGKKAAKAEEIKRAPFIKINMDGVPIGRKIDLNAFDSYEKLSLAVDKLFRGLLAAQRDPLTAGAKDCQQEDVAISGLLDGTGEYTLVYEDYEGDKVLVGDVPWGMFVSSVKRLRVLKTSDLSSSLITSGRKRTAAEC

SEQ ID NO: 24545 - protein, 205 aa, Oryza sativa; identical to SEQ ID NO: 17134
  Clone ID: TF_OsC334733_1.pep

SEQ ID NO: 24546 - protein, 266 aa, Oryza sativa; identical to SEQ ID NO: 17135
  Clone ID: TF_OsC59803_1.pep

SEQ ID NO: 24547 - protein, 234 aa, Oryza sativa
  unsure (1)..(234): unsure at all Xaa locations
  Clone ID: TF_LIB3431-025-P1-K1-F7.pep
DAWADAWADAWADAWADAWAQFGISLSDLHLNKLQSSLSPHGLHQLDHGMQPRIAAGLIIGHPAARDDISCLLTIGSPQNNKKSDGKKAPAQLMLFGKPILTEQQISLGDAASVDVKKSSSDGNAENTVNKSNSDVSSPRSNQNGTTDNLSCGGVPLCQDNKVLDVGLETGHCKVFMQSEDVGRTLDLSVVGSYEELYRRLADMFGIEKAELMSHVFYRDAAGALKXTGDEPSA

SEQ ID NO: 24548 - protein, 133 aa, Oryza sativa
  Clone ID: TF_OsC28546_2.pep
DLQKYDSYQKLSSAVEELFRGFLEAQKDLSCAESGEQGAEDKIFSGLLDGTGVYTLVYEDNDGDRMLAGDIPWKVFVSTVKRLRVMRRSELPHDYGKHRATSTGAIFLINSSAVSLVKLGSNGCTFVLYNTML

SEQ ID NO: 24549 - protein, 1736 aa, Oryza sativa
  Clone ID: TF_OsC608_1.pep
MGRLFVSGGLGAPDFYPQTLSCAEETLTKEYVQSGYKDTVEGIEEAREIVLSQIPYLSKPDIATKCKEALKKRFRAINESRAQKRKAGQVYGVPLSGSLLTKPGMYPEQMHSNEDTRRKWIEALVQPNRRLWSLAEQVPRGFRRKLLFNYLIRYNVPLLRASWLVKVTYLNQVQTSSNNVSSAAPDSLRSQHWTKDVIEYLQLLLDELCSKNGFFGLPSSQEQSLPCLVAGDSPIKLKTGASPASADVEEPSLHFKWSYMIRIVQCHLMEQLLVPSLLIEWVFNQLQERDSTEVLELLLPIVLSLVDTITLSQTYIHMLVEILIQRLSDASPGSLSVKNNPKRSSITSALVELLQYLILAVPDTFVSLDCFPLPSVVAPDVYGKGALLKIAGGGKIASSRRQNASRHLSCGYAICSVQRRASDLSLVANPNLQVRGAANVVQALDKALVTGNLTAAYTSVFNYLSDTLMEETWIKEVSPCLRSSLMWMGAVELSLVCSVFFICEWATCTFRDCRTSQCQNVKFSGSKDFSQVYMAVSLLKDKMNEINNLSSSKSSSQLAMKDHLKSATLNHSSIKVTAMETASGFRDSTGSIDENNKKDIFSSPGPLHDIIVCWLDQHEISDASGFKSVDVFMTELIRSGIFYPQTYVRQLIVSGITIWNDSLFDLEKKTRHYKILKHLPGFCLFNILEEAKIAEDQVLYEIVSTYSSERRLVLSELSSGLATDANVEGRVPLSSCLQKQPDLLMDSTDDNHGRVAVQVEEVKLMISGREETKKTKKGQTDLVDSEEDVGHAKTGCKDSSRTKRQKLDKNVFPFQGSPLVQSDEEDFWWVRKEQKQELFTVETIHQSIEQTSGGKATVVQKTQNIAQLAAARIDGSQGASTSHVCDNNLSCPHHKPGTNSDILKDADHMSMLTLAEVGKSLKRLRLLERRSISIWLLKSIKQLIEGDEVKHSKANNSISASTVQHSGKIASGWRFGEDELLSVLYIMDTCCDLLSSVRLLIWLLSKIYIGRTTSGQVGRGVMHPKHKENQVFQVAEAFLFSSLLRYENILIAMDLLPEVLSVSMNRTVHKSGERQSTSVAFAYARYFLRKYRDVTSVARWERNFRSTSDKRLLAELDSGKSITGDSIISGISSDCIRQNGGANPDGDHSLVASAVSAIVDNAGHAIAKHLDISGGNNPGVTSINSLNLIQHILDIHINSLALLRETLGDRFSRIFEISLAVEASSAVAASFAPPKAHRSQQSSETHDESGNHANEVPSNPSKCFNVKAVKVSAAVSALVVGAIIYGVVSLERMMVVLRLKEGLDILQFLRISKASTNGVTHSIGNFKIDSSTEVLVHWFKILIGNCKTVYNGVIAEILGDSYVLAFSRLQRTLPLGIVLPPAYSIFAMVLWRPYLYDTSTSNHEDIQLYQSLLGAISDITRHQPFRDVCFRNMHLFYDLLAADVGDSEFAAIVELRSPDECLKALSPLRARVFLNALLDCEIPVTMRDDGTYALEPGCAEASTKNDVKFPERLIEILNVLQPAKFHWQWVELRLLLDEQSLIEKPKNVPYVKALRSLSPNAENFTLSEREKGLTEVILSRLLVRPDAAPLYSELIHLLGKLQESFVMGIKWFLQGQDVLLGNNSVRQQLVNLTQRKGFPMKTQFWKPWGWSKLVGYANANKSSKRKLEVTSIEEREVDGLIDSRKSSNRKSLNVGTSPEGHGSTQKYFTQEALAEFFLLCIYFCFCLFNFLFFFLP

SEQ ID NO: 24550 - protein, 157 aa, Oryza sativa
  Clone ID: TF_LIB3599-052-Q6-K1-E12.pep
MRWPPIRSYRKNTMAMSQPALKGKDDGEAKQAPASGCLYVKVSMDGAPYLRKVDLKMYKNYKELSLALEKMFSCFTVGHGESNGKSGRDGLSDCRLMDLKNGTELVLTYEDKDEDWMLVGDVPWRMFTDSCRRLRIMKGSDAVGLAPRATDKSKNRN

SEQ ID NO: 24551 - protein, 129 aa, Oryza sativa
  Clone ID: TF_OsC6383_1.pep
ECYNLFTISPSVKVSMDGAPYLRKVDLKMYKNYKELSLALEKMFSCFTVGHGESNGKSGRDGLSDCRLMDLKNGTELVLTYEDKDEDWMLVGDVPWRMFTDSCRRLRIMKGSDAVGLAPRATDKSKNRN

SEQ ID NO: 24552 - protein, 266 aa, Oryza sativa
  Clone ID: TF_OsC6383_2.pep
MAPPQERDYIGLSPAAAAALATELRLGLPGTAEEAESEGGGGGGTDAAPLTLELLPKGGAKRGFADAIVGGPAGQRREAAGGKAAAAAAEAEEEEEKKKAQAPAAKAQVVGWPPIRSYRKNTMAMSQPALKGKDDGEAKQAPASGCLYVKVSMDGAPYLRKVDLKMYKNYKELSLALEKMFSCFTVGHGESNGKSGRDGLSDCRLMDLKNGTELVLTYEDKDEDWMLVGDVPWRMFTDSCRRLRIMKGSDAVGLAPRATDKSKNRN

SEQ ID NO: 24553 - protein, 141 aa, Oryza sativa
  Clone ID: TF_OsC4615_2.pep
MARRGGRRARVVGWPPVRAFRKNALAALAAASSSKAKFVKVAVDGAPYLRKVDLEAYRGYDQLLAALQDKFFSHFTIRKLGNEEMKLVDAVSGNEYVPTYEDKDGDWMLVGDVPWKMFVETCQRLRLMKSSEAVNLAPRSA

SEQ ID NO: 24554 - protein, 535 aa, Oryza sativa
  Clone ID: TF_OsC141148_1.pep
MAAGGSSSNPMSREASSSAAAAAAGVAVRDVGDDKPLPSAEVDITYWAAQEEAAALLESMAARARGEDDLPEEQLQANNQLQEDEVIALQAIFGDDMVILENKDNLRFIQIFVHYTLPDSIRVFLNLRRSGAMVGTDDSENHNGGELYHLAAKWLDEPKVSYLCAALDEVWTELPGQEVIYRWVDWLNSSSWSSIALNDEIVLDPDKTLKIGDERAIARRILVESTIPLMQSYSEKRSHKIFLESLLCMESHCKIHVKEGNLMQLACPDTNCRNPLPPSVLKSLLRDDGYAQWESFALQKLLDAMPDLVYCPRCSAACLEVDNDAQCPGCFFTFCTLCKRRRHVGDTCITPEEKIRILKGLTRMSSMRKLYSIPEEQLLKEKREIDELINIQEALRDSKQCPRCKMAISKIEGCNKMTCGNCGRFFCYRCNKAIGGYDHFWNGNCDMFEREQDENPQQQDDENFGGDPDEDAELLEPEWVLLTYPCPNCGQLGTNNHISCPGCRGHYCALCRKRVLKCSQHFGPRGCQQHTEDAR

SEQ ID NO: 24555 - protein, 511 aa, Oryza sativa
  Clone ID: TF_OsC53097_1.pep
MEERLADVEGSFACNSRGEDDFRSCCGDEDEWEDTEESFTAGVAKGELDESSVRLFFKGVSSPEAEGKKLSGIGVVMERSPGVPMLQVQKKLDFYVDELVADHLALMDGLLVALQNGIRKIFAFTNSEKLYFQRIAEAEILEDQLLVALGHRILELVEKLEDFDIILLPSFELERPLQLAKEAIGIMYLSPYEVGTCSICCEEKRGAQMIKVGCAHTFCYSCLTSYTQEKLQTNKVPIRCPQLRCKYHISASECKSFLPVSCYDSLERAFAEAGTSDMERFYCPFPNCSVLLDLSQHFSRASTSSQSDLNCVECPECHRDICINCGVPWHVMMGCDEYQSLPVDERDAGDLSLHRLAQNNRWRRCQRCRRMIELTQGCFHMNCWCGHEFCYSCGAEYTNGIQTCQCVFWDEESIEAASAAHSTQASEIWAWDTFDCMPTAIEGYSEQERAQLALIQRFLSGGFNLGEPPSQSPPRCADSYIIDTMKDLHQLPWLERFVSVISDSYNEDYIQ

SEQ ID NO: 24556 - protein, 302 aa, Oryza sativa; identical to SEQ ID NO: 17140
  Clone ID: TF_OsC58839_1.pep

SEQ ID NO: 24557 - protein, 887 aa, Oryza sativa; identical to SEQ ID NO: 17144
  Clone ID: TF_OsC1517_1480.pep

SEQ ID NO: 24558 - protein, 322 aa, Oryza sativa
  Clone ID: TF_OsC42004_2.pep
MASGSSSSNDAAADLTVLVDDFYFSVLSHGRNDDDDSADGDDGELFPISDEKYASELQLQEVIMSSSVAATTARSSSAPVIFIGECSSSHAASSSSRLTSIPAAAATTLVFCKICMDAVPPSAAHRASRGCDHAFCAACLAGYVGAKIQERIADVRCPEERCRGALDPELCQGILPREVFDRWGAALCEAMVLAAPRAYCPFKDCSAMMLDDAGEAVTESECPSCRRLFCAQCAVPWHAGVDCAAYKKLGKGDRGKEDLLVVEMAKGKKWKRCPKCKYFVEKSQGCLHITCRCGFEFCYGCGRQWQLIHDGCCSLMTQQAGE

SEQ ID NO: 24559 - protein, 289 aa, Oryza sativa
  unsure (1)..(289): unsure at all Xaa locations
  Clone ID: TF_OsC1713_3842.pep
MSCAGCSHFYCHECWEGYISAAVNDGPXCLVLQCPEPSCDAIVLEDMINSLTKDEDKVKYARFVLWSYIGVNNKIKWCPAPDCTCAVEFLGDGNYDVSCKCKFSFCWNCAEEAHRPVSCDTVSKWILKNSAESENMNWILAYSKPCPKCKRPIEKNQGCMHMTCTPPCKFEFCWLCLGAWSDHGDGTGGFYACNRYQSAKMGGMYDEAEARRERAKNSLERYMHYYERWASNQTSRQKAQADLQKVENEDLTKLSDVVGIPETQLKFIPEAWHRRVLXWTYAMVLSTHK

SEQ ID NO: 24560 - protein, 174 aa, Oryza sativa
  unsure (1)..(174): unsure at all Xaa locations
  Clone ID: TF_uC-osflm202106d08b1.pep
ANDDDKVRYARFILRAYVEDSKKTKWCPAPDCTCAVEFVSDGNYDVSCNCKFSFCWNCTEEAHRPVNCETVSRWILKNSAESENMNWILANSKPCPKCKRPIEKNQGCMHMTCTPPCKFEFCWLCLGSWAEHGERTGGFYACNRYEXSKEEGVYDETEXRRERAKNSLERYMHY

SEQ ID NO: 24561 - protein, 606 aa, Oryza sativa; identical to SEQ ID NO: 17148
  Clone ID: TF_OsC2708_1.pep

SEQ ID NO: 24562 - protein, 1732 aa, Oryza sativa
  Clone ID: TF_OsC54778_1.pep
MRRSNDGRPFRPPDWGPPPHRYHHHHQNQYQYQQRYRPAQPGPRQFAVILLRGGSNLSAPPATEVEALVAGLPSPPPDSLSVSSSGRQAARLAFRSPQAAAAAARELWSLRLEGLHLLTPDVSDPALAAHAAPLIASLFAAHAARLVDSDLVSLTAARSSELAASIQAVKRRLAGHNRIRDFEQLQAQKRTLKAEKELVDAKIDEYKAAMRSIRRALLRGTEDDEEAEEEGLEVFGIGGGGEMNFARLHMIMLRECRRLKEGLPIYAYRRNILDHIFANQVMILIGETGSGKSTQLVQYLADSGLAANGSIVCTQPRKIAAISLAHRVVEESNGCYGDNFVLNSTFLDHQDFSSKIIYTTDNCLLHHCMNDMGLDGISYIIVDEAHERSLNTDLLLALIKKKLLDRLDLRLIIMSATADANRLAEYFYGCQTFYVKGRSFPVEIKYVPDISEEASFNTVPNHLRGSCATASYVYDVVKMVSIIHKNEEEGAILAFLTSQLEVEWACENFSDADAVVLPMHGKLSHVEQSLVFKSYPGKRKIIFCTNIAETSLTIKEVKYVVDSGLAKESRFVPSSGLNVLKVNWISQSSANQRAGRAGRTGAGRCYRLYSESDFSMMEVHQEPEIRKVHLGTAVLRILALGIRDAQNFEFVDAPNPEAINMAVKNLEQLGAVKYKCDGFELTDTGRYLVKLGIEPRLGKIMLDCFGFGLRKEGVVLAAVMANSSSIFCRVGTDEEKYKADRLKVPFCHQDGDLFTLLAVYKEWEDEHENRNTWCWQNSINAKTMRRCQETISDLENCLRHELNIIVPSYWCWNPEESTVHDKLLKRIILTSLSGNIAMFSGHERFGYQVISTDQAVKLHPSCSLLIYDSKPEWVVFTEILSVPNQYLVCVTAIDPDALCSIHPMPLIQQLEKLKLQVKVISGLGYNLLRKFCGKSGQNQQKIISLLQEEFRDDRVTVEVDFRNKEVVLFAKEQDIEKVFGIVNDALECEARMLRNECLEKSLFSGKPGDCSLALFGSGAEIKHLELEKRYLTVEVLHQNAHELNDKELICLVDTLISGVANFYKLYGNLQVASDETKWGKFTFLNPEYAEDAVSKLNGMEFHGSPLKVVPVCSSSNRGLPFPAVRAKVSWPLKQSRGLALVTCASGEAEFVVKDCFALGVGGRYINCEVSTRHENCIFVRGIPMHVTEPELYDAFRSTTTRKIVDVHLLRGTPIAAPSASLCAEALNREISSFMPKKIFPAQNFRVEVLTPEENDSVMRATITFDGSLHREAARALEHLQGSVLPCCLPWQTIQCQHVFHSTVSCQVRVYNVISQAVASLLESFRSQKGVSYNLEKNEYGIFRVKLTANATKTIADLRRPLEILMKGKTINHPDLTLSTVQLLMSRDGVADLKSVEQETGTYILYDRQSLNIKVFGLQDQVAAAEEKLIHALLQLRDKKPLDIRLRGRNLPPNLMKEMLKKFGADLEGLKREVPAVELRLNLRQHTLYVRGSKEDKQRVEEMISELVNSTKYNGLLQLPLENACPICLCEVEDPFKLESCGHVFCLTCLVDQCESALKSHDGFPLCCLKNGCKKQLLVVDLRSLLSSEKLEELFRASLRAFVASNAGKYRFCPTPDCPSIYQVAAADAESKPFVCGACFVEICNKCHLEYHPFISCEAYKEYKEDPDATLLEWRKGKENVKVCPSFHFTIEKADGCNHVECKCGSHICWACLENFRSSDDCYSHLRSVHLSY

SEQ ID NO: 24563 - protein, 624 aa, Oryza sativa; identical to SEQ ID NO: 17150
  Clone ID: TF_OsC59837_1.pep

SEQ ID NO: 24564 - protein, 208 aa, Oryza sativa; identical to SEQ ID NO: 17157
  Clone ID: TF_OsC930_2.pep

SEQ ID NO: 24565 - protein, 160 aa, Oryza sativa
  unsure (1)..(160): unsure at all Xaa locations
  Clone ID: TF_OsC142633_1.pep
AQIANRKGRVNTKFFSIELSSWHLKGQDLSEIGIQETQTLQNQLELRIRCIRSEKYHLMIEDSNVLNRXEILIQQEIMDLYRKMTNCIGYTLNYLMTAYLSPQLYETGAENEANRDSTTPYNFAVIEEANTPARLELNPPSQQNDAEQTTPPKLGLQLHP

SEQ ID NO: 24566 - protein, 162 aa, Oryza sativa
  unsure (1)..(162): unsure at all Xaa locations
  Clone ID: TF_jC-osflLIB3477P008a12b1.pep
MARGKVQLKRIENKINRQVTFSKRRNGLLKKAHEISVLCDAEDAAIGFSPKGKLYEYASDSXMDKILERYERYSYAEKALISSESESEITLPQVTTCTASRSTHGIXCQYCLMSKTLGNWCHEYRKLKAEIETIQICHKHLMGEDLESLNLTRLQQLEQQLE

SEQ ID NO: 24567 - protein, 160 aa, Oryza sativa; identical to SEQ ID NO: 17159
  Clone ID: TF_OsC15113_3.pep

SEQ ID NO: 24568 - protein, 219 aa, Oryza sativa
  Clone ID: TF_OsC15113_1.pep
PQPPRHRFCRRCPLPEEIRPTSLSLSISFDFSTSLSLPFSLCAAAAWQGQRGACGGPAAAAPSPPPDLTGAGGEARSWRTVWRCNAGDHKPARAPSLDNPSSGGCGSSCPEFGYSRSSGLRRQQRQIQAHGEWMASPLSSNRLCALPSAVKAYRLYGEHVLLLILCSHHLPATLARHLWSCFSSCCSSLRFRDSRSSPMRWLQELQKINFAARSSSPIR

SEQ ID NO: 24569 - protein, 247 aa, Oryza sativa
  Clone ID: TF_OsC482_1.pep
MWRRRWRGRGEGEGRAATGKRERIAIRRIDNLAARQVTFSKRRRGLFKKAEELSILCDAEVGLVVFSATGKLFQFASTSMEQIIDRYNSHSKTLQRAEPSQLDLQGEDTSTCARLKEELAETSLRLRQMRGEELHRLNVEQLQELEKSLESGLGSVLKTKSKKILDEIDGLERKRMQLIEENLRLKEQVSRMSRMEEMQPGPDSEIVYEEGQSSESVTNASYPRPPPDNDYSSDTSLRLGLSLFSSK

SEQ ID NO: 24570 - protein, 260 aa, Oryza sativa; identical to SEQ ID NO: 17174
  Clone ID: TF_OsC386220_1.pep

SEQ ID NO: 24571 - protein, 186 aa, Oryza sativa; identical to SEQ ID NO: 17170
  Clone ID: TF_OsC1443_2.pep

SEQ ID NO: 24572 - protein, 248 aa, Oryza sativa
  Clone ID: TF_OsC892_1.pep
MGRGRVHPRRIENKINRQVTFAKRRNGLLKKAYELSVLCDAEVALIIFSNRGKLYEFCSGQSMTRTLERYQKFSYGGPDTAIQNKENELVQSSRNEYLKLKARVENLQRTQRNLLGEDLGTLGIKELEQLEKQLDSSLRHIRSTRTQHMLDQLTDLQRREQMLCEANKCLRRKLEESNQLHGQVWEHGATLLGYERQSPHAVQQVPPHGGNGFFHSLEAAAEPTLQIGFTPEQMNNSCVTAFMPTWLP

SEQ ID NO: 24573 - protein, 250 aa, Oryza sativa
  Clone ID: TF_OsC1057_1.pep
MGRGRVELKRIENKINRQVTFSKRRNGLLKKAYELSVLCDAEVALIIFSSRGKLYEFGSAGITKTLERYQHCCYNAQDSNNALSETQSWYHEMSKLKAKFEALQRTQRHLLGEDLGPLSVKELQQLEKQLECALSQARQRKTQLMMEQVEELRRKERQLGEINRQLKHKLEVEGSTSNYRAMQQASWAQGAVVENGAAYVQPPPHSAAMDSEPTLQIGYPHQFVPAEANTIQRSTAPAGAENNFMLGWVL

SEQ ID NO: 24574 - protein, 117 aa, Oryza sativa
  Clone ID: TF_OsC44879_2.pep
QSLENQLEISLRSVRTKKDHVLIDEIHELNRKGSLVHQENMELYKKISLIRQENAELYKKIYETEGPSEVNRDSPTPYNFAVIEKTNVPVQLGLSTLPQHSDAEQSTAPKLGLQLNP

SEQ ID NO: 24575 - protein, 249 aa, Oryza sativa; identical to SEQ ID NO: 17172
  Clone ID: TF_OsC494_1.pep

SEQ ID NO: 24576 - protein, 220 aa, Oryza sativa
  Clone ID: TF_LIB4371-038-R1-K1-B8.pep
MDRSEMGRGRVELKRIENKINRQVTFSKRRNGLLKKAYELSVLCDAEVALIIFFLRGKLYEFGSAGINKTLEKYNSCCYNAQGSNSALAGGEHQSWYQEMSRLKTKLECLQRSQRHMLGEDLGPLSIKELQQLEKQLEYSLSQARQRKTQIMMEQVDDLRRKERQLGELNKQLKNKLEAEADSSNCRSAIQDSWVHGTVVSGGRVLNAQPPPDIDCEPTL

SEQ ID NO: 24577 - protein, 235 aa, Oryza sativa
  Clone ID: TF_OsC44879_1.pep
MGRGKIVIRRIDNSTSRQVTFSKRRNGIFKKAKELAILCDAEVGLMIFSSTGRLYEYSSTSMKSVIDRYGKSKDEQQAVANPNSELKFWQREAASLRQQLHNLQENHRQLMGEDLSGLNVKELQSLENQLEISLRSVRTKKDHVLIDEIHELNRKGSLVHQENMELYKKISLIRQENAELYKKIYETEGPSEVNRDSPTPYNFAVIEKTNVPVQLGLSTLPQHSDAEQSTAPKLG

SEQ ID NO: 24578 - protein, 268 aa, Oryza sativa; identical to SEQ ID NO: 17175
  Clone ID: TF_OsC1730_2.pep

SEQ ID NO: 24579 - protein, 644 aa, Oryza sativa
  Clone ID: TF_OsC1204_1.pep
MPSLALLRAVAMALLLLLARSMEGVDGAGGGGNATCPLDLSYVTTFPWDADLCAGGAGNMTRCCNTLLSVLAIGLAEQVRATGHFRIPSVGESAACLKDYGAKLSAAPLSLPGASLVQTCFPSPEQFVSSPSFCAGVTTAAEYRAVVGNDSVAALDSACGDLSSTPHCLRCLDAGIAATSRLKAAANISANATTDGAATTRNCFYLTVTYAAGISNVAGPTNPPTAACTLGLALSNPPAAPPKSHDTVIYATAIPVAFLLLASLLAFLVWRRHDKKKKKKKIHEISKEGSAKRRSHPRPNTGSILYDIAELSKATDAFADRNLVGRGGFGAVYCGVLADGSVVAVKKMLDPDVEGGDEEFTNEVEIISHLRHRNLVPLRGCCIVDDDAEEGKQKFLVYDFMPNGALEDFIFRDGKRPALTWAQRRSIIMDVAKGLEYLHYGVKPAIYHRDIKATNILLDGDMRARVADFGLARRSREGQSHLTTRVAGTHGYLAPEYALYGQLTEKSDVYSFGVLVLEVLSARRVLDMSAPSGPVLITDWAWAHVKAGQAREVLDGALSTADSPRGGAMERFVLVGILCAHVMVALRPTITEAVKMLEGDMDIPELPDRPLPYGHSAMFSEAGSNFSASPAFSGPFIDNGDMLR

SEQ ID NO: 24580 - protein, 267 aa, Oryza sativa
  Clone ID: TF_OsC99_1.pep
MGRGKVQLKRIENKINRQVTFSKRRNGLLKKAHEISVLCDAEVAAIVFSPKGKLYEYATDSRMDKILERYERYSYAEKALISAESESEGNWCHEYRKLKAKIETIQKCHKHLMGEDLESLNLKELQQLEQQLESSLKHIISRKSHLMLESISELQKKERSLQEENKALQKELVERQKNVRGQQQVGQWDQTQVQAQAQAQPQAQTSSSSSSMLRDQQALLPPQNICYPPVMMGERNDAAAAAAVAAQGQVQLRIGGLPPWMLSHLNA

SEQ ID NO: 24581 - protein, 343 aa, Oryza sativa
  Clone ID: TF_OsC1755_2.pep
MVQCHEVGQPRGERRKVQEEEKHQGQYIDGLSPHRPGLHLISSFPNHSLLLEHTPLFLIIISSLIREELANMHIYKEQEAEPSTGLMMPEPAPVASPGSGGSGGSGSVGAEKIGSRGKIEIKRIENTTNRQVTFCKRRSGLLKKAYELSVLCDAEVALVVFSSRGRLYEYSNNSVKETIERYKKANSDTSNASTVAEINAQHYQQEAAKLKQQITNLQNSNRTLVGDNITTMNHRELKQLEGRLDKGLGKIRARKNELLCAEIEYMQRRETELQNDNMYLKSKVAESERGLQTVNMMGSASTSEYVQNMIHYDPRNFLQFNIMHQPQYYPEQEDRKAFMSDER

SEQ ID NO: 24582 - protein, 263 aa, Oryza sativa
  Clone ID: TF_OsC753_1.pep
DLAWLVGCSWRSIGMGRGRVELKRIENKINRQVTFAKRRNGLLKKAYELSVLCDAEVALIIFSNRGKLYEFCSTQSMTKTLEKYQKCSYAGPETAVQNRESEQLKASRNEYLKLKARVENLQRTQRNLLGEDLDSLGIKELESLEKQLDSSLKHVRTTRTKHLVDQLTELQRKEQMVSEANRCLRRKLEESNHVRGQQVWEQGCNLIGYERQPEVQQPLHGGNGFFHPLDAAGEPTLQIGYPAEHHEAMNSACMNTYMPPWLP

SEQ ID NO: 24583 - protein, 224 aa, Oryza sativa
  Clone ID: TF_OsC930_1.pep
MARGKVQLRRIENPVHRQVTFCKRRAGLLKKARELSILCEADIGIIIFSAHGKLYDLATTGTMEELIERYKSASGEQANACGDQRMDPKQEAMVLKQEINLLQKGLRYIYGNRANEHMTVEELNALERYLEIWMYNIRSAKMQIMIQEIQALKSKEGMLKAANEILQEKIVEQNGLIDVGMMVADQQNGHFSTVPLLEEITNPLTILSGYSTCRGSENGLFLLT

SEQ ID NO: 24584 - protein, 257 aa, Oryza sativa; identical to SEQ ID NO: 17183
  Clone ID: TF_OsC1644_1.pep

SEQ ID NO: 24585 - protein, 244 aa, Oryza sativa; identical to SEQ ID NO: 17184
  Clone ID: TF_OsC207784_1.pep

SEQ ID NO: 24586 - protein, 105 aa, Oryza sativa; identical to SEQ ID NO: 17188
  Clone ID: TF_OsC1644_2.pep

SEQ ID NO: 24587 - protein, 230 aa, Oryza sativa
  Clone ID: TF_OsC1664_2.pep
MVRGKTQMKRIENPTSRQVTFSKRRNGLLKKAFELSVLCDAEVALIVFSPRGKLYEFASASTQKTIERYRTYTKENIGNKTVQQDIEQVKADADGLAKKLEALETYKRKLLGEKLDECSIEELHSLEVKLERSLISIRGRKTKLLEEQVAKLREKEMKLRKDNEELREKCKNQPPLSAPLTVRAEDENPDRNINTTNDNMDVETELFIGLPGRSRSSGGAAEDSQAMPHS

SEQ ID NO: 24588 - protein, 249 aa, Oryza sativa
  Clone ID: TF_OsC1730_1.pep
MGRGPVQLRRIENKINRQVTFSKRRNGLLKKAHEISVLCDADVALIVFSTKGKLYEFSSHSSMEGILERYQRYSFDERAVLEPNTEDQENWGDEYGILKSKLDALQKSQRQLLGEQLDTLTTKELQQLEHQLEYSLKHIRSKKNQLLFESISELQKKEKSLKNQNNVLQKLMETEKEKNNAIINTNREEQNGATPSTSSPTPVTAPDPIPTTNNSQSQPRGSGESEAQPSPAQAGNSKLPPWMLRTSHT

SEQ ID NO: 24589 - protein, 278 aa, Oryza sativa
  Clone ID: TF_OsC336457_1.pep
MGQGKIEMKRIEDATRRQVTFSKRRAGFLKKANELAVLCDAQVGVVVFSDKGKLFDFCSPPVILMELFHRYEITTRNTRLQETNRDDEQMVMEITRLRNEIDQLEASLRRQTGEDLSSVSTVDELSQLQLQLESSLSKVHARKDELMSQQLEDMRRMVHYSLIVVAVVVFADECCRPCMSRTISCAAWGELQLWSSLPVGEQQMSENWHSENWQSPGSGEASAMEALTMLPPAAAATTAAEAFNCFFPEEEKGVAASSTLLQLWPQPHDGDQPDLRLW

SEQ ID NO: 24590 - protein, 153 aa, Oryza sativa
  Clone ID: TF_OsC15113_4.pep
MANGVEVQRRGLRRQQRQIQAHGEWMASPLSSNRLCALPSAVKAYRLYGEHLLLQLLQLFEIQRFKILSHEMAAGITENQFCCKILFSHKEHAVAAAVARIRSIEARITAHRDTITVKGHRLRAVRANMVPPVRARLAVPMGATGGGGCYSSG

SEQ ID NO: 24591 - protein, 166 aa, Oryza sativa
  Clone ID: TF_OsC1755_6.pep
MSSVKRIHCCSVKETIERYKKANSDTSNASTVAEINAQHYQQEAAKLKQQITNLQNSNRTLVGDNITTMNHRELKQLEGRLDKGLGKIRARKETELQNDNMYLKSKVAESERGLQTVNMMGSASTSEYVQNMIHYDPRNFLQFNIMHQPQYYPEQEDRKAFMSDER

SEQ ID NO: 24592 - protein, 270 aa, Oryza sativa
  Clone ID: TF_OsC1755_1.pep
MGRGRIEIKRIENTTSRQVTFCKRRNGLLKKAYELSVLCDAEVALIVFSSRGRLYEYSNNNNVKATIDRYKKAHACGSTSGAPLIEVNAQQYYQQESAKLRHQIQMLQNTNKHLVGDNVSNLSLKELKQLESRLEKGISKIRARKNELLASEINYMAKREIELQNDNMDLRTKIAEEEQQLQQVTVARSAAMELQAAAAAQQQQQNPFAVAAAQLDMKCFFPLNLFEAAAQVQAVAAQRQQIIPTELNLGYHHHLAIPGATAADAPPPHF

SEQ ID NO: 24593 - protein, 211 aa, Oryza sativa; identical to SEQ ID NO: 17164
  Clone ID: TF_OsC392059_1.pep

SEQ ID NO: 24594 - protein, 233 aa, Oryza sativa
  Clone ID: TF_OsC1639_2.pep
MVRGRTELKRIENPTSRQVTFSKRRNGLLKKAFELSVLCDAEVALIVFSPRGRLYEFASAPSLQKTIDRYKAYTKDHVNNKTIQQDIQQVKDDTLGLAKKLEALDESRRKILGENLEGCSIEELRGLEMKLEKSLHNIRLKKTELLERQIAKLKEKERTLLKDNENLRGKHRNLEAAALVANHMTTTTAPAAWPRDVPMTSSTAGAADAMDVETDLYIGLPGTERSSNRSETG

SEQ ID NO: 24595 - protein, 225 aa, Oryza sativa; identical to SEQ ID NO: 17168
  Clone ID: TF_OsC1641_1.pep

SEQ ID NO: 24596 - protein, 102 aa, Oryza sativa
  unsure (1)..(102): unsure at all Xaa locations
  Clone ID: TF_LIB4371-039-R1-N1-B3.pep
SKTARMFSGAQEKCAPCSKTGYPLKKVTVXGQAFPKSCFKCFPGGWALLPSNYAALEGILYCKPPFFPLFKEKGSFHPLVKWASVKGAEGQPAPPPGGADSS

SEQ ID NO: 24597 - protein, 624 aa, Oryza sativa; identical to SEQ ID NO: 17196
  Clone ID: TF_OsC12552_1.pep

SEQ ID NO: 24598 - protein, 215 aa, Oryza sativa
  Clone ID: TF_OsC54167_3.pep
MGWLSKIFKGSVNRVSRGHYNGNTHEGHSAWHTKAYEHDSDHEDIDRAIALSLSEEDQRKGKAVDEVDIDHRLHEDEQLARALQESLNDEPPRQNVPVKDVHSESTPATFMPPYIFPSTGLRVCAGCKTPIGQGRFLSCMDSVWHPQCFRCFACDRPISEYEFAVHEGNPYHRSCYKELFHPKCDVCKNFIPTNKDGHIEYRAHPFWMQKYCPAP

SEQ ID NO: 24599 - protein, 524 aa, Oryza sativa
  unsure (1)..(524): unsure at all Xaa locations
  Clone ID: TF_OsC54167_1.pep
MTFVSVKKYRSSGLKVVARSFPLQTYSVRIQKGTSGSRLGKCRYKDFRLPILENMGWLSKIFKGSVNRVSRGHYNGNTHEGHSAWHTKAYEHDSDHEDIDRAIALSLSEEDQRKGKAVDEVDIDHRLHEDEQLARALQESLNDEPPRQNVPVKDVHSESTPATFMPPYIFPSTGLRVCAGCKTPIGQGRFLSCMDSVWHPQCFRCFACDRPISEYEIPTNKDGHIEYRVHPFWMQKYCPAHETDRTPRCCSCERMEPKDSKYITLDDGRKLCLECLNTSIMDTDECQPLYIDIQEFYEGLNMKVEQQIPLLLVERQALNEAMEAEKTGHHLAETRGLCLSEEQIVRTILRRPVIGPGNKIVDMITGPYKLVRRCEVTAILILYGLPRLLTGSILAHEMMHAYLRLKGYQTLDPKVEEGICQVLAHICSAYVAPSQKCHLGSSSIIASIAASSSSSSSSSAPSSKKGYTKHGTFEKKLGEFFKHQIDXDPSDVYGDGFRDGIKAVERYGLRKTLDHMKLTGVFPC

SEQ ID NO: 24600 - protein, 224 aa, Oryza sativa; identical to SEQ ID NO: 17199
  Clone ID: TF_OsC1528_2384.pep

SEQ ID NO: 24601 - protein, 188 aa, Oryza sativa
  unsure (1)..(188): unsure at all Xaa locations
  Clone ID: TF_OsC44261_1.pep
MATSFQGTTTKCMACDKTVYLVDKLTADNRVYHKACFRCHHCKGTLKLANYNSFEGVLYCRPHFDQLFKRTGSLDKSFEGTPKVVKPEKTVENENAIKVSSAFAGTREKCVGCNKTVYPIERVTVNNTMYHKSCFKCCHGGCTISPSNYIAHEGKLYCKHHHIQLIKEXRGTSANLRMTMRRHHNLDL

SEQ ID NO: 24602 - protein, 196 aa, Oryza sativa; identical to SEQ ID NO: 17200
  Clone ID: TF_OsC11613_1.pep

SEQ ID NO: 24603 - protein, 1844 aa, Oryza sativa
  Clone ID: TF_OsC2152_1.pep
MAAAAWGGTTQKCDSCGRTVYPVEELAADGRVYHRPCFRCTHCKATLQFSNYSSVEGVLYCKPHYDQILKSTGSLEKSFEGTSKSAKAEKSNGNKGQPNRFSSMFVGTQDKCVVCNKTVYPLEKVNLNGSSYHKSCFRCTHGGCTLSPSNNVTHEGKLYCKTHHSQLFMVKGNFSNFEDSTPNAKVDIEKQPEHEDATKNPGGPGQGDGLTEKPLESELTPEKPSQDDIVAEKQSQSSVDVPKQSESSTTVQRSEEGERVTKGESNSHVVSKKPLESSVEKPFQSSAVNLQPSGSSAAVRKPWQRNLPTDKPLLSNTTTEKSTPSSAAIEESLPSNGVDAKQPESSTASTVVKRPWQRRVATENLPQSISPSDKPSSTSADDVKPSENSKLIRKPWQRAVAAEAQIQNSGPTEKSSLTNDTKPSESTTSIKRPWEHKVVNEKPLQNNIDTEKPLQNNTDTEKSSSSAIDVKLAETSTTPTVPQEHSGITEKPSQTSADDVKPSESTAAVVKKQWQRNIGFQKQPQSSVTDAKTPESRGMGKRLWQRNVPTEKQSQSGASVVTPSQVSVASTNPLQSSVVVKKPWQRSVSREKEPEKDISSNKPLQNRVLAEEAEKTNVTADNKSQIIQDKKNNGATTENSSQISESAKKLPLTANKSQADTSTEKLSESDILAVASSQITEPSKKPSENTAENEKPSQTDIATDELPLTQSVEAMSEPSPSDAAHQEISEREILTDKLPESTMAVEKLSQTATLTEKPSKEDAAEKLPQTNEPSEQPHESEETAEKPLQNEANAESTTKQSDLSLEKPPQVDANVGNPTEPESDATSGVNSSDAQIRPTAEQLVGPQGIVSAEKTSDQILEANTDPAADQSSESQDVAPAKVATEQPLENQKAAASEQPLEPQHEAYEENPQEHNSDATAKESSEPERDTASDQLAEQPSESRTAGEKATLRESDVVTEDPAEPQIDAAAERSAEVLSESQTGVETPVLHQSDRTNEVPSEPQTDEASDKSTEQPLEPENDASVEDEKPPEIESDDVHDKPSESTPDTETLPHNTPKSSISISEAADGNVSEEAPPQSSASIETPSESAIAVEEPKHDDEASIKPSEDSSALEEPPQDDSASVEPSENTITLEKASEEDEGSVKPSEGNDALEKTLEEDEASAKLPEDSTTFEKPSEKDDAGTKQTEDPVTLEKEPEEDKGSVEPTQDNAGLEKPLEEDEASAKPSEDSVVLDKPSVEDDDSAKPSEDSMDLEKPEAHKPSEEEDGATKSSPEDAAVEEAPLQVSEEGRRREFSMAPKRKPPARAAAAKLDPDGMFRGVSAFVVPHAVQSRRLEVWKQRLAQMGGRVQEKLAAKGGGGAVTHVLAADAKALLRELDAAWLHRFRGSVVSFEWLEECLKSGERLPEHKFAINYEEEFKPKKEGGAAGSGVLQSAKRSKISSDGPENRKETAGGNRESRDAIAHPNEDSDVVKGPSTCTSSQSASGDSKETIASQNAFKAEEASSGESSTYAPPDLNRNITEIFGKLINIYRALGDDRRSFSYYKAIPVIEKLPFKIESADQVKDLPAIGKSLKDHINEIVNTGKLSKLEHFENDEKVRTVSLFGEVWGVGPATALKLYDKGHRTLDDLQKDDSLTSAQRIGLKFFDDIKQRIPRHEVSEMEKLLQEVGTDILPGVIIVCGGSYRRGKSSCGDMDIIITHPDGESHVGFLPKFVQRLKGINFLREDLIFSIHSIEGTDCGVDTYFGLCTYPGRELRHRIDLKKVYPRNRHAFGLLAWTGNDVLNRRLRILADSKGYILDDTGLYLATPGSGGKRGGRSDAIINCDTEKDVFDTLGFPWLEPHERNL

SEQ ID NO: 24604 - protein, 206 aa, Oryza sativa; identical to SEQ ID NO: 17205
  Clone ID: TF_OsC28685_1.pep

SEQ ID NO: 24605 - protein, 496 aa, Oryza sativa; identical to SEQ ID NO: 17194
  Clone ID: TF_OsC91189_1.pep

SEQ ID NO: 24606 - protein, 201 aa, Oryza sativa; identical to SEQ ID NO: 17193
  Clone ID: TF_OsC12484_1.pep

SEQ ID NO: 24607 - protein, 882 aa, Oryza sativa
  Clone ID: TF_OsC13226_1.pep
MGDRPDMGAGVALRFSHNDWTLEEDSKALHFLQPDLVLFTGDYGNENVQLVKSISDLQLPKAAILGNHDCWHTYQFSEKKVDRVQLQLESLGEQHVGYKCLDFPTIKLSVVGGRPFSCGGNRIFRPKLLSKWLLSFLVASPGWFLIAYYFCCVVTCSEIELQWYGVNDMAESAKRIYDAATNAPKEHAVILLAHNGPTGLGSRMEDICGRDWVAGGGDHGDPDLEQAISDLQRETGVSIPLVVFGHMHKSLAYGRGLRKMIAFGANRTIYLNGAVVPRVNHAQSSRQPAISTSEKTGLEGLTGLMVPTSRAFTIVDLFEGAVEKISEVWVTVGDARTELEQELVLYKQPHKSVPSNIAIWSSMGWLTKFFRGSTHKISEGQYHSKPAEETIWNGPSNSAVVTMVYPLESTFGQLDLLLLATDLRQLVIDDVDCCDLDVPSEFDNEETARAISLSLLEEEQRKAKAIEKDMHLEEDEQLARAIQESLNVESPPRARENGNANGGNMYQPLPFMFSSGFRTCAGCHSEIGHGRFLSCMGAVWHPECFRCHACNQPIYDYEFSMSGNHPYHKTCYKERFHPKCDVCKQFIPTNMNGLIEYRAHPFWLQKYCPSHEVDGTPRCCSCERMEPRESRYVLLDDGRKLCLECLDSAVMDTSECQPLYLEIQEFYEGLNMKVEQQVPLLLVERQALNEAMEGEKTGHHHLPETRGLCLSEEQTVSTILRRPRMAGNKVMEMITEPYRLTRRCEVTAILILYGLPRLLTGSILAHEMMHAWLRLKGYRTLSPDVEEGICQVLAHMWIESEIIAGSGSNGASTSSSSSASTSSKKGGRSQFERKLGDFFKHQIESDTSMAYGDGFRAGNRAVLQYGLKRTLEHIRLTGTFPF

SEQ ID NO: 24608 - protein, 138 aa, Oryza sativa
  unsure (1)..(138): unsure at all Xaa locations
  Clone ID: TF_LIB3431-002-P1-K1-C5.pep
SRARTHVRTKHVSLFSTYATSEQQLWYSPIATATKEVAAAAAAADKAPTTPSTPLIQEANEALKAPKPKEAPKAKEGEEKKAKGDKEKENANKERHPRATXPRSARPHHPPYSETIKEDIMALQGNSTGGSSTYAISK

SEQ ID NO: 24609 - protein, 304 aa, Oryza sativa
  Clone ID: TF_OsC135984_1.pep
MGAPKQKWTSEEEEALRRGVLKHGPGKWRTIQKDPEFSPVLSSRSNIDLKDKWRNLSFSASGLGSRDKLKVPRIKGPSSSTSPSSQTPLLVLPPNKVAEASPSADPEKSSQDVKIPNSMVIEALCEIGDPNGSDVDAICHYIEQRHEVQANFRRLLTAKLRRLIAAKKIEKIDRSYRITESYAAKVSQANKSPSPKKDPAKPLKASQNLGSFAGTSPALEAAAAAAMKVADAEAKSHLANEHMTEAERIFKLAEETESLVTLATEIYERCSRGEILTIMQVAQSNFEFQSVSGNGSGTGSTVLA

SEQ ID NO: 24610 - protein, 293 aa, Oryza sativa
  Clone ID: TF_OsC20360_1.pep
MATDVAATEPEVAAEEAAAAAPETTATAGDSKPAKEAKAKKAAAPRKARSTATHPPYAEMISEAIATLKERTGSSQYAIGKFLEDKHKDHLPSNFRKQLLVQIKKLVAAGKLTKVKNSYKLPPTRAPAAAKPKAKPAAAAKPKPKPKAAAKPKAAAKPKAKAPAKSKAAAKPKAAAKPAAKPKAAAKPKSPAKPAAKPKAAPKAKAKPAAKPKAKAAPKPKAAVVTKTKATSAPARRPAKAAKTSAKDTPSKKAAPAAKKPAAAAKKAPAKKAAPAKKAAAPARKVPARKAKK

SEQ ID NO: 24611 - protein, 538 aa, Oryza sativa
  Clone ID: TF_OsC1869_1.pep
MVVAVASPSSAPGPGAAGRPHPTYKEMILRALKELPDPIISSRRAIAKYISDNFSGLPSHHDALLTVHLRRLRSQGLLLMSGHSYLLSTSATAARGRGRGRPPKKASSSAPPQKRGPGRPRKNTALFPVPVLEAKPGRGRPRKNPLPVASSTSSAAAAATALSLRVKRGPGRPRKNAAATPLRLGVKRGPGRPRKNAAATPLRLGAKRGPGRPRKNATATPLSLGVKRGPGRPRKNAAAAASPVAPPPASPLKRGVGRPRKNATPLVKPGPGRPSGFKRGPGRPRKNATPPVLSVPPTAAAVLGVKRGRGRPRKDKPLQSWSVLSGGAAMTKRGPGRPRKKRPLEAGGVVAAQVDTADGGEAGAVQNGGEVRCLLSDGASSMGNRGPGSPRKEVLLENEPTVSTLVGKRGRGRPKKEKPSAARPAETGDAKSMGIKRGRGRPRKDSSFQAVFAEAAGQVSRDVTAAQPEGDADLLARKEPETAAVVSVENKETRPADAGGVVVSEEKTSIDPVEAGSVMPCVNAEVDRMNSDLRTANP

SEQ ID NO: 24612 - protein, 123 aa, Oryza sativa
  Clone ID: TF_uC-osflcyp033a05b1.pep
KLVPLQDSRAGSILPATTRVLSDPYIPPIREGRYVQTGLFAKEPHLAWTSPAPRWQAPRQPPRSTRQTPSDDAGGSSHPPYFQMIKDAITVLNERTGIQRSLHHQVHGRTSTAPALAANYKKM

SEQ ID NO: 24613 - protein, 297 aa, Oryza sativa; identical to SEQ ID NO: 17210
  Clone ID: TF_OsC62134_1.pep

SEQ ID NO: 24614 - protein, 355 aa, Oryza sativa
  Clone ID: TF_OsC4154_1.pep
MIMEAIVALKERTGSSSQAIGKHIHANHGANLPPNFRKHGRGTGRPPPPQNRKQSAASRDHFLRVVVEGRVSEGRAAMATEEVVPEVPVTEVEAAAAEEAVEETTAAEEKAAKPAKEKKKAGRPPKEKKEAKPAKEKKVKEAKAKKPRVAAAHPPYAEMIMEAIVALKERTGSSSQAIGKHIHANHGANLPPNFRKLLSGNLKKLTAAGKLAKVKNSFKLSSTRPAAPAAADAKPKAAPATKPKVKTTKAAKPAAKAKAPATTKAAKPATKTKIKVAAAPAAKPKASPKAKAKTATSPVKPRGRPAKSAKTSAKDSPAKKAAPVAAKKKAAATKKKASVAAAPAARKGAARKSMK

SEQ ID NO: 24615 - protein, 184 aa, Oryza sativa
  Clone ID: TF_OsC566_21.pep
MVEFAASSLGTRDVHAVFTEVDRAAPIMYWVDSSLCQCCVPVRRMIKEAIMALDGNGKAGSSPYAIAKYMGEQHMGVLPANYRKVLAVQLRNFAAKGRLVKVKASFKLSAAEEKKATAAKAARSKAAKGVVGGAKRKRTPRPSGAAAKKPASSAEAKKRVPPARPARAKRARKAALAKPMQPPK

SEQ ID NO: 24616 - protein, 133 aa, Oryza sativa
  Clone ID: TF_uC-osflcyp061f05b1.pep
MATATEEVAAAAAAAGEAPPPPPPAVVEEVKEAVEAPNPEEAPNADEGEEKKAEGEKEKEKAKKERKPRARKPRSAGPHHPPYFEMIKEAIMALDGNGKAGSSPYAIAKYMGEQHMVVFPANYRKVLAVQLRN

SEQ ID NO: 24617 - protein, 191 aa, Oryza sativa
  Clone ID: TF_OsC5305_1.pep
MPAMAKPASRAAKPASAPKKQKAKPSAAAGGSSHPPYFEMIKEAITVLKERTGSSAHAIAKYMEEKHGASLPANYKKMLSIQLRGFASKGKLVKVKASYKLSDAAKDSPKAKPAAPAPKAAAPKPAKDAAKPKKDAAAAKPKKAPAAGTKRKAPEKKVVAKPKKSPAAKAKAKPKTVRSPAAKKTRKAPAA

SEQ ID NO: 24618 - protein, 608 aa, Oryza sativa
  Clone ID: TF_OsC11113_1.pep
MQHGRRGGWRKGEAAAAGERGGGLVLPDHTLRHGERMAQAADRAGDQRQAVVDAALTKPSRGRGIVNGGGETEARATTRWLRQGSAGGGVTAPSGVAFNITAGPMTEIVDDIDVAMVEEVVAAPAEKDEHVQAILLAIVASTREDRHGVERLERSEVEARDPRVRDVANVQALSLRRHRSRLPTSHRSSPPMPHRSRPPTPPLRNRARPPPSPLRLLWPPFWCGDGARLKRCPLGRPAPSPPAGLPSRQKIREEPQPQPPFSSQIRVAAAPNPTRAQRSTNAGRRQRPSPPPPQPYEREGASQPASQAWPPPLPLATAPPTSSSPPTPRHALFLNPSCSWPDAQICGGIDRVSWVVFSFSLLQMIVEAIASLAEENGSSQAAIARRIEAARGGGGLLPPSHPALVAAHLSRMSAAGELVAVAGGKYALRPTPPPPPPADPAAAAAVAEEEEEEEEFLADDDSADDLPPPPPPKRGRGRPPKVRPPGYPAVPAAAAPVPVPVGAPVDGSVAAAAPAVPRRRGRPPKPRDPHAPPKIPRPRGRPRKNPLPEGMVPPPPTRPGATAKPRPQFAEWLISSKNCKGLTASLLFAVVPAAKLMMVNAHCLQLDP

SEQ ID NO: 24619 - protein, 471 aa, Oryza sativa
  Clone ID: TF_OsC166550_1.pep
MAAADEASKPPPLPPYPEMILAAIEGLNEKSGSNKSAISKFIEGKYGDLPPAHASLLTAHLARMKESGELIFLKNNYFRADAPDAPPKRGRGRPPKPRDPNAPPPPPKPSSPRPRGRPPKSKDPISDAIPKSRGRPPKKAKTAPAPPPAAGDGSAPVKRGRGRPPKLVWPLMVATGVLVSGGGGSWYLCASWTANRRHGGQIIPEQEPQSKIEFPDLDGLGGGGGGASGSGCRHPARVRVCVGGGDGVCVAPGTSVVVVEVATVSALSSALRRLSSPFAVPELAVALFPSVAPMLAVAPAGVGMCAMIGASSSVGGSGWLVVIYILLQADAFRILVIGCLFCPKSCGSMLQVALSLAIPALKARQKSIGSLSKASLLMVGWSTFWPSLLFPRSRSRAWFVIRVELGPPAQFRLSGLLEFLRFNDESRGDVSLSAVMLTPKIYGSATNLDLVPFPWRQPKGINGLSSGVHFN

SEQ ID NO: 24620 - protein, 102 aa, Oryza sativa
  Clone ID: TF_LIB4371-022-R1-K1-F8.pep
MATSTSTGHRAADLVLPSYPEMIVEAIASLAEENGSSQAAIARRIEAARGGGGLLPPSHPALVAAHLSRMSAAGELVAVAGGKYALRPTPPPPPPADPAVAA

SEQ ID NO: 24621 - protein, 242 aa, Oryza sativa
  unsure (1)..(242): unsure at all Xaa locations
  Clone ID: TF_OsC566_18.pep
LVPNSARARKPRSAGPHHPPYFEMIKEAIMALDGNGKAGSSPYAIAKYMGEQHMGVLPANYRKVLAVQLRNFAAKGRLVKVKASFKLSAAYDKKATAAKAARSKAAKGVFGGAKRKKTPRPSAAAAKKPASSAEAKKAVPPARPARAKRARKPPPXEAMQAPKSIRSAISKKANKAAPDHLRRLAARPRRALYPLYNLSVVANLVVVRHRRFVCFDRSSALCPVCVLRCRGLGFFLQGEKLL

SEQ ID NO: 24622 - protein, 78 aa, Oryza sativa; identical to SEQ ID NO: 17324
  Clone ID: TF_OsC31153_3.pep

SEQ ID NO: 24623 - protein, 227 aa, Oryza sativa
  Clone ID: TF_OsC393664_1.pep
MGQDFLVNGPKLNWAFGDRLGAGAAPAAAEPAPAAAACRWTRQKDKLLETLVARCAMNRQCVGGWDAIAAAFGDDRTAAQVEQRYGEIAAEVRRVMEEPWDAEDPAIAAAAAAVPAAPVKHAAAGPGSDGGGEEGKVVVEKKSGIWSEEEHRQCLRGIEEIGHGRWTQISIEYVPSRTPIQIASHTQKYFLRMAKPKEDRKRKSIHDTPYHLHLPNAADAHAHQQQQ

SEQ ID NO: 24624 - protein, 78 aa, Oryza sativa
  Clone ID: TF_1044913.pep
MGRAPCCDKKGLKKGAWTPEEDKLLVDYIQVNGHGSWRLLPKLAGTGWLLCSCEAMLCFCHVFVFACRTSAELLISTF

SEQ ID NO: 24625 - protein, 219 aa, Oryza sativa; identical to SEQ ID NO: 17407
  Clone ID: TF_OsC100249_4.pep

SEQ ID NO: 24626 - protein, 201 aa, Oryza sativa
  Clone ID: TF_OsC263120_1.pep
MSLVRSAPARPRAAGTRQEEQNFFNALRQVGKNFEKITLRVQSKSKDQVRHYYYRLVRRMKKLLGPEFSLDAKNSKDTIAAMLCWWSLLEKFSCSASKLHLKPRRFKTFVEALGNQLLKDRNKTRKKCPRGDVCLSSSSSAVNRTPGNESFSVKLLPVDVSNGSKVASSKGAVFKRGAEPNSSNKSGATKGDLSATSTVKQ

SEQ ID NO: 24627 - protein, 128 aa, Oryza sativa; identical to SEQ ID NO: 17222
  Clone ID: TF_OsC134_46.pep

SEQ ID NO: 24628 - protein, 109 aa, Oryza sativa; identical to SEQ ID NO: 17224
  Clone ID: TF_OsC341175_1.pep

SEQ ID NO: 24629 - protein, 87 aa, Oryza sativa; identical to SEQ ID NO: 17226
  Clone ID: TF_OsC96526_1.pep

SEQ ID NO: 24630 - protein, 1272 aa, Oryza sativa; identical to SEQ ID NO: 17229
  Clone ID: TF_OsC4193_1.pep

SEQ ID NO: 24631 - protein, 427 aa, Oryza sativa; identical to SEQ ID NO: 17228
  Clone ID: TF_OsC51198_1.pep

SEQ ID NO: 24632 - protein, 148 aa, Oryza sativa
  Clone ID: TF_LIB4506-009-R1-N1-D10.pep
KDVQGLQDKDFCDSDDNPKTKRGGKRKHHRAWTLCEVVKLVDGVARYGAGKWSEIRRLAFSSYSYRTSVDLKDKWRNLIRASQTQLSTENDGVCPRKSNPSAIPIPVSILLRVKKLAEMQSQAGDVRVPIKFSGQSTTVVQGKVSGFL

SEQ ID NO: 24633 - protein, 478 aa, Oryza sativa
  Clone ID: TF_OsC25904_1.pep
MASRAVEGEGEGEEEGEGKGNLEDESLIQMINIYGHNNWETVARAIPGRNAQQCRVREHASNHFKRLSELKLLEHFTGRTSAAIKEHWRGPMKRKLNSYLASGLLKKSPGLPENLSVSQSSDSNILQQCDVSSDENKLLSDLRPSLKSKEGVSSKCDGSSSDNQLLSDLRASLKSKGASSKCDGSSGDNQLLSDLRASLKSKGASSKCDGSSGDNQLLSDLRASLKSKGASSKCDGSSDENKLLSDLRACLKSKQGASSKCDGSSGENQLLSDLQASLMSKQRTSSKYKQGASSKYKQGASSKSKQGTSSKSKQGFIDLCENTDTSEGESSELICTERPDPDSGEASQRIRDRLNWRKRARKKLVFLSSPVELKVSAVAESERHLQESKEMSPEVNIVSPPAVLQGFSPEVPSVCEKIVEPPLADFNQAKNVCSLETSSDPCTLEQHLANVSDLLDMSYIDGLMIIPPSGCPYDGDFI

SEQ ID NO: 24634 - protein, 87 aa, Oryza sativa; identical to SEQ ID NO: 17232
  Clone ID: TF_OsC389431_1.pep

SEQ ID NO: 24635 - protein, 203 aa, Oryza sativa
  Clone ID: TF_OsC28425_1.pep
GEDKFRELGLCDMGEDIAQRWTDEEESLFYRVVYSNPPSLGKNFWHFLPRALPGKTSMELVSYYFNVFMLRKRAQQNRSEPLHVDSDDDEVPDEPSVTEDEDSAVESPAHDYYVNNPMSPESEDSFHEKVADSLSGLRDGPSQKPLGSNTDNPGGDADVQDESCTSFEDHNGAHGSNGVQCAEFHMMLPNAALDHYSDRGACM

SEQ ID NO: 24636 - protein, 467 aa, Oryza sativa
  Clone ID: TF_OsC31153_2.pep
MDHADMDGLATAMLPLSLWSREIAGLLFMMDRLTGTTVTSLRNQGPKFSYATHGARCLMLLPTLTASASFPLDIAINGEMANRMMHQVPKKRAPQTHNAFYLDALMLLPHAALCHRNHRSMEHATVSENRSRRHFRNPVLAYVTPWNSKGYDMAKLYSTKFTHISPVWYDLKSDGNKLVLEGQHNFDAKWVSELQSNGSLVLPRVVLEAFPGVVLMKKKLRDKAIDLIFVIWLSVNRDKGYDGVVLESWSRWAVYGVLDDSELRNRALQFVKHLGKTLPLTSSNLSTHHHLKLIYVVPAPRMKELNNQEFRPEDLLQLADSVDGFSLMTYDFSGPQNPGPSAPLSWIQYSLKTLLAAKGSASHGHSHMIFLGINFYGNDFLLSKGDGGNAITGRDFIYLLDKYKPSLQWDEKSSEHFFVYSDKGLRHAVFYPTLMSLSLRLDEAQDWGTGLSIWEIGQGLDYFFDVL

SEQ ID NO: 24637 - protein, 719 aa, Oryza sativa
  Clone ID: TF_OsC52736_1.pep
MKKEFPGQAPTSRLHSEMDAAAAGGGGAAKRKRSFSEDDAYLILHRYQPATILTMLQEMGKQVGAGKGIDWRALVRRTSTGITSAREYQMLWRHLAYGHEFVESVEPASLPLDDGSDLECEIEIVPAPGNEALAEATSFAKTIITGSSREQTSGQRVNSEAAALNTPNEKIVRVPSDKQLVPGHRLTNGTGPVSSSKQPSHTGSSPDPLDPNGHPKKKKKPKPWSREEDMELGAGVQKHGEGNWMEILHKYKFDSSRTHLQLQQRWALICKRQGSTKPATPKIPNVMSEELKAAQKAFSLAIGTTRSSTLRPGGVPHHNPMVTTTNPEVKSVTAPSPLPVPVHVVPVPVPVQPVQVQLPPPQLHQAPAQSAPPPPKVSNASNKSRNNSKKQVAQSIPVNGPLSIQEAALAAGGRIAEPSVATNFLKAAQSTKAVHIRSRGTGSSKSSTGSKTPTVAGEPGTQLGSDQHLELQSTGGPSQVLTAHATEQVHNVSEVAGVNPLGQSAGVHLSETKKALNTTPVSGSSDKMEIDDNSNYFAVTMEDLFPEDVKQEDVQDPKIEEAIDPKDADMLEFDRFVAQGCLNKDNVDKSKAAKIAPEAQSVIGSQKKQLKTLPTVGKSNPVFAGPPATAKKTKAPVPQGGMSSGIVGVLNRSLGGKAPAPATTGTQSTVQKQQSMSSKGNLLVPKNVAPGTVTPANNRANTAVNGASKVNPPASQKPA

SEQ ID NO: 24638 - protein, 83 aa, Oryza sativa
  Clone ID: TF_OsC31153_4.pep
MDSSSGSQGKNSKTSDGCETKEVNNTAQNFVHFTEEEEDLVFRMHRLVGNRWELIAGRIPGRTAKEQYTEGEIWCLETFPRRM

SEQ ID NO: 24639 - protein, 50 aa, Oryza sativa
  Clone ID: TF_rsicee_6205.y1.abd.pep
MGRLSSCGGVQAKLRKGLWSPEEDDKLYNHIIRHGVGCWSSVPKLAGLQR

SEQ ID NO: 24640 - protein, 215 aa, Oryza sativa
  unsure (1)..(215): unsure at all Xaa locations
  Clone ID: TF_LIB4309-043-R1-K1-B2.pep
MYSSLLGIVMQAQKVLGNKWTEIAKVVSGRTDNAVKNRFSTLCKRRAKDDELFKENGSLCSSTSSKRALVQTGCLTSGASGSAPPIKQMRPCNSDFKENMTPNMRLVGQDKSTQDSRQPLAIVYQNNQDNMNTMDTQNLVAKTAAKQLFAXEQNCVKHEGNFLNKDDPKIATLLQRADLLCSLATXINTENTSQSMDEAXQQLQHHLDXKDDNDM

SEQ ID NO: 24641 - protein, 93 aa, Oryza sativa
  Clone ID: TF_OsC44378_4.pep
MVVKKAATMAEAEAEEEMMMRMMCGSGGNEMMKTKMKKKNREGEEEEEVSGGGRMRKGPWTEQEDVQLVWFVRLFGERHWDFLAKVSSLRGGG

SEQ ID NO: 24642 - protein, 345 aa, Oryza sativa
  Clone ID: TF_OsC205949_1.pep
MVSANQPPPDAAAAAAGSAGEDASKKVRKPYTITKSPESRQEEKPAEPETLSRRADADAYAEPPARSAPMVSANQPPPDAAAAAAGSAGEDASKKVRKPYTITKSRESWTEQEHDKFLEALQLFDRDWKKIEAFVGSKTVIQIRSHAQKYFLKVQKNGTSEHVPADSSSMLRELRHECHCFVMDTQFYPTNCSLIHGERFVVRVMPDFAQVYSFLGSVFDPSTSGHLQKLKEMNPIDVETALLLMRNLSINLTSPDFEDQKKLLSSYSTPSDGLELGSTRSSVLADRPLSAPFIMCKGATVYSRLAQLVMAFSFLSSGREGTTAPSDPWHSQKQNAPSVHLMRYV

SEQ ID NO: 24643 - protein, 318 aa, Oryza sativa; identical to SEQ ID NO: 17275
  Clone ID: TF_OsC84775_1.pep

SEQ ID NO: 24644 - protein, 267 aa, Oryza sativa; identical to SEQ ID NO: 17281
  Clone ID: TF_OsC215503_1.pep

SEQ ID NO: 24645 - protein, 273 aa, Oryza sativa; identical to SEQ ID NO: 17278
  Clone ID: TF_OsC92629_1.pep

SEQ ID NO: 24646 - protein, 383 aa, Oryza sativa; identical to SEQ ID NO: 17319
  Clone ID: TF_OsC37603_1.pep

SEQ ID NO: 24647 - protein, 342 aa, Oryza sativa; identical to SEQ ID NO: 17290
  Clone ID: TF_14588603.pep

SEQ ID NO: 24648 - protein, 342 aa, Oryza sativa; identical to SEQ ID NO: 17290
  Clone ID: TF_OsC150_1.pep

SEQ ID NO: 24649 - protein, 428 aa, Oryza sativa
  unsure (1)..(428): unsure at all Xaa locations
  Clone ID: TF_OsC155790_1.pep
MGRNSYCYNQRLTXGLWSPEEDEDLMNDITQHDHCFWCTVPELARLERCCKSCRLRWINYLRPDLKRGAFSQEEEDLIVELHAVLGNRWSQIATRLPGRTDNEIKNLWNSCIKKKLRQKGIDPNTHKPLAEVDRSKATPTISNDRTSESSDVDPSSGVALHNLSHLLSETAQSSELLPVKVTKPRTQAPGLARLKVPPKELFLDQLTSGHENLPSCRSSGPIPNFPFQQLLCYNNDFNSMDVGNRNSLWYNQNESSSSTISTVMPPVSPSTLSTSTGLNPSPDNANSRGTGIHNSQFYWDTNNPSSSSSTGSSGNNGLGFELQSTSSLLETNIFPWSDLAPEKDSQAQLEEELKWPDLLHGTFSEMPAPMQNLSQSLYEDVVKAESQFNMEGLCAAWSQNLLPQQHLPVVSDMYDKDLQRMSLSFENI

SEQ ID NO: 24650 - protein, 378 aa, Oryza sativa
  unsure (1)..(378): unsure at all Xaa locations
  Clone ID: TF_OsC52992_1.pep
RCHATKAHHHKWTKSPHKLISVMCMMATAAQCPHLHAHRNEFHVSSFSACPKGRIHDNSVNKKAYFNRQQNGHQELHLVDXHSTMSLTAMNTILHLLVDLFFPLQPTMILAMSTTLKEEKRMLSSSIGLRRLFXKASPHLPLFTPKSEVSASGKSLKKANVVKGQWTLEEDRKLVKLVEQFGLRKWSHIAQILPGRVGKQCRERWHNHLRPNIKKDTWSEEEDIVLIQTHKEVGNKWAEIAKHLPGRTENSIKNHWNATKRRQFARRRSRASSKNPKSGTLLQNYIKSLGIGPIKSSVRQAPPESTAVSSSSPASTQKLAEVNGKIRPDSNPSNQMVTQGILTMDENSYIQTNSCEELLVSTYDDLCLDMCDHLFETK

SEQ ID NO: 24651 - protein, 321 aa, Oryza sativa; identical to SEQ ID NO: 17322
  Clone ID: TF_OsC134_57.pep

SEQ ID NO: 24652 - protein, 260 aa, Oryza sativa
  Clone ID: TF_OsC351_4.pep
MGRSPCCEKAHTNKGAWTKEEDQRLIAYIRAHGEGCWRSLPKAAGLLRCGKSCRLRWMNYLRPDLKRGNFTDDEDELIIRLHSLLGNKWSLIAGQLPGRTDNEIKNYWNTHIKRKLLARGIDPQTHRPLLSGGDGIAASNKAAPPPPHPISVPAKAAAAAIFAVAKPPPPPRPVDSSDDGCRSSSGTTSTGEPRVRDLNLELSVGPTPSSPPAETPTSARPVCLCYHLGFRGGEACSCQADSKGPHEFRYFRPLEQGQYI

SEQ ID NO: 24653 - protein, 463 aa, Oryza sativa; identical to SEQ ID NO: 17293
  Clone ID: TF_OsC159752_1.pep

SEQ ID NO: 24654 - protein, 641 aa, Oryza sativa; identical to SEQ ID NO: 17300
  Clone ID: TF_OsC150867_1.pep

SEQ ID NO: 24655 - protein, 310 aa, Oryza sativa
  Clone ID: TF_OsC833_1.pep
MVRPPCCDKDGVKKGPWTPEEDLVLVSYVQEHGPGNWRAVPTRTGLMRCSKSCRLRWTNYLRPGIKRGNFTDQEEKLIVHLQALLGNRWAAIASYLPERTDNDIKNYWNTHLKRKLKKMSATGGGGDDGEGGGAGEVKTRAAAPKGQWERRLQTDIHTARQALRDALSLDPSPPAKPLDSSSGATAPPSSQAATSYASSAENIARLLEGWMRPGGGGGKTTTTPSSGSRSSAASVLSGEASHSGGATAPTPDGSTVTSKTKDEETAGAPPPPPPPAFSMLESWLLDDGMGHGEVGLMDVVVPLGDPSEFF

SEQ ID NO: 24656 - protein, 163 aa, Oryza sativa
  unsure (1)..(163): unsure at all Xaa locations
  Clone ID: TF_jC-osflLIB3479001e05b1.pep
PTRPEDVWTEEXDRMLIEAHRTYGNRWSVIARCLPGRSENAVKNHWNATKRSLKSKRRMKKKSVQVVNSPPGQLSPLEEYIRSQYPSAVETTPPPPAVPAPPSDVIVHGAGSVSAGPTVATQEPTGTNPSEMGIYLGLGNPAGPTTQQLAAMNLNMSLAPDLN

SEQ ID NO: 24657 - protein, 358 aa, Oryza sativa
  Clone ID: TF_OsC1123_3.pep
MQRECIVSGPIDGSISATGDGARRGVGGMRGHRSRVRGDRGLRMHRSGSDPDSDKAHWYMSNSDDESFVDKDKDCRRGTVAPLLKKGPWTSWENSILEKYIKKHGERNWKLVQKNTGLLSFCITRRTDNEIKNYWNTRIKKCKNNRWLLYPANVCNDALNEDQYGSVDPSVREKLTNNQLEDTTSMYSAPQFSYASISNILDRRLASKDYDSIEDQRNRIEVAAEYEISLPVLKTTNNDIFPSASIFANHGISNGNLSALSTTDALQMELPLIQFDPNNQFIYSRDYATHLTNLALLNDQAEELLNHIDVLNYVVMKKELSGGSLSPTINMPCKATAYSSELPLCKGYREQDLDFYTQ

SEQ ID NO: 24658 - protein, 200 aa, Oryza sativa; identical to SEQ ID NO: 17303
  Clone ID: TF_OsC352864_1.pep

SEQ ID NO: 24659 - protein, 395 aa, Oryza sativa
  Clone ID: TF_OsC1123_1.pep
MHESDSGPDSDRTHWYMSNSDDESFVDKDKDCRRSTVALLLKKGPWTSWEDSILEKYIKKHGERNWKLVQKNTGLLRCGKSCRLRWMNHLRPNLKKGAFSKEEENKIINLHRKMGNKWSRMAADLPGRTDNEIKNYWNTRIKKCKNNRSPLYPANVCNDALNEDQHESADPNVREKLTNNHLEDTTSMYSAPPGFQDASISNILDRRLASKDYDSIEDQRNQIEVVAKYEIPLPVLKTTNNDIFPSASIFANHGISNGNLSALSTTDALQMELPLIQFDPNNQFVYSRAYAMHLTNFALLNDQSEELLNDTDVLNYVVMKEELSGGSLSPTINMPCEAHNSMAASNELVVPQYEGDAPPLQDDFTSYFYLNDTNLSIFEDTNELFLENKLDTKGN

SEQ ID NO: 24660 - protein, 329 aa, Oryza sativa; identical to SEQ ID NO: 17307
  Clone ID: TF_OsC26573_1.pep

SEQ ID NO: 24661 - protein, 59 aa, Oryza sativa
  Clone ID: TF_2943794.pep
GKSCRLRWLNYLRPNIRRGNISYDEEDLIIRLHRLLGNRWSLIAGRLPGRTDNSIKNYW

SEQ ID NO: 24662 - protein, 358 aa, Oryza sativa; identical to SEQ ID NO: 17313
  Clone ID: TF_OsC344488_1.pep

SEQ ID NO: 24663 - protein, 285 aa, Oryza sativa
  Clone ID: TF_OsC351_3.pep
MGRQPCSDKLGVKRGPWTAEEDKKLMSFILTNGHCCWRAVPKLAGLLRCGKSCRLRWTNYLRPDLKRGLLTDAEEQLVIDLHAKLGNRWSKIAAKLPGRTDNEIKNHWNTHIKKKLIKMGIDPVTHEPLDRKQESPATTSQSTVTAESSKSGEATRQQSRQLDDAVVRDMSVSAGGDSPPESSTNTASTAGGSSSSSSSHHQDPLVKWLLEEDLLPTGDEPWLNFTASNDVDEFSSIAATGATPALPWDVGMTTDWLLDYQDFGMGDSSLVVDASMVNSSNGSNF

SEQ ID NO: 24664 - protein, 300 aa, Oryza sativa; identical to SEQ ID NO: 17314
  Clone ID: TF_OsC490_2.pep

SEQ ID NO: 24665 - protein, 256 aa, Oryza sativa; identical to SEQ ID NO: 17317
  Clone ID: TF_OsC42685_1.pep

SEQ ID NO: 24666 - protein, 447 aa, Oryza sativa
  Clone ID: TF_OsC57946_1.pep
MSASASAACLLPPRGGSLARPDTALPPASQPATVAVNQNIPRLASPRLAVTSITLLPRRGRRCAVDLLLLHLHRLLLFLSLFSEETPNLFLPRKPAAFLKRIKSPSLIRRCNPSPQNLAAPRAVLGFELMAVEEASSSSGGGRGGGGGGGGEEGLSGCGGGWTREQEKAFENALATVGDDEEEGDGLWEKLAEAVEGKTADEVRRHYELLVEDVDGIEAGRVPLLVYAGDGGVEEGSAGGGKKGGGGGGGGGGGGHGEKGSAKSAEQERRKGIAWTEDEHRLFLLGLEKYGKGDWRSISRNFVISRTPTQVASHAQKYFIRLNSMNRERRRSSIHDITSVNNGDTSAAQGPITGQPNGPSANPGKSSKQSLQPANAPPGVDAYGTTIGQPVGGPLVSAVGTPVTLPVPAAPHIAYGMHAPVPGAVVPGAPVNMPPMPYPMPPPTSHG

SEQ ID NO: 24667 - protein, 97 aa, Oryza sativa
  unsure (1)..(97): unsure at all Xaa locations
  Clone ID: TF_LIB4506-019-R1-K1-H12.pep
CGRAAAGLQDEAAAEEEAYAAVADLQLELRRGPGTVDEDLTLVNYIXDHGEGRWNSLARAAGNIIKSSVKRTGKSCRLRWLNYLRSDVKRGNFTADE

SEQ ID NO: 24668 - protein, 264 aa, Oryza sativa; identical to SEQ ID NO: 17351
  Clone ID: TF_OsC199642_1.pep

SEQ ID NO: 24669 - protein, 241 aa, Oryza sativa
  Clone ID: TF_OsC134_84.pep
MPDQRRGTTALLPTARHGPAASDRHHSASAARRDAAATRPATSVAAANTLVSSSLIEIESTHTPPTTGRPPRTGEQDGEAAVLRQGWVKKGPWTPEEDLMLASYIQEHGSGNWRAVPTNTGVMRCSKSCRLRWTNYLRPGIKRGNFTEQEEKLIVHLQALLGNRRDHMEVISPMKDGTFIDWDIVDNIWNHAFSFYPEEHPMLIVEPSTNTGQQREKYLLTLKIMKALCIYQGFDMVFVQE

SEQ ID NO: 24670 - protein, 377 aa, Oryza sativa; identical to SEQ ID NO: 17327
  Clone ID: TF_OsC419061_1.pep

SEQ ID NO: 24671 - protein, 228 aa, Oryza sativa; identical to SEQ ID NO: 17331
  Clone ID: TF_OsC149302_1.pep

SEQ ID NO: 24672 - protein, 1498 aa, Oryza sativa
  Clone ID: TF_OsC351_1.pep
TQCGRSMVFVTPCQEQKKKQSSTPGAVFSPDMIGEAVADRTIELLRLTNSETQCWQDWLLFADIFFFLMKSGCIDFLDFVDKLASRVTNSDQQILRSNHVTWLLAQIIRIEIVMNTLSSDPRREHLNSDQLQKGKQIDEWWRQMTKASGERMIDFTSLDERAMGMFWVLSFTMAQPACEAVMNWFTSVGVADLIQGPNLQPNERMTMMRETYPLSMSLLSGLSINLCLKLAFQLEETIFLGQNVPSIAIVETYVRLLLITPHSLFRPHFTTLTQRSPSILSKSGVSLLLLEILNYRLLPLYRYHGKSKALMYDVTKIISMIKVKRGEHRLFRLAENLCMNLILSLRDFFLVKKELKGPTEFTETLNRITIISLAITMKTRGIAEVEHIIHLQPLLEQIMATSQHTWSEKTLRYFPPLIRDFLMGRMDKRGQAIQAWQQAETTVINQCNQLLSPSAEPTYVMTYLSHSFPQHRQYLCAGAWMLMNGHLEINSANLARVLRELSPEEVTANIYTMVDVLLHHIQLELQRGHQIQDLLSKAITNLAFFIWTHELLPLDILLLALIDRDDDPYALRLVINLLERPELQQRIKAFCTSRSPEHWLKNQPPKRIELQKALGNHLSGKERYPPFFDDIAARLLLVIPLIIYRLIENDATDIADRVLAVYSTFLAFHPLRFTFVRDILAYFYGHLPSKLIVRILNVLGVSTKTPFSESFAQYLASSNSSICPPPEYFANLLFGLVNNVIPPLSCKSKSNPSDAAGSTARTTYNKPYTSSAGGISNSDGQRAFYQNQDPGSYTQLVLETAAIEILSLCVPASQIVSSLVQIIAHVQAMLIQSNSGHGMSGGLGQNSGVPTSSGGGVEPVGANRPNTTASGINASNFVSRSGYSCQQLSVLMIQACGLLLAQLPPEFHTLLYAEAARIIKDCWWLADSSRPVKELDSAVGYALLDPTWASQDNTSTAIGNIVALLHSFFSNLPHEWLESTHTVIKHLRPVNSVAMLRIAFRILGPLLPRLAFARPLFMKTLALLFNVLGDVFGKNSQASPPVEASEIADIIDFLHHAVMYEGQGGPVQSTSKPKLEILTLCGKECAAISGVMLLDKQLVDGQSQASPSMLLPPHSCTADYCRQYYIEGERAVTQLLKDVDPLQTAVVLTLRRQRPRRELSPDYTCTRNSILEAWRARRLAADVSDGLTPSRLRLASAFPLLAASINPRAAPEPLQIKTRVSSSGSVHPSREIQIASQIRDQRVMGRQPCCEKVGLKKGPWTADEDQKLVTFLLSNGHCCWRLVPKLAGLLRCGKSCRLRWTNYLRPDLKRGLLSEEEEKLVIDLHEQLGNRWSKIAARLPGRTDNEIKNHWNTHIKKKLKKMGLDPVTHRPVMSLAQPDPLKQQQQQHEPSVSGGTGADDKEEEEEETPTSAQPQGVACAASSASAVSSSCSSSASASAATPGADVDWPGLFEVDAILDIDWAGLLSACGDDGGCSAIGVDMLFDQCSDVGFDQDVWM

SEQ ID NO: 24673 - protein, 261 aa, Oryza sativa; identical to SEQ ID NO: 17329
  Clone ID: TF_OsC351_12.pep

SEQ ID NO: 24674 - protein, 176 aa, Oryza sativa
  Clone ID: TF_18698673.pep
MGRSPCCEKAHTNKGAWTKEEDQRLIAYIKAHGEGCWRSLPKAAGLLRCGKSCRLRWMNYLRPDLKRGNFTDDDDELIIKLHALLGNKWSLIAGQLPGGRTRDQELLEHAHQAQALSRGIDPQTHRPVTPEHAPPGKRAYTTATPRFSSLARGRRRRRQAKTRARPGANIAAFQVR

SEQ ID NO: 24675 - protein, 340 aa, Oryza sativa
  Clone ID: TF_OsC76_1.pep
MGRAPCCDKNNVKKGPWSPEEDAKLKEFIEKHGTGGNWIALPQKAGLRRCGKSCRLRWLNYLRPNIKHGEFTEHEDRIICNMFASIGSRWSIIASQLPGRTDNDIKNYWNTKLKKKLLGSSAVAAAAPPRIQRHQQSHHRSSLLLPNSPSLNPGGGYPGFFSGAGGFHPQEPAMPLTLPTTTQEFMLGTHSGLPMVSASALLNHLHGASHHHQLLVKEEISSNMIVFGSDQQSCSSSDGLAAPHSHNHHGNREFILDGYSYGVGYGSSCIDQVDNDKLFQHHHQQDQAQEQQQQLVYNYDEIKQLLMNTSTTSNSINAGQDHGGSMEAGLIGSQGKVTMM

SEQ ID NO: 24676 - protein, 317 aa, Oryza sativa; identical to SEQ ID NO: 17274
  Clone ID: TF_OsC16767_1.pep

SEQ ID NO: 24677 - protein, 242 aa, Oryza sativa
  Clone ID: TF_OsC1737_4.pep
MARKCSSCGNNGHNSRTCTGQRSLQESGGGYGGGGAGGVRLFGVQLHVGGAPLKKCFSMECLSSPSPSPSPAYYAAVAAAASNSSPTVSSSSSLVSVEEAGEKMANGYLSDGLMARAQERKKGVPWTEEEHRKFLVGLEKLGKGDWRGISRHFVTTRTPTQVASHAQKYFLRQSSLTQKKRRSSLFDQHGTARSHAAASSILNPDAKLFITSSEQQQQRTTKNNPSFSDGGKASGATATPAT

SEQ ID NO: 24678 - protein, 1666 aa, Oryza sativa; identical to SEQ ID NO: 17333
  Clone ID: TF_OsC6483_1.pep

SEQ ID NO: 24679 - protein, 350 aa, Oryza sativa; identical to SEQ ID NO: 17336
  Clone ID: TF_OsC26138_1.pep

SEQ ID NO: 24680 - protein, 152 aa, Oryza sativa
  Clone ID: TF_OsC174168_1.pep
SQERQLLPAGGGAHASASIKSLATRGPCGRRCCPAGLTSLSPAPGRGAFSQEEEDLIIHLHSMLGNKWSQIAAQLPGRTDNEVKNFWNSYIKKKLRQRGIDPATHKPLKWSDYVFDGYNHQLPPYNHGGIYGGGDSKDTAVHFDAHALGNWC

SEQ ID NO: 24681 - protein, 379 aa, Oryza sativa
  Clone ID: TF_OsC3325_1.pep
DAWADAWARAHRTCVCAVVLGTLPHIYPLDRAPSRPPRSTERSIDRYTPARATNPAAGSCSRVGREWDGTRALPPVSSRSCARGSGLPRKTRSSTITSTATASVAGAPFPSSHRLQRCGKSCRLRWINYLRPDLKRGSFSQQEEDLIVALHEILGNRWSQIASHLPGRTDNEIKNFWNSCLKKKLRQRGLDPATHKPIAAAAAAATSSESAVTQVDEDHKPHGAAAAAAAADGLAANAKQSVFDPFPVTDFGAGFDLGAANMAAALYGSHPDDGAGFVADYSSVLDVSENLGYGESSSNSSNWTCAEVSNVLDSEVLNWAASAGADAAAKAEPFADMEQQHSGYGGEYQVEDDATLEHKFSLPCHEQSLAQFDFNLEYF

SEQ ID NO: 24682 - protein, 292 aa, Oryza sativa
  Clone ID: TF_OsC46522_1.pep
MRDVCMEVLPPMDHYASRGNWFMARKWSPEENKQFERALAGLDLRCPDWDRVARAIPGRSALEVMNHFRDLELDVQQIENGMVPFPVYGAAAAGGAFTLQWDGAHGVGDFRNAYRFGGGGGGKRHFGRTPEQERKKGVPWTEEEHKLFLLGLKKYGKGDWRNISRNFVQTRTPTQVASHAQKYFIRLNSGGKDKRRSSIHDITTVNLTDDRPPSPSQSSLISNQSNTSTLTAAVAPFSSTADVKPQNAANASFNSPSRTLGMAGYGMGLQDQGLQCGGPLHDQLAASRSILF

SEQ ID NO: 24683 - protein, 321 aa, Oryza sativa; identical to SEQ ID NO: 17339
  Clone ID: TF_OsC215051_1.pep

SEQ ID NO: 24684 - protein, 965 aa, Oryza sativa
  Clone ID: TF_OsC139519_1.pep
YSDDSDPDIDEDLQRDLDALRQSCILSGNDPDAAVAQVSACLAAPPAAAAGAEVNGLSDDDDEEEDEDLALVRSIRENLLLNKASPSSPLPRPICAWPPSDSEDDEDDLETLRAIQRRFSHYHSGTSSGSEMNTKTEASKEGSGNIFGNELDEEFDAEKHNKEATTRTGFPKAALLLVDALKKNRACQKFIRRKMITIEAKIEENKDLRDRVKCLLDYQLSCRKAFGKILCQKEDPRVRLISSRKPCAQSTKNKDKKTPALFLGPADNPHVSKYKMVLKQLPMSLQKQPWSDVEKEKLAKGIKQQYQEALILNSINKGSSTGDFSAVDMAYALTNTAGNFEVTPESLRSVLPLINWDKIAAMYLPGRSGAECESRWLNFDDPLISHNAWTAREEKRLILTVQQQGMNNWINIAVTLGTHRTPFQCLVRYQRSLNHCILNKDWAEEEDLQLQAAVNTFGTNWQLVSASMDGRTGNQCSNRWRKTLNPERSRVGRWSLDEDKRLMVAVKLFGSGSWNKIAQFIPGRTQSQCNERWRNVLDPDIDLGEWRPEEDSILLASVDEFGPCWSKIAGAKIPHRTDNMCLRRWRKLCQDKLPSVKAAQQIKKSILQCNFVDRETERPAIGPSDLMPLVRSKVDGSDENTVSAKVRKPRKRSRIPCEDNVLPGDTSNSSPSMNLPLSESIDAEAAVNTTTANSKKKPSRSRSKKQTDENLAVCDVNNSSNCSSGARKRKRSITDKNQVVQKKMKGSISGDNEAVVETVGTISADNEVATKRKTGSTSVGEEGTTKKTTRGSLSGKGEVNKRMRGSISGVQKGATKQRMRGSVSTDNHGAVMKSKRAPSRKSAEENSKADSMANAAFGSDLPTVASEDRDANNGNVKNGRLKSMPRPKQINMTEGSADKFSTSTRLADCMSFGRINGSSRVARHLCVSVKPLSNMIQSNGPSDVSAKDPTSAETDPTSVENSNTA

SEQ ID NO: 24685 - protein, 812 aa, Oryza sativa
  Clone ID: TF_OsC1713_5582.pep
MPRKASSTSDSRLKWRKWKRNPTASPSPSNRSSAAAAAADHSDDSDSAAVNEDDDSAVPEDADDETLAGAEDPVLDLREAEVLPSAEPVSAFPVATRRVVNRPHPSVLAVIAAERSACAGEGSAAVAAAPVLENISYGQQQVLSGVLPDHASLATDTDKPSTYVCTPPNLMEGHGVTKQFQGRLHVVPKHSGPPALCNQKPECLSYNAALTCLRFVDWFSPGIVHRLERQVVPQFFSGKSPGNTPEKYMLLRNKVIAKYLENPSKRLAFAECQGLVANTAELYDLSRIVRFLDTWGIINYLASGSVHRGLRMATSLLREEPTGELQLLTAPLKSIDGLILFDRPKCNLQAEDISSLASNSEVVDFDAGLAELDGKIRERLSESSCSYCLQPLTSLHYQSLKEADIALCSDCFHDARYITGHSSLDFQRIDGDNDRSENDGDSWTDQETLLLLEGIEKYNDNWNNIAEHVGTKSKAQCIYHFIRLPVEDGLLENIEVPDASVPFRAETNGYPHLDCNGSTSGNLPQKIPPDNQLPFINSSNPVMSLVGFLASAMGPRVAASCASAALSVLTVDDDSRVNSEGICSDSRGQGPHPNFRDHNGGVSSSISPEKVKHAAMCGLSAAATKAKLFADQEEREIQRLTATVINHQLKRLELKLKQFAEVETLLLKECEQVERIRQRIASDRVRIVSTRLASPGNSLPGGSTSTMSSNPMSMSPRPMGVPGSMPQSSMPAPFANNMQGHGHPQMAFLQQQQQQQRQQMLSFGPRLPLSAIQTQPSPQTSNIMFNPGMPNSVTPNHHQLLRSSSGNNSSVG

SEQ ID NO: 24686 - protein, 719 aa, Oryza sativa
  Clone ID: TF_OsC158_1.pep
MEINSSGEEAVVKVRKPYTITKQRERWTEAEHNRFLEALKLYGRAWQRIEEHVGTKTAVQIRSHAQKFFTKLEKEAINNGTSPGQAHDIDIPPPRPKRKPNSPYPRKSCLSSETSTREVQNDKATISNMTNNSTAQMAGDAALEKLQRKEISEKGSCSEVLNLFREVPSASFSSVNKSSSNHGASRGLEPTKTEVKDVVILERDSISNGAGKDAKDINDQEMERLNGIHISSKPDHSHENCLDTSSQQFKPKSNSVETTYVDWSAAKASHYQMDRNGVTGFQATGTEGSHPDQTSDQMGGASGTMNQCIHPTLPVDPKFDGNAAAQPFPHNYAAFAPMMQCHCNQDAYRSFANMSSTFSSMLVSTLLSNPAIHAAARLAASYWPTVDGNTPDPNQENLSESAQGSHAGSPPNMASIVAATVAAASAWWATQGLLPLFPPPIAFPFVPAPSAPFSTADVQRAQEKDIDCPMDNAQKELQETRKQDNSEAMKVIVSSETDESGKGEVSLHTELKISPADKADTKPAAGAETSDVFGNKKKQDRSSCGSNTPSSSDIEADNAPENQEKANDKAKQASCSNSSAGDNNHRRFRSSASTSDSWKEVSEEGRLAFDALFSRERLPQSFSPPQVEGSKEISKEEEDEVTTVTVDLNKNAAIIDQELDTADEPRASFPNELSNLKLKSRRTGFKPYKRCSVEAKENRVPASDEVGTKRIRLESEAST

SEQ ID NO: 24687 - protein, 563 aa, Oryza sativa; identical to SEQ ID NO: 17349
  Clone ID: TF_OsC144018_1.pep

SEQ ID NO: 24688 - protein, 175 aa, Oryza sativa
  Clone ID: TF_sicee_6517.z1.abd.pep
MAFYLGSMGGSPSSWGVAEVPVPSSRPWSKAEDKVFESALVAFPEHTHNRWALVASRLPGRSAHEVWEHYQVLVDDVDLIERGMVASPGCWDDDNNSAGHGRGSGGDERRRGVPWTEEEHRLFLEGLEKYGRGDWRNISRWSVKTRTPTQVASHAQKFFIRQANASSRGDSKRKS

SEQ ID NO: 24689 - protein, 275 aa, Oryza sativa; identical to SEQ ID NO: 17364
  Clone ID: TF_OsC1122_1.pep

SEQ ID NO: 24690 - protein, 200 aa, Oryza sativa
  Clone ID: TF_OsC6000_6.pep
MGGGGGVEADCDRIRGPWSPEEDEALRRLVERHGARNWTAIGREIPGRSGKSCRLRWCNQLSPQVERRPFTAEEDATILRAHARLGNRWAAIARLLQGRTDNAVKNHWNLLPQAQARRRHHHHHHHHRRRRRAGSGRRCRRARRAAVQAVHPHAGQPVGVWFRVGPQRPHPRRGVRADFPAGDDRVRARLRAQPAGRRIP

SEQ ID NO: 24691 - protein, 367 aa, Oryza sativa
  Clone ID: TF_OsC342590_1.pep
MGRSPCCEQDADVKKGPWTPEEDKLLVEYIGKNGHGSWRRLPKLAGLNRCGKSCRLRWTNYLRPDIKRGGFSDDEERLIIHLHATLGNKWSSIATKLKGRTDNEIKNYWNTHLRKKLLSQGIDPVTHRPRTDLLAGLPNLLAAANLGGAAHQLPLDLNAIKLQADAAKFQILQGLLRVLASTTAPPPTAAVLPGTDLMTSILGATLAANSAGILGQQQQLAGVDLSRLGQYNGNYDNLPPLTNDSCTQQTQPAMSSMSPDSLLNRISSGISGDMLGSPELCHGGDGLSSPELGQGGPSASNMTTSPMAPPPPMVAADDHQCNTNTPSGGGDGMSCEQTPASSTFDGLNLDDIDMEGCCPMTHILRAD

SEQ ID NO: 24692 - protein, 1125 aa, Oryza sativa
  Clone ID: TF_OsC251248_1.pep
MAIGGKQLAVFGGLCSQLLSFVFHAHTRRDEDEEEEQELGLGGGDLLRPQIGGATSSRPRSRTARRLHLCRAESLSWSRRRRRRGPVVGAPQIAPLPWPSGSHPQIQHPGIVRLGTALRGTRAARVAVARAIVMMTSDNGKAPEKDGEPSGPPSAPQEGEISNEPKRRRPLNGTTGPTRRSTKGNWTPEEDAILSRAVQTYNGKNWKKIAECFPDRTDVQCLHRWQKVLNPELVKGPWSKEEDEIIVQMVNKLGPKKWSTIAQALPGRIGKQCRERWYNHLNPGINKEAWTQEEEITLIHAHRMYGNKWAELTKFLPGRTDNSIKNHWNSSVKKKVNSYMSSGLLTQVSCLPLNEYSANCNSSPAMTQQNSEDSGCFAVREVENSSGCSQSSLAKVSCSQVHDTTVPLGCDLQVNANFDKNEAHDSQSSMGPQACYTSAEAVASALPAVHCHVSSSNLDPDQHLQEDFAQGLNLDMTIDEMPTVPSFADNQTVCSIENHERSLEPYDVAMEVPLSMLSSDSGAEQKLHFMSEADFNSPNCLKSELWQDISLQGLLSGPDAVEADSISRSNHQSDVYSSEADTHFLAPPYMPQTSNSSSVMGLADDQSPQMSVPPSLICSNAMTDDAPFDNRPGRKEMPLSQAEVVTQSSSSSGDAEMFANPGCSNDRHVPSSTMESIPECGDQQVTNAEEPEASLEKEPSLTQSVTAPDEQDKGALFYEPPRFPSLDVPFVSCDLVTSGDLQEFSPLGIRQLMHSTMNVCTPMRLWGSPTHDESTGVLLKSAAKSFICTPSILKKRHRDLLSPIPDKRIEKKYGTEKDRGVSDTSSTGIQTSCINATKDDALITTVLRIERSASSKSLEKKLVFSDENKENLGYTTEQTKDGQSAGNDEHMDEQTTGERSSATNVATNDDLSGNLQPAGILIEHSGDDPISPDYGKNTMNQKLNTNVKSLSVCKEGVCAKSKPTELIVEKSSPCINVDYEYVNILADTPGIKRGLESPSAWKSPWFVDMHFQGSYFTSPADSYDALGLMKQINVQTAAALVEAREVLASGGQCDNISSDKENTGNPDAKKEPGTTKLQTKIMAEGRVLDFECTTPERSSDKNAGSNLGRYLSSPIPSSHLLKSFR

SEQ ID NO: 24693 - protein, 227 aa, Oryza sativa
  unsure (1)..(227): unsure at all Xaa locations
  Clone ID: TF_OsC134_42.pep
MAFAAAYWLDHIWASFSWDVGDVVGAMARPEMVRVDGNDEVGRWRRYGHRERRRAYHQLFDQRRGTTALLPMARHGXPVASDRHHSASAARRDAAATRPATSVATANTRVSSSLIEIEXDTHTPPTTGRPPRTGEQDGEAAVLRQGWVKKGPWTPEEDLMLASYIQEHGAGNWRAVPTNTGVMRCSKSCPLRWTNYLQPGIKRGNFTEQEEKLIVHLQALLGNRSLP

SEQ ID NO: 24694 - protein, 279 aa, Oryza sativa; identical to SEQ ID NO: 17355
  Clone ID: TF_OsC806_1.pep

SEQ ID NO: 24695 - protein, 366 aa, Oryza sativa; identical to SEQ ID NO: 17356
  Clone ID: TF_OsC146515_1.pep

SEQ ID NO: 24696 - protein, 190 aa, Oryza sativa
  Clone ID: TF_OsC43020_3.pep
MVTVREEMRKGPWTEQEDLQLVCTVRLFGDRRWDFVAKVSGLNRTGKSCRLRWVNYLHPGLKHGRMSPHEEHLILELHARRGNRWSRIARRLPGRTDNEIKNYWRTHMRKKAQERKSNMSPSSSSSSLTYQSCHPETPSMIIGIEEQELHGGSGCITSIMKSTPVDMDGYPMDQIWMEIEAPNVLPGPLF

SEQ ID NO: 24697 - protein, 195 aa, Oryza sativa
  unsure (1)..(195): unsure at all Xaa locations
  Clone ID: TF_LIB4309-001-Q1-K1-A10.pep
MGRSRGVPNSGDDETNHRSKRRRVASSGDAPDSLSAACGGAGEGGGKKALYHCNYCNKDISGKIRIKCSKCPDFDLCVECFSVGAEVTPHRSNHPYRVMDNLSFPLICPDWNADEEILLLEGIEMYGLGNWAEVAEHVGTKTKAQCIDHYTTAYMNSPCYXLPDMSHVNGKNRKELLAMAKVQGEKXKGTSVLPG

SEQ ID NO: 24698 - protein, 570 aa, Oryza sativa
  unsure (1)..(570): unsure at all Xaa locations
  Clone ID: TF_OsC2142_1.pep
MGRSRGVPNSGDDDTNHRSKRRRVASSGDAPDSLSAACGGAGEGGGKKALYHCNYCNKDISGKIRIKCSKCPDFDLCVECFSVGAEVTPHRSNHPYRVMDNLSFPLICPDWNADEEILLLEGIEMYGLGNWAEVAEHVGTKTKAQCIDHYTTAYMNSXIGISGELDLPLPVTLARTGEVELPFTLSRAGTSVLPGDLTPKDESPFSPPRVKVEDALGEGLAGRSPSHIAGGANKKASNVGQFKDGANVAKVEDGHVDRSIGVKKPRYSADEGPSLTELSGYNSKRHEFDPEYDNDAEQALAEMEFKETDSETDRELKLRVLRIYLSRLDERKRRKEFILERNLLFPNPLEKDLTNEDKEVYHRYKVFMRFLSKEEHEALVRSVLEERKIRRRIQELQECRSAGCRTLAEAKIHIEQKRKKEHEVNAQKAKESGQLLSNTKVVHKTNRPMKIESDGNLDQKKGGASLDSTGRDSPKTTGHAGTKHWDDWDIVGFPGAELLSTSEKNLCCQNRLLPNHYLKMQEVLMQEIFKGSVAKKEDAHVLFKVDPAKVDNVYDMVTKKLGTNEEAPTV

SEQ ID NO: 24699 - protein, 306 aa, Oryza sativa; identical to SEQ ID NO: 17358
  Clone ID: TF_OsC90588_1.pep

SEQ ID NO: 24700 - protein, 297 aa, Oryza sativa; identical to SEQ ID NO: 17361
  Clone ID: TF_OsC387490_1.pep

SEQ ID NO: 24701 - protein, 276 aa, Oryza sativa; identical to SEQ ID NO: 17362
  Clone ID: TF_OsC804_1.pep

SEQ ID NO: 24702 - protein, 89 aa, Oryza sativa
  Clone ID: TF_LIB3433-019-P1-K1-H3.pep
MNMTGVPWSEEEHRLFLVGLEKLGKGDWRGISRSYVTTRTPTQVASHAQKFFLRQSSIGKKKRRSSLFDMVQSQFLGLLKLIRVLEFFG

SEQ ID NO: 24703 - protein, 301 aa, Oryza sativa; identical to SEQ ID NO: 17332
  Clone ID: TF_OsC96816_1.pep

SEQ ID NO: 24704 - protein, 266 aa, Oryza sativa; identical to SEQ ID NO: 17372
  Clone ID: TF_OsC165761_1.pep

SEQ ID NO: 24705 - protein, 224 aa, Oryza sativa
  Clone ID: TF_OsC44378_1.pep
MVVKKAATMAEAEAEEEMMMRMMCGSGGNEMMKTKMKKKNREGEEEEEVSGGGRMRKGPWTEQEDVQLVWFVRLFGERRWDFLAKVSGLKRTGKSCRLRWVNYLHPGLQRGRITADEERLILHLHSQWGSRWSRIARSLPGRTDNEIKNFWRTHMRKIAHHAKKKTNSPSPAPTTSFGSLSFSLTTATTTMATAAALQEAAAAAATTRPSTSWWGGAPRRRASC

SEQ ID NO: 24706 - protein, 1004 aa, Oryza sativa
  unsure (1)..(1004): unsure at all Xaa locations
  Clone ID: TF_OsC11497_1.pep
MRIMIKGGVWKNTEDEILKAAVMKYGKNQWARISSLLVRKSAKQCKARWYEWLDPSIKKLCSPHAILLQAYTAFEGLMTEWTREEDEKLLHLAKLMPTQWRTIAPGVGRTPSRYLERYEELLHGACEKDGNYEPNHERRKGRPGEIHPKPEPKPEHHDAVDMSNADDDELRRADSPRAKXQGNDQVVMLERNSISQDGDTANCKNGSXLNDGGIDTRKXERHRKGIDYNADVRFDKSPPPGFYYTVGEDSTHEHAQFPTIIEXFKIXRREDIEAQLRKQDFLRSKIIQRQVALAAFAQAIKLKVPXSVTKRSKLKLLPPXNSYHLLVGTANMGNGGDTSLVEELGEGSTATRALLSSYSQTPRLAMTWVRTPQRTPAGKGDAIMMEAENLARLRESQTPLLGGDNPELHPSDFSGVTPRKKEMQTPNPMATPLASPGPGATPRIGMTPSRDGSSFGLTPKSTPFRDELRINEEVDMQDTAKLELRRQAELRKSLRSGFASIPQPKNEYQIVMPPITEEEKEEAEEKIEDMSDRLARERAEEQARQEALLRKRSKVLQRSLPRPPAASIEILRQTLIKGGESRSRSTFVPPTSLEQADELINEELLRLLEHDNAKYPLDEKTQKDKKKGSKRQANGTPSVPEIEDFDEDELKEANSMLEEEVQYLRVAMGHESESLEDFVKAHDACQEDLMFFPNNNSYGLASVAGNSDKIAALQYEFEIVKKRMDDEAKKASRLEQKIKLLTPRIPGRLGMMHHKHCNMYRAGKLWSQVQDTFKQMDTSATELECFQELQKQEQMAASYRIRNLTEEVNKQKALERTLQSRYGDLLTSYKRIQEQLEEHKRQLMIQEEMEAQKRAQEEEEMEAQKRTQAEEEKEAAKAEEEARKMDRAADEEAAGSKQVNEDQMDVDNSNADGDEFVGPIPPGPGTQGDDNVVAVEENSSSQSGDTATTEDGSCGMIDASKSGGQDHIDSKDELPTVGASLDDGSAAASSDQDVSTEVNATVPE

SEQ ID NO: 24707 - protein, 278 aa, Oryza sativa; identical to SEQ ID NO: 17373
  Clone ID: TF_OsC44378_2.pep

SEQ ID NO: 24708 - protein, 309 aa, Oryza sativa; identical to SEQ ID NO: 17374
  Clone ID: TF_OsC2083_1.pep

SEQ ID NO: 24709 - protein, 561 aa, Oryza sativa; identical to SEQ ID NO: 17375
  Clone ID: TF_OsC951_5.pep

SEQ ID NO: 24710 - protein, 287 aa, Oryza sativa; identical to SEQ ID NO: 17376
  Clone ID: TF_OsC351_7.pep

SEQ ID NO: 24711 - protein, 599 aa, Oryza sativa; identical to SEQ ID NO: 17381
  Clone ID: TF_OsC8573_1.pep

SEQ ID NO: 24712 - protein, 307 aa, Oryza sativa; identical to SEQ ID NO: 17383
  Clone ID: TF_OsC207688_1.pep

SEQ ID NO: 24713 - protein, 368 aa, Oryza sativa; identical to SEQ ID NO: 17390
  Clone ID: TF_OsC808_1.pep

SEQ ID NO: 24714 - protein, 857 aa, Oryza sativa
  Clone ID: TF_OsC9889_1.pep
MSPPVAGAASSGDGPPGRPPRELYTIPASSGWFQWDEIHETERRALPEFFGGAGGSGFGTASRNPRIYREYRDYIISRYREDTSRRLTFTEVRKALVGDVTLLRKLFAFLDSSGLINFSASPSRPEAQQQQRQTEAEARREAPGGLQVRPRPLLESSAEEKGGRGKENWFCLPPLTSYSDVFGEWAPGMAPICGLCGMECRDGNAQILKDGFKVCSKCYANNDNKGEANIHPGDKKERIDNHSSSAWTDAETLLLLEGVLKHGDDWDLIAQHVRTKNKSECIARLIQLPFGEHMLGTVNGKLDNRLHKIQTTDGKVNKSTVKESSSQPTETVDDMQIDGNEDGADKSVEEHPTKHRRLFSSIDITVSLMEQLAHLTTSTSPDVVAAAADAAIKALGNENPQARRAFQLSEKEYQTRAFSSNHARQRDYCSDDVGGGDRDVEMHGHPDQEEREMELLMASIIETQLKKIQYKIKHFEELELIMDQEYATLQQMKSSLVDEWQKQSQQFGVWRIGAILNRLGFDRTAGMESHRRAPPFFPNAERRRRQPKTPPSSPPGLSVSPNLARHLSSPRPPPPDAQFTGALMAKKGKAAAAEAAAPDAGVSGPQGGGGEKEGSFLLGSPTWEDAGGGRWRCKETGHELPEREKEAYGRSRACRLALIDQAVARKKPPLNAFKPHPEHKSKLICNITGDIINKSEEHIWKHINGKRFLNKLEKLEEKMASGEMAEGEAEQSNEGENKTKSRKKKDKKKAAVVNPSLPREPKPEIDDSDNSDDPDFWVPPVGSRWDDDDGKDRWTSSPVKDKDDAAEDEDGDDDGDDMADKDDKETREIASRTKRLSVEAVGPSSFASRKKKTKKEQ

SEQ ID NO: 24715 - protein, 272 aa, Oryza sativa
  Clone ID: TF_4138298.pep
MGRRACCAKEGMKRGAWTSKEDDVLASYIKSHGEGKWREVPQRAGLRRCGKSCRLRWLNYLRPNIKRGNIDDDEEELIVRLHTLLGNRWSLIAGRLPGRTDNEIKNYWNSTLSRKIGTAATAAAGSRGGSTPDTARATDAASSSSVVPPGQQQQPASRADTDTATAAAAAAATTTTVWAPKAVRCTRGFFFHDRETAPLAAAAPAPAGELGDGDDVDCDYYCSGSSSAATTTSSSSLPAVVEPCFSAGDDWMDDVRALASFLDTDDAWNLCA

SEQ ID NO: 24716 - protein, 403 aa, Oryza sativa; identical to SEQ ID NO: 17379
  Clone ID: TF_OsC373_1.pep

SEQ ID NO: 24717 - protein, 285 aa, Oryza sativa
  Clone ID: TF_OsC490_1.pep
MEMVLQRTSHHPVPGEQQEAAAELSSAELRRGPWTVDEDLTLINYISDHGEGRWNALARAAGLKRTGKSCRLRWLNYLRPDVKRGNFTAEEQLLILDLHSRWGNRWSKIAQHLPGRTDNEIKNYWRTRVQKHAKQLNCDVNSKRFKDAMKYLWMPRLAERIHARAGAVDDSGDYSNNDLSCVSGVTMATVANCFDGSPSMVTSSSSDSFTSESQDLKKINLHVHGDDEKMNSEDWMQEVDHEFWSTEIQPNNEQFQDQQLNGWVQGFSEGLSETLWSLEDIWKMQ

SEQ ID NO: 24718 - protein, 75 aa, Oryza sativa; identical to SEQ ID NO: 17391
  Clone ID: TF_OsC411024_1.pep

SEQ ID NO: 24719 - protein, 343 aa, Oryza sativa
  Clone ID: TF_OsC6000_3.pep
MGMGRGGAVQCTARAGAATTTTTMGEWIVPGPHVNDEEENDNGPGIRGPWSPEEDEALRRLVERHGARNWTAIGREIPGRSGKSCRLRWCNQLSPQVERRPFTAEEDATILRAHARLGNRWAAIARLLQGRTDNAVKNHWNCSLKRKLAVATTTTTTTTGAAAAPGVVADAAELVERPCKRFSPTPDSPSGSGSGSDRSDLSHGGGFGQIFRPVARTGAFEPVDCAISRRQEEDPFTSLSLSLPGTDQRFNHDSAHSHFQELPSSPSPPPPPPPAAAASTTQYPFTPEFAAAMQEMIRAEVHKYMASVGVRAGCGDAGGADLHMPQLVEGVMRAAAERVGRMH

SEQ ID NO: 24720 - protein, 416 aa, Oryza sativa
  Clone ID: TF_OsC9332_1.pep
MFGRVPRSNNTKYYEVLGVPKTASKDELKKAYRKAAIKNHPDKGGDPEKFKELSQAYEVLTDPEKRDIYDQYGEDALKDGMGGGSDFHNPFDIFEQFFGGGAFGGSSSRVRRQRRGEDVAHTLKVSLEDVYNGSMKKLSLSRNILCPKCKGKGTKSEAPATCYGCHGVGMRNIMRQIGLGMIQHMQTVCPECRGSGEIISDRDKCTNCRASKVIQEKKVLEVHIEKGMQHGQKIVFQGEADEAPDTVTGDIVFILQVKVHPRFKRKYDDLFIERTISLTEALCGFQFILTHLDSRQLLIKANPGEIIKPGQHKAINDEGMPHHGRPFMKGRLFVEFNVEFPESGVLSRDQCRALEMILPPKPGHQLSDMDLDQCEETTMHDVNIEEEMRRKQYQRKQEAYDEDEEEDAPRVQCAQQ

SEQ ID NO: 24721 - protein, 168 aa, Oryza sativa
  unsure (1)..(168): unsure at all Xaa locations
  Clone ID: TF_OsC358016_1.pep
MGRSSACCDKAAVKPKRGAWTAEDDERLRSYIQQHGTGGNWXGLRRCGKSCRLRWLNYLRPGIRHGAFSDHDDRLILALHAAVGTRPVLLLAAHQLHVASTSSGGMHVGVGEEGRGYDDVFAAGPEHGRRADDDDELAQPPKPATIFARQITNWCAAAATCIWHALLV

SEQ ID NO: 24722 - protein, 84 aa, Oryza sativa
  unsure (1)..(84): unsure at all Xaa locations
  Clone ID: TF_OsC351_17.pep
GGRGGVRPRVRDRLIAYIKAHGEXCWVSVPKXAAGVLRCGKSCRLRWINYLRPGLKRGNFTEEEDELIIKLHRLLGNKDVGSSQ

SEQ ID NO: 24723 - protein, 346 aa, Oryza sativa
  Clone ID: TF_OsC2658_1.pep
RASSLPRSPLSRRAPVLVRPWATSPPPPPPPPPQPAAAAPGTPGNARHRASHRRWGCAFFSTPVLPPPCLTPSASPHILPRPHAGSGDGYPSDGGLLLSSGKRRRAQERKKAVPWTEEEHRTFLAGLEKLGKGDWRGISKNSVTHASPTQVASHAQKYFLRQTNPNKKKRRSSLFDMMATDMSPAPNCPVLPPSMGKLHDMVAMTKQLQNSSLEGVSSSSTVNLAPQVARDLPPPIPSFKATNVDSSLSKMNHMDGFLRAPMLFRPIPRIAEGASSSTPATASIADLEFQANLTACSNALFASPRRKPKKADPPAEKDLDLTVAPPSQQTRASISSQNAVGVIQVV

SEQ ID NO: 24724 - protein, 409 aa, Oryza sativa; identical to SEQ ID NO: 17398
  Clone ID: TF_OsC351_5.pep

SEQ ID NO: 24725 - protein, 342 aa, Oryza sativa
  Clone ID: TF_OsC2381_1.pep
MRRWSQIAAQLPGRTDNEIKNRWNSCIKKKLRQKGIDPNTHKPLTEADRRGAAPTVSTERTSGSSDVNPSSAGALGNLSHLLSETAQSSMLLPVYDKNHPETASLPRPKVPPKELFLDQLTAGHESPSSCRSSGPTLYFPFQQPLGYSNECGTGDGASMNSLWFNQNDFNCSTISTVMPPVSPSALSTSMGLNLPPENPRHGGTGIGNTPFYWDGSNPSSSGSTGSSGSNSMGFEPQSTTSILENSVFPWTDIGQEKDTRVHLVEELKWPDLLHGTFAEATTAMQNQSQSLYDDVIKAESQFNMEGICASWFQNQQPQQQLQAASDMYDKDLQRLPLSFEHI

SEQ ID NO: 24726 - protein, 246 aa, Oryza sativa; identical to SEQ ID NO: 17401
  Clone ID: TF_OsC257872_1.pep

SEQ ID NO: 24727 - protein, 261 aa, Oryza sativa
  unsure (1)..(261): unsure at all Xaa locations
  Clone ID: TF_LIB4371-008-R1-K1-H5.pep
YITGHSSLDFQRIDGDNDRSENDGDSWTDQETLLLLEGIEKYNDNWNNIAEHVGTKSKAQCMYHFIRLPVEDGLLENIEVPDASVPFRAETNGYPHLDCNGXLQVGFLASAMGPRVAASCASAALSVLTVDDDSRVNSEGICSDSRGQGPHPNFRDHNGGVSSSISPEKVKHAAMCGLSAAATKAKLFADQEEREIQRLTATVINHQLKRLELKLKQFAEVETLLLKXCEQVERIRQRIASDRVRIVXTRLASPGNSLPGG

SEQ ID NO: 24728 - protein, 491 aa, Oryza sativa
  Clone ID: TF_OsC13695_1.pep
MEMACLPGNAMATDENGADDRAGGESTVDHLRSHMNYGDMDLSGEEHVPKARKPYTITKQREKWTDEEHRLFLEALQLHGRAWRRIQEHIGTKTAVQIRSHAQKFFSKVVRESSGSNTGSGGASAAAAAAAIQIPPPRPKRKPAHPYPRKVDGAAKKHVPALRQLEKPPLWMQSLSEQEEGSPTSVLTAAQIGTEALGGGFSNNSSGSGSLAPSAAGTDEHVDGGGSPASSVDREDGCLSPSIPTAELAMQAPNTKMSIATTDAKEASSEASVFRLFGKSVVVKDSDQLHLLNGSNIATSGSVERATRNILVPSFAAAPEGSSSNPWPSSMQQFLYFLPRSDGFAAQPVMPWLSYNGSLPCALFYPAAAAAANQQCHRDSEGVEFRVSQREGSLTGSNTASSVVLGSSAAVPAAAAAAQNSDVAESRGQGNSREAAASPRLTKCESSASVTLLQRGFMPYKRCAAESELLRSEAAGGEEAVADGELTRLCL

SEQ ID NO: 24729 - protein, 278 aa, Oryza sativa
  unsure (1)..(278): unsure at all Xaa locations
  Clone ID: TF_OsC351_6.pep
MGRSPCCEKAHTNKGAWTKEEDQRLIAHINQHGEGCWRSLPKAAGLLRCGKSCRLRWINYLRPDLKRGNFTDEEDELIIKLHELLGNKWSLIAGRLPGRTDNEIKNYWNTHIKRKLLARGLDPLXRTARSMPPPPSPATTTSXRRRLQLLARRNKRPQQLQRRRRVPRRHRPQPVHKPAVVVVPAVFPAAAAARSRGETRRSDGELHLPPPLLGDEGEDMPVLEPPRAARRRRVQLRRLVGLFLLLAAAGDGELASVHIRQCIVVNSVKHREIQRFSD

SEQ ID NO: 24730 - protein, 265 aa, Oryza sativa; identical to SEQ ID NO: 16705
  Clone ID: TF_OsC2008_2.pep

SEQ ID NO: 24731 - protein, 267 aa, Oryza sativa; identical to SEQ ID NO: 17409
  Clone ID: TF_OsC806_2.pep

SEQ ID NO: 24732 - protein, 451 aa, Oryza sativa
  Clone ID: TF_OsC17430_1.pep
MASMPQLEEKDSSDLAINKGPSLDLVKSPLMMNDASATVTAMQPNEGMEEFPVKVRKPYTITKQREKWTEEEHDKFLEALKLYGRSWRQIQEHIGTKTAVQIRSHAQKFFSKVVREPGSNNAIEIPPPRPKRKPLHPYPRKCANSGSDANPATAQLKLAPGSSSSGSDQENGSPISVLSAMQSDAFGSSVSNPSTRCTSPASSDDGNNIPTFTSGEDNNVPCEPTVIDPSQSHKEIDQDRKDVNNMSEEDSSEEEVQETSLKLFGRTVVIPDPRKRSSSDPKHESEEQISQPSNEEMLQASSSVGEIPAAYCAPNGWFMSYNSFPFQFGESAADARIPPLHVWWPYYGFAPISHPRGLSTVMQQTEGSDESDGVKSHSSESSSDSGENVQMTAPQSSRIVESLGAIYVRDSGSSFELKPSANSAFVRVKPSNSGDEEVIRGFVPYKRCKFQ

SEQ ID NO: 24733 - protein, 289 aa, Oryza sativa; identical to SEQ ID NO: 17416
  Clone ID: TF_OsC161464_2.pep

SEQ ID NO: 24734 - protein, 239 aa, Oryza sativa; identical to SEQ ID NO: 17420
  Clone ID: TF_OsC24389_2.pep

SEQ ID NO: 24735 - protein, 587 aa, Oryza sativa
  Clone ID: TF_OsC50674_1.pep
MGAMAMVEQEGCVENRQPLAAPSRPVSDGSSYGGGGGGLAQMSPPVSSSANSISGLRRTSGPIRRAKGGWTPEEDETLRKAVEAYKGRNWKKIAECFPYRTEVQCLHRWQKVLNPELIKGPWTQEEDDQIIDLVKKYGPTKWSVIAKALPGRIGKQCRERWHNHLNPEIRKDAWTTEEEQALINAHRIYGNKWAEIAKVLPGRTDNSIKNHWNSSLRKKQDMYNTSNNMVVPKLLVHDKFKDKPKLMAMEGHLDLNKAPIINSKDQPGTAHRSNCSGFLSRSSLPTAQPLTSREASVVDGSAVTLVAQALESDSVRGKGLEIDSVHEKGLEVNSAPDHTGNSWTIQLEAAPSKGEAELSLKNEARSLGPLCYQIPNMEDVVPVSSSLFSDHLTGNHTSEHCGDDILSPAGCTTPPPTKGKLTSQLSVDSILKSAANSFPGTPSILKRRKRDKSTPVSASEMKISGSNTDRFYTPMGMEPATATPESFKTTSFLSLGSLDGSVKSFDVSPQYRARSKRMALTKTVEKQLDFSSDGLDTCGSEILNSSCNNSQSTLSITEAPKLKEKEHAVQLENGTKNFAHTTNLDVT

SEQ ID NO: 24736 - protein, 511 aa, Oryza sativa; identical to SEQ ID NO: 17421
  Clone ID: TF_OsC3094_1.pep

SEQ ID NO: 24737 - protein, 219 aa, Oryza sativa
  Clone ID: TF_OsC1713_4582.pep
GSIASVGVDGSLLLLVSSVAVVSSVRHIGEGEVDVDEQQWLFGWLRAIRNQYLSVDTLGARQCQDHWIYFKIRADPITLTPLLLLFPSPSSPRAFRRHGPAVTPPASLASRKESTPMAMSYPCAAVFPVSGSEGVANAGEEEEVAGVGGEGLEHESQSSFSGPKSVRFEDGFSIDRSKSQTIGFHPSNQNFRTLDNSFNKKLITAIARFCPSTYFGIAI

SEQ ID NO: 24738 - protein, 508 aa, Oryza sativa
  unsure (1)..(508): unsure at all Xaa locations
  Clone ID: TF_OsC75714_2.pep
MMAEALREVLPLPYFPGQPCWYLQERRGAEAWSAEENKVFERALAQVDLDSPNRWEMVAAMLPRKTVIDVMNHYRDLENDVGSIEAGLVPFPHYSSSLSPASSGFTLQDWDGSDGGFRRGCYLKRGRAPDQERKKGVPWTEEEHKSFLMGLKKYGRGDWRNISRYFVTSRTPTQVASHAQKYFIRLNSGGKDKRRSSIHDITTVNLPEEDTSNPSPSPPSVLTTASDPLACLVDRRPVAPRRALVGSXMGLKTYGRGDWRNISRYFVTSPDADATVSAGAEAMLTLVTAGGNGGGPSSDDDIATAQLIETATTRPRPSRPPVSASDWHASWLXSCFIRLRIAKYWTEGPLTGYCFDQEHQGIPRDRNPXSVLDTAYCIXSMIYLLTCLWVPKRPHRRATRVYVYMNRARVVEPASEPASGLIXDPKREMNXSGTPGPFIFRSGFLCSDDVERNSCSSSGPVFYSSDPILFNGCERKSAIAAIALLGRHVRPRLRANIQILQMDDIIEE

SEQ ID NO: 24739 - protein, 311 aa, Oryza sativa
  Clone ID: TF_OsC805_1.pep
MGRPPCCDKEGIKKGPWTPEEDIILVSYIQEHGPGNWRSVPINTGLMRCSKSCRLRWTNYLRPGIKRGNFTAHEEGIIVHLQSLLGNRWAAIASYLPQRTDNDIKNYWNTHLKKKLAAAANSTSSSNRHPIFADATFPSAAGGSYTVSSNSDVTQMAAIARRSPFADCPSSSYASSMDNISKLLDGFMKTNSPSPPPPPLQHYDGGYYDDVKPAVDVGGNPLLSSFDCMSGADLDCCFDVHQQHQQQPPASFMEYGGYGGGYGDESKQQLMNQAAPPLSSIEKWLFDEAAAEQVADLMDLSDGCCSVPMMF

SEQ ID NO: 24740 - protein, 348 aa, Oryza sativa
  Clone ID: TF_OsC75714_1.pep
MMKESYMEVLPPAPAHYFVGQAAAAGGWFLPDRRGGGGAWSQEENKVFEQALAALDRNDPERWERVALLLPGKTVADVMTHYDDLENDVCFIEAGLVPFPHYGAAGGGGGSGFTLDWDGGDDPAGLGFKRSCYMVGGKRARGPDQERKKGVPWTEEEHKLFLMGLKKYGRGDWRNISRNFVTSRTPTQVASHAQKYFIRLNSGGKDKRRSSIHDITTVNLPDDDHGNPSPSPPPSVLTASEQFGVLVDGKPPPPPLGRGAGHHHFMPHPYAQVKIEAGNSHVAGGGRLDDSVLVQMQCGQPQSKENRKTVSALSTGAPLVQPANTPLSPAGVIAKRPAPIALPNSCAA

SEQ ID NO: 24741 - protein, 315 aa, Oryza sativa; identical to SEQ ID NO: 17284
  Clone ID: TF_OsC75714_3.pep

SEQ ID NO: 24742 - protein, 312 aa, Oryza sativa
  Clone ID: TF_OsC6000_2.pep
MSSSRKEEEEVDSMGMEAECDRIKGPWSPEEDEALRRLVERHGARNWTAIGRGIPGRSGKSCRLRWCNQLSPQVERRPFTAEEDAAILRAHARLGNRWAAIARLLPGRTDNAVKNHWNSSLKRKLATATDGGEIDRPCKRVSPGPGSPTGSERSELSHGGCGSGSGGGQVFRPVPRPGGFDAISAADVVRPPRRRDDNDDDGDDDPLTSLSLSLSLPGFHHDSARSHFQELPSPSRSPSPPPSAAAASPSAYPFTAEFVSAMQEMIRAEVRKYMASVGVRAGCGHAAGADLHMPQLVEGVMRAAAERVGRMH

SEQ ID NO: 24743 - protein, 280 aa, Oryza sativa
  Clone ID: TF_OsC43020_1.pep
MLKRRRAKLDTSGRRARRPAPSRSKVGASSVGATLSSYTRVTNMVTVREEMRKGPWTEQEDLQLVCTVRLFGDRRWDFVAKVSGLNRTGKSCRLRWVNYLHPGLKHGRMSPKEEHLIIELHARWGNRWSRIARRLPGRTDNEIKNYWRTHMRKKAQERRGDMSPSSSSSSLVYQSCLLDTVPIISMDGGDIHDDRSCMARVLKSTQSVMDGYTMDQIWKEIEAPGAPSLLGIDEGKDKACSNLPCPLLTSTMSDYSCPEVFWKIDNEETRMLATQSGYGK

SEQ ID NO: 24744 - protein, 288 aa, Oryza sativa
  Clone ID: TF_OsC52907_1.pep
MAVPAPAAAVGEEARKVRKPYTITKSRESWTEPEHDKFLEALQLFDRDWKKIEAYVGSKTVIQIRSHAQKYFLKVQKNGTGEHLPPPRPKRKAAHPYPQKASKNVSPAAISQPPPLGEQGCVMSMDTSPVIRNTNASAVVPSWDNSIAQPLSASRTQGTGAVATNNCSSSIESPSTTWPTSEAVEQENMLRPLRAMPDFAQVYSFLGSIFDPDTSGHLQTLKAMDPIDVETVLLLMRNLSMNLTSPNFAAHLSLLSSCNSGGDPIKSEGMENLGSPQSCHLPFMETSE

SEQ ID NO: 24745 - protein, 175 aa, Oryza sativa
  unsure (1)..(175): unsure at all Xaa locations
  Clone ID: TF_LIB4830-029-R1-N1-B12.pep
MMASCRRGGGGDVDRIKGPWSPEEDEALQRLVGRHGARNWSLISKSIPGRSGKSCRLRWCNQLSPQVEHRPFTPEEDDTILRAHARFGNKWATIARLLAGRTDNAIKNHWNSTLKRKHHSSLLADDLRPLKRTTSDXHPTLSSAAAPGSPSGSDLSDSXHHSLPLPDGPLTPTPP

SEQ ID NO: 24746 - protein, 522 aa, Oryza sativa; identical to SEQ ID NO: 17286
  Clone ID: TF_OsC351_2.pep

SEQ ID NO: 24747 - protein, 269 aa, Oryza sativa
  unsure (1)..(269): unsure at all Xaa locations
  Clone ID: TF_OsC344203_2.pep
MPCTSAAWMLHVGGAAAEQASSSSSSKGGGRVVTAGTTTMDTGGYNNGGGGGGGGGNGGGGGDHQESSSSGGGGGQSSRLAARGHWRPAEDAKLRELVALYGPQNWNLIADKLDGRSGKSCRLRWFNQLDPRISKRPFSDEEEERLMAAHRFYGNKWAMIARLFPGRTDNAVKNHWHVIMARKYREQSTAYRRRKLNXPSSASSTPPPPPTSSSPTTTPTPPPTTPTPSPSATTASLFRPPPPPPPTSRPSPACSPGRRRRPGAAAAVA

SEQ ID NO: 24748 - protein, 908 aa, Oryza sativa; identical to SEQ ID NO: 17256
  Clone ID: TF_OsC359_7176.pep

SEQ ID NO: 24749 - protein, 326 aa, Oryza sativa; identical to SEQ ID NO: 17259
  Clone ID: TF_OsC351_8.pep

SEQ ID NO: 24750 - protein, 338 aa, Oryza sativa; identical to SEQ ID NO: 17261
  Clone ID: TF_OsC344203_1.pep

SEQ ID NO: 24751 - protein, 153 aa, Oryza sativa
  Clone ID: TF_rsicek_6331.y1.abd.pep
MDSSEVSGASGTSWTDEETLLLLEALEIFGGKWTEIAEHVATKTKAQCMLHFLQMQIEDRFHGDEDINQNIQENTEQASAEKGAAEIPDKMEVEEKAEGKDTAGEKTPEKAEGNSVEAQTEDGNAIENKDANNSGGTDSVKSLNTDEPKKSSD

SEQ ID NO: 24752 - protein, 552 aa, Oryza sativa; identical to SEQ ID NO: 17266
  Clone ID: TF_OsC331108_1.pep

SEQ ID NO: 24753 - protein, 346 aa, Oryza sativa
  Clone ID: TF_OsC351_9.pep
MMGRSPCCEKEGLKKGPWTPEEDQKLLAYIEQHGHGCWRSLPSKAGLQRCGKSCRLRWTNYLRPDIKRGKFSLQEEQTIIQLHALLGNRWSAIATHLPKRTDNEIKNYWNTHLKKRLAKMGIDPVTHKPRSDVAGAGGGGGGAAGGAAGAQHAKAAAHLSHTAQWESARLEAEARLAREAKLRALAASATPGAPHLPAPPASAAAAAAAHGLDSPTSTLSFSESAVLATVLEAHGAAAAAAARAAMQPMQAYDEACKDQHWGDVDAADVGFPGAGAGFTGLLLEGSLNQIPRPAGRDAEADGEFQETEEEKNYWNSILNLVNSSSAPMSTAVVVPASHAYSPAPDF

SEQ ID NO: 24754 - protein, 210 aa, Oryza sativa
  Clone ID: TF_OsC424_1.pep
MRAINAGCWIVRRVYGWCVADAGLQRSGKSCRLRWVNYLHPGLKRGRMSPEEERMVVQLHAKLGNRWSRIAKSIPGRTDNEIKNYWRTHLRKLKLKQQKQQQSDDHHNDNDDDDDRNSSSSSSSSNSNSNLQQQPQPEDESSASGSLQAQHHEDQHQLFLHPLWNDDIIVDVDCWSSSTNVVAPPPMPASPLWDIDDAFFCSDYSLPLWG

SEQ ID NO: 24755 - protein, 287 aa, Oryza sativa; identical to SEQ ID NO: 17269
  Clone ID: TF_OsC76813_1.pep

SEQ ID NO: 24756 - protein, 306 aa, Oryza sativa; identical to SEQ ID NO: 17424
  Clone ID: TF_OsC100249_2.pep

SEQ ID NO: 24757 - protein, 257 aa, Oryza sativa
  Clone ID: TF_OsC729_1.pep
MGRAPCCEKMGLKKGPWTPEEDKVLVAHIQRHGHGNWRALPKQAGLLRCGKSCRLRWINYLRPDIKRGNFSKEEEDTIIHLHELLGNRWSAIAARLPGRTDNEIKNVWHTHLKKRLDAPAQGGHVAASGGKKHKKPKSAKKPAAAAAAPPASPERSASSSVTESSMASSVAEEHGNAGISSASASVCAKEESSFTSASEEFQIDDSFWSETLSMPLDGYDVSMEPGDAFVAPPSADDMDYWLGVFMESGEAQDLPQI

SEQ ID NO: 24758 - protein, 321 aa, Oryza sativa
  Clone ID: TF_OsC1121_1.pep
MGRKPCCSKEGLNRGAWTAMEDDILVSYIAKHGEGKWGALPKRAGLKRCGKSCRLRWLNYLRPGIKRGNISGDEEELILRLHTLLGNRWSLIAGRLPGRTDNEIKNYWNSTLSKRVAMQRTAAATSMPAAATTSSNADAAGAAARRRRSPEPRTVVVSPIRTKALRCNNNSSSGIVVVQQAGACSHGGRPPESGAPGDAAADKVATPQAVQQQQQQELAGAEDDDDLPVPAVCIDLDLDDIELGGLDGFLISPWRGGGHDDGNAAAGAVPNLPMPIGYELGGAGGGGEAGAVDLEALLGQLEAEEDDDGDHHHHHHHHHHQ

SEQ ID NO: 24759 - protein, 219 aa, Oryza sativa
  unsure (1)..(219): unsure at all Xaa locations
  Clone ID: TF_OsC43020_2.pep
MAKSRRIAAAHLTCMEIFNRALDWALERELHTSRRGADDDRQILKLVHAATARGRRSRGRGSTSPPRKGGMESSVPMIMADKKASAFHIRRTGKNIWKKPDRDFSKIPFPMAGVHQGSHPEAGANKHTEVEEEQEDRLRADTRVINMVTVREEIRKGPWTEQEDLXTGLNRTGKSCRLRWVNYLHPGLKRGRMSPHEERLILELHARWGNRDPVNDHWN

SEQ ID NO: 24760 - protein, 78 aa, Oryza sativa
  unsure (1)..(78): unsure at all Xaa locations
  Clone ID: TF_LIB3431-001-P1-K1-G9.pep
HAFGKQATGGGGCGRPSRTTERCFWKATGCDRSIRXRGYPNRMIGLNKTLGYYEGRAPTGTKTDWVMNEVCLCECDTI

SEQ ID NO: 24761 - protein, 172 aa, Oryza sativa
  unsure (1)..(172): unsure at all Xaa locations
  Clone ID: TF_jC-osleLIB3474001h09a1.pep
DRKYPNGSRPTRAAGIWYXKAPGTNKPVAPRGRTLGIKKALVLYAGKAPGGVNTEWIMHESRLANDGRASTGAKKGSLRLHDWVXLCRMYINKNEWDKMQQGKEVKEQASDMGTXQCALGTPTRWGETRTLESEIVDSDPFPELHSFPAFQLAPPPAQAMMVPNIRIDGRRH

SEQ ID NO: 24762 - protein, 136 aa, Oryza sativa
  unsure (1)..(136): unsure at all Xaa locations
  Clone ID: TF_OsC1517_1194.pep
MTWCNSFNDVRAVENNLATAAAVAAAKKQQQQQQVSQHVNLIKTCPSCGHRAQYEQAAAAATIQDLPGLPAGVKFDPTDQELLEHLEGKARPDARXXQPLIDEFIPNIXGENGICXNHSESFQEAKTADSEFFNAV

SEQ ID NO: 24763 - protein, 350 aa, Oryza sativa; identical to SEQ ID NO: 17541
  Clone ID: TF_OsC359885_1.pep

SEQ ID NO: 24764 - protein, 558 aa, Oryza sativa
  Clone ID: TF_OsC342748_1.pep
MATAAESQGLSPGFKFNPSVEQLLCFFLLPYLQHRRLLVDGVVFLDDPASAPPWALLHRHGRGGEDEAYFIGPVPAGDGHGGRRQQQVSRTVTGGGGGKWIKQRTERPRGEEEPVVVFGGETFRWEEFSLNFHADERCRSGSTGWVMHEFAVVPPAGSRVAATHTACRIAFTGHGQKRKRVPDGYVFVDVHVQTAAAAAAVAPPLPMLSSYGEPPHEHFSDDHPPPHSYTYYTQGYQQFLPPAEQSDQEQEYCAPDQQNFQDYHLAAAEQTDQDYFYTEMINQEQDYAYQQQQQHLFHGDFLATSQQFLGQDHEVMFTGLGGGLVVSDNGEHASAAAPATEPPVHDVFLETLVPEPPENAYVDGAGESAMASASSAGGAPLLEQPFATPPQQFLDQEPAPAGLNDGGAMIYNNNGDGEHDAAPAAQPPARYYSGPVPAVDSVFLDKMREYLMADAKGLCRIDAPINNGEHAAAPAPAADDPLAAQHGHGDAPPLPVPPDAAELERVVGHLLREVEDIIKVAAAGGYGGSSDKPLSEFDKAQNQILAKLMAVFNQVAES

SEQ ID NO: 24765 - protein, 282 aa, Oryza sativa; identical to SEQ ID NO: 17430
  Clone ID: TF_OsC330475_1.pep

SEQ ID NO: 24766 - protein, 54 aa, Oryza sativa
  Clone ID: TF_uC-osflcyp108a02b1.pep
SSSAQLASCRSSCSSQAAPFSNHGSLARSDSLGSHVPACPFWMTSYLAPSIFSS

SEQ ID NO: 24767 - protein, 507 aa, Oryza sativa
  Clone ID: TF_OsC49175_1.pep
MKKTLVFHSGRAPKGQRTNWVMHEYRLLDADGTQDLHVVCRIFQKNGSGPQNGAQYGAPYLEEDWEEEDDAIENMPASGAFAEMAAVTDTADESTEEDGNFSLKTNDEPLQTQEYQPEITPVKAQGSNEETNGGGYSCDVFSLDEILQEPENVCKNEEQNAIDDKFTIAELSGYPRQDDGYVGENGPVNWIDPSNGDNTNWPLRAYSTQNHVNGTLSADGFFDTVNGTNSYSGPSDNQNLYLQDDGLTSSHQVGDNMPFYDASSNHKWVDGKDDYLNLNDLLYPPAENQPLFDAGDDLMAYFDATEDDFKFDIMGTEDSNSQLPDMSNFVQKDDNNNKFTLDGISNTALYGASSSGSHGNMYPDTAVPDMPMDDTVDKSFGKRLASMLGSIPAPPAMASEFPPSTGKSVVPLSAVNPSSSIRVTAGIIQLGGITFTGSTEHLQKNGDFNLLLSFTVEGDVSTKSIGFEPDTQMSTTPMVLRSGMYLFFVSAMILMLSYKVGLCIYSR

SEQ ID NO: 24768 - protein, 341 aa, Oryza sativa
  unsure (1)..(341): unsure at all Xaa locations
  Clone ID: TF_OsC277393_1.pep
LRPRVVSXGDKPPPSSSSCGFIIHEADVYSADPADLTRGFAPAVARSSGDEAWYFFSAVRGLKGGRKARTVDDGAGCWHSEAGAKPVLAASSGRRLGHRQSFSFITKDDDGQRVRSGWLMVELSLDVDEEEQLVLSKVYFSPRAPGARKPTTAAAMSRHKRKLSTTDIASPPRRQRRHRVVPSSPPEEPNTSPSPAAAPPDQQEGGDDDPDRGSISWWLRRVFGLTATFTEEESIELNPWLKDILRPFPPPLPPTPPPPCPSPRRKLIDMPEIREFIMRGSYLGGGPAPPRYECDHPAMVMTGGDDQQQLDEQRRDDVGDDRAHYDRVDGQLQFERHYLQL

SEQ ID NO: 24769 - protein, 56 aa, Oryza sativa
  unsure (1)..(56): unsure at all Xaa locations
  Clone ID: TF_LIB4370-024-R1-K1-D2.pep
FLADXSYIFIHGDDTAASIFSHASGFRFQPTDEQLVVDYLQRRTACAAMALLPTSP

SEQ ID NO: 24770 - protein, 948 aa, Oryza sativa
  Clone ID: TF_OsC13359_1.pep
MSATLSSFLLLLFSFLSSLPLQSERKAKQVEGSGRAATGKHDSGVEVDVIASTYYMRARERDAGAEADALREELWSVKAELELAKTKAVAAAAAAGALAEKAQEVYKRGREDVRNTIASYRSALLKMELFSRVLPPLGIAMGDSWSDTEIIMFLAERKTWDPLPQNILVGVDLTMIDPRDSPGTLWFLNWPDNQLCYDDENNVFRKAKNGYWKCVDACRIQTGTSILGVKLCLEFHEGQTPCGTRSGLMMYEYLIEQNDELNLPQAYKSLCRMFLQKDRKIVEDEHISLNLGVHHNFLGSYSQYLAEIQRQNMVMNSQAVSSDKKSIFIRELDERKSKKCSTKITRSSTRLYRQKIPHIWCLRHSVSRKWFRESMFRVIDKLAKLLESVLLDLATVRQKINKGKKRIWKMEGKLEKAQIQHLTDFNNKYGPSIRQSVETAEHNNCALRCLNNYLELMIEEPRFSSIAYVRLDSQVKKLDKENTSAMDLSSSLHQMLQKLNLRVQDEEVWVSQLGSNLQASFRKIMDTSSEIGKLEDEVLQLKVDIAEFAPGEVTSCAVYEMIKTLQIVELFMNNSTRHLKLIDGINSEMREFGSIFNGKVRCLVRFARYQQTIMEKSTQINLFQIINFLGDIRAKVDKMTQMYGLSEVVPIVSNQFIEGSFNADAYAFESLKEHSTDLCFSWRTRKFHNRLILPPVRQQTSGTRSYYATLSSVESLYKREYASYPTILKDKIGQPDEFLVNLSRAQLEDIVEDFYTRHKVKGSKRLNVCLDKMKNEGVISEESYMNPQAQSTERYKIKQYEELNLEIAMRERDKEEVSIVDKKCIGKKKKRRFRKKMRMKEHIFLTKIKKVIESHIMDGKVLIASFRVTTGYFRLLPHQIYKIPEEDPQYELNKKGNPCSHCVVVVGFGIRDGECYLIYLNSYGTSWGHDGFGRIYLDSVRKLFLAQV

SEQ ID NO: 24771 - protein, 137 aa, Oryza sativa
  Clone ID: TF_OsC13359_2.pep
MPLRVLPPLGIAMGDSWSDTEIIMFLAERKTWDPLPQNILVGVDLTMIDPRDSPGTLWFLNWPDNQLCYDDENNVFRKAKNGYWKCVDACRIQTGTSILGVKLCLEFHEGQTPCGTRSGLMMYEYLIEPDDELNLPQ

SEQ ID NO: 24772 - protein, 108 aa, Oryza sativa
  Clone ID: TF_uC-osflM202051g08a1.pep
SIIGSWSDLIWCELFVQLDDWVLCRLYNKKNEWEKMQQGKEVKEEASDMVTSQSHSHTHSWGETRTPESEIVDNDPFPELDSFPAFQPAPPPATAMMVPKKESMDDAT

SEQ ID NO: 24773 - protein, 68 aa, Oryza sativa
  Clone ID: TF_uC-osflcyp108a03b1.pep
MATPGQQLPPGFRFHPTDEELVVQYLRRRALCRPLPADVIEDVHYAGVLDPWDLPGARDGEAYLFSFR

SEQ ID NO: 24774 - protein, 286 aa, Oryza sativa
  Clone ID: TF_OsC114295_1.pep
MANPSPMGCAVGVADGGAHHGGLWNIKEPFKLQNGWLLWAGVGLFGAIISIALVGVAMTYLNGEPPERETDSLVLLLPLIGSSSASTAFLVGITGVLAPILEETVFRGFLMVSLTKWFPTPVCILVSAALFAFAHLTPGQFPQLFILGVALGFSYAQTHNLLTPITIHAFWNSGVILLLTFLQRPIYSSEGTKCISLKKSLVFYKGRAAKGFKTDWMMHEFRLPSLTEPSLSKIPIDKKPAKDIWAICKIFKKPNSMAQRALSHPWGPQSTATTSSQFASGSSSCT

SEQ ID NO: 24775 - protein, 109 aa, Oryza sativa
  unsure (1)..(109): unsure at all Xaa locations
  Clone ID: TF_jC-osleLIB3474001h09b1.pep
MGGRVVIFIQRIVLAATRRKHEAMGMVMRRERYLEAELNLPPGFRLHPTDDXLVEHYLCRMAAVHRLPQPIMGXVDLYXFDSWNLTNRSLYGPREWLFFISRDRKYTTG

SEQ ID NO: 24776 - protein, 86 aa, Oryza sativa
  Clone ID: TF_LIB3434-009-P1-K1-B11.pep
MALREIESTLPPGFRFFPSDEELVCHYLHKKVANERIAQGSTLVEVDLHAREPWELPEVAKLTASEWYFFSFRDRKYATGSRTNRA

SEQ ID NO: 24777 - protein, 678 aa, Oryza sativa; identical to SEQ ID NO: 17477
  Clone ID: TF_OsC33185_2.pep

SEQ ID NO: 24778 - protein, 706 aa, Oryza sativa; identical to SEQ ID NO: 17478
  Clone ID: TF_OsC33185_3.pep

SEQ ID NO: 24779 - protein, 228 aa, Oryza sativa; identical to SEQ ID NO: 17472
  Clone ID: TF_OsC2923_1.pep

SEQ ID NO: 24780 - protein, 506 aa, Oryza sativa
  Clone ID: TF_OsC5734_7.pep
MERRCGTSAPAIEDMSPHSRSTAGKYIAGYIVKKKMHPNGAPLAVPPGFRFHPTDEELLYYYLRKKVAYEAIDLDVIREIDLNKLEPWDLKDRCRIGTGAQEEWYFFSHKDKKYPTGTRTNRATVAGFWKATGRDKAIFLGSGGGTRIGLRKTLVFYTGRAPHGKKTDWIMHEYRLDDDNVDVPEEGWVVCRVFKKKSIHQRGFDQPDMAAAADEDELRYQLLHGAGMSSSPVDQKHVLLQEQLVAHGAHGGGFVVPAFEASMHLPQLASADAAPCGGGGGGHVAFASMNPLDAAGCGSQNMMTMKMAATSGGEMLLMSGGGVDGGRFGAAADWSILDKLLASHQNLDQLFHGKVAGAHQQQQQMAMDAASSLQRLPFHHYLGLEAADLLKSSPLPVSHRPVPDRVPQAHDSSPPHRPAPPWGQAVVASSLRGQAAAAAGTNRLLAQSPHRRHRSNPRRLCRAPLPPRAVTRHIAAAGPSQPTPPPRRPIASSPAAPSSPKIWYDL

SEQ ID NO: 24781 - protein, 301 aa, Oryza sativa; identical to SEQ ID NO: 17476
  Clone ID: TF_OsC225972_1.pep

SEQ ID NO: 24782 - protein, 376 aa, Oryza sativa; identical to SEQ ID NO: 17509
  Clone ID: TF_OsC256659_1.pep

SEQ ID NO: 24783 - protein, 78 aa, Oryza sativa
  Clone ID: TF_uC-osroM202005c08b1.pep
MSGGQDLQLPPGFRFHPTDEELVMHYLCRRCAGLPIAVPIIAEIDLYKFDPWQLPRTIILLLHPPNHHHHQRRRELID

SEQ ID NO: 24784 - protein, 318 aa, Oryza sativa
  Clone ID: TF_OsC1780_1.pep
MEMAAAVGGSGRRDAEAELNLPPGFRFHPTDEELVVHYLCRKVARQPLPVPIIAEVDLYKLDPWDLPEKALFGRKEWYFFTPRDRKYPNGSRPNRAAGRGYWKATGADKPVAPKGSARTVGIKKALVFYSGKAPRGVKTDWIMHEYRLADADRAPGGKKGSQKLDEWVLCRLYNKKNNWEKVKLEQQDVASVAAAAPRNHHHQNGEVMDAAAADTMSDSFQTHDSDIDNASAGLRHGGCGGGGFGDVAPPRNGFVTVKEDNDWFTGLNFDELQPPYMMNLQHMQMQMVNPAAPGHDGGYLQSISSPQMKMWQTILPPF

SEQ ID NO: 24785 - protein, 534 aa, Oryza sativa
  unsure (1)..(534): unsure at all Xaa locations
  Clone ID: TF_OsC311999_1.pep
MAPVSLPPGFRFHPTDEELIIYYLKRKINGRQIELEIIPEVDLYKCEPWDLPEKSFLPSKDLEWYFFSPRDRKYPNGSRTNRATKAGYWKATGKDRKVNSQRRAVGMKKTLVYYRGRAPHGSRTDWVMHEYRLDERECETDTGLQDAYALCRVFKKTAPGPKIIEHYGVVHHHVEQPQWMTSSIDRSPTLDVSCDGRGDDFESSSFSFPTETPMDSMHGGFGMQMSAPHEDGKWMQFLSEDAFNATNPFLTNPVSANFSCLPSKVDVALECARLQHRLTLPPLEVEDFPQDVSLDTKIGILRSNPNEVDILQEFLSVATASQELINGSTSSYPEMWLGASTSSASYVNELSSLVEMGGVGTSNHHESARLQVEIADMEVFKDEKKRVENLRGVKLVNTVFHIRYRLYTDTVLACTNSELXAGEAGHRMTDPTDVGGIDTAPIFSQSQPDDFAAGFDDVNPNASFDLYEKVDVNHRLFVSRVAAAKTFFHRIEPSKKVSFHSNPAATAVSKATEKFHFPVTTKVSGRIMGIALSA

SEQ ID NO: 24786 - protein, 252 aa, Oryza sativa; identical to SEQ ID NO: 17493
  Clone ID: TF_OsC652_3.pep

SEQ ID NO: 24787 - protein, 370 aa, Oryza sativa; identical to SEQ ID NO: 17494
  Clone ID: TF_OsC1517_1609.pep

SEQ ID NO: 24788 - protein, 505 aa, Oryza sativa
  Clone ID: TF_OsC1517_1495.pep
MYTSPTLLALSFALLLLILLFYYSSSLLYSQLATRRRLTHACARSLPDAYESGMNRGHISSSELIDAKLEERRISTAKHCPSCGNKLDCKPDWVGLPAGVKFDPTDQELIEHLEAKVREEGSRSHPLIDEFIPTIEGEDGICYTHPEKLPGVTRDGLSKHFFHRPSKAYTTGTRKRRKIQTECDVQKGETRWHKTGKTRPVMVSGRQKGCKKILVLYTNFGKHRKPEKTNWVMHQYHLGDLEEEKEGELVVCKIFYQTQPRQCSWSSDRGGGAAATASAVTTAAVQQDQQRRRDSGSGSCSSTRDHEVSATSYSTAGYAVAAAVEMQHLKHAADHFSFAPFRKSFEEVGISGDQVHSNQLGRSEQQHAGQEQQPHRPLLATTTAVPATAFLISRPTNPVSNIVPPAMQHASVVLDHDQFHVPAILLHHDKFQQQQQQKLDRRSAGLEELIMGCTSSSTKGVVYTCTFRKLQFLTPKRQNGLTSHTGLLTTRIIMDSSNKAAFDMH

SEQ ID NO: 24789 - protein, 333 aa, Oryza sativa; identical to SEQ ID NO: 17489
  Clone ID: TF_OsC267092_1.pep

SEQ ID NO: 24790 - protein, 346 aa, Oryza sativa; identical to SEQ ID NO: 17491
  Clone ID: TF_OsC153799_2.pep

SEQ ID NO: 24791 - protein, 393 aa, Oryza sativa
  Clone ID: TF_OsC148618_1.pep
MVLSNPAMLPPGFRFHPTDEELIVHYLRNRAASSPCPVSIIADVDIYKFDPWDLPAKANYGDREWYFFSPRDRKYPNGIRPNRAAGSGYWKATGTDKPIHSSGGAATNESVGVKKALVFYKGRPPKGTKTNWIMHEYRLAAADAHAANTYRPMKQGTARVRLDDWVLCRIYKKSSHASPLAVPPLSDHEQDEPCALEENAPLYAPSSSSAASMILQGAAAGAFPSLHAAAAAATQRTAMQKIPSISDLLNEYSLSQLFDDGGAAAAAPLQEMARQPDHHHHQQQQHALFGHPVMNHFIANNSMVQLAHLDPSSSAAASTSAGAVVEPPAVTGKRKRSSDGGEPTIQALPPAAAAGKKPNGSCVGATFQIGSALQGSSLGLSHQMLLHSNMGMN

SEQ ID NO: 24792 - protein, 445 aa, Oryza sativa; identical to SEQ ID NO: 17496
  Clone ID: TF_OsC272662_1.pep

SEQ ID NO: 24793 - protein, 290 aa, Oryza sativa; identical to SEQ ID NO: 17501
  Clone ID: TF_OsC272918_1.pep

SEQ ID NO: 24794 - protein, 240 aa, Oryza sativa; identical to SEQ ID NO: 17500
  Clone ID: TF_OsC24651_1.pep

SEQ ID NO: 24795 - protein, 118 aa, Oryza sativa
  Clone ID: TF_LIB4506-013-R1-K1-B12.pep
SLHRNVLDDEHDYNFLVLVFFSGDLGLGKSLDGAWYVFSPRSRYKERGVRPARGIKTTAVGYWKSNSAEADVVDDDGEVIGRVNSLTLALGHQPRGKATHWRMKEYRIPQFQIPPDAW

SEQ ID NO: 24796 - protein, 143 aa, Oryza sativa
  unsure (1)..(143): unsure at all Xaa locations
  Clone ID: TF_OsC58633_1.pep
MGMENPPLRWPPGFRFSPTDEELVLYFLKRRIATGRPTPYIADVDVYKSHPSHLPERSALRTGDKQWFFFSRMDRKYPNGSRASRTTGEGYWKATGKDRSICNGXGGGTASGRAVGSKKTLVYHHGRAPRGERSDCVMHEYTL

SEQ ID NO: 24797 - protein, 432 aa, Oryza sativa
  Clone ID: TF_OsC83405_3.pep
MEEEKRLERIIKEIDSPISPGGGAALLAEDDDLVFPGFRFHPTDQELVGFYLTRKVEKKPFSIDIIKEIDIYKHDPWDLPKVSHGAVALQGSSSSSSLSTAAAAEKECGYFFCLRGRKYRNSIRPNRVTGSGFWKATGIDKPIYSSSLAAAAAAAGAGDCIGLKKSLVYYRGSAGKGTKTDWMMHEFRLPSSISDSDHLQDASETWTICRIFKRSMTYTKGRAAAAAASMNKRISHELQHIHHHQQQQFYYHEVVHDGHGHHHRRHLQHYAGSASMAAAAANIVDVIDHSSDAETTTRSHSHSQSHLVADIRHRQSPFMLDFHAGTASSSSSTAAGWSEVMSFSRDGGSSSGSSWDELGRIMDISTNSANNNYYFAPPPSPAGAARLLLERASPLPPPPAGAARLLLARTRRSRLTLPAAACFPARAAPRRR

SEQ ID NO: 24798 - protein, 860 aa, Oryza sativa
  unsure (1)..(860): unsure at all Xaa locations
  Clone ID: TF_OsC18626_3.pep
MNPRDPVEEFLNQTIADPDEHSSTTSKAQYDSDTGIIPTEFENHGVMQGEFMDDLSGLENLDFWPDDRNPQLSALYEDTPLLPYDSTDQDVLSMDSGAESLQDLFNSMTVMELKKLPLGFRFHPTDEELVRHYLKGKITGQIRSEADVIPEIDVCKCEPWDLPDKSLIRSDDPEWFFFAPKDRKYPNGSRSNRATEAGYWKATGKDRVIRSKGDKKKQQVIGMKKTLVFHRGRAPKGERTGWIMHEYRTTEPEFESGEQGGYVLYRLFRKQEEKIERPSPDEVDRSGYSPTPSRSTPDNMEPIEDGNTPLNRESPESALHESPIDLPALTEAQAAPITRWLADRTDNATTIEVNVSTIQTRGIMCGAKASPSAGAFPQLIGSQQNIHDNNELXTASRRLMLQLSESLSPDFDASMTRDECEDEEPGIVXLRRTIADPDEHSSTTSKAQYDSDTGIIPTEFENHGVMQGEFMDDLSGLENLDFWPDDRNPQLSALYEDTPLLPYDSTDQDVLSMDSGAESLQDLFNSMDDSNARNNVWGNEPFLQGTGFPMSWPLQPNSAFPNQGTANRRLMLQLSESLSPDFDVSMTRDECEDEEPGIVVTSKYVNEAPEESTAEKDMPSDGDDAEPTGITILRRRHAPTASSFSDGDDAESTGITILRQHQAPNASLLSDGDDAESTGITILRRRQAPTASSASSFTQQGAAVQRVRLQSNLDAAPCSSVDGSSSCIINEGESERTMEKPEIEENAGSTLAEGGTCHEDDQKEHDASAANAKSVLRLRKTAEGSDKENKQEEEEGVLASHMLVATYPSCSAVDTLKERVERKLKKASCKREDGHLLPSGLWAKADFDLLENDFKGWFGL

SEQ ID NO: 24799 - protein, 147 aa, Oryza sativa
  Clone ID: TF_15856347.pep
MHAYVSLDPLERRPPKGTKTSWIMHEYRLAADPLAAAANTYKPSSSSRFRNVSMRLDDWVLCRIYKKSGQASPMMPPSPRYDHDEPSGVLETPTVLRAAMIRTSSSPSPQDPLHLRDSSTSTRSPRIFDGPRDPRATTSACPRVQPS

SEQ ID NO: 24800 - protein, 207 aa, Oryza sativa
  Clone ID: TF_OsC53655_2.pep
MRGSDHHQDVVAAPRGGGGGGDDGQAHDMVMPGFRFHPTEEELIEFYLRRKVEGKRFNIELIAFVDLYRYDPWDLPALASIGDKEWFFYVPRDRKYRNGDRPNRVTPSGYWKATGADRMVKVEGDRPIGLKKTLVFYVGKAPKGLRSSWIMNEYRLPHGDADRYQKVEISLCRVYKRPGIEDNCSAIESRSTRHLAICRLITSSALL

SEQ ID NO: 24801 - protein, 494 aa, Oryza sativa; identical to SEQ ID NO: 17469
  Clone ID: TF_OsC422472_1.pep

SEQ ID NO: 24802 - protein, 225 aa, Oryza sativa
  unsure (1)..(225): unsure at all Xaa locations
  Clone ID: TF_jC-osflLIB3477P002f12a1.pep
VFTKKLLDVYRLXXPAEHELVNYYLKHKLLGDDPRVHVIPVIDLCDEEPWNVPVILASSSAIRFGDPDWFFFSPGDFKYLKSKRFNRTTKCGFWKATGKDRDIRTGDTDNTVIGTKKTLVYYQGRVSXGVKSNWVIHEYHAVTFHENQRTFVXCCLMKKPXKTTEGGTDPLICDEGEPSRSMISDYENQPTAEGIASEGTFTGIEAIFQATPWAENCFSPKQQSL

SEQ ID NO: 24803 - protein, 322 aa, Oryza sativa; identical to SEQ ID NO: 17471
  Clone ID: TF_OsC1781_14.pep

SEQ ID NO: 24804 - protein, 372 aa, Oryza sativa
  Clone ID: TF_OsC1783_2.pep
MSISVNMESCVPPGFRFHPTDEELVGYYLRKKVASQKIDLDVIRDIDLYRIEPWDLQEHCGIGYDEQSEWYFFSYKDRKYPTGTRTNRATMAGFWKATGRDKAVHDKSRLIGMRKTLVFYKGRAPNGQKTDWIMHEYRLETDENAPPQEEGWVVCRAFKKRTAYPARSMVETWDYSLHERNIMSAAAAAAFADPSAAYAQMRRQHRSGRFKQEAELDGAATALLHYSSHLAELPQLESPSAAAAPLQPNPSQLATAGEDDDCKGDNGGRRAKKARAAGDKVATTTDWRALDKFVASQLSPGECGSMEATAEAAAAAVAGVSSPLDHGDDDMAALLFLNSDERDEVDRWTGLLGSGAGASGVDGDLGICVFDK

SEQ ID NO: 24805 - protein, 382 aa, Oryza sativa; identical to SEQ ID NO: 17520
  Clone ID: TF_OsC1517_1611.pep

SEQ ID NO: 24806 - protein, 303 aa, Oryza sativa; identical to SEQ ID NO: 17518
  Clone ID: TF_OsC1781_2.pep

SEQ ID NO: 24807 - protein, 94 aa, Oryza sativa
  Clone ID: TF_uC-osrocyp010a11b1.pep
MHFCLLTNKPNPDPRLRPPARSSPAPKLSFMAAEAAYGGGGGYRMLPQAEMPIGFRFRPTDEELLLYYLRHMAMLGALAAVVRLVVQLFHQHSW

SEQ ID NO: 24808 - protein, 485 aa, Oryza sativa
  unsure (1)..(485): unsure at all Xaa locations
  Clone ID: TF_OsC359887_1.pep
MAAPEDGEDKNFGKNKHGLPIGFYFAPTDQELLAILEAKRLGRPLSRAHDAFFHDIRILDFHPAELYEKYAKDEEKGYFYFFSKREFPTSSKKRPLRVAEGGAWNSSGAVYKVVKSSKSGGGYDVGHKKTLVFHQRFPGDKEAVKTNWAIQEFTRIIGPQNEVPDLAVYRLYKMRKEGRETPADLAADEAAAAAAMNNRGQQASAAAMALPPPATGLPGGRMMSMADKANMASTSKAYGPSNVGXAKALPLPAPGLPGVRRMSMADKANMASTSKAYATSQSSSSQLQQGAAAVAAPPNAAGPSNWAPRPCNCRECAPAAGQYGYFASMVPRPSLDRKGKGKAPMDCAEQAGGGGGCHAESTSTPAPPKGAEYYGCSVAVEDDDEELLKFLQAMVRGEEVEGDGDHAMADERGPQQGSSPVAAAAASGSAPAGHDGRRGSLQGGHHGSSSPTSLAAAAATGDDVTSAASAGDDVSGSQQEDHPAR

SEQ ID NO: 24809 - protein, 343 aa, Oryza sativa; identical to SEQ ID NO: 17528
  Clone ID: TF_OsC83405_2.pep

SEQ ID NO: 24810 - protein, 656 aa, Oryza sativa; identical to SEQ ID NO: 17530
  Clone ID: TF_OsC50016_1.pep

SEQ ID NO: 24811 - protein, 886 aa, Oryza sativa; identical to SEQ ID NO: 17532
  Clone ID: TF_OsC359_8224.pep

SEQ ID NO: 24812 - protein, 213 aa, Oryza sativa
  Clone ID: TF_OsC18236_1.pep
MATTRSGVGGAISDPFATPGFRFYPTEEELLGFYLRHRLAGTRPDVERVIPVVDVYGYHPSQLAALAGEASARDTEQWFFFCPRAERELHGGRPARTTPSGYWKATGSPSCVISSATNRVIGVKRTMVFYQGRAPTGTKTRWKMNEYKAVADDADAAAAAMLHQLRNELGVCRVYISTGTLRSFDRRPLDNQRWDTNKAKNQIISSGRLTPAS

SEQ ID NO: 24813 - protein, 488 aa, Oryza sativa
  Clone ID: TF_OsC153799_1.pep
MAVEGFEEAIKCLENLKLESGEASLEQRLPAAACGDHHTAAGAGLPPGFRFHPTDEELLLHYLGSRAAAAPCPAPIIAEVDIYKYNPWELPAMAVFGECEWYFFSPRDRKYPNGVRPNRAAGSGYWKATGTDKPILGNAADETVGVKKALVFYRGRPPKGTKTSWIMHEYRLANAAASSSSSYTSNMKQLASSSSSSSSSASMRLDEWVLCRIYKKKEANQQLQHYIDMMMDDDNDDEHNLQVQQQQQQQAQSHRMPRPPSISDYLLDYSDDLPPSTDQTPSLHLGFTAVNEGNNKRHKTMEEYYSISISTADMLHASSSTSNNKSTQINFSSIFEPQTPAAAGHQLIDEGRWPGGAWRSGPQVQTSDGRKSSGWALSVEAVELWIWGFGAAVVARFGENNGGGHWAPARSEMGSWRDKELGDFVIEMLLSMIKVLVTELLSSWLVTSIVQATWLPYVESTLDVTWQMTAVDVEHGGSDMECARVLAL

SEQ ID NO: 24814 - protein, 451 aa, Oryza sativa
  unsure (1)..(451): unsure at all Xaa locations
  Clone ID: TF_OsC2635_2.pep
MAQTCLPPGFRFHPTDVELVSYYLKRKIMGKKPLIQAISDVELYKFAPWDLPAQSCLQSRDLEWFFFCPRDKKYPNGSRTNRSTPNGYWKTSGKDRTIELNSRIVGSKKTLIFHEGKAPKGNRTDWVMYEYKMEDNQLVSAGFSKDDFVLSQXFSKKSGLGPGIGEQYGAXPFNEEEWEHADAEMFPLLPNVETSVFPLLPSSEVVNSTDDTRVQPSVAARAIEELPVQHLPHVCAGNGSTYQNITVTGESALMELPSQHSVESIGDEVVSVDNCSNVVNNADSPVIEGLVLEELSRFLTDSPHHGNPVGEHSGLPPMSEAEAHAFEVSTNDLYNEIAGLAELGVPNGDGFSPSNAGVTEQQPTYFGVPNSENYVNMDDIFAPDTRLSYAYPLPNNQFWHYPMDQFTYSTTLSAAFPSGDSRPTMRIVDDLPAAANNGGFASKPSMQFPLS

SEQ ID NO: 24815 - protein, 218 aa, Oryza sativa
  Clone ID: TF_OsC168819_1.pep
MAPVGLPPGFRFHPTDEELVNYFPPRKVHGLSIDLDIIPEVDLYKCEPWELEEKSFLPSKDSEWYFFGPRDRKYPNGCRTNRATRAGYWKSTGKDRRINYQNRSIGMKKTLVYYKGRAPQGIRTSWVMHEYRIEESECENAMGIQLQDSYALCRIFKKNVVLGEFDKKGECSSSQAKGNEEVTDFGDAGQSSGANENDKDNSWMQFIAEDLWCTNKLK

SEQ ID NO: 24816 - protein, 571 aa, Oryza sativa; identical to SEQ ID NO: 17512
  Clone ID: TF_OsC371956_1.pep

SEQ ID NO: 24817 - protein, 425 aa, Oryza sativa; identical to SEQ ID NO: 17515
  Clone ID: TF_OsC29141_2.pep

SEQ ID NO: 24818 - protein, 267 aa, Oryza sativa; identical to SEQ ID NO: 17536
  Clone ID: TF_OsC397849_1.pep

SEQ ID NO: 24819 - protein, 316 aa, Oryza sativa; identical to SEQ ID NO: 17537
  Clone ID: TF_OsC43596_1.pep

SEQ ID NO: 24820 - protein, 518 aa, Oryza sativa
  Clone ID: TF_OsC394395_1.pep
MAAAKMAGLTPGFKFEPSDEQLVQFFLLPYLRELPVPLGGLVIRDDPRSVPPWKLFARNGRGDEEDAYFLAPADGEGRQARTCDGGRGRWITQRLERTGNLRLAGGGGSGEAVVFEKHRLNYHAGEGRCGSTGWVMHEYAVVKPAALGARHRACHIAFTGHGQKRKRVPDGYVDVEDDGSKASTNAAAAVPPSSTAAMSACPSNVTYNQGCHISPEQSIEQHFPAEHNNIQIQQQAYYQSQDHEQCQYSDEEKYLLQQIKQEQYYYNQQNCFLPGQGNQELYYNDEQQQIFSLPEHQCSQEQYCHHDDQQDCVLPEQHSQELHGYNNEDQGSLLPPEPIDQEEQALFVGGEPQHEQQPLTSTPRQALLDYDDGKLLPPVGVNGAIAIPPQDAAVASNDDDGGQATEAPAAKMTAEEKKWFMEELLTEGCWSGPLLFDQPYYAAAPTGRYRATLRVALAASATPAPRQAAAARAAAAAPAPLRYCLFATTAVSARKEWIRARKEERIRARREIRRKTLR

SEQ ID NO: 24821 - protein, 145 aa, Oryza sativa
  Clone ID: TF_jC-osleLIB3474012e11b1.pep
MDGLISDDSMMMGGEVRAIESRLPPGFRFHPSDEELVGYYLRNKQQQQQQQTAATSMLVEVDLHACEPWDLPEVAKVGSDEWYFFSWRERKYATGWRMNRASKQGYWKATGKDKPILHPTVAGARKTLVFYSGRAPNGRKTAWVM

SEQ ID NO: 24822 - protein, 249 aa, Oryza sativa; identical to SEQ ID NO: 17543
  Clone ID: TF_OsC393139_1.pep

SEQ ID NO: 24823 - protein, 489 aa, Oryza sativa
  Clone ID: TF_OsC257626_1.pep
MDAVQPSNASINRVHLVYVLVRRLALVGSLVGRGGLRLPAGGAGAAMTGCIVLFMRPGVRTASYIRGTVCSCLRTSWIIDSHRIASKIKNASGSVDASKHKWVSNPTKACPRCNHIIDNSDVVHQWPGLPRGVKFDPTDQELLWHLLAKHGKVGAKAHPFIDEFIPTVEEDDGICYTHPQKLPGVKQDGSVSHFFHRTFKAYNTGIRKRRKINTGDLADVRWHKTGKTRPVVVDGKHLGCKKFMVLYMSTMKGGKPEKTNWVMHQYHLGTGEDEVEGQYVVSKLLFQQQFKPGEKNAQDLTSADALESIVAEDLPNIPPLPLEEHVFTNQELEVLEKSETITDQGKETSEINNEDNAVEDVAHMATEKPEDGDNPSSQDPKWWEGESQFLLDSQQLAENLAICDEFLQSQSQTSCGGGDDETDKIKPRLAVYAQLPVEDLKKDLEECQRLDPSDGTNLELENASEFRLSQIEFSQDSFTTAWAGGKVID

SEQ ID NO: 24824 - protein, 196 aa, Oryza sativa
  Clone ID: TF_OsC18626_1.pep
HAPTASSFSDGDDAESTGITILRQHQAPNASLLSDGDDAESTGITILRRRQAPTASSASSFTQQGAAVQRVRLQSNLDAAPCSSVDGSSSCIINEGESERTMEKPEIEENAGSTLAEGGTCHEDDQKEHDASAANAKSVLRLRKTAEGSDKENKQEEEEGVLASHMLVATYPSCSAVVSQVRDMVTFVYVMFCSII

SEQ ID NO: 24825 - protein, 391 aa, Oryza sativa
  Clone ID: TF_OsC29141_3.pep
MPSSGGAMPALPPGFRFHPTDEELIVHYLMNQAASVKCPVPIIAEVNIYKCNPWDLPGKALFGENEWYFFSPRDRKYPNGARPNRAAGSGYWKATGTDKSILSTPTSDNIGVKKALVFYKGKPPKGVKTDWIMHEYRLTGTSANSTTTTKQRRASSMTMRLDDWVLCRIHKKSNDFNSSDQHDQEPEESTVEQLEDIHDNNSSEQPPAPADMNNQQSDFQPMTAMSMSKSCSLTDLLNTIDCAALSQFLLDGSSDAIAEPPAPPSPLIYTTPHPNYQTLNYNINSNSSMPHAFESRLDHHDGYVNNYNVNGLRRKRMMACSATSFDDGSSSNDFVHAVVKKPQLLPSDSRGSGFGGGYCNQQLSETATGFQFQNGNLLSHPFPLNNHLQMQ

SEQ ID NO: 24826 - protein, 776 aa, Oryza sativa; identical to SEQ ID NO: 17553
  Clone ID: TF_OsC33185_7.pep

SEQ ID NO: 24827 - protein, 1601 aa, Oryza sativa
  Clone ID: TF_OsC12565_1.pep
MRRRRWRRRLAPVFRFYPTEEELICLYLRNKLDGFRDDIERVIPVFDIYSVDPLQLSGTSTRVYLLLPAARRGSGWFYFCPRQEREVRGGRPSQTTPSGYWKAAGTTGVVYSAEPWPRAVGNKDRVEDDEREREGGRWKMRSYRWVFPIAKRQITVLAEKCLPRDTDEDLGGGHVDDMTKLTYLNEPGVLYNLKRRYALNEIYTYTGSILIAVNPFTRLPHLYNEYMMEQYKGVRLGELSPHVFAVADASYRAMVNDSRSQSILVSGESGAGKTETTKFIMQYLTYVGGRAAIDDRTVEQQVLESNPLLEAFGNAKTVRNDNSSRFGKFVEMQFDANGRISGAAIRTYLLERSRVVQINDPERNFHCFYQLCASGKDAELYKLGHPGSFHYLNKSKTYELEGTNNEDEYWKTKRAMDIVGISRNDQDAIFRILAAILHLGNIEFSPGKEIDSSKIKDPTSNFHLQMAAKLFMCDPDLLVSTLCTRAINTLEGAIIKALDCSAAAANRDALAKTVYARLFDWLVENINKSIGQDVDSKVQIGILDIYGFESFKNNSFEQFCINFANEKLQQHFNEKPIGIIALLDEACMFPKSTHETFATKMFRNFSSHHRLEKTKFSETDFTISHYAGKVTYQTESFLEKNRDYIVAEHCNLLSSSRCPLVSGLFGTLPEESLRSSYKFSSVASRFKQQLQALMETLNSTEPHYVRCVKPNSVNQPQIFENQSVLHQLRCGGVLEAVRISLAGYPTRRTYAEFVDRFGVLVPELMLGSYDERALTKGILEKMKLDNFQLGSTKVFLRAGQIAILDMRRAEVLENAARHIQGRFRTFITRKEFVKTREASISIQAYCRGCLARKKYMVKRETAAAIIVQKYVRRWRLHRTYQQAHSAALLIQSCIRGFIARRYFSVIREQKAALVIQSLWRKRKVIILFQQYRQATVKIQCAWRQKLARRELRRLKMAANEAGALREAKNKLEKKLDDLTLRLTLERRLRAAGEEAKSVEILKRDKMIESLSAECAAAKSDAQSEHDKNRLLQRQLDDSLREITMLRGSKIMTAEAEKENSNLKNLVESLSKRNSSLEYELTSARKGSDATMKKLKDVEGKCNHLQQNLDKLQEKLTNMENENHVLRQKALNMSPLNNMPMTTKAFPQKFATPIGLPNGEQKHGYETPPPAKYLASLPQSLTRSRRTRMPVERQEENHEILLRCIKENLGFKDGKPVTACIIYSCLLHWRAFESERTAIFDHVIEAINNVLKGEEADGRLPYWLSNTSSLLCLLQKNLRSNGLFATPSRRSGGPLGIGDKIVQTLRSPSKLMGRSDTLGQVDARYPAILFKQQLTACVEKIFGQLRDNLKKEISPLLSVCIQAPKSSRAQPGKATKSPGIGAQPPSNSHWDNIVKFLDLLMDTLHENYVPSFFIRKLITQLFSFINIQLFNSLLLRRECCTFSNGEYVKAGLSLLEKWITDATDEFAGTSRHELNYIRQAVGFLVIHQKRKKTLEEIRQDLCPNLSVRQIYRICSMYWDDKYNTQGISNEVVSAMREEVNKYTQNLVSNSFLLDDDLSIPFSTEDLSMAIPAIDYADVEFPESLHHYPSVQLLVKHHDPQPV

SEQ ID NO: 24828 - protein, 170 aa, Oryza sativa
  unsure (1)..(170): unsure at all Xaa locations
  Clone ID: TF_OsC135094_1.pep
MSEVSVMAEVEETAAAAPLDLPPGFRFHPTDEEIVSHYLTPKALNHRFSSGVIGDVDLNKCEPWHLPAMAKMGEKEWYFFCHKDRKYPTGTRTNRATESGYWKXATGKDKEIFRGRGILVGMKKTLVFYLGRAPRGEKTGWVMYEFRLEGKLPSQAXRAPAKDQWAVCKV

SEQ ID NO: 24829 - protein, 332 aa, Oryza sativa
  Clone ID: TF_OsC60046_1.pep
MSLISMMEANLPPGFRFHPRDEELVVDYLYHKLSGGGEFYGGVAMVDVDLNKCEPWELPAYFLHNLIIFPARARARAAGRRRREDAARVGATEWYFFSLHDRKYATGQRTNRATRSGYWKATGKDRAIVTRRRAAAGEAVAGGEVVGMRKTLVFYQGRAPRGSKTEWVMHEFRVDGHAVADHPSSSTSSSSSNLLKEDWVLCRVFYKSRTATPRAVVSGEAAVSLSGELSLPPPLPPPVAPAVVDGYTGGGYYEQDSSAGYHHHHHHRPPPSAALPFKDLTDFRDLLSNMAQGGGGGAAAAKTEGFHLGWSEEESSGYVQQSAMASQAWNPF

SEQ ID NO: 24830 - protein, 73 aa, Oryza sativa
  unsure (1)..(73): unsure at all Xaa locations
  Clone ID: TF_2311034.pep
MSGGGEGAAAERQELQLPPGFRFHXTDEELVMHYLSRRCXXLPIXVPIIAEVDLYKFDPWHXPRXAXLYGEKE

SEQ ID NO: 24831 - protein, 366 aa, Oryza sativa
  Clone ID: TF_OsC334673_1.pep
MAEEDDKKQKGPDVTVPSGYFFVPKPEQLIRDYLNHWITGRPIEELRDIVREADVYGSDPATLTEAHRAYGHDGKSWYFLTVAKWKGGRGGAGTAGRLNRGGFEGGGTWHNSQRRRVIEGYGDRQAFEYRAPGNKKTDWLMEEIASNLPAAITDEGIMVICKVYLSPRAKEATADEEERQETNVVPGPKRLREAEATGYDAPAPETPQPDVGCSYSGGGETSQATASMDYCCSTTTHTADDTANAAAYYHGDADAIKPDAYDGGDYGIGFNADGELVLCGNGHGGIGTQGQTPLAMQNTNGEMTLFSPMNGYGVGFNEEVRQEPQVGGEVEMDDFFNDLFVDFDGAGDPNPNPNGGGDSHGHILCE

SEQ ID NO: 24832 - protein, 514 aa, Oryza sativa
  Clone ID: TF_OsC158769_1.pep
PAHGVRDAGGVRDQRVGRLVRPLRRAPRPAGSHRVHGARPPVRGPAGGGDRRRRRQGPWRPRPRVPVDERRRGGVCLSHAAWSLYHRFYARLAVELDVAGIVSVVLPLAPEHRLPAAIDAGHAALLWLRDVACGTSDTIAHHAVERLRDAADFSRVFLIGDSAGGVLVHNVAARAGEAGAEALDPIRLAGGVLLHPGFILPEKSPSELENPPTPFMTQETVDKFVMLALPVGTTSRDHPYTSPAAAVTAAEGAQLPPMLVMVAEEDMLRDAQVEYGEAMARAGKAVETVLNKFPAQCIRVFVSPIRLRNFDLMEKHVEKMLSLGFRFNPSAEDLITFYLPRLIAGKPMKDTEKFICRADVYGSEPSDLAGKFAPVPRCEKGGRFFFTSCKRHKGSSTKKERTAGAGTWVRQNSKEVKNKAGVKVGETQNFRFKKDGSYTDWLMEEHHCCRQQAVAGDEEPVICRMYVSPRAPPDSAARQESAAFVQQQPAPQVSEPPCDKKKRDDVAEEAPAAA

SEQ ID NO: 24833 - protein, 223 aa, Oryza sativa
  Clone ID: TF_OsC16309_1.pep
MANTGLSIPMVNGATIHLLPGFRFRPTDDELVIKYLYPRAFHVPLPCAIITDVDIHHHNPWDIVPVAEREKGKHFFTRKEVKYPGSRRSNRVAGNGFWRAAGSEVPIYYKPEGAANDMLVGMRRTLVFHYGKSRSAERTEWAMHEFQLAGAGLLPHPMMRHATSNGSEPPCGCLEATIAKKSDGLSATLRAKRDSAPLMRIMVEPDSSWVICCIYKKRQRAPP

SEQ ID NO: 24834 - protein, 331 aa, Oryza sativa; identical to SEQ ID NO: 17559
  Clone ID: TF_OsC46776_1.pep

SEQ ID NO: 24835 - protein, 276 aa, Oryza sativa
  Clone ID: TF_OsC1783_3.pep
MHPSGGALSVPPGFRFHPTDEELLYYYLRKKVAYEAIDLDVIREIDLNKLEPWDLKDRCRIGTGPQNEWYFFSHKDKKYPTGTRTNRATTAGFWKATGRDKAIFLANACRIGMRKTLVFYVGRAPHGKKTDWIMHEYRLDQDNVDVQVGGWVVCRVFMKKSYQRGLNPADMAAVDDDDLLHHHHHPFPPAQLHGGAADHKHDGAGGHHHHHLMQPHHHYDDFPSFDPSMQLPQLMSADQPPPPPPSLLPGGTASSLQRLPLQYLGCEAADLLRFSK

SEQ ID NO: 24836 - protein, 375 aa, Oryza sativa
  Clone ID: TF_OsC1783_4.pep
HPSGGALSVPPGFRFHPTDEELLYYYLRKKVAYEAIDLDVIREIDLNKLEPWDLKDRCRIGTGPQNEWYFFSHKDKKYPTGTRTNRATTAGFWKATGRDKAIFLANACRIGMRKTLVFYVGRAPHGKKTDWIMHEYRLDQDNVDVQEDGWVVCRVFMKKSYQRGLNPADMAAVDDDDLLHHHHHPFPPAQLHGGAADHKHDGAGGHHHHHLMQPHHHYDDFPSFDPSMQLPQLMSADQPPPPPPSLLPGVPPSAAAALSSLDVECPQNLMKLTSAAAGGGATGLLHAGGDHRFATAATDWSILDKLLASHQNLDQLFQGRVIAGASSPAAMAAPSHHQHLMDQLAGGGGGTASSLQRLPLQYLGCEAADLLRFSK

SEQ ID NO: 24837 - protein, 66 aa, Oryza sativa
  Clone ID: TF_OsC346533_1.pep
MFRFSQYLTEDRDPSPHHMRTNRATASGYWKATDKDKEIFRSRSVQLLSSGHVLPFSLHPWPRCVI

SEQ ID NO: 24838 - protein, 247 aa, Oryza sativa; identical to SEQ ID NO: 17563
  Clone ID: TF_OsC41958_1.pep

SEQ ID NO: 24839 - protein, 362 aa, Oryza sativa; identical to SEQ ID NO: 17562
  Clone ID: TF_OsC83405_1.pep

SEQ ID NO: 24840 - protein, 160 aa, Oryza sativa
  unsure (1)..(160): unsure at all Xaa locations
  Clone ID: TF_LIB4833-025-R1-N1-F6.pep
MAMTPQLAFSRMPPGFRFQPTDEQLVVDYLQRRTAAQPCVTPDITDIDVYNVDPWQLPAMAMYGSDHDRYFFTMAAREAQARRTTPSGFWKPTGQRKISSXRRGHECPPRQKEFVFYLGHHQPSGSNNNNKTSWIMHEYRLMNSPKSGSAVVFFGESSSH

SEQ ID NO: 24841 - protein, 366 aa, Oryza sativa; identical to SEQ ID NO: 17564
  Clone ID: TF_OsC351524_1.pep

SEQ ID NO: 24842 - protein, 352 aa, Oryza sativa; identical to SEQ ID NO: 17570
  Clone ID: TF_OsC146425_1.pep

SEQ ID NO: 24843 - protein, 421 aa, Oryza sativa; identical to SEQ ID NO: 17556
  Clone ID: TF_OsC359883_1.pep

SEQ ID NO: 24844 - protein, 260 aa, Oryza sativa; identical to SEQ ID NO: 17557
  Clone ID: TF_OsC283445_1.pep

SEQ ID NO: 24845 - protein, 382 aa, Oryza sativa
  unsure (1)..(382): unsure at all Xaa locations
  Clone ID: TF_OsC16321_1.pep
MRLARQQQQVVVAATMEHDVHHHRQMMQQQQQQEMDLPPGFRFHPTDEELITHYLLRKAADPAGFAARAVGEADLNKCEPWDLPSRATMGEKEWYFFCVKDRKYPTGLRTNRATESGYWKATGKDREIFRGKALVGMKKTLVFYTGRAXPRGGKTGWVMHEYRIHGKHAAANSKQDQEWVLCRVFKKSLELAPAAAAAVGRRGAGAGTDVGPSSMPMADDVVGLAPCALPPLMDVSGGGGGAGTTSLSATAGAAAAPPPAHVTCFSNALEGQFLDTPYLLPAADPADHLAMSSASPFLEALQMQYVQDAAAAGGAGMVHELLMGGGWYCNKGERERLSGASQDTGLTSSEVNPGEISSSSRXNAWIITTRPSGPIEIFIHHH

SEQ ID NO: 24846 - protein, 325 aa, Oryza sativa
  unsure (1)..(325): unsure at all Xaa locations
  Clone ID: TF_OsC10665_1.pep
MGEQQQQVERQPDLPPGFRFHPTDEEIITFYLAPKVVDSRGFCVAAIGEVDLNKCEPWDLPGKAKMNGEKEWYFYCQKDRKYPTGMRTNRATEAGYWKATGKDKEIFRNHHMLIGMKKTLVFYKGRAPKGDKTNWVMHEYRLADASPPQPPPPPSSAEPPRQDDWAVCRIFHKSSGIKKPVQVPMQMPMQMQMPVAHQVPAANYQQQMAMASASIIQVPMQMQMPSMSDQLQMLDDFSTGSLMAPPPPPPSYSTLPGFPLQINGGAXQQFVGNPSMYYQQQQQQQQQQMDMAAXGGFVVXEPSSLVVSPHRCCPIHIYIGMRELN

SEQ ID NO: 24847 - protein, 129 aa, Oryza sativa
  unsure (1)..(129): unsure at all Xaa locations
  Clone ID: TF_LIB4833-006-R1-N1-G8.pep
MAMYGSDHDRHFFTMAVREAQATRTRPWVCCEPTSPETTMFLDAAGAMVPVRVHTVLISTQHDETVTNDEIAADLKEHVIKPVIPDKYLDEKTIFHLNPSGRFVIGGPHGDAGLTXRKIIIDTYGGWGA

SEQ ID NO: 24848 - protein, 441 aa, Oryza sativa
  Clone ID: TF_OsC1783_1.pep
MHPSGGALSVPPGFRFHPTDEELLYYYLRKKVAYEAIDLDVIREIDLNKLEPWDLKDRCRIGTGPQNEWYFFSHKDKMDGSSMSSSSTQQQAQVPPGFRFHPTDEELVDYYLRKKVAARRIDLNVIKDVDLYKIEPWDLQERCRINGGSAAEEQNEWYFFSHKDKKYPTGTRTNRATAAGFWKATGRDKPIYATKQHSLLVGMRKTLVYYRGRAPNGHKSDWIMHEYRLETTETAPPQEEGWVVCRVFKKRLPTTRRDSDHDAPCGSWYVDEDAPGAFMSPMMITRSSILRPHQHHAGITLQEQHLHTTYKHRDLTTKIQQLQVPAAGHHLLNTMPHDLESSTSSFHSLLVSPDHHQINMHHAQADPFFDDMHAVDQATTTDWRVLDKFVASQLSNDATNKPADHYTDEGDILQVSDKQQEVAAADYASTSTSSSQIDPWK

SEQ ID NO: 24849 - protein, 288 aa, Oryza sativa; identical to SEQ ID NO: 17580
  Clone ID: TF_OsC408353_1.pep

SEQ ID NO: 24850 - protein, 59 aa, Oryza sativa
  Clone ID: TF_LIB3432-002-P1-K1-B11.pep
MAVEVAVAWPSIEVGQDLPGFRFHPTEEELLDFYLFRGVLGKKVHFYIIGTLNILRHYS

SEQ ID NO: 24851 - protein, 329 aa, Oryza sativa
  Clone ID: TF_OsC315862_1.pep
MGTMTLPPGFRFHPTDDELVGYYLKRKVDSLKIELEVIPVIDLYKFEPWELPEKSFLPKRDLEWFFFCPRDRKYPNGSRTNRATSTGYWKATGKDRKIACAGEVFGLRKTLVFYKGRAPGGERTDWVMHEYRLCQDLAHGVSNFIGAYALCRVIKRHEAGLHGEPPAAKAKGMISKVSSSSSLVTVEHQLSSRGNASPSFTPTNNGSPLVDEMFVGGGGGDPFQLLPSCVPYHGGDACGFDLPPLCMPQTQDPFFSDAGFTQAAPPLYGDVMGSVSEHELKWDTLGGYSGGGGGELWNAAAAPLLCRQASDGDDLTAWFTAADDNMSVF

SEQ ID NO: 24852 - protein, 161 aa, Oryza sativa
  Clone ID: TF_OsC46432_1.pep
MERAAAAAPVVVRHGGVVLPPGFRFHPTDEELVVQYLRRKAFGLPLPAAVIPDLHNLFKLDPWDIPGASSDGDKYFFAVRPPAARGRRQHVTASGGCWKPAGGRDKPVVVARLSGSSLVALANGRDERSKQMHGSCKVKKRRRSSSCSFSSVSIFNCIELA

SEQ ID NO: 24853 - protein, 178 aa, Oryza sativa
  unsure (1)..(178): unsure at all Xaa locations
  Clone ID: TF_LIB4371-016-R1-K1-B5.pep
MTVMELKKLPLGFRFHPTDEELVRHYLKGKITGQIRSEADVIPEIDVCKCEPWDLPDKSLIRSDDPEWFFFAPKDRKYPNGSRSNRATEAGYWKATGKXDRVIRSKGDKKKQQVIGMKKTLVFHRXGRAPKGERTGWIMHEYRXTTEPEFESGDRGGXYVLYPAVPKAEEKNERPSPG

SEQ ID NO: 24854 - protein, 307 aa, Oryza sativa; identical to SEQ ID NO: 17481
  Clone ID: TF_OsC189913_1.pep

SEQ ID NO: 24855 - protein, 276 aa, Oryza sativa; identical to SEQ ID NO: 17445
  Clone ID: TF_OsC1779_1.pep

SEQ ID NO: 24856 - protein, 107 aa, Oryza sativa
  Clone ID: TF_LIB4370-037-R1-K1-E1.pep
FCLSFFSFVRWQRSDDEVAEREKGKHFFTRKEVKYPGSRRSNRVAGNGFWRAAGSEVPIYYKPEGAANDMLVGMRRTLVFHYGKSRSAERTEWAMHEFQLLVPGLSS

SEQ ID NO: 24857 - protein, 489 aa, Oryza sativa
  Clone ID: TF_OsC1784_1.pep
MESLRDMVLPPGFGFHPKDTELISHYLKKKIHGQKIEYEIIPEVDIYKHEPWDLPAKCDVPTQDNKWHFFAARDRKYPNGSRSNRATVAGYWKSTGKDRAIKMGKQTIGTKKTLVFHEGRPPTGRRTEWIMHEYYIDERECQACPDMKDAYVLCRITKRNDWIPGNGNELDNSDPHPEPYDAPPSVISTEQLNPAAEPVVGVEAAPVTVAEPDGVTTSAITANIPSPSDDINLDDWLNELFDPFFDPEQSLASADLSPDEQNVESSNVGALAPKVEQDYSSPNENVVDDTEYLLPEDVYNILHPGTDDFNMLQNPLDQYPIQYATDVWSGIQKEELWSPQANAEPSQSNEAADNGIIRRYRSMKTPETSVPQFKGKTQAKMRVGINKMATSSSESINQTIKFENSGRLVEHQKNQAHDVASTKRSDAGKPSTELSSNRGFLRGIRNAFAGCSDARWNMILVAGFAIGVAVVALHIGQRLGLSQRDQQHT

SEQ ID NO: 24858 - protein, 373 aa, Oryza sativa
  Clone ID: TF_OsC152847_1.pep
MERCSVLGLGGGGGGGGRLDGELPPGFRFHPTDEELITYYLLRKVVDGSFNGRAIAEIDLNKCEPWELPEKAKMGEKEWYFYSLRDRKYPTGLRTNRATGAGYWKATGKDREIRSARTGALVGMKKTLVFYRGRAPKGQKTQWVMHEYRLDGTYAYHFLSSSTRDEWVIARIFTKPGVFPVVRKGRLGISGGGGDTSCFSDSTSASVGGGGGTSASSALRAPLAEASLFAAAAAPAVDGADSSNYGGGGGAGSATATANLVTGLELVPCFSTTAHMDASFGTGQYNPAPLAVEPPPPPPAFFPSLRSLQENLQLPLFLSGGMQAGVSSQPLSGGGAFHWQSGMDVKVEGAVGRAPPQMAVGPGQLDGAFAWGF

SEQ ID NO: 24859 - protein, 176 aa, Oryza sativa
  Clone ID: TF_LIB4833-008-R1-N1-D7.pep
MASPGVCINLVNGTSTRLPTNADLVVHYLHRRAIQEPVPCDFITNVDILQHNPWDIVPAEEKTNGKYFFIHEENERLGNHHSNRAAGDGFWRPVGSEVPIYHKRSGGADEALVGMKRTLVFHYGNSSSAKRTEWVMQEFRLAGATLIPCPVTRPATGDGSMLPCHRTGTTIATENN

SEQ ID NO: 24860 - protein, 588 aa, Oryza sativa
  Clone ID: TF_OsC1252_4.pep
MTPRASNLTGVEIYSPVEMKWKERSGTAKTAKMAKRRGGWENDATRMAAGEQERQASQVLGEGARRHPGLDPDLRLRGSEDVVQEDCRRRRRHRRDARSSGLPRLAATAKPTSSPPPRASAGCACGSSSAAAVARRSSSSASTERRLTPPPCSSLASTERRLTPPPCSPRRPPPPPCSSSSASTKRRLTPPPPSSPPVSRRRRPARCPREKKREREKRKGEKRGKKEEADLDRLTWSIQARMSSDGASGSIGMKHDDGDHRPSTGASSRRCPSCGHDPDCNKPFDMVGMPAGVRFDPTDQELIEHLEAKVKDGGSTSHPLIDEFIHTIQGEDGICYTHPENLPGVTRDGLSKHFFHRSAKAYPTGTRKRRKVLADQQPDDHPQASKGRNVAAAETRWHKTGKTREITVRGQPKGCKKILVLYTSFGKKRKAEKTSWVMHQYHLGELDDEKEGELILSKVFYQTQTRSAAAAEAPVSSGAAMEVQGQQQQVLKLQADDGHFSSAPTKKRLHQDVVAQVKVDRGHHCMPAQRQVNFNLKVTPVPTTSSFPVVVDKQLEELQFISPKKQIGLTSAGLLTTKINMDNFLDSQ

SEQ ID NO: 24861 - protein, 90 aa, Oryza sativa
  Clone ID: TF_LIB3477-009-P1-K1-E12.pep
MVTSKEFARDQAAMDQKIKSDVGEVVLAGDEEEDGDVVLPGFRFHPTDEELVTFYLRRKVARKSLSIEIIKEMDIYKHDPWDLPSKCIPN

SEQ ID NO: 24862 - protein, 331 aa, Oryza sativa; identical to SEQ ID NO: 17455
  Clone ID: TF_OsC136542_1.pep

SEQ ID NO: 24863 - protein, 292 aa, Oryza sativa
  Clone ID: TF_OsC84764_1.pep
MEQPGSRSTAAGGEVEVEQLPGFRFHPTEEELLEFYLKQVVQGKKLKFDIIPTVHLYRHDPRELPGLARIGEREWYFFVPRDRKQATGGGGGGRPSRTTERGFWKATGSDRAIRCAADPKRLIGLKKTLVYYEGRAPRGTKTDWVMNEYRLPDAAAIPDTMQLQMQHDDMVLCKVYRKAVSLKELEQRVAMEELARSTTSSGTHNTGSPLQQDSSSISISSSSDAMKKEVVGVDEASAAAHELVRPATLSLPQLEVARPQSGLEWMQEPFLTQLRSPWMETWSPYYASVLNF

SEQ ID NO: 24864 - protein, 118 aa, Oryza sativa
  unsure (1)..(118): unsure at all Xaa locations
  Clone ID: TF_uC-osrocyp010e10b1.pep
MSLISMMEANLPPGFRFHPRDEELVVDYLYHKLSGGGEFYGGVAMVDVDLNKCEPWELPDAARVGATEWYFFSLHDRKYATGQRTNRXTRSGYWKATGKDRAIVTXLRAVGGEVVGMR

SEQ ID NO: 24865 - protein, 260 aa, Oryza sativa
  unsure (1)..(260): unsure at all Xaa locations
  Clone ID: TF_OsC12565_4.pep
MADGGGRRAPGFRFYPMEAEEELICFYLRNKLDGLRDDIERVIPVFDVYSVDPLQLSEIHHEMLGXGGGEEGEPWFYFCPRQEREARGGXRPSRTTPSGSWKAAGTPGVVYSADRRPIGMKKTMVFYRGRAPSGTKTAWKMNEYRAFHYPDASSASASSAGAAAPPNHLPPQLRSEFSLCRLYTRSGGIRQFDRRPLAGGGDENPGPSMAAAAASPEENDGSGSSMQQLELMDQGGAVDPDWDQWDDLATLTALLYWPRD

SEQ ID NO: 24866 - protein, 316 aa, Oryza sativa
  Clone ID: TF_OsC24159_1.pep
MGMGMRRERDAEAELNLPPGFRFHPTDDELVEHYLCRKAAGQRLPVPIIAEVDLYKFDPWDLPERALFGAREWYFFTPRDRKYPNGSRPNRAAGNGYWKATGADKPVAPRGRTLGIKKALVFYAGKAPRGVKTDWIMHEYRLADAGRAAAGAKKGSLRLDDWVLCRLYNKKNEWEKMQQGKEVKEEASDMVTSQSHSHTHSWGETRTPESEIVDNDPFPELDSFPAFQPAPPPATAMMVPKKESMDDATAAAAAAATIPRNNSSLFVDLSYDDIQGMYSGLDMLPPGDDFYSSLFASPRVKGTTPRAGAGMGMVPF

SEQ ID NO: 24867 - protein, 316 aa, Oryza sativa; identical to SEQ ID NO: 17458
  Clone ID: TF_OsC397708_1.pep

SEQ ID NO: 24868 - protein, 537 aa, Oryza sativa
  unsure (1)..(537): unsure at all Xaa locations
  Clone ID: TF_OsC344389_1.pep
MAELPPEGRGGGGNNNGKWKGKEKVVPEHGKNRHGMPVGCYFVPKDXLELFAILRCKLVRGQLPGALNNVFEHIRILEFHPALLHETYIENEEDGYIYFFSRRQFATKAGNKRRPTRVAKGGTWKASGGSKTVRSKKVGGIDVGQKLTMVFYERRFEGDRNPIKTNWGMHEFTKIIDGSKNQLPGSPXDLAVYRLYKIKRKEDEEPSNTAAAASSTDEPSTSSALPPPTPPRPLPDMAGPSSATPLLPLQLPGLAGSSSAMSLPALQLPGMAGSSSAMPLPPLSLPGLAGGMMSMADQANMASTSQASTPSSELLQDWYDEFEITYGAVAPPSPSTISWVAPQSSPTGWWPSPNGGPVQHDGYLGMAADPTSYMLENLLPTAAIPPEPMMPPTSSPAPPPAVDHHHRLSPPHDAAGSNYNHPELADYNGGVQAQHEHQYHPQEPQASLVDAEDGYSAMAGGDDAQLGGAELDTERIAEMVNHIMDGEFEFKFEDNTVLKYNEVFPDNDEVVAAPMMIDGGRDGDGADGGDGDDPFDN

SEQ ID NO: 24869 - protein, 204 aa, Oryza sativa; identical to SEQ ID NO: 17460
  Clone ID: TF_OsC604_13.pep

SEQ ID NO: 24870 - protein, 568 aa, Oryza sativa
  unsure (1)..(568): unsure at all Xaa locations
  Clone ID: TF_OsC345355_1.pep
MAAADGLLPGLKFDPSDHDLVGRYLLRRLQGQPLPLDGVILEADPLSAPPWKLLADHGRGDEAFFFAEAHAKNGKGKRQKRTVEGGGFWQGQPTCVDGERLCVPDDGVGSGGGGGGLQIAWRKYVLSFFANGERGXSSGWVMHEYPVTAPDGLASSQLRLYRVRFSGYGKKRKREPQCPGAHGDDDGELQCAPPPRPMAETALLEERGPLPHPVLGPASVVDQCTDQGSSGVIDDSSLVFRDLPDLIDLPVAEEADASHGAETALLNEHLPLPPPQLFVPPTAVPLDLADDSNGADQNSYGMMGDDQLLLPDLPGTINDDMPDLFVSQAEEASAVPAISYHSSGFMGNEVAALSDFELPESYSSSDAMDGEALALSNYEFPESFEEDLSCIDFATANASSLGFPMDGYPMDELFDDMPDQGSSGAMDDSSVVFRDLPGLINLPAAEEADAIGDAETALLRDLADDSNGTDRNSYGVMGDDQDRLLLPEIPRRIDMPDLFVSQAEEAGLGGGAALDSSSGAMDGEALALSDFEFPESVEEVLSCMDFSTVDMSFLDVPIDELLDDLPAD

SEQ ID NO: 24871 - protein, 329 aa, Oryza sativa; identical to SEQ ID NO: 17463
  Clone ID: TF_OsC1781_9.pep

SEQ ID NO: 24872 - protein, 155 aa, Oryza sativa
  Clone ID: TF_uC-osflcyp044b03b1.pep
MECGGALQLPPGFRFHPTDDELVMYYLCRKCGGLPLAAPVIAEVDLYKFNPWDLPERAMGGEKEWYFFSPRDRKYPNGQRPNRAAGTGYWKATGADKPVGSPRAVAIKKALVFYAGKPPKGVKTNWIMHEYRLADVDRSVAARKLSKSSHNALRL

SEQ ID NO: 24873 - protein, 308 aa, Oryza sativa
  Clone ID: TF_OsC1783_5.pep
SISVNGQSCVPPGFRFHPTEEELLNYYLRKKVASEQIDLDVIRDVDLNKLEPWDIQERCKIGSGPQNDWYFFSHKDKKYPTGTRTNRATAAGFWKATGRDKAIYNAVHRIGMRKTLVFYKGRAPHGQKSDWIMHEYRLDDPATDTAAATPTVTSAAAAAAAMAAAADGGQEDGWVVCRVFKKKHHHKEAGGGGGKHGGDGSAGAKAAHAYSSSDDALDQILQYMGRSCKQEHELPSPQASGGAGAGAGSRPASRYLPPMYPSLRASGFGNRSLFRRPRGGSAAIGYSSVLPDNNIVYILYVVSGSSAD

SEQ ID NO: 24874 - protein, 334 aa, Oryza sativa; identical to SEQ ID NO: 17466
  Clone ID: TF_OsC228106_1.pep

SEQ ID NO: 24875 - protein, 683 aa, Oryza sativa; identical to SEQ ID NO: 17470
  Clone ID: TF_OsC1713_5122.pep

SEQ ID NO: 24876 - protein, 252 aa, Oryza sativa
  Clone ID: TF_OsC8585_1.pep
MTAPADKGKKAKTDADGGAAEENEQIDGALVLSIEKLQEIQDELEKVNEEASDKVLEVEQKYSEIRRPVYLRRSDVIQTIPDFWLTAFLSHPLLSELLTEEDQKMFKYLESVDVDDSKDVKSGYSITLTFSENPYFEDKELTKTYAFADDGTTTINATSIKWKEGMEIANGNAKKKGSKRPLVEESFFTWFTDTEHKSLADGVQDEVAEIIKEDLWPNPLKYFNNEAEELGEDDDEEGSDADEGEEDEEEEN

SEQ ID NO: 24877 - protein, 351 aa, Oryza sativa
  Clone ID: TF_OsC8302_1.pep
MGGDKENLDLSDLNASLPAAAAALSAEDRAGLVNALKDKLQSLAGQHTDVLEALSPNVRKRVEYLREIQGQHDEIELKFFEERAALEAKYQKLYEPLYTKRYNIVNRKLLRCYGWQCNKSCLLYFVDAVFCVELPRKLLVGCARVSFRCLVYVTRGFIGGSCEACLGTSILEYYYVLVICNRFIKRKQLGLKIEWYPGKNLTQKILKKKPKKGSKNAKPITKTEVCESFFNFFSPPQVPDDDEDIDEDTADELQGQMEHDYDIGTTIRDKIIPHAVSWFTGEAVQAEDFDDMEDDEEDDEDDDEDEEEEEEDEDEDEDDEEEKSKPKKKSAGKPKYFALNCPGNYWLVVHG

SEQ ID NO: 24878 - protein, 259 aa, Oryza sativa
  Clone ID: TF_OsC18074_1.pep
MAAAEQKGKKPRTDGAEAEPVDAALLQSIEKLQEIQDEIERVNEEACDKVLELEQKYNEVRRPVYVRRNKIIKQIPDFWLTAFLSHPMLGELLTEDDQKIFKHLESIDVDDSEDIKSGYSITLTFSPNPYFEDTKLTKTYSFSDDEAVKVKATSIRWKKGMDIANDRAYTKKGDKRILIDESFFTWFNSEKNRSFAHGAMDEVADVIKEDLWPNPLKYFNNEFEEELELLDDDDEVSDDDDEEEDDEDQGEGEEDGEEN

SEQ ID NO: 24879 - protein, 364 aa, Oryza sativa; identical to SEQ ID NO: 17582
  Clone ID: TF_OsC26576_1.pep

SEQ ID NO: 24880 - protein, 1058 aa, Oryza sativa
  unsure (1)..(1058): unsure at all Xaa locations
  Clone ID: TF_OsC1542_1.pep
MDGGTGPGAELLSPGEAEWPPELRLPPPPPPHPPPPPPLEPAPPSTPQLRGEASPPPPPPPPVGPPGAAVVAAAARKEASASAEGFDDSHFLGSIMGAPAHQHQHQHQQPPAVGPPVVVKRKRGRPPKNRDGAAPPPPPKPVKKREDDEDVVCFICFDGGNLVVCDKXGLLEDLIDDNGTFSDKITGAFVRIRTPCVGQKQDIYRLVKVLGTHKVAERYSVGKKTTDHALEILNLDKKEVITMDTISNQDFTEEECKRLRQSMKCGLITRLKVVLLIKIHYTGDIHEKAKIFQLLRVNDXSCNFWALLKKEHASLMKIQKYMLTHNHRQNCSATSHHTTTSPPTEGMTHGQGEEASFASSEIVSGDMEPEKVWHYKDPSGSVQGPFTLLQLSKWAAYFPHQLVLMMSGPLEATLVNGTIVRIVVEGSHWSSTADSITHDGLQLSLASAKPESCSAVNPIRDGDSSSASRVPNQSGAHVYSPPHPATTNLSKSEETMNQCKSCEPEASNKSRKPDASHAPVNQHPKPESDPLLPDTQDFERTHPSPSTEHDTKEPLKDQSRSTSVAPEGSGTMAHGQSSIAFISEASGPLSSKIVGLQPPKDTSFLVEKDIKDGGSITQTEQQKEESTAFKKENVAVDPISDSEAIVSGVLESLTETYNLHEETALENFTPTSAEEEQPQCSTPIALSPWDETSDYQGEAVDSALWGVQDDQNNEMWSLSSPTPTLQPSGIGADTKGASCAIEEVIVAQGNSGVVEPSPALEKKRIEKVPSASIDRGVPEQVKPKSDAALSPEESRKPSGLQLSSTYLQGSTKSSGLPPSGTSLDGGIEPSGLLPSGTSLEWGTKISGVQSSASSLEGSKKAFVRQPSGSSLEGNTKASEKLQHGNHQVLRLLQGAQKHQVGSHHLARARNLSLIPHGVPAKAATRLRTNQQHQQLNTHQKPQGDKETTTQILLAGETLSETRAGIHPQAMRAAEAAILATTMTGTIRAANHGVVAQIIPGDQIIVKNMATVARRDHRRRGGNLKGGSVDTTRMATAGRALPASSSTVENALTFLYSPK

SEQ ID NO: 24881 - protein, 143 aa, Oryza sativa
  Clone ID: TF_OsC10655_1.pep
MADLVSSCKDKLAYFRIKELKDILNQLGLPKQGKKQDLIDRVLALLTDEQGQRHHGWGRKNSLTKEAVAKIVDDTYRKMQIQCAPDLATRSHSGSDFSFRPIEEAYDSFPPEAKVRCICSSTMVNDSMIQCEDQRCQVWQHLK

SEQ ID NO: 24882 - protein, 1774 aa, Oryza sativa; identical to SEQ ID NO: 17666
  Clone ID: TF_OsC31430_1.pep

SEQ ID NO: 24883 - protein, 1777 aa, Oryza sativa; identical to SEQ ID NO: 17590
  Clone ID: TF_OsC13528_1.pep

SEQ ID NO: 24884 - protein, 405 aa, Oryza sativa
  Clone ID: TF_OsC15358_2.pep
MGEPPPAGEGSGMMMPAKRRRERVLPSRFKDSVLVLPTAAAKKGKPAEAAAEGGVVDGELYDVELEEGDPGMLWTGDERPVQTEEELYWACRNIRRSSTSTSGSFSSSIFSGSSAVTSLSNAGGGGGNGRPEGKPTVVVECKPKSDGGERKEDFYWPEEFVLGDVVWARSGKKCPAWPALVIDPLLHAPRVVLNSCIPGALCVMFFGYSNSGLRDYGWVKQGLIFPFVEYLDRFKGQTLYKIKASRFREAIEEAFLAERGLFELETDEGCSLEKSVNDQSIPDGLLEGSGSNNEQECQSEAQVVGKSPGCDICGNRLPCKIASKKKQAGERLLCRHCDKLLQSKQYCGICKKIWHHTDGGNWVCCDECQIWVHVECDQTCIKMEDLENADYFCPDCKSKRKNISS

SEQ ID NO: 24885 - protein, 74 aa, Oryza sativa
  Clone ID: TF_uC-osflM202123g09a1.pep
SACGSTDRGEVMLICGNEDGSTGCGVGMHIDCCDPPLEAVPEHDWLCPQCEMPKATKKSASRVASKSRVSKRKR

SEQ ID NO: 24886 - protein, 478 aa, Oryza sativa
  Clone ID: TF_OsC10999_1.pep
MNTAAPGILPTSRNAPVRKVAECDVLSAKQESVPVAVPAKQEVHSPKQESIPKFNTGSSRVSQLISVQQANDSSPNSKVSADANIGSFDLAKFSKKNALPCDICMRSETVLNRIFVCSSCKAAVHLDCYRSVTNPTGPWKCELCQEMPSDVVAGSQSDCDGSKPCLLQCDLCHGTSGAFRKTIKGRCIHAFCAEWLLESTFTRGQYNAVDGMESLPKDKDTCAICHRNVGSCLKCSTVDCQITFHPTCARDAGFYMDTKTIGSTLEHKAYCGKHGIEQRKADLLQLHGPGEVKNMKQMRVDLEVLRLICERVVKREKLKKDLVVCGHDTLAARRNSIAYSTRTSYCGSGPGASSESATTSVNNSYSGLMQRTDDVAVDSIISRKPTVRFSLNNSDADRNTADSSTSSISYKQKLDDRESLADKNLPKKPATAMQISEEGETKSSDKKNQRPPKSIVYTRRSALSKKRQLSQNVEGPGG

SEQ ID NO: 24887 - protein, 687 aa, Oryza sativa; identical to SEQ ID NO: 17592
  Clone ID: TF_OsC305349_1.pep

SEQ ID NO: 24888 - protein, 256 aa, Oryza sativa; identical to SEQ ID NO: 17595
  Clone ID: TF_OsC349609_1.pep

SEQ ID NO: 24889 - protein, 774 aa, Oryza sativa
  Clone ID: TF_OsC17337_1.pep
MPDLPCDGDGVCMVCRVASPPEVDLLRCSTCATPWHSPCLSKPPALADAAQWSCPDCSGDSTDAPPPAPAPLAPGSAGQLVAAIRAIECDATLSDQEKARRRQELLGGAAPAGADADDDEGDDVLEVIGKNFSCAFCMKLPERPVTVSTLAGPFPHCFQKWIHSGKRTCGKCRAQIPAKMAEQPRINSALVSVIRMAKVSKNANSAVSAAAYHYIRNDDRPDKAFTTERAKRAGKANASSGQIFVTIPPDHFGPILAENDPKRSIGVLVGDTWEDRLECRQWGAHFPHVAGIAGQSTHGAQSVALSGGYVDDEDHGEWFLYTGSGGRDLSGNKRTNKEQSSDQKFEKLNAALRISCLKGYPVRVVRSHKEKRSSYAPEAGVRYDGVYRIEKCWRKISVQGKFKVCSDIYGDRPRPLPKVDELKGATDISERKGTPSWDFDEKEGWKWVKPPPISRKPNLSGDPATDKEIRRVARRAQMSVTERLLKEFGCSICKQVMKEPLTTPCAHNFCKLCLVGTYGSQSSMRERSRGGRTLRAQKIVKKCPSCPTDICDFLENPQINREMMDLIESLQRKAVEEGDTKTSSDVSNGAESSGDDGNNEALEKGEDDSSLKDDGSLKDDGKVVKAVVVIKEEDLQPKKSKGEDEKEQGDKKMDSADVVDIAVEKKQATKRASEKAEKKQARKRKGDAVATNDGKRMKTGGDAMETAAEEDAPLSGGTPVKRNSRKSSEVDAKGGGGSPVVSSPRRVTRSNAKASGEADGSPATRTRRATRAEA

SEQ ID NO: 24890 - protein, 821 aa, Oryza sativa; identical to SEQ ID NO: 17596
  Clone ID: TF_OsC297803_1.pep

SEQ ID NO: 24891 - protein, 1563 aa, Oryza sativa; identical to SEQ ID NO: 17598
  Clone ID: TF_OsC18633_1.pep

SEQ ID NO: 24892 - protein, 230 aa, Oryza sativa
  Clone ID: TF_LIB4371-013-R1-K1-G11.pep
LVLGGDDGKECTYGGGYLKRQAVFSCLTCVPAGVAGVCTACSLACHDGHEVVELWTKRKFRCDCGNSKFGSHVCKLCPEKDPENPVNSYNHNFKGSYCTCGRPYPDPEAEKQVEMIQCCICEDWFHEDHIGLNSIEEIPRDEEGEPLYEDFICPKCSPKCYFLKLYPDTIWASNKQSSAPQAETTNSTVMNGNSSLGDIEKSENGALINHLNCEKTSDNENCPKDSVAPD

SEQ ID NO: 24893 - protein, 477 aa, Oryza sativa
  Clone ID: TF_OsC3201_1.pep
MAGEGSGGEGGAGAFEDEAEPTVTIGEYIEGIEAEELEADLVLGGDDGKECTYGGGYLKRQAVFSCLTCVPAGVAGVCTACSLACHDGHELGLVSMFIWVRRMSATRVILGVALAVAKLSIAIFCIKYLYDWVMRTQLMLGWFFLLKVVELWTKRKFRCDCGNSKFGSHVCKLCPEKDPENPVNSYNHNFKGSYCTCGRPYPDPEAEKQVEMIQCCICEDWFHEDHIGLNSIEEIPRDEEGEPLYEDFICPKCSPKCYFLKLYPDTIWASNKQSSAPQAETTNSTVMNGNSSLGDIEKSENGALINHLNCEKTSDNENCPKDSVAPEKASLDDSSDGKCKLGMNICSNTPSADSEKKMPFFMSKSWREVICRCETCTDFYAQQGVAYLIDKEDSIEEYEKVAKQKREKKLEQQEGVEANFLNSLDHVQKIEILSGINDMKNELQSFLETFDSSKPVTSEDIRAVFENLAKKKKQRLS

SEQ ID NO: 24894 - protein, 751 aa, Oryza sativa
  unsure (1)..(751): unsure at all Xaa locations
  Clone ID: TF_OsC340224_1.pep
MSSSAAPARKENGTVAAPAASSAAASNTFHVLNSGSAAAAVAAGRAYVQSPRATALRSPQVRAITNYGMFPTTGASAARTAMAGRTINGGASMLTTTTTTTTPPHLIQQLMVLAGWTTRSPWLQNHASMSPRGSPSSFSSGRFSDPRGMPSTFAYRTPGASSGRVIDNGAVAGRGKQMAGTSRSLEIIAVDTGAGSSKNASPAGGHANAGVVVKRLAPVLAMPSAGAAGKGKEEAAAAAAAPSPNGRGRKRAPPKVSNVPAAGXSDKKPRKRAKKAAAAGSKVTVPADVIIVDDDVNQPSSNTDAQSNADDDLKKAAVASPAATRSKTRSKCKTSSNSAAASPSARSSAIAARKKNNATATGTTATPPPPEAKKHTVLTWLIDTGFLKDKAKVFYVPGDAGAAEKVISGMVTKTGIRCRCCNTVVPVAVFETHARCERPGQPWEKLLLMSGKPLSKCMQEAWAQERVTAMRAREKAMASLEQEKEKSSQAKRKLAKTKKMQLLDGVVVVSTSSPRHQVKKNGGGKDCSDDACGVCADGGQLLCCDTCPSTFHPDCLAIXTTVAPDGSWSCHFCRSSVLPFHGRKLAEMPFAGTLPAYQKQGMMRRLVKAVEKVLASLQVENLVIPAVADLVETWKRSFSFRPMQAEVRDEAKKLSLVAITGTTLLQKPISAHQQQPVPSRKGSSSSRSKRASAPATVTGSSKEEEEQMTTTAARLTDDELAFLEMAPLCSFTDLLAGGVYPTGLQLLRGMK

SEQ ID NO: 24895 - protein, 64 aa, Oryza sativa
  Clone ID: TF_OsC3802_4.pep
MVQCEGCKDWFHPSCMGMTIEQAKKLDHFLCADCVKENGTKRPSNSYPASSNSDSKVEPKKRKR

SEQ ID NO: 24896 - protein, 1125 aa, Oryza sativa
  Clone ID: TF_OsC359_8462.pep
MEASAGLVAGSHNRNELVVIRRDGDPGPKPLRQQNGQVCQICGDDVGLNPDGEPFVACNECAFPVCRDCYEYERREGTQNCPQCKTRFKRLRGKSHPQCRIGCARVPGDEEEDGVDDLENEFNWRDRNDSQYVAESMLHAHMSYGRGGVDVNGVPQPFQPNPNVPLLTDGQMVDDIPPEQHALVPSFMGGGGKRIHPLPYADPNLPESAKGSCATVQPRSMDPSKDLAAYGYGSVAWKERMESWKQKQERLHQMRNDGGGKDWDGDGDDGDLPLIFSPVELLYHFGWTKMDEARQPLSRKVPIPSSQINPYRMVIIIRLVVLGFFFHYRVMHPVPDAFALWLISVICEIWFAMSWILDQFPKWFPIERETYLDRLTLRFDKEGQTSQLAPIDFFVSTVDPLKEPPLVTANTVLSILAVDYPVDKVSCYVSDDGAAMLTFEALSETSEFAKKWVPFCKKYSIEPRAPEWYFQQKIDYLKDKVAPYFVRERRAMKREYEEFKVRINALVAKAQKVPEEGWTMQDGTPWPGNNVRDHPGMIQVFLGQSGGHDIEGNELPRLVYVSREKRPGYNHHKKAGAMNALVRVSAVLSNAPYLLNLDCDHYINNSKAIREAMCFMMDPLVGKKVCYVQFPQRFDGIDRHDRYANRNVVFFDINMKGLDGIQGPIYVGTGCVFRRQALYGYDAPKTKKPPSRTCNCWPKWCCCCCCGNRHTKKKTTKPKTEKKKRSFFKRAENQSPAYALGEIEEGAPGAENEKAGIVNQQKLEKKFGQSSVFVASTLLENGGTLKSASPASLLKEAIHVISCGYEDKTDWGKEIGWIYGSVTEDILTGFKMHCHGWRSIYCIPKLPAFKGSAPLNLSDRLHQVLRWALGSVEIFFSNHCPLWYGYGGGLKCLERFSYINSIVYPFTSIPLLAYCTLPAICLLTGKFITPELTNVASLWFMSLFICIFATGILEMRWSGVGIDDWWRNEQFWVIGGVSSHLFALFQGLLKVIAGIDTSFTVTSKGGDDEEFSELYTFKWTTLLIPPTTLLLLNFIGVVAGVSNAINNGYESWGPLFGKLFFAFWVIVHLYPFLKGLVGRQNRTPTIVIVWSILLASIFSLLWVRIDPFLAKNDGPLLEECGLDCN

SEQ ID NO: 24897 - protein, 1574 aa, Oryza sativa; identical to SEQ ID NO: 17606
  Clone ID: TF_OsC187381_1.pep

SEQ ID NO: 24898 - protein, 1076 aa, Oryza sativa
  Clone ID: TF_OsC1163_1.pep
MAANAGMVAGSRNRNEFVMIRPDGDAPPPAKPGKSVNGQVCQICGDTVGVSATGDVFVACNECAFPVCRPCYEYERKEGNQCCPQCKTRYKRHKGSPRVQGDEEEEDVDDLDNEFNYKHGNGKGPEWQIQRQGEDVDLSSSSRHEQHRIPRLTSGQQISGEIPDASPDRHSIRSGTSSYVDPSVPVPVRIVDPSKDLNSYGINSVDWQERVASWRNKQDKNMMQVANKYPEARGGDMEGTGSNGEDIQMVDDARLPLSRIVPIPSNQLNLYRIVIILRLIILMFFFQYRVTHPVRDAYGLWLVSVICEIWFALSWLLDQFPKWYPINRETYLDRLALRYDREGEPSQLAPIDVFVSTVDPLKEPPLITANTVLSILAVDYPVDKVSCYVSDDGSAMLTFEALSETAEFARKWVPFCKKHNIEPRAPEFYFAQKIDYLKDKIQPSFVKERRAMKREYEEFKVRINALVAKAQKVPEEGWTMADGTAWPGNNPRDHPGMIQVFLGHSGGLDTDGNELPRLVYVSREKRPGFQHHKKAGAMNALIRVSAVLTNGAYLLNVDCDHYFNSSKALREAMCFMMDPALGRKTCYVQFPQRFDGIDLHDRYANRNIVFFDINMKGLDGIQGPVYVGTGCCFNRQALYGYDPVLTEADLEPNIVVKSCCGGRKKKSKSYMDSKNRMMKRTESSAPIFNMEDIEEGIEGYEDERSVLMSQKRLEKRFGQSPIFIASTFMTQGGIPPSTNPASLLKEAIHVISCGYEDKTEWGKEIGWIYGSVTEDILTGFKMHARGWISIYCMPPRPCFKGSAPINLSDRLNQVLRWALGSVEILLSRHCPIWYGYNGRLKLLERLAYINTIVYPITSIPLIAYCVLPAICLLTNKFIIPEISNYAGMFFILLFASIFATGILELRWSGVGIEDWWRNEQFWVIGGTSAHLFAVFQGLLKVLAGIDTNFTVTSKASDEDGDFAELYVFKWTSLLIPPTTVLVINLVGMVAGISYAINSGYQSWGPLFGKLFFSIWVILHLYPFLKGLMGRQNRTPTIVIVWSILLASIFSLLWVKIDPFISPTQKAVALGQCGVNC

SEQ ID NO: 24899 - protein, 1076 aa, Oryza sativa
  unsure (1)..(1076): unsure at all Xaa locations
  Clone ID: TF_OsC71795_1.pep
MAKTLQGTQQQYAASGFPTQQYPTSGWTQSAAEILQLDNMDQDTSVVRNIIHRKIVEYLNERKEFCNFDLSFLMEIGKCIDRHLFEKADSKIKYMDLETLRTRLNAIVNSASFRGRYNQYENCMGAANFAHSLADKPKQMPERLANTIFTSCASTLPKCSPSIDVLHIGHIKEHFSGDAYQNDSSQPSTSGSSSSLSAVWDQTTCSSAMRTLPMDSFSTVNGQNLSTNNKSLYPTTGQGPLLQQYIECEMKQETWSRSLEQSDQSNITTGNRDLYHAQIHPYINGEHKRDRCIQMKEKLGHTSDHEGFSREKSSNLSNHFMHHQQGFMTNYGACSPVSKTVDRAEQTSNSTVSKPTSPASDGSSGKHYPAKRLKVDVPHLVHVNEMEASKEQQPAANETYASAETVQSEVTNSPTKSPCCTSLGDNIACTDNVHGMDMVRLSGSAVQTEEEFRRENSDIEMKDAKVDLLDQTLSGDSLRARKRRGASVLYALTSEELKDHLCTLNHDTSQSKVPTEELLSVEGLPDQNTCNLCGMERLLFEPPPRFCALCFKIINSTGSYYVEVENGNDKSSICGRCHHLSSAKAKYQKRFSYAETDAEAEWWVQCDKCKAWQHQICALFNPKIVDPEAEYTCAKCFLKEKDNEDVDSLEPSTILGARELPRTRLSDHIEQRLSERLVQERQQRAIASGKSVDEVPGVEGLTVRVVSSADRTLQVQPRFKDFFKKEQYPGEFPYKSKAILLFQKNEGVDVCLFAMYVQEYGSACPSPNQRHVYLAYIDSVKYFRPEIKSASGEALRTFVYHEILIGYLDFCKKRGFVSCSIWTCPSTKRDDYVLYCHPTIQKMPKSDKLRSWYQNLVKKAVKEGVVVERNTLYDFFLQPTNECKTNISAAWLPYCDNDFWPGEAERLLEKKDDDTSQKKETQLGRLLRVAKRDDRKGNLEDILLVHKQFCKHCHHPIVSGSSWVCTSCKNFFLCERCYAEELNTPLKDRHPATTKQKHAFERDYLEGLVHASRCFDRSCTSKLCLTLXNCSSMVYDVIPVPVVEEVAICVYSCGNCCSRTHCFVTMQTVQLPDAGI

SEQ ID NO: 24900 - protein, 1026 aa, Oryza sativa
  unsure (1)..(1026): unsure at all Xaa locations
  Clone ID: TF_OsC48275_1.pep
TSSLKGQRDKQYHAQARWLLFLFHAKSCTSPPGSCKSSYCDRVRELVVHLTDCQIKDCSYRHCRESKMVSDHYKNCINEHCHVCCKAKEMLRRSSELAHKQNPAEPILITQHNMNQRSADRVHGDRMDIDQAVETFDDQPPAAKRPKLQLVSPDASENVPVCQKNPGFMLQEAHPRQLDQNKKMVPDQEVDVGLDIRHPQVTLVSCHGSDEKIGAAQNTVIPGALNKIHCHVQQETVVADKESVTVVDVKKKTGSVDVTISKTGKPKVKGVSLMELFTPEQIHEHINSLRQWIGQSKAKXAEKNQVIGYSESESLCQLCKVENLTFEPRPIYCSPCGARIKQNASYYTGSTAMGRLFFCISCYNASLGNTIEVELIKLSKADLEKKRNSDEPEEGWVQCDKCECWQHQICALFNARRNDVEEAEYTCFKCYIEEFKRGLRMPLPESVVRGAKDLPRTLLSDHIEERLFKRLREERQERANKLKTSLDEVPGADGLVVRVVSSVDKKLEVKPHFFKILQEDNYPAEFPYKSKAILLFQKIEGVEVCLFGMYVQEYGAECKFPNQRRVYLSYLDSVKYFRPDIETVSGQALRTYVYHEILIGYLEYYKQRGFTSCYIWACPPVKGEDYILYCHPEIQKTPKSDKLRQWYLSMLQKAIKENIVVELTNLYDQFFVTAKECKIKVSAARLPYFDGDYWPGAAEDIINQLQLEGDGKLLKKGRVNKIITKRALKAAGHTDLSGNASKEAMLMQKLGEIICPIKDDLIMVHLQYSCSHCCTFMVSGRRWVCNECKSFYICDRCYNAEQRLEEKERHPSNSKCLHILHPVEIVGVSEDTKDRDIILENEIFDTRQAFLSFCQGYHYQYDTLRRAKHSTMMMLYHLHNPTGPAFVATCNVCNCDIENGQGWYCKDCPDFDMCASCYQKHXGANHHHKLTNHPSSAECNVQNKGAWQKHVLQVRVWLELALHASSCHVRNCQYPNCRKLKGLFHHGAQCKIRLTKGCKQCARMWYIIRLHSQSCRQSDCAVPRCR

SEQ ID NO: 24901 - protein, 234 aa, Oryza sativa
  unsure (1)..(234): unsure at all Xaa locations
  Clone ID: TF_LIB4309-026-R1-K1-A8.pep
VYNLFLQCDKCRMMVHARCYGELEPLNGVLWLCNLCRPEAPRVSPRCCLCPVTGGAMKPTTDGRWAHLACAIWIPETCLKDVKRMEPIDGLSRINKDRWKLLCSICGVAYGACIQCSHPTCRVAYHPLCARAADLCVELEDDDKIHLMLLDEDEDPCIRLLSYCKKHRQPSTERPSLESNLAKPAVVVQTDAVPPSGCARTEPXYIHGRRGQKQPQVMATASXKRLYVENMPYI

SEQ ID NO: 24902 - protein, 708 aa, Oryza sativa; identical to SEQ ID NO: 17615
  Clone ID: TF_OsC29983_1.pep

SEQ ID NO: 24903 - protein, 1623 aa, Oryza sativa; identical to SEQ ID NO: 17616
  Clone ID: TF_OsC94386_1.pep

SEQ ID NO: 24904 - protein, 682 aa, Oryza sativa
  unsure (1)..(682): unsure at all Xaa locations
  Clone ID: TF_OsC48959_1.pep
VLPILNTWCRYNYQPPPGKPNHTCGGADRWADVVSTDDTSNSSSSSPSASTSTSKMELKMSKKISFSRIPRNLKDLLATGLLEGHPVKYIMRKGKVVSPYYFEVHAGSTKKHPSDYIFLENGNNLHDILRACSDATLDMLQSAIQNAIGPAPKKRTFRCQTCKSELSSCCTGKFALLCDSCLESKGSQNSXPGKLCHSSTFCQRQKIWRTSKIGRNPTSSARRSKNESPGSKYCNSSARGSKNAFPGVKTTSTGRITRKDKGLHKLAFMSGVLPEGTDVGYYVGGKVSPSQFEAHAGRAARRKPYHNIYMSNGVSLHELSVSLSKGRNMSNRQSDDLCSICSDGECVGFTTIPRGTWCCRYCENRQQRESSLAYNHNAIAAGRIDGIDPMEQIFTRSIRIATTPVTGFGGCALLCRLHDFSKKKFSARTVLLCDQCGREFHIGCLKEHNMADLTALPEGAWYCTADCVRISETLKDLLSRGAEPISSVDVEIIKRKYEQKALNKDGDLDVRWRVLKDKSSADSKLVLSKAVAIFHESFDPIIQIATGRDLIPAMVYGRSVRDQDYTGMHCAVLTVGNTVVSAGLFRVMGSEIAELPLVATSRDSQGLGYFQALFGCIERLLASLKVKHFVLPAADEAESIWTQRFGFVKITQDELREYLKGGRTTVFQGTSTLHKLVPKLDG

SEQ ID NO: 24905 - protein, 42 aa, Oryza sativa
  Clone ID: TF_jC-osflLIB3477P005f01b1.pep
FCICCDICETWFHVKCVRISPARMERIKHFKCPGCSNKSTRE

SEQ ID NO: 24906 - protein, 1350 aa, Oryza sativa; identical to SEQ ID NO: 17620
  Clone ID: TF_OsC4410_1.pep

SEQ ID NO: 24907 - protein, 256 aa, Oryza sativa; identical to SEQ ID NO: 17632
  Clone ID: TF_OsC134975_1.pep

SEQ ID NO: 24908 - protein, 1238 aa, Oryza sativa
  unsure (1)..(1238): unsure at all Xaa locations
  Clone ID: TF_OsC463_6.pep
MAKPLRSTVLVCASAAMAPTSAPRLPTSAPPISPASSRKPKPNRARAGTLCRSSSRAERHRGGRTSTRWAAVAAEGGGEAMRRWVDRRLRDSFPVDTVEEMTTLALQCVAKDAAAQPEMSWPRGSPPRCPSSSCPEPQRQEFGGGNPLRRLPLVSPPPRPADFPPRPGGAVLDSAVRGLPRAQGVDVQPEESHIRRGVEIRVSLYSPPMKGGRLHRLERPPAAHITTAAAATTPAPAPADDWGDGSWTVDCSCGITYDDGEEMVSCDECNVWVHTRXKRAPSSADEAEVAELLAELXPTHRPRPLYRRWAEVPLPSRVHVHGLPGGTDTALFRSAAPSPVFSSALWRCAGYVPKRFGFRYCEFPYWADDKDGANALFALAREKRKEKAETRFPLRLGAIHKDKNYVRTLSICGDKVDGVEHSVDDDAKRTSPPSDAKKRGTSISIVEPDTWDNGCEKKRDFDVPASEDQHAKTNMVNSDLHVLVEAKKKRASSSERSGDKKCSASKEITGMLKKYEPKESKRLVISSGVATTAAVAEQEVHSRFVKLYPPHLSAPGGGEMHGSELHLPMGGGAEWQSHQQTLAWRRCKPGVHQGSVYEGLDGNQNVGLQTGVRSNGVVKRDDAKRSNGDVQSDAAPEKMNEGLDLQKQSNQTSNLLVVGGVPDLQTNQSESLTIKKEASTDDHERTEAIQFVSDEHKSGKQDTAMLSTLQRHSSKLASDLVYQHPKSETQNPMHTIPEHPNSSLGNVKVCTASSGPNSTTFDLSCSLLSTEPSSEETTVRLVKKDQTRLVSSADSENDFAKKSESSQDRTRSSDKVQLKGFVPSAPKSSQGSRTYVSSAKNRFIVPKEQLQKTSTEGNAPPGSLQGEVAPLHSRNKAMPLSFYQRKDKIHHRSIHITQDTSNSSASAELQSTETTASLSDEQLALLLHQQLNSSPRVPRVPRCHQASTMQMLHPTGASVFSKRSSAHGGRDQALVLKKRNKDDAWRDNDETKKTGKVSSVERRHRDSSTERVLAAKDSCKFTENIESEQRNRGICSTGATSGVGNDAPIDRGVSHDLPGLIEEIISKNTNITYGELCNAIRQHWGDLSKPNVENNAYPNYLHAVNDCLRNRNDWAHLVDQAAMMNPNKRRKVEESDSLSADVLATEKTNKEAKRGPEDTNAESHHEILPRGKRKARKCRRLELKGRRVNDTRKRSSFDSASDDDDTTLSDSSSDRNDTPMDKSLEDSFVIAKNADSSS

SEQ ID NO: 24909 - protein, 1990 aa, Oryza sativa; identical to SEQ ID NO: 17623
  Clone ID: TF_OsC158862_1.pep

SEQ ID NO: 24910 - protein, 1478 aa, Oryza sativa; identical to SEQ ID NO: 17636
  Clone ID: TF_OsC11584_1.pep

SEQ ID NO: 24911 - protein, 973 aa, Oryza sativa
  Clone ID: TF_OsC85093_1.pep
MIFKRNQRSEILSLRRCNAGGGAGVGEDDGDGGERRPKRRRGDEFFPVELLGDVPVAGIPYAAFGFRWCEEAEVASPAAASRAAAAAAAASRPPVVRTSRGRAQVLPSRFNDSVLIDPWKKDKPAKPPVPAKAVQLVPKSEVLYRKGAIADRSLTMSELDENGDDDYEEGHNFVASRKYSMSLSTVTSVHGEPYSYYHRKGLMKRQYDDDDDDDDDDDDDDDDEDEEAEEEEEEEEEEEEELSYWRNDFVYGDIVWARLGKRQPVWPGVVVDPAQPAAAQALPPQPRSGAVLCVMLFGWAAEFGDEKKFIWVRQGGIFPFVDYMDRFQGQTELSSCKPGDFQRALEEAFLADQGFFEVPMDGNTTGQPARYKRALQCESCGNCFPNKDPSMMVYVMEQLACRQCAKILRSKEYCGVCLKSWQHKCGGRWKSSKPDKVAVICFGMEGTYLRDLELISCHCGPCKGQKFLFNEWERHAGCRSKNWKSSIKIKDTLMPFGKWIEQHQSSSYSTNPAKRSSQKMKKQKLLDLLSEPYDTVNVKWTTERCAVCRWVEDWDYNKIVICNRCQIAVHQECYGVRGKQDFTSWVCRACETPDQKRECCLCPVKGGALKPTNVDNLWVHVTCAWFQPQVAFASDELMEPAIGILNITPLLFMKMCVICRQIHGSCTQCYRCSTYYHAICASRAGYRMEIRCLEKNGKQTTNKISYCAHHRAPNPDNVLIIQTPAGTISSKKLVQSNGTVAASRLIRKDLPKDSVSEVEISENLSAARCRFYVKKELKRSREGAIAHRVRGSCQHRWDEIDSLNPPREERDPESFSTFKERLHYLQKTEHTRVCFGRSGIHRWGLFARRGIQEGEMVLEYRGEQVRRSVADLREEQYRVQGKDWYLFKISEEVVVDATDKRYLALLIGQSCTPNFHARLMSVGHDLSRIVLITKKNVSAGEELTYDYLFDPDEADDRKVPCLCQTANCRKFMN

SEQ ID NO: 24912 - protein, 1696 aa, Oryza sativa
  Clone ID: TF_OsC12404_1.pep
MEGLVGRAVRKEFPGFGVFDGVVESYDAEAGYFRVMYEDGDSEEVELGEVVGLLVGGSPVGVEMAHPLPLTPGRRPKKRRRGDEEGGVGVGAVVAMEVDSVVLAVPAGGAEPASPVVVVEGSSRDEVDGDVVSEMAEKRRRVVSPGPESSGKPLRRSARQAKAAARVAEMEAAAAVAAAAEAEAAAAAMAEAEAEAAVTPPQSGSKRKRASGAGRYRSVAKDLEKAAVERLPPKPELPPSSQSLDLEGLPALDVFQVYSCLRSFSRQLFLSPFLLETFVAALRCIYVNPLIDWVHFSLLRAMKSHLEDLANEGDPPAMHCIRNLNWELLDLATWPIYLAEYLLTRGSELRYGMKLTDLKLLNTEYYTQPAMVKLELLRALCDDVLEIEAIRSEVVSRMSELDGNDELCKSTRTRRKRRASAVKNLLNSSRAPEDSSDTEDGNSDECYLCGMDGNLLCCDGCPAAFHSKCVGVVEDLLPEGNWFCPECLIQKNDGFKNMVKPGRGAEVLGMDPHDRLYFGTCGYILVVESTAEDSLDSTCHYYGIFDHHSLFNVLRTCHPSYSSITNMISLFWGTAIDSFDSNGRCENNKEFSIFDAKIDCSHLLPSKQHTEHEQLKSDKNGSCEQLACGKAHASDPDRLDHDTSHHKFSLRSAVISENGNATSAKTQQDVCSYANGLPAENKIDQSPHKKISDCYIHSNPAMYVNYYSFGQIAASAAEELKDKLSENKEGKKVGQDAASFQLKTICKKYANIFALTDQKLSVELRKEKCGWCNSCQISGGVDCIFRVTDGKCMEGLQSEKNMNSHIILAIHIILSIEERLNGLLIGPWKNPQFSSYWRKAVLKASDVSSLKQPLLMLECPVRRVAFSVEWQKPADSVEVVGSAAHVLVRTSNKSSRHGSTRKPGRKPFIVELKVDSRDVGVYWRRGGRLSRQVFHWKRLPKSLTYKAVRQAGRIKIPTILYSDGSQFARRSKYIAWQAAVEMAENVAQFILQIKELEFNIRWTEILSTLPASLATKETQKIARLFKKVIVRRKRVDGTNVEYLLDFGKRENIPPVIAKHGKKLDEPSNERNRYWLSEGHLPLSLLKAYEAKALTRLLKKKDIDHLPKKMIDLKPPKPKKSGFDDLLEKAKKQVLGLCGHCDKEVKISDAVNCQYCEALFHKKHFKVPRGATDAYYVCNKCLSEKVLNVKSPQKKVVSKKNSLKKKTKKQSLKIVTRSKQIVAKSKKKMGKNKGKRGRPRKYPLNESKNKLPELRVKEPANVPKNEPAKRISKRLYSKYMKGNSNISERSAKRRRTASHYSYWLDGLRWTQNPNDDRAISFRTERVVFPCEDADLSEVFPVCRLCQKCYSGESIYIACEDCGDWFHGDIYSITLENVNNLIGFKCHRCRLKDVPVCPYVQTDNILMAQSDKDDVTSRSIEDKEDRSPTDLVAHDSLEGSHGHIIEKEVNDHSFEKEVGDHICLQAQEDHNEKELDSHSTEKELGDHNKTEEFDGNMKVLFNLNSTKELDSTSTEKELGDHNKIEEFDVNMEMFFNLNNTKELDSTGESICAGGEAHCLHELNNHEILKECHSLDNNLGELDNQDCQKECHNQNSLKELENHRSSQELDSHKSPEELDNIISPKELDCTENNEHSAAVTQSDGFLDDPFNIRISDKGLIIASENGKIKESIPLQTKNKPEENPVPADHDIDLQVVVTL

SEQ ID NO: 24913 - protein, 716 aa, Oryza sativa
  unsure (1)..(716): unsure at all Xaa locations
  Clone ID: TF_OsC54697_1.pep
MVVNSRPLKRARTRVEARDFAGFPQAVDGGAARTFRXAVRGFLARYARLLPLPSIFSPAAAAAPPHLLTWRVSLRVGEEGDEEGGGGAVELNVVEEDVLRSRSVYCDQCRVVGWSGHPVCGKRYHFIIENDNNQVCGKRHSCCLRCGTPTVAGESRCLLCNFDMDGEELEECGYMHLDDNTHLLHAVVHANGYGHLLRVNGREGGSRCLTGRDIMSFWDRLCKVLHVRKVTVMDISKKHGMEYRLLHAITSGHPWYGEWGYKFGAGSFALTSDTYQEAVDTLSGIQLALYFSHRQPIRTPLQNTIALYWALSDRQLVTVRDLFRFIMHLLHQARKKNETSKPTTDEHKEVASNVLCKWTKEDIDRAETAMLKVLRVVQPGQWVSWRALRGAASKAVDSQELLDYSLRGLGGKLMDDGHFIAVRCNAETSAIEYRLEDNSNQSVDAAAFGPSVDHLLHDLKFLYNALLNPETMLASQPEVIGASSHSAAAKILDCKQFIKHYDQHTPRAPLNPFLLSVRCSIELLDHPKDYTAPPVELVLLPASATLAELKIQATRAFQETYLMFQSYQVEQLPDFPNFSDTTLVKHVLGSSQLVRVRGRCTGDNRRIVQFRMERGLENWTVDCTCGAKDDDGERMLACDVCGVWQHTRCSGISDFDDVPEKFICRKCASPRRGKGRGGGGGNGGSRMDVSAAGRCKDEIGSSVGGAGKFGRMATVG

SEQ ID NO: 24914 - protein, 144 aa, Oryza sativa
  Clone ID: TF_uC-osflM202003g05b1.pep
MHLMFQSFQVEQLPDFPNFSDTTLVKHVLGSSQLVRVRGRCTGDNRRIVQFRMERGLENWTVDCTCGAKDDDGERMLACDVCGVWQHTRCSGISDFDDVPEKFICRKCASPRRGKGRGGGGGNGGSRMDVSAEACVNLHGILSF

SEQ ID NO: 24915 - protein, 1671 aa, Oryza sativa
  Clone ID: TF_OsC15358_1.pep
MLASRIPLKRCTAAAVVPLPGELEMEEGPTPPAGGGEGSGAAVVPAKRRRERVVPSRFRDSVVSLPLPPAKKGRPAKKAAAREGGDGEVYDVEVRAVEQQGATAAAFGAVETAVWPGDERPAQTEEELYRACRNIRRSSSSSGFSGSVVTSLSNAGGSVAPEGKPVVVVECKPKREGGDKKEDFYWPEDFVLGDVVWARSGKKCPAWPAVVIDPLLHAPAVVLNSCIPGALCVMFFGFSSGGHGRDYGWVKQGLIFPFVDYLDRFKGQALYKLKANRFRQAIEEAFLAERGFCELETDEGCSLEKSVNDQSIPDGLLEGSGSNNEQECQSEAQVVGKSTGCCDSCGNRVPPKIAKKKKQAGEQLLCRHCDKLLQSKQYCGICKKIWHHTDGGNWVCCDECQIWVHVECDLTCINMEDLENADYFCPDCKSKRKTVPPVEQMNTPNSSECASTSKEKLPEMIPVFCFGMDGMYLPKKHMILCQCNSCKERLMSLSEWERHTGSRKKNWKMSVKLKSNGDPLVTLLDDIPCANVKSSTPSINKEELLKLLGTLALEFMLVYAVANSFRPVNARWTTERCAVCRWVEDWDYNKIIICNRCQIAVHQECYGARDVQDFTNWVCRACELPKQKRECCLCPVKGGALKPTDIDQLWVHVTCAWFQPKVSFPVDETMEPAMGILSIPSEYFKKACVICKQMHGACTQCYKCSTYYHAMCASRAGYRMELQYSEKNGRNITRMVSYCAFHSTPDPDNVLIVKTPEGVFSTKFLPQNNEKQSGTRLVRKENLQEKVLPAKISDCPAARCLPYEMLKNKKEPGEAIAHRIMGPRHHSQESIEGLNACMKIENKRVSCGRSGIHGWGLFAAKKIQEGQMVIEYRGDQVRRSVADLREARYHREKKDCYLFKISEDVVVDATEKGNIARLINHSCMPNCYARIMSVGDEKSQIILIAKRDVSAGEELTYDYLFDPDESEDCRFFSAVQFQFQIGREWRCCSHPRVETDLKTLARRFWKVAAPYWWSEDKVQARLRLAAVFALTLATTGISVGFNFLGRDFYNALADKDQEQFTKQLLYYLGGFAVGIPIVYTRIISHITRFSFFVLRDYARETLSLRWRSWMTSYYMKRYFKNRTFYKIQSQSLIDNPDQRINDDLSAFTGTALAFSLTFLNAAVDLISFSNILYGIYPPLFIVLIVYSLGGTGISIFLGKNLVNLNFMQEKKEADFRYGLVRVRENAESIAFYGGEENELQLLLDRFRRAFENLSELLIASRNLEFFTNGYRYLIQILPAAVVAPMYFSGKIEFGVINQSVSAFNHILSDFSLIVFQFQSISAFSAVIDRLGEFDDLLDGNGSSLSKPDNIDGINIIFKSTGPTVLSSNGSPTQSNPSMVLEICNLTLLTPRSGNILITDLTMELKEKDHLLVMGPSGSGKTSLLRALAGLWTSGTGDIIYHVRGSMELQTSNSGPDEPSNIQSNGEELLQSSKQRRDNGIFFVPQRPYMVLGTLRQQLLYPTWTEDVCHSSNNDPQSTDPLTFEVSTSDGVGSKSEMPTTDELIRVLEAVKLGYILPRFNGLDSMHDWASVLSLGEQQRLAFARLLLAKPTLVLLDESTSALDDMNERHLYSQIEAAGITYISIGHRKTLHKFHNKVLYISNSDSTDSNPRNWYLKPTEQMSIEESSSFAS

SEQ ID NO: 24916 - protein, 1027 aa, Oryza sativa
  Clone ID: TF_OsC247488_1.pep
MRKGICTGHITYTGRTRGPITEGKEASSAICRGSAKRENGTTWTMEMDGGDEATSSGTRENLGIPERAARYGASFPCVEEHGETKVGQAGVQAPSREECSPGFKWQWITHYRHSWGSRRVCDCELGFGAAGRGRGGGLAEAAAALEGFLADPWLLRPAAAGEGVGVEEEGGVATVQVEVPPVEAAEEGEEEAGRAAVLRQAAAAEDYARRLEGAAAAGTGLRFMPNGFSVLLTLCFFIWGVDTHDYDVVKLEEGDEEDWGQEDVGNAAVKVMCRICFSGENEGSTKAAKMLPCKLCNKKYHRSCLKNWGEHRDLFHWSSWVCPSCRSCEVCRRPGDPNKLMFCKRCDGAYHCYCQQPSHKNVTHGPYLCPKHTRCHSCGSGVPGSGHSTRWFLGYTCCDACGRLFVKGNYCPVCLKVYRDSEVIPMVCCDVCEKWVHIECDGISEEKYQQFQSDQNLQYTCGACRGECSQIRDTEDAVRELWKRRDVVDHDLMASLRAAAALPSLEDVSPSHPNSDDEKLGAYVMKNDGRNTLKFSFKSNSTKPALDSSEQEKNAIKSSGSNKKHSKKKGNQNNKTVSEQDEIFLEKRNETKSLGSLGDQIADVTRDKSSFKNDADAFVLSSAQSAEKALKLQSAKAAAHNADMIPKVKIKGTKVPSLHFKDVGEENAAKSDTGKGTKLVIHIGSRHKSRSGSPKSEMSNSQKEQELVSMHGGKVDVTSQFKSSRSEIKEKSVMKLVRETGVQQNSLLGDLGASKKHATGKRSNAIVSAMENASESGTRSRSFGQKQSVNHLTENQGNASFSVNNSPDSLKPSLLKLKFKRPIFEQPSTQSSQPEEPGTWASPQEELNVAKGQRSKRKRPSLDKMDGSESKAPAAKRHEQSTGEEAMDANWILRKLGKDAIGKRIEVQLASDGKWHQGVVSNVINGTLCLQLDNGRSENIELGKRAIRLIAQRSHTGKRLTHFAPQAPAFGSSQSLIHGRLGGLKRIGFILTSGSVGTNNWEGFLGATLDVEEMPDDGHVHVAVAAE

SEQ ID NO: 24917 - protein, 197 aa, Oryza sativa
  Clone ID: TF_rsicef_7783.y1.abd.pep
ARGTYVDSSSEESEDQQVKICDICGDVGEEKKLAICSRCNDGAEHIYCMRVMMPEVPEGDWFCEECRTEMQIEKEKSILEKSQVKVSTISVGSKVKAANVSSKDLNVSNTSSKSTKEDAEEGIVPSGCTSTGKEEDGRSCIGGSEAANKNEEQTSSGRNDDFNLKILHGERHMQSHNNDVPFTSVAHDISNMAVKNK

SEQ ID NO: 24918 - protein, 334 aa, Oryza sativa
  unsure (1)..(334): unsure at all Xaa locations
  Clone ID: TF_OsC348_1.pep
MLEEVELPHPPEDVPGEQAVGGGLVAPPRRALHLQRRRHALQPAVQLAAAVPHHVLHVVHLVAEEDAHQVQELGHGPRQLPPHEELDQVGEVVGGVEGDPLDGAVGADEARRHEQRRQRARPDAVXLRCAARSTPCSASSWTDSAAWRWTRWSKSERLISKASAGAAVGDAARVMPTWMRWSASTLRRRRSYRSPAVSRAGCLVGRWITPGNXRVHGHVREVIDRVADDPEFLLHVVRPHPAYLHRRRRLPLPANAGGXRTPTARTPCQAAAAAASSDRRRTTTPAAASSWRRQTLTACLNSKIGWISATNSKRDEQLEFGKIRTELEMRVRPV

SEQ ID NO: 24919 - protein, 267 aa, Oryza sativa
  Clone ID: TF_OsC348_2.pep
MDEGGGAGAAAAAAGNAAGAAVHHNARSAEDVFRDFRARRAGIVKALTTDVEKFYRQCDPEKENLCLYGLPNETWDVTLPAEEVPPELPEPALGINFARDGMIEKDWLSLVAVHSDAWLLSVAFYFGARFGFDKEARRRLFTMINGLPTVYEVVTGIAKKQTKVSNGSSKSNKSNPKPSKQSNSNSKPAKPPQPKDEEDSGPEGAEDEDQAYMCGACGETYANGEFWICCDVCEKWFHGKCVRITPAKAEHIKQYKCPGCSSKRSRE

SEQ ID NO: 24920 - protein, 1442 aa, Oryza sativa; identical to SEQ ID NO: 17642
  Clone ID: TF_OsC11017_1.pep

SEQ ID NO: 24921 - protein, 1146 aa, Oryza sativa; identical to SEQ ID NO: 17647
  Clone ID: TF_OsC86365_1.pep

SEQ ID NO: 24922 - protein, 1988 aa, Oryza sativa; identical to SEQ ID NO: 17644
  Clone ID: TF_OsC296057_1.pep

SEQ ID NO: 24923 - protein, 167 aa, Oryza sativa
  Clone ID: TF_jC-osleLIB3474049f11b1.pep
TKSSEPRAKQPKPQPQPPVKNEGREEEGGPDDEEGGVGGGGGGREEEHGETLCGACGESYGADEFWICCDICEKWFHGKCVKITPAKAEHIKQYKCPSCSAAAGPALGLTKPNAVEPPQVSFAAKDVEFSEWKGDILAIAVTENDLVKGSDSKFENAVLKKLDGQLG

SEQ ID NO: 24924 - protein, 79 aa, Oryza sativa
  unsure (1)..(79): unsure at all Xaa locations
  Clone ID: TF_jC-osroLIB3475012g10b1.pep
APKDQEGXSGDDQGQEKEDVHGNTLCGTCGTNDGKNEFWICCDNCEKWYHGKCVKITPARAEHIKQYKCPDCTNKRARA

SEQ ID NO: 24925 - protein, 367 aa, Oryza sativa
  Clone ID: TF_OsC5969_2.pep
MDAQYNPRTVEEVFRDFKGRRAGLVRALTADVEDFFRQCDPEKENLCLYGFPNEHWEVNLPAEEVPPELPEPALGINFARDGMQEKDWLSMVAVHSDAWLLSVAFYFGARFGFDKNDRKRLFGMINDLPTIFEVVSGKSKAKPPSANNHSNSKSKSSNKTKSSEPRAKQPKPQPQPPVKNEGREEEGGPDDEEGGGGGGGGGREEEHGETLCGACGESYGADEFWICCDICEKWFHGKCVKITPAKAEHIKQYKCPSCSGGNGGGGGVSGNGKRARPTKREAIISQYLVRDERSKNTSTHARSPLISDNPYEVISDIRIMLAEQYTTNAREDDFDAKPNDKDNQGEGNVAWGGINKELYSLQVTIQN

SEQ ID NO: 24926 - protein, 296 aa, Oryza sativa; identical to SEQ ID NO: 17649
  Clone ID: TF_OsC170376_1.pep

SEQ ID NO: 24927 - protein, 596 aa, Oryza sativa
  Clone ID: TF_OsC1283_1.pep
MILRFCLTCPATLLLLLTLSNLTTSVRILVRQAQKAVAAKRKPQAWEKYAKKRPRVLRINDDDLLITAMVKNRDLGYAKKFTKFKSSKKCGRLLARMSGKGGSNLLGGKRVSLARKTVLCWLIATGFLTVKDVIQYQNLKSNEVVKDGQVTWEGILCNCCTKTFSISDFKVHGGCSLPKSSLGLFLQSGKSYTLCQVEAWSAEFLSRKCDASGRKVEAMDENDDTCGFCGDGGELLCCDNCPSTYHQTCLSDQELPEGSWYCHNCTCRSCGNPLSEKEVSTFSAILKCLQCGDSYHDTCIDQEMLPCGDKQSNIWFCGRYCKEIFIGLHNHVGIENFLDNELSWSILKCNTDGQKLHSSKKIAHMTECNTKLAVALTILEECFVRMVDPRTGVDMIPHVLYNTRSNFARLDYQGFYTVILEKGDEILCVASIRVHGTKAAELPFIATSVDYRRQGMCRRLMDTIEMMLRSFHVETLVLSAIPELVNTWVSGFGFKPIEDNEKKQLRNVNLMLFPGTSLLTKRLDGITAANAGEVRNPEQIKINGRREELGLAAGVARGEGDGEEVLGLGDGAGAAELDDVCHNHLVSCTRHCTRLA

SEQ ID NO: 24928 - protein, 1096 aa, Oryza sativa
  Clone ID: TF_OsC45337_1.pep
MGSKQIVAVLQVGGEFKTDDDGQMSYSGGEAHAMHVKSDWTFKTFKHEISSTLNNLKLDSYVFKYFLPRNNKTLISISNDKDLKRMVEFHAESETTYIYVMKKADNRVKTSAVVPAASADHAVAATTPDGSKRQKICASWENAITGAGQVFEGPKEFRDALHKYAIAHRFHYRFVKNDSSRVTVECTAEGCPWRIHASKSPAKKDFMIKKVFGSHTCESESVKSHRLASQKWVASVIKEKLRDSPNYRPRDIANDLQREYGLSLNYSQAWRGKSIAQKELYSSHEEACNQLPWFCQRIVETNPGSAATVEALEDSKFRFFVAFHASIQGFVHGCRPLLFLDVISVKPNKHWKLLAATSVDGEGDMFPVALSVVDDESQENWHWFLEQLKASLPVSGELTFISNGKCGLLDEVSLIFPDSYHGYHVNYFIEEFKAQLDDSWSEELKDTMVEHVKKAMYSCKVDEFNQCIELIKVESDKLAEWLLETKPEKWSDAFFKGSRLGQYTCNVPETILQWVPSRYELSVVQLVDTIRCNLMEMMYTRREYSNSWTEPLTPSTNQKIQEEMGKALTHSVVCSTGNDGNNNVFEVCDGAVNVVNIDTWDCTCRKWHVSGIPCSHAIAVFERTDHNPLDFCAKYFTTECYRLTYAMSINPIPDIVVAAPSTDPSQGEALHQSPILTRRQVGRPKEKPADPRIAIKRAVRCSRCKGYGHNKATCKVPILIDRYTSTRFTYHENTYTPSRGANGFSRRVHQPKHTSASPPETAARTDTATTTGARATRASTLPHPTPRAVIDSETSDFFAAPIRLPDTWVPHLPQPTRQRHNRKGGRPHQRETSDLLRPASESPTSGSHSTTASSSAPHLAPRLDSPRIPLSSLNPLLALLVLCFACCSPRPTAPAAVGGAVVSQVGMLPYEAREVAMGIHRDAVAQAQALRVAAASAIESVTARAPPFGPPAARHPGEAGRGNPPPPCAACGLPENPGGTIVCDSCERGFHLACVRVWPPLMPPPPPPPAPPGARRPRATANEDWICPECEMRGARTNRWKLGPVPLDINVPPPSTPDAEDPVAVATRDVTRQLSQLSFPQLLLLTADLIRWSKKC

SEQ ID NO: 24929 - protein, 93 aa, Oryza sativa
  unsure (1)..(93): unsure at all Xaa locations
  Clone ID: TF_OsC5969_3.pep
GGPDDKEAAGAAEGAGREEEHGETLCGACGESYGADEFWICCDIXCEKWFHGKCVKITPAKAEHIKQYKCPSCSGGNGGGGGVSGNGKRARPS

SEQ ID NO: 24930 - protein, 1345 aa, Oryza sativa
  unsure (1)..(1345): unsure at all Xaa locations
  Clone ID: TF_OsC13101_1.pep
MKDYDKSTSFEVDDSTIDGDVELGGGLTVVGNERNDGRGFVGENGASNKRSLRYNSMLMQVCAETAACVSLDFCNDETFEKXRCDKLAEGDRAGLRTSLAYNAELGAAENCALECDAGFDATXNSANHVXGLDLAEVGSVPLNGMDAYIKESEGXIGKLDDXLVTLSEEPNESGGGTSVGGINDSQENKAVNGLCQGLVIAPFDTANGNAWTIRKKISDSGRESIEQEDTVMCSNEEQKVENHCQFDDKHKEAEISQIELAVDNHIMLTDCTNQKKGIDSPVNETKGDSTPDIVFIRRKSITRKTCEAKQVKSEDEVRFEKRVTRSATVRQREVSASMCVGATNDANLESKERKEDVHHYTRKVGSTVRSKVHHTGVAECDTDTKKKLKGTVTTRRNSDAIANDDPPSITQNKESKTQMKIDIKSQPLTRRGSIVNKTEDAVSGLDQNICSSAITDKNDIELTDSEGVKSENKAAVRKSILSVGAKIVASKKRILESGLDKASGESPVAIPSLKKARDTSSDTELEQPKMSSGKKLTRNNCGSSKKGMSTRRQHQSQTAKLSTSVNCSNKNESKLSQNESDDDGTGSDTSLKNTCVRRTRSGGVVPKKQEDSSESEEPIILRKNHQRGKYSGKRAGSTPRKVKAPKGNRKEVKASSLKSSGPSEQINTGSLREEKQKISDHIKGMLLDAGWTIDLRPRNGRNYLDSVYIPPSGKGSYWSVTKAYAVFLEGMESEKKGRAKDQRPSKKSVGSPGKSHVSEEILSKLKRIVVNKRRTKVELQKLKKRKHGLLKKQKTSKRNSRGSKNKISNSRKLHLGSERKKRGGCALLARGSNKDGGSSTNGFVPYEWKRTVLSWLIDLDIIDINAKLKCVDETHSKVLLEGVTTRDGINCRCCSKVFTVLEFVAHAGGPVSKPYRNVLVDGLDTDLLHCLINAWDKQSDSERQAFFPISTETDDPNDDTCGICGDGGNLICCDGCPSTFHMSCLELEEHSRQDAQDIAEVDSSLCTCSQCEEKYHPGCSPETTNTSNVSSQACDLFCQQSCRLFSIRFLGGNDIYGTVNSALMQSLRYIYSLFSCDIHYRGKLFEGLRNLLAVKKDLEPEFSCRIIQRIHENVPETVVALDERVECNSKIAVALSLMDECFLPIVDQRTGINLIRNVVYNCGSNFVRMDFHGFYIFVLERGDEIIAAASVRIHGTKLAEMPFIGTRNMYRRQGMCRRLLDGIEMILSSLNVEKLIIPAIAELVDTWTSKFGFSSLDVSEKQEVKSTSMLVFPGTGLLQKPLLKKTSPGENSSSQEVDGVFSELESGKTSNVANEDSLCSANAETQGSAAPCYGDNSKDASACND

SEQ ID NO: 24931 - protein, 799 aa, Oryza sativa; identical to SEQ ID NO: 17661
  Clone ID: TF_OsC97719_1.pep

SEQ ID NO: 24932 - protein, 253 aa, Oryza sativa
  Clone ID: TF_OsC9817_2.pep
MAIARTGVYVDDYLEYSSTLAGDLQRILSTMRELDERAHGIMGQTKEQIKYLLGVPSHGFDRSNMDDDESASERMKKDIEASQDNALSLCTEKVLLARQAYDLIESHIKRLDEDLGQFAEDLKQEGKIPPDEPSILPAISAFSRDDKRRPGFSTPQATKKFREREWDRERGMDFDLMPPPGSNKKTTAPMDVDQTIDPNEPTYCICHQISYGDMIACDNDNCEGGEWFHYTCVGLTPETRFKGKWFCPTCRNL

SEQ ID NO: 24933 - protein, 1103 aa, Oryza sativa
  unsure (1)..(1103): unsure at all Xaa locations
  Clone ID: TF_OsC60785_2.pep
MAGGSSPSPAAAPIQVRCAGCRGVLAVGPGMTEFICPKCGMAQRLPPQLMPKPPPSSSSSAAATPAPPAPAAPPPPTSRRGGGGGAALPPPQAQGVDPTKIQLPCANCQAVLNVPHGLARFRCPQCGVELAVDLAKLHNFLASSNNNAAAAPPDNVPPASGPASRAPLVPAPPPAPFPPVPTPGMTQAPQMVPGALIPMVLPITDPPEEINEVAIDVEREEDEGGTVGETFTDYRPPKLSLGLPHPDPIVETSSLSAVQPPEPTYSLNIMDELDETKALSCLQIETLVYACQRHLYHLPTGDRAGFFIGDGAGVGKGRTIAGLIWENWQQGKHKAVWVSIGSDLKYDARRDLDDVGAKCVQVHPLNKLPYSKLDSKAIGIKNGCHKAKNLIPDAGSQPTRTGSLEKGGVGALELVAMDMKARGMYVCRTLSYKGVDFDIVEAPLEERMMNMYRKAAEFWAEFRLELLSAGESFTEGISNQIWRLYWASHQRFFRHMCMSAKVPAVVKLAKEALAENKCVVVGLQSTGEARTEEAITKYGVEMEDFVSGPRELLLKLVEENYPLPPKPDSFQQGEEKVTEIHRKRHSAPDVSFKGRVRKVAKLVEVSDDDSDDYSPSESDHGSTESDEEFHMCQICNTEEEKTLLLHCSGCSRHVHPGCLTPPWTGVLTDDWSCYTCKKLEGEENEQDAHVADFSQRYDAAVEKKKKILDMIRSLDLPNNPLDDIIDQLGGPDNVAEITGRRGMLIRASDGKGVVYQARNAKEVSMEMINMHEKQQFMDGKKLISIISEAGSAGVSLHADRRAKNQRRRVHITLELPWSADRAIQQFGRTHRSNQTSAPQYRLLFTNLGGEKRFASIVAKRLESLGALTQGDRRAGPSLSAFNYDSNYGKKALTIMYRGIMEQSYFQDDQDSFPVVPPGCSDNQSSIQEFIAEAKAALVSVGIIRDAVVCNGKVAGKLSGRIVDSDMHDVARFLNRLLGLAPKIQNRXVHIDSLSGASTVLFTFTIDRGVTWEXKDGAGSSNDGFYESKREWMGGRHFILAFEGSIEGMYKIIRPAIGEALREMPLTELKSKYRKVSSIEKVNKGWQDEYDASSKQILKRIRIS

SEQ ID NO: 24934 - protein, 1640 aa, Oryza sativa
  Clone ID: TF_OsC77457_1.pep
MASFYCVRVQIDSASLRHILRPFAAQGAAPPEQLAASHPSSQYGQPARAAPSTSLLAQVAGNHPHATHVSDRKALFGMLNAGNAANVIDLTRASPLGGAEPLPKHPRHGLEASSSVEQPSCLGPLFQNTSANVQGSFPGECSVNNGISQGAIQFQDSSTCAVQKLPSQSTPRHHPALLGDQICVSCLNVGGEFFVGEAGIFGVRCFCHRLRMSVAKFCEHSGGPAEKAGEIVIMDNGMTIVQWLKYCMGVGASISDTKWDWPEWAYMRYSSEEYWTKSLLTTNNNMEKTGLFSGHGKSTGHINNPVYSSDIHNEVGRFTSVEKLVNKPDETFYRKSVGLHEAFSKNPAIQQSSKINLANHMIHDMNMNSISRPSERTYSTANMGITYSRNHLAHDYANFLEKNLNNLSRSPGPSSTRVLSNDSRACMPDVPHKIIQDGSESLGADAYPKQTTKANKTIENIEPSFGTGNRKRSLDVSNGTSHSELNEITDDAAKNSFISLFLSHLERNSTSESIDDVLNSNEHYLLKAPDVAYSSDRLKTASTQVETRANDNQLKLAPAIIHTKRISDSRSLPVPVASKGYVHQDVLHANSQEPLINGDCLPHLLPSQPNAGISKICAEVSSPVNCRCCNHVADKSHLAHSETGAPCFYDRTENQCIDAVAKLKKILPNLVLELAISADLISVMMALQFQPIGLDEVRTRSTFIPRSSLCSRELMLQSCCHACPIDGYYRSSMGHTANSLTKNTLLDAPNNTECSPYRDGKCCCSLAPKCLAGYGFTKHCVARIDQTDHTVQKSKDDGMQAAARCCTLGESEKLICQCSSEIIARKSDSKASFQNEVSTEVLNRPCVPTLQQLKNVTEASAVGGHWPYETVKEKASACRDSGIFKELKSGFSSGFSSDVVTKFSASPELNKYGLEHKNLVFDEGSRIEKCSSSSYLPISTGCEEAQNSFSRFHLEPSLVKHKNNQISEGSTRKEHENEGQCSEMSKKTRTLRCCANKSESDDCTRKIDLSSREGDSQPQHKAGPFSRRVSKTKRKHPPTHLNKHVKRLHSNCKVLNVDNERSDDEGIYVGESNSSDRKKQEDNMTTLDRTKCQQQGSRLLVRKLPKYVSLNCIVNETNSEDACSGSASIDSSLIATGITNDNRKSPKIVPLNLILKKAKRCHAIKPLSKTENIHFSEEKSSDGSADKSSSGDRSFSPQDELWSPKKNRYSSNVSRPHVKTDCQSPCCVLEEDEPLSLADMGTSQLSASRSRGSKNQRACISLNRMERYIQRPSLDASCCVCGISNLEPSNQLIECSKCFIKVHQACYGVLKVPRGQWFCKPCKINTQDTVCVLCGYGGGAMTRALKAQNILKSLLRGIATAKRSDKYVYSSGNVNSECTSKLHGEYVRHDSFNGHRSRSFNAISSFGIKEASIGSARGDIISKSWTSNRNSSLLGPRTRQWVHVVCGLWTPGTKCPNTITMSAFDISGASPAKRNTECSMCNRTGGSFMGCRDVNCSVLFHPWCAHQRGLLQSEPEGEHNENEYVGEIVGQCVADKREIEYQSGKRQQYKSACYFFKIGKEHIIDATRKGGIARFINHSCQPNCVAKIISVRNEKKVVFFAERHINPGEEITYDYHFNREDEGQRIPCFCRSRGCRRYLN

SEQ ID NO: 24935 - protein, 875 aa, Oryza sativa
  Clone ID: TF_OsC4368_1.pep
MVIAVEGGFVHEEEEVDHPIRYLPLGRVYSSSAPCPLPKKPRSAEDGKPPVIVYYRRRRKKPRVEGPPPSPATAPPMLHPREDDEDEEVTRRKGSLKYELLSLGQAPPALGGDGEEPARRRCLRRSGGAERRGYFSEPKRRQRQGVHKEAASSAGRRWLELEIEAADPLAFVGLGCKAKVKYDDGESEDLNLADERIKFSISSEEMKCRNLKFGISNLNKRGYDELLALAVSLHDYQGLDPGDLVWAKLTGHAMWPAVVVDESNVPANRALKPGRLDQSILVQFFGTHDFARFLCTQLLPENMLQLQKSMEKGSSDANSNKDVHSCDNLSEDKTAESGGDYDEMTPIELGNLRVSKLGRIVTDSDYFHNKKHIWPEGYTAFRKFRSVKDPHVVILYKMEVLRNSDIKARPLFRVTSEDGTQIDGSTPNTCWKEIYCRLKEKQRNVASGLDRDVCQGSGSYMFGFSNPQIRQLIQELPNARSCLKYFENAGDTFRGYRAVHVNWKDLDYCSVCDMDEEYEDNLFLQCDKCRMMVHARCYGELEPLNGVLWLCNLCRPEAPRVSPRCCLCPVTGHAFNYINPNFGTETCLKDVKRMEPIDGLSRINKDRWKLLCSICGVAYGACIQCSHPTCRVAYHPLCARAADLCVELEDDDKIHLMLLDEDEDPCIRLLSYCKKHRQPSTERPSLESNLAKPAVVVQTDAVPPSGCARTEPYNIHGRRGQKQPQVMATASVKRLYVENMPYIVSGFCQNRVGHDAISEPIQSVGFLDVAHQEAVGNVSSMIEKYKSMKATFRRRLAFGKSRIHGFGVFAKVSHKAGDMMIEYIGELVRPPISDIRERRIYNSLVPEGDMWKTLVKLIGLFMEFNPITQIRGIFT

SEQ ID NO: 24936 - protein, 167 aa, Oryza sativa
  unsure (1)..(167): unsure at all Xaa locations
  Clone ID: TF_OsC88193_1.pep
MTGFTSARDLCIAILREDGLITESRTKIKAEELTGYDADLLFQCKTCGKSDHPLKMLICDSCEAAFHLSCCIPRVHEVPTDEWYCLPCFRKKPKSQEYQPKASWHESYRVHVTRYVXYVTGVRXGIDXQAEVPEWSCPTSSMLLFLFLEGCLIARSPLNLILLTSLN

SEQ ID NO: 24937 - protein, 1229 aa, Oryza sativa; identical to SEQ ID NO: 17668
  Clone ID: TF_OsC11114_1.pep

SEQ ID NO: 24938 - protein, 272 aa, Oryza sativa; identical to SEQ ID NO: 17625
  Clone ID: TF_OsC1327_1.pep

SEQ ID NO: 24939 - protein, 117 aa, Oryza sativa
  unsure (1)..(117): unsure at all Xaa locations
  Clone ID: TF_LIB3434-034-P1-N1-C10.pep
VHIKGRCIGXXTRFAIDRMEMGVDKWTVKCSCGATDDDGERMLSCDTCHMWMHTRCAGISDFDRVPKRYVCKSCKLTHKPKSSGPRLMYSSAPNKRCKTGTGSFSNAAEGLLWPQIS

SEQ ID NO: 24940 - protein, 895 aa, Oryza sativa; identical to SEQ ID NO: 17627
  Clone ID: TF_OsC133489_1.pep

SEQ ID NO: 24941 - protein, 697 aa, Oryza sativa; identical to SEQ ID NO: 17626
  Clone ID: TF_OsC294928_1.pep

SEQ ID NO: 24942 - protein, 244 aa, Oryza sativa; identical to SEQ ID NO: 17628
  Clone ID: TF_OsC78000_1.pep

SEQ ID NO: 24943 - protein, 751 aa, Oryza sativa
  unsure (1)..(751): unsure at all Xaa locations
  Clone ID: TF_OsC53130_1.pep
MGTARGRVALEGGGRRRRKLDEEDDEEYVADDDEEKDEDEDEEEYQQAAAPSDDGEEGGDDEGEQEDESGADFVGDEEEEEEDLEDAYDLEEVKAPRPKRPPKGKPPPRSRRRRQKDDDDDYEEEEEEDADFDPDVDEDDEEEKDSTKNHVAKRQRPPARKKNKRNPARVFKTKHKKHSSGRRRRERWDTDDDEEQEEDADHILKDDQEVEPDARHPKKKAXAARKTRDVTPEPDVEASAWPAVESDTSEFEFVTSDEEAADKEAPAAEPAKTKGKKGRKRWGSGSESSSDSDYVISEQELKDLEVSMPPDAALQSPATLPRRTFLSRRVGEKGKEPEEAWKQTCGICLSEEQRATIQGVLNCCAHYFCFACIMEWSKVESRCPLCKRRFTTITKSSMADLGLGSRKAVIRVEKRDQVYQPTEEEMRRWLDPYENVVCIECNRGGDDNLMLLCDICDSSAHTYCVGLGRQVPEGNWYCGGCRSGGEGPSAQDTVVHCRESNTNPANSSSGSFGSATPSGVFQRPPPINTQPSLQGFDLNLSPRETPDEDKREESHVSADAVSTPTGRHATLDRRRAFNRRIRILLFRPRVTPNGWQNPIQSDRTIPENEQNPQSTSTPTEVNPSCSRDSSMQNQQSSSSFVQPARGLIERTYGGGSNFQQTEGAKEQLIPIVKRNLKLMCAQSPLGQSDFKNVARRATHTILALSGIAHNEDFVVTILDEREMEMNIVQSNVMLRNGCSTEYRPCLSCLRS

SEQ ID NO: 24944 - protein, 298 aa, Oryza sativa
  Clone ID: TF_OsC4349_1.pep
AFFFCASLCALSISLSSKTLTLAAGGSGGGGGRGGGGVVVVVGGMDGGGAHRTPEDVFRDFRARRAGMIKALTTDVEKFYQQCDPEKENLCLYGLPNETWEVNLPAEEVPPELPEPALGINFARDGMDEKDWLSLVAVHSDTWLLAVAFYFGARFGFDKESRKRLFSMINNLPTIYEVVTGTAKKQSKEKTPKTSGKSNKSGTKPSRQPEPNSRGPKMPPPKDEDDSGGEEEEEEEDHENTLCGACGDNYGQDEFWICCDACETWFHGKCVKITPAKAEHIKHYKCPNCSSSSKRARA

SEQ ID NO: 24945 - protein, 167 aa, Oryza sativa
  Clone ID: TF_OsC31997_4.pep
VALASQTYDLVDAHIQQLDQFMRKLEELRQEKEAATTAAAAAAAAAASVATGTPVAATVTASAGTSTADNTPKGGRSSERGRGGRKKTAKVPTEQPAPAIDLELPVDPNEPTYCLCNQVSYGEMVACDNNDCKIEWYHFGCVGVKEHPKGKWYCPSCIGFQKKRKGK

SEQ ID NO: 24946 - protein, 679 aa, Oryza sativa; identical to SEQ ID NO: 17631
  Clone ID: TF_OsC152828_1.pep

SEQ ID NO: 24947 - protein, 258 aa, Oryza sativa; identical to SEQ ID NO: 17630
  Clone ID: TF_OsC32575_1.pep

SEQ ID NO: 24948 - protein, 168 aa, Oryza sativa
  unsure (1)..(168): unsure at all Xaa locations
  Clone ID: TF_OsC308411_1.pep
MSSIGAGAGGAVVGAAVAAVAVGGGAPPHVLAVDDSSVDRAVIAGILRSSRFRVTAVDSGKRALELLGSEPNVSMIITDYWMPEMTGYELLKKVKESSKLKKIPVVIMSSENVPTRISRLPSTXTIVLPSLLCSIGLLTRCLEEGAEDFLVKPVRPSDVSRLFSRVLP

SEQ ID NO: 24949 - protein, 236 aa, Oryza sativa
  Clone ID: TF_OsC359_8248.pep
LVLTEVELPLMSGFLLLSTIMEHDACKNIPVIMMSSNDSVSMVFKCMLKGAADFLVKPIRKNELRNLWQHVWRKQLSSGVLDVQHTQQEDNLTERHEQKTGVTKAEHVTENVVHKNMECSEQESDAQSSCTRSELEADSRQTNNLLEYKQPMGRHFSKPDHKNTEKNGGTKIHASNDGNLIPRREEDASLRRMTCSNDINCEKASRDMELVHIIDNQQKNNTHMEMDVARANSRGK

SEQ ID NO: 24950 - protein, 136 aa, Oryza sativa
  Clone ID: TF_LIB4370-019-R1-K1-H1.pep
MSPDADAAAAAAAGGEGAAAAGVGTAGEGRGVIRWDQILPRRSLRVLLVEHDDSTRQVVTALLRKCGYRAVAAVADGMKAWGVMRERAYAFDLVLTEVTMPTLSRIELLSRIVASDQCKNIPVIMMSSQDSIGTVL

SEQ ID NO: 24951 - protein, 134 aa, Oryza sativa
  unsure (1)..(134): unsure at all Xaa locations
  Clone ID: TF_LIB4370-026-R1-K1-B1.pep
MGSQDDQGAPRRGRGDNRVVARAALKAAGGGDVVDEAENGEVAVQRVRDAAAPYDLVLMDKQMPVMDGHERVLLXVQATRRIRGMGVTTPIVAVSSDGLPADVDAFITAGADDFTSKPLSKEKLGVILAKFRLA

SEQ ID NO: 24952 - protein, 566 aa, Oryza sativa
  Clone ID: TF_OsC359_8450.pep
MGGGVEERKVVDLEDGDGEEGEDAAAVAAGSSRETRMLPRMPVRVLLAEGDDSTRHIICALLRKCGYRVAAASDGVKAWDILKEKSFNIDLVLTEVELPLMSGFLLLSTIMEHDACKNIPVIMMSSNDSVSMVFKCMLKGAADFLVKPIRKNELRNLWQHVWRKQLSSGADSRQTNNLLEYKQPMGRHFSKPDHKNTEKNGGTKIHASNDGNLIPRREEDASLRRMTCSNDINCEKASRDMELVHIIDNQQKNNTHMEMDVARANSRGNDDKCFSIPAHQLELSLRRSDYSRLESQEKNERRTLNHSTSSPFSLYNCRTASSTINAGDAQACSTSATHIDLENKNGDSKTPSQDKRETNQPPIRVVPFPVPVGGLTFDGQPFWNGAPVASLFYPQSAPPIWNSKTSTWQDATTQAISLQQNGPKDTDTKQVENVEEQTARSHLSANRKHLRIEIPTDEPRHVSPTTGESGSSTVLDSARKTLSGSVCDSSSNHMIAPTESSNVVPENPDGLRHLSQREAALNKFRLKRKDRCFEKKVRYQSRKLLAEQRPRVKGQFVRQDHGVQGS

SEQ ID NO: 24953 - protein, 152 aa, Oryza sativa
  Clone ID: TF_OsC261347_1.pep
TLLYQVMRHHRAAVDGRDGGGGTNVGRRRRRRRGWGEVVPVPPPPAEQLHRLLAAVHGGDVERSRLAGGGAAAATAVRPEQQLHDPPVHRRVVHHQHPHRLRPHPLRSHPHTRSSRRSSSNGPRALAAVLAVGVFERGGIATALASPPRAQT

SEQ ID NO: 24954 - protein, 851 aa, Oryza sativa
  Clone ID: TF_OsC1281_24.pep
MGSACEAGTDEPSRDDVKGTGNGILENGHSHKPEEEEWRNGMGEDLPNGHSTPPEPQQTDEQKEHQVQIVRWERFLPVKTLRVLLVENDDSTRQVVSALLRKCCYEDSRGFCASRFPSAVIPAENGLHAWQCLEDLQNHIDLVLTEVVMPRLSGIGLLSKITSHKICKDIPVIMMSSNDSMGTVFKCLSKGAVDFLVKPIRKNELKNLWQHVWRRCHSSSGSGSESGIRTQKCTKPKVDDEYENNSGSNNDNEDDDDNDEDDDDLSVGHNARDGSDNGSGTQFSLNVGQLCQCILMPSACFKTQSSWTKRAVEIDSPQQMSPDQPSDLPDSTCAQVIHPTSEICSNRWLPTANKRSGKKHKENNDDSMGKYLEIGAPRNSSMEYQSSPREMSVNPTEKQHETLMPQSKTTRETDSRNTQNEPTTQTVDLISSIARSTDDKQVVRINNAPDCSSKVPDGNDKNRDSLIDMTSEELGLKRLKTTGSATEIHDERNILKRSDLSAFTRYHTTVASNQGGAGFGGSCSPQDNSSEALKTDSNCKVKSNSDAAEIKQGSNGSSNNNDMGSSTKNAITKPSSNRGKVISPSAVKATQHTSAFHPVQRQTSPANVVGKDKVDEGIANGVNVGHPVDVQNSFMQHHHHVHYYVHVMTQQQQQPSIERGSSDAQCGSSNVFDPPIEGHAANYSVNGSFSGGHNGNNGQRGPSTAPNVGRPNMETVNGIVAPFLGLKSTAGLPVSRRSTNSGFGNVSNGGRIKCMQVWPIEGIKKFETLSYLPPLTVEDLLKQIEYLLRSKWVPCLEFSKVGFVYRENHRSPGYYDGRYWTMWKLPMFGCTDATQVLKELEEAKKAYPDAF

SEQ ID NO: 24955 - protein, 1024 aa, Oryza sativa; identical to SEQ ID NO: 17680
  Clone ID: TF_OsC53858_1.pep

SEQ ID NO: 24956 - protein, 660 aa, Oryza sativa
  Clone ID: TF_OsC1281_22.pep
IPAENGLHAWQCLEDLQNHIDLVLTEVVMPRLSGIGLLSKITSHKICKDIPVIMMSSNDSMGTVFKCLSKGAVDFLVKPIRKNELKNLWQHVWRRCHSSSGSGSESGIRTQKCTKPKVDDEYENNSGSNNDNEDDDDNDEDDDDLSVGHNARDGSDNGSGTQSSWTKRAVEIDSPQQMSPDQPSDLPDSTCAQVIHPTSEICSNRWLPTANKRSGKKHKENNDDSMGKYLEIGAPRNSSMEYQSSPREMSVNPTEKQHETLMPQSKTTRETDSRNTQNEPTTQTVDLISSIARSTDDKQVVRINNAPDCSSKVPDGNDKNRDSLIDMTSEELGLKRLKTTGSATEIHDERNILKRSDLSAFTRYHTTVASNQGGAGFGGSCSPQDNSSEALKTDSNCKVKSNSDAAEIKQGSNGSSNNNDMGSSTKNAITKPSSNRGKVISPSAVKATQHTSAFHPVQRQTSPANVVGKDKVDEGIANGVNVGHPVDVQNSFMQHHHHVHYYVHVMTQQQQQPSIERGSSDAQCGSSNVFDPPIEGHAANYSVNGSFSGGHNGNNGQRGPSTAPNVGRPNMETVNGIVDENGAGGGNGSGSGSGNDLYQNGVCYREAALNKFRQKRKVRNFGKKVRYQSRKRLAEQRPRIRGQFVRQSGQEDQAGQDEDR

SEQ ID NO: 24957 - protein, 539 aa, Oryza sativa
  Clone ID: TF_OsC15088_1.pep
MSPDADAAAAAAAGGEGAAAAGVGTAGEGRGVIRWDQILPRRSLRVLLVEHDDSTRQVVTALLRKCGYRVAAVADGMKAWGVMRERAYAFDLVLTEVTMPTLSGIELLSRIVASDECKNIPVIMMSSQDSIGTVLRCMQKGAVDFLVKPVRKNELRNLWQHVWRRHAMNSQTNASENNAASNHLSANGGNGSKTGEHSDEESDAQSSGSKREVEIQSAENSLRSSDPGKDLLVVAQTTADRKCKSSALENNAVMENNLSENSKGTATGHAESCPSHFVEINLEKQHHLNGYTNHKLNEKDIFNHSNSSAFSRYGNKRIESSAQRPFPPSFRVVHQQPVYDKNPQSSRVLLSCEHNTRESTVQAQVPLDRSTEDAGTSSSSPRKDSLTHPSYGFIPVPIPVENHQLHHSRQILRESGEPVDLAKAHMERINQSASCSQDIRKGSGCTGSGETDANTNTVIALESGNESGVQNCSNNVLDGDRSRREAALLKFRMKRKDRCFEKKVRYHSRKKLAEQRPRVKGQFVSQKLKSAITTEAETD

SEQ ID NO: 24958 - protein, 518 aa, Oryza sativa
  Clone ID: TF_OsC53137_1.pep
MVGAGEGDRVGGGAAVGGGQQFVDRSKVRILLCDSDPSSSREVLRLLCNCSYQVTCAKSPRQVINVLNCEAGEIDIILAEVDLPVSKCFKMLKYIARNKELRHIPIIMMSNRDEVSVVVKCLRLGAAEYLVKPLRMNELLNLWTHVWRRRRMLGLSEKNFFNDNFELALSEPSDANTNSTTLLSDDTDDKPKENINQETSTSNQHEYESNPSDAEPKQKGTPEGLLVSTEGGDQASSPGVMFSRPIKTNLRVAESSAFLAYVKSSTPTTSSFDSELQKGGNRLDSSDHRGNFSSTTDRSDTGTDVNIRDKEAFEMPVQYPVVCFSSSNLHLERSNEGQNDASGTPPVYHFPFYYPGMMDHGMTHPPVQNFQGNINNAQVHTPQTLLPQYNVYPQCHGVSMMPPFQYNPAGMSIQSNQLPTQNMWPQASSTPMPEETCSRSERRAAALAKFRLKRKERCFDKKVRYVNRKKLAETRPRVRGQFVRQANYTDITSTGDDISEDEDDDPSSREVEMVSSPE

SEQ ID NO: 24959 - protein, 644 aa, Oryza sativa
  Clone ID: TF_OsC50511_1.pep
EFLHTHTTRSLSSSSSSAVIPAENGQQAWTYLEDMQNSIDLVLTEVVMPGVSGISLLSRIMNHNICKNIPVIMMSSNDAMGTVFKCLSKGAVDFLVKPIRKNELKNLWQHVWRRCHSSSGSGSESGIQTQKCAKSKSGDESNNNNGSNDDDDDDGVIMGLNARDGSDNGSGTQAQSSWTKRAVEIDSPQAMSPDQLADPPDSTCAQVIHLKSDICSNRWLPCTSNKNSKKQKETNDDFKGKDLEIGSPRNLNTAYQSSPNERSIKPTDRRNEYPLQNNSKEAAMENLEESSVRAADLIGSMAKNMDAQQAARAANAPNCSSKVPEGKDKNRDNIMPSLELSLKRYHTPVASNQGGTGFMGSCSLHDNSSEAMKTDSAYNMKSNSDAAPIKQGSNGSSNNNDMGSTTKNVVTKPSTNKERVMSPSAVKANGHTSAFHPAQHWTSPANTTGKEKTDEVANNAAKRAQPGEVQSNLVQHPRPILHYVHFDVSRENGGSGAPQCGSSNVFDPPVEGHAANYGVNGSNSGSNNGSNGQNGSTTAVNAERPNMEIANGTINKSGPGGGNGSGSGSGNDMYLKRFTQREHRVAAVIKFRQKRKERNFGKKVRYQSRKRLAEQRPRVRGQFVRQAVQDQQQQGGGREAAADR

SEQ ID NO: 24960 - protein, 232 aa, Oryza sativa; identical to SEQ ID NO: 17689
  Clone ID: TF_OsC22028_1.pep

SEQ ID NO: 24961 - protein, 836 aa, Oryza sativa
  Clone ID: TF_21735411.pep
MLLSTWTPGCFQGNKILLRSLITWYYLEFMPKLRPFYFLFYLTLPSCATDSPPISDKSSSIFLPLAQQQQLVHWMMPPRFRCQDYLLPLLLALSPAAAPARQVEYHHCHCDGGGGGGGGGLWSMDSIFRWQKVSDLLIAAAYFSIPLEILYFVAGLRHLLPFRWVLVQFGAFIVLCGLTHLLTAFTYEPHPFMVVLLLTTAKFLTALVSFLTAITLLTLIPQLLRVKVRESLLWLKARELDREVVLMKRQEEASWHVRMLTHEIRKSLDRHTVLYTTLIELSRVLGLTNCAVWMPAAGEMCLTHELRRDGGGEDGVVGVDDADVVEVRGSDGVKLLGPDSVLAAASGGKEEGTGAVAAIRMPMLKVSDFKGGTPEVIQTSYAVLVLVPPAGKSWGRHEMEIVEVVAGQVAVALSHATLLEESRAMRDRLAEQNRELLQARRDALMANEARQAFQGVMSQGMRRPIHSILGLVSMVQEEALAPEQRLVVDTMARTATVVSTLVNDVMEMSADSRERFPLETRPFHLHAMIRDAACVARCLCDFRGFGFAVHVENALPDLVVGDERRIFHVLLHMVGNLIGRTEPGHVTLRVRAADDDVLDDRLGQRWDPWWPSYSTGYSSVKFVIGVKRQQNGDAGSPLSRRPSGKGIDLRLSFSMCRKLVQMMQGNIWAILDPQGLPESMTLVLRFQLQSPLTSSSLGGSFEQKHSSPSCQIAGLKVLLIDDDDDINLVVARKLLEKLGCVVSSPPSGSGFLSSVGSSAAAFQLVMVNLEMKRVKALDVATRISQYRSGRWPIVMAMASDQKAWEKCAQSGINGILKKPVILQELKDELARILQST

SEQ ID NO: 24962 - protein, 799 aa, Oryza sativa; identical to SEQ ID NO: 17688
  Clone ID: TF_OsC945_1.pep

SEQ ID NO: 24963 - protein, 170 aa, Oryza sativa; identical to SEQ ID NO: 17684
  Clone ID: TF_OsC50061_1.pep

SEQ ID NO: 24964 - protein, 201 aa, Oryza sativa
  Clone ID: TF_OsC51348_1.pep
MAVAIEAPFHVLAVDDSLPDRKLIERLLKTSSFQVTTVDSGSKALEFLGLHDHEDSPISTQSDQQEVGVNLIITDYCMPGMTGYDLLKKIKESSYLRDIPVVIMSSDNIPSRINRCLEEGADEFFLKPVRLSDMSKLKPHILKSRCKEHYQQEQNLQSNSESNNSSNPTSENSSSSTSTNSHKRKAVDEEILPHTIRPRHS

SEQ ID NO: 24965 - protein, 763 aa, Oryza sativa; identical to SEQ ID NO: 17690
  Clone ID: TF_OsC569_1.pep

SEQ ID NO: 24966 - protein, 156 aa, Oryza sativa
  unsure (1)..(156): unsure at all Xaa locations
  Clone ID: TF_OsC115733_1.pep
ARGDLLKAIXALGSPNPIPVVVMSSENEPQRISRCLTAGAEDFILKPLKMNDVQRLRKCSGATRPKSAVAGDDDRCCNTAKKAAAAAAATPEQQQQQQRSPHVFWFLQVMNASSFEVSHYFQLIFKLILLAYAVLCLSQLLHRWSNGSSLLSLWCA

SEQ ID NO: 24967 - protein, 132 aa, Oryza sativa
  Clone ID: TF_OsC36724_1.pep
MVFQTQGSNLRALLVEDIKVNRMILSQMLRKFQVETTVVQNGKEAVELFLGGETFDIVLTDNLMPIMTGPEAISKIRAMGATDVMDCGVSVDANSMEEFKDAGADLCVPKLKLEILEHILQETRSKKNKSSA

SEQ ID NO: 24968 - protein, 104 aa, Oryza sativa
  Clone ID: TF_LIB3433-027-P1-K1-D5.pep
MPSTHTICIFSSTILAFSLEPLSFGLSEKRNIFVQALAFFMGGAIEAPVHVLAVDDNPPDRELIERVLKTSSFQVTTVDSGSKALEFLGLHDHEDSPISTQSDQ

SEQ ID NO: 24969 - protein, 445 aa, Oryza sativa
  unsure (1)..(445): unsure at all Xaa locations
  Clone ID: TF_OsC6964_1.pep
FVRKMEALDDTSPENIEVTANSKNTMPYNTLSGLEVANNRKTLESFRMFKDSSDAIDSVNLLVTVEDTGIGITKDAQTRIFTPFMQADGSTSRTYGGTGIGLSITKRLVELMGGEIGFXVSKPGVSSTFSFTAIFKENRKDPGDIKRYCPEPTPPDFQGMRALVVDGRCARAEVTMYHLRRLGIQCDLAATSESALSALLESCNSSVKSSLNMVLVDKEAWGEDSGLAFFRCLIDLRLKGTLKSWQTMPKFFLLAGSITPADSDCLRLAGYSNSIRKPLRLSTVAACLSKALGVGLTGRRSRDNSLVLRSVLTGKNILVVDDNAVNRIVAAGALKKYGAIVTCVDSGKEAISRLQPPHKFDACFMDVQMPEMDGFEATRLVRSVESKINDTIQAASAKNPFGDNNIAKQKSYAVNREQKFDWTAIYVSFDNWMKSISTSRLQPCA

SEQ ID NO: 24970 - protein, 852 aa, Oryza sativa
  Clone ID: TF_OsC18122_1.pep
CRRISAVLLQKKKKKKKEQFERQQGWAIKKMYSSSNKKQSSPGPGPGDAAVAEIREPAEEYAPVIFAQDAYKHVISFDMLSGNEDRDNILRARKSGKGVLTAPFKLLNNRLGVILTYTVYKYELPAYARPHERIQAAIGYLGGIFDIQALVEKLLKQLASQESIMVNVYDTTNESPISMYGDDTGSGMCHVSVLNFGDPSRKHEMHCRFEKKPPWPWLAITSSFGTLVIALLTGHIFQATVHRIAKVEDDFHKMSELKKRAEDADVAKSQFLATVSHEIRTPMNGVLGMLQMLMDTDLDTTQQDYVRTAQASGKALVSLINEVLDQAKIESGKLELETVPFDLRTVCDDILSLFCGKAQEKGLELAVYVSDQVPQILIGDPGRIRQIITNLVGNSIKFTERGHIYLTVHVVEEVMSCLEVETGIQNTNTLSGYPVANRRCSWESIRLFNRELHSSEKSFAPIASDSISLVISVEDTGVGIPFEAQSRVFTPFMQVGPSIARIHGGTGIGLSISKCLVGLMKGEIGFASKPHVGSTFTFTAVLMRAHCKGNDIKSSEFKGINALVVDHRPVRAKVTKYHLQRLGVKTELTAELNQFISKLNSGSLTAKLVLIDKETWLKESHCTPLLVNKLRNNDKPDSPKLFLLGSSASSPKGGSDTSREHNLNVIMKPLRASMLQVSLRRALGGVDKVHCRNGVVGNSTLGSLLHKKQIIVVDDNIVNLKVAAGALKKYGAEVTCADSGKKAITLLKPPHNFDACFMDIQMPEMDGFEATRRIRVMERDLNERIERGEAPPECASIQRWRTPILAMTADVIQATHEECLKSEMDGYVSKPFEGEQLYSEVARFFQNHDQVE

SEQ ID NO: 24971 - protein, 176 aa, Oryza sativa
  unsure (1)..(176): unsure at all Xaa locations
  Clone ID: TF_LIB4309-004-Q1-K1-F10.pep
MTVEERQGRVGGHGVSGGGGGRDQFPVGMRVLAVDDDPTCLKILENLLLRCQYHVTTTGQAATALKLLRENKDQFDLVISDVHMPDMDGFKLLELVGLEMDLPVIMLSANXETQTVMKGITHGACDYLLKPVRLEQLRTIWQHVIRRKNCDAKNRGNDDDAGQKAQGMNNEVRVLV

SEQ ID NO: 24972 - protein, 247 aa, Oryza sativa; identical to SEQ ID NO: 17698
  Clone ID: TF_OsC51348_4.pep

SEQ ID NO: 24973 - protein, 252 aa, Oryza sativa; identical to SEQ ID NO: 17672
  Clone ID: TF_OsC41886_1.pep

SEQ ID NO: 24974 - protein, 291 aa, Oryza sativa
  unsure (1)..(291): unsure at all Xaa locations
  Clone ID: TF_OsC41886_2.pep
TPKNRTIASRIHSFEKLMAQRVGHSADGVFVMIVDEDKSHANFARGMLSSLNFHVIVYSSPVNALVFLENNAQDVAVVLAAVDMKQLSGFQFLEAARVKRQDLQVIMMSAETTMSTMMRCVKLGARFLVKKPLNEETVGNLWQHVDLKVLKMEKIRELLQDPGQETVITISYEEQFSGETEADENNEEEEVNSFEAKKADSVKVQSDEKGHDNAKISNTAAAEGSDEKVSSGDGHVVPKAYNNVNVEESIGSNNTSGEQVSDKIKSDARVXVILVDYPDFEDDETKKPTST

SEQ ID NO: 24975 - protein, 152 aa, Oryza sativa
  Clone ID: TF_LIB4371-041-R1-K1-A4.pep
ARAWTPPPSPTGCASSSWTTTPPGSRSSRRCSGSVPTKKYRLYLSRLQKQNEERILGAARQDFSHKGTSENLNLRSSFQEQPSNIANGYPHASQNIQTQANMLDSQLEDTKSTVPLPVPDKKRTLASDAADSQNVTSASSLGGGSVFQKHGR

SEQ ID NO: 24976 - protein, 95 aa, Oryza sativa
  unsure (1)..(95): unsure at all Xaa locations
  Clone ID: TF_OsC1528_1640.pep
LVTWPSLVSCGLGAGEVTARVEGVGGAGQQCPSCAVDKCKEELSRCHDXHRWHKVCEALSKLPVVVADCEMLFCQQCISLGSIWDMAGNLHKHEP

SEQ ID NO: 24977 - protein, 237 aa, Oryza sativa
  Clone ID: TF_OsC99563_1.pep
MADWGPVFIGLVLFILLSPGLLFQIPGKGRIVEFGNFQTSGLSILVHSIIYFALIAIFLLAVNVHMRFYNTMSGRSTIINLSLTNRTAKSQPLLYTCQENGIAWEGSSYVTAGTKTWSPATDPPSDANAVVTACDEAAILLKEEGANCGGAVALEMPAAGEGCSDDDRRERAHSGSSPWGTPLHALRVVVMLAPSSGEEKGRRRSWRAAPRPLPPSCIKGNCFGSRKVPENEMEKGG

SEQ ID NO: 24978 - protein, 1117 aa, Oryza sativa; identical to SEQ ID NO: 17704
  Clone ID: TF_OsC1735_1.pep

SEQ ID NO: 24979 - protein, 157 aa, Oryza sativa
  Clone ID: TF_OsC53012_1.pep
MGRGGGSSSSAAVAAGASSSSSSSSVAAAARRGAGRAGGGAPSGGGGGPRCQVERCGVDLSEAGRYNRRHKVCQTHSKEPVVLVAGLRQRFCQQCSRFHELTEFDDAKRSCRRRLAGHNERRRKSAADTAHGENCRHADQDAGRSHQGTGNPPFQIR

SEQ ID NO: 24980 - protein, 458 aa, Oryza sativa; identical to SEQ ID NO: 17705
  Clone ID: TF_OsC324749_1.pep

SEQ ID NO: 24981 - protein, 469 aa, Oryza sativa; identical to SEQ ID NO: 17710
  Clone ID: TF_OsC11432_3.pep

SEQ ID NO: 24982 - protein, 214 aa, Oryza sativa
  Clone ID: TF_OsC148343_1.pep
MDAPGGGGPRVRGRVGGEPVWDWGNLLDFAVHDDDSLVLPWGDDSIGIEADPAEAALLPPAPSPQPAEAEAEAAGPASLPSSMQAEGSKRRVRKRDPRLVCPNYLAGRVPCACPEIDEMAAALEVEDVATELLAGARKKPKGAGRGSGAAVGGSGGGASRGTPAEMKCQVPGCEADIRELKGYHRRHRVCLRCAHAAAVMLDGVQKRYCQQCGK

SEQ ID NO: 24983 - protein, 513 aa, Oryza sativa; identical to SEQ ID NO: 17711
  Clone ID: TF_OsC8701_1.pep

SEQ ID NO: 24984 - protein, 343 aa, Oryza sativa; identical to SEQ ID NO: 17712
  Clone ID: TF_OsC152916_1.pep

SEQ ID NO: 24985 - protein, 272 aa, Oryza sativa
  Clone ID: TF_OsC1737_1.pep
MSTAAAAAAAQSWCFATVTPRSRATVVASLASPSPSSSSSSSNSSNLPAPFRPRLIRNTPVFAAPVAPAAMDAAVDRLKDGFAKFKTEFYDKKPELFEPLKAGQAPKYMVFSCADSRVCPSVTMGLEPGEAFTVRNIANMVPAYCKIKHAGVGSAIEYAVCALKVELIVVIGHSRCGGIKALLSLKDGAPDSFHFVEDWVRTGFPAKKKVQTEHASLPFDDQCAILEKEAVNQSLENLKTYPFVKEGIANGTLKLVGGHYDFVSGNLDLWEP

SEQ ID NO: 24986 - protein, 753 aa, Oryza sativa
  unsure (1)..(753): unsure at all Xaa locations
  Clone ID: TF_OsC113993_1.pep
MSSGLKKKGLEWDLNDWRWDSNLFLATPSNASPSKCSRRELGRAEGEIDFGVVDKRRRVSPEDDDGEECINAATTNGDDGQISGQRGRSSEDEMPRQGTCSSSGPCCQVDGCTVNLSSARDYNKRHKFYGNYLTCLVRFHFLQEFDEGKKSCRSRLAQHNRRRRKVQVQAGVDVNSLHENHSLSNTLLLLLKQLSGLDSSGPSEQINGPNYLTNLVKNLAALAGTQRNQDMLKNANSAAIASHTGNYVAKGNSLHDSRPHIPVGTESTAEEPTVERRVQNFDLNDAYVEGDENRTDKIVFKLFGKEPNDFPSDLRAQILSWLSNCPSDIESYIRPGCIILTIYMRLPNWMWDKLAADPAHWIQKLISLSTDTLWRTGWMYARVQDYLTLSCNGNLMLASPWQPAIGNKHQILFITPIAVACSSTANFSVKGLNIAQPTTKXEDLDQSSLSFPFVVAEEDXHIRATSETPKDCTEGFPAARFRWLLSFAVDREFCAVIKKLLDTLFQGGVDLDVQSTVEFVLKQDLVFVAVNKRSKPLIDFLLTYTTSSAPMDGTESAAPAQFLFTPDIAGPSDITPLHIAATYSDTAGVLDALTDDPQQLGIKAWKNARDATGLTPEDYARKRGHESYIEMVQNKIDSRLPKAHVSVTISSTTSTTDFTEKHASQSKTTDQTAFDVEKGQQISTKPPLSCRQCLPELAYRHHLNRFLSTRPAVLSLVAIAAVCVCVGLIMQGPPHIGGMRGPFRWNSLRSGPK

SEQ ID NO: 24987 - protein, 138 aa, Oryza sativa
  Clone ID: TF_rsiceg_12459.y1.abd.pep
MEMASGGGAAAAAGGGVGGSGGGGGGGDEHRQLHGLKFGKKIYFEDAAAAAGGGGTGSGSGSASAAPPSSSSKAAGGGRGGGGKNKGKGVAAAAPPPPPPPPRCQVEGCGADLSGIKNYYWRHKVCFMHSKAPRVVVA

SEQ ID NO: 24988 - protein, 400 aa, Oryza sativa; identical to SEQ ID NO: 17701
  Clone ID: TF_OsC300385_1.pep

SEQ ID NO: 24989 - protein, 997 aa, Oryza sativa; identical to SEQ ID NO: 15827
  Clone ID: TF_OsC51748_1.pep

SEQ ID NO: 24990 - protein, 377 aa, Oryza sativa
  Clone ID: TF_OsC952_1.pep
MDWDLKMPVSWDLAELEHNAVPNMAAAASAAEPGIAAVAASRGAPGRPECSVDLKLGGLGEFGAADALKEPAAAAKAPVSSAAAAASVAKVPPSTSTLKRPRGGGGGGGGQCPSCAVDGCKADLSKHRDYHRRHKVCEPHSKTPVVVVSGREMRFCQQCSRFHLLGEFDEAKRSCRKRLDGHNRRRRKPQADSMSSGSFMTSQQGTRFASFTPPRPEPSWPGIIKSEETPYYSHHHHPHPVMTSRQPHFVGSPSSATTAAFSPKEGRRFPFLHEGDQISFGGGGGAAAAATLEISVCQTTVVAPPPPESSSSNKMFSSDGLTTATTTTTTAHHHHHHHQVLDSDCALSLLSSPANSSSVDVSRMVQPSPAAAAGAAP

SEQ ID NO: 24991 - protein, 108 aa, Oryza sativa
  Clone ID: TF_OsC1528_2153.pep
IPVTPLLLILELMQSCRRNPAFYGSCLCKLPAISQMLPKLPKSCPSDLGHLCSSSSPSYLAIGDNDGQLGERLTHLVPPVLVVAPAQLLLALVHRAGHFTGTEATADK

SEQ ID NO: 24992 - protein, 806 aa, Oryza sativa; identical to SEQ ID NO: 17717
  Clone ID: TF_OsC98_3.pep

SEQ ID NO: 24993 - protein, 127 aa, Oryza sativa
  unsure (1)..(127): unsure at all Xaa locations
  Clone ID: TF_8955113.pep
IRYEXXGAXWISLLQALXXXPXGPPTVXITGIDXXVXAXXPSSRLXLVXKXLSXXPCLXKVXXKFXPLXISXXKVXXXHXXIIPGESLAXNXTLXLHHXPDDXVSXANXXDXXLMIXXXLSPKVPTL

SEQ ID NO: 24994 - protein, 216 aa, Oryza sativa; identical to SEQ ID NO: 17719
  Clone ID: TF_OsC1713_4566.pep

SEQ ID NO: 24995 - protein, 163 aa, Oryza sativa
  unsure (1)..(163): unsure at all Xaa locations
  Clone ID: TF_OsC97073_1.pep
VAESPRNXMPLKPIRKMNPHVFIHGVVNGSYNAPFFVTRFREALFHYSAIFDMLETNIPKDNEQRLLIESALFSREAINVISCEGLERMERPETYKQWQVRNQRVGFKQLPLNQDMMKRAREKVRCYHKDFIIDEDNRWLLQGWKGRILFALSTWKPDNRSSS

SEQ ID NO: 24996 - protein, 478 aa, Oryza sativa
  Clone ID: TF_OsC348872_1.pep
METMSYPCSLLIPFSTQFEEISSSSLLLWSPQAEENPHENANMYEFDADHSHDQIHQDHQFLDMMVIQESANEFDGDHSHDQIHQDHEFLETMVIQESANEFDGDHSHDQIHQDHEFLEMMAIQESANDLLQLQDDFSVPNADPLAASFEFDERLAVAGHENGNVVATQEESAGDLLLAGAMAVDAGDAVHASAIMSRLDDLLADIAGRRSCEATSPGDHLAYYFARGLKLRISGAATPASSPPPPAANWSSPAYRMLQELTPFVKFAHFTANQAILEATADDLDVHVVDFNVGEGVQWSSLMSDLAAAGRHRCSTSRTLKLLLLGTITILQPKLVILIEDELSRISKNPPSPSLAAPPPFPEFFSDAVAHFTAVMESTASCLVSYDDEAWLSLRRVGEEVVGPRVEDAVGRYGSLAGGAQMMEGLRAREVSGFSVAQGKMLAGLFGGGFGVVHQEKGRLALCWKSRPLISVSLWCPK

SEQ ID NO: 24997 - protein, 810 aa, Oryza sativa; identical to SEQ ID NO: 17749
  Clone ID: TF_OsC334805_1.pep

SEQ ID NO: 24998 - protein, 477 aa, Oryza sativa
  Clone ID: TF_OsC39025_1.pep
MRMCDDVRFHQTKPSKPHTLARVVFLLAAAALGNVSGAVYHADPAAAVYASLVPGMAVVPGRAPPSAVQIEAARRWKELEKMALRSVNLMVTCAGAIQAGDYAAAAGSLSDAREIFAKMPTTRTGIGRVLTHFADALAERLFPAFPQSAPPPPPPRGEQRELFRGFYEAGPYLKFAHLAANQAILEAFEGCNSVHVIDFALTDGIQWPSLIQALAVRPGGPPFLRITGIGPHAAGNRDELRDVGLRLAEFARSCSVPFAFRGIAADQLDGLRPWMFQVAPGEAVAINSVLQLHRLLVDQDAAAAASFPAPIDGVLDWVASMNPRVFTAISRHGGGDGAGNPLAEAYLQGEIADIVSREGSSRVERHEQMPRWVERLRRGGMTQLPLGATGLWQAAMQLREFSGAGFGVQENGGFLTLTWHSQRLYSASAWRATAGKKMTMMASGAADAMEESQNSNTNGGGGGSSGGGHGALNQIMQ

SEQ ID NO: 24999 - protein, 487 aa, Oryza sativa
  Clone ID: TF_OsC545_37.pep
MVRKRPASDMDLPPPRRHVTGDLSDVTAAAAGAPTLSASAQLPALPTQLPAFHHTDMDLAAPAPPAPQQVAAGEGGPPSTAWVDGIIRDIIASSGAAVSVAQLIHNVREIIRPCNPDLASILELRLRSLLNSDPAPPPPPPSHPALLPPDATAPPPPPTSVAALPPPPPAQPDKRRREPQCQEQEPNQPQSPKPPTAEETAAAAAAAAAAAAAAAKERKEEQRRKQRDEEGLHLLTLLLQCAESVNADNLDEAHRALLEIAELATPFGTSTQRVAAYFAEAMSARLVSSCLGLYAPLPSPSPAGARVHGRVAAAFQVFNGISPFVKFSHFTANQAIQEAFEREERVHIIDLDIMQGLQWPGLFHILASRPGGPPRVRLTGLGASMEALEATGKRLSDFADTLGLPFEFCPVADKAGNLDPEKLGVTRREAVAVHWLRHSLYDVTGSDSNTLGPLPSASAVRPPPLVNSGPPGIMATLHPILLIDIVT

SEQ ID NO: 25000 - protein, 590 aa, Oryza sativa
  unsure (1)..(590): unsure at all Xaa locations
  Clone ID: TF_OsC65210_1.pep
PWLFPDLFLLHFRRHQLLRRRRHRHRRCRRRGARAAVREHRARSRRVLRRGQLRPHDSAFLKGMEEANKFLPTENKLIIDLEASSENNXQGSRGGQEVPAQRRQASVDVVVATASGGGGRGRKNPYDDEELELEGGRSSKQTAVQGDDVAARAMFDKVMMPSHENCTEMMEKLRIAMKEEAAKNEASAGGKGGNGKVKGGRRGGRDVVDLRTLLIHCAQAVATDDRRSATELLKQIKQHAKPTGDATQRLAHCFAEGLQARIAGTGSLVHQSLVAKRTSAVDILQAYQLYMAAICFKKVSFIFSNQTIYNASLGKKKIHIVDYGIQYGFQWPCFLRRISQREGGPPEVRMTGIDLPQPGFRPTERIEETGHRLSKYAQEFGVPFKYNAIAAVKMESVRKEDLNIDPDEVLIVNCQYQFKNLMDESVVIDSPRDIVLSNIRKMQPHVFIHAIVNGSFSAPFFVTRFREALFFYSALFDVLDATTPRESEQRLLIEQNIFGRAALNVIACEGIDRVERPETYKQWQVRNQRAGFKQLPLNPEIVQVVRNKVKDCYHKDFVIDIDHQWLLQGWKGRILYAISTWTPNDALSYF

SEQ ID NO: 25001 - protein, 738 aa, Oryza sativa; identical to SEQ ID NO: 17758
  Clone ID: TF_OsC65210_2.pep

SEQ ID NO: 25002 - protein, 711 aa, Oryza sativa; identical to SEQ ID NO: 17760
  Clone ID: TF_OsC2627_1.pep

SEQ ID NO: 25003 - protein, 431 aa, Oryza sativa
  unsure (1)..(431): unsure at all Xaa locations
  Clone ID: TF_OsC364342_1.pep
MGVISGGGGGDDDGYGGGDGMLRSLHSSSSSDTDNNSGGCKNNGGGGGEAAAAVEGGGDQRAVAAAAPSTRDLLLACADLLQRGDLPAARRAAEIVLAAAASPRGDAADRLAYHFARALALPVAPFLRFAHLTANQAILEAVDGARRVHILDLDAVHGVQWPPLLQAIAERADPALGPPEVRVTGAGADRDTLLRTGNRLRAFARSIHLPFHFTPLLLSCATTAPHHVAGTSTGAAAAASTAAAATGLEFHPDETLAVNCVMFLHNLAGHDELAAFLKWVKAMSPAVVTIAEREAGGGGGGGDHIDDLPRRVGVAMDHYSAVFEALEATVPPGSRERLAVEQEVLGREIEAAVGALRRPVVARHRXWGGAARAAGFAARPLSAFAVSQARLLLRLHYPSEGYLVQEARGACFLGWQTRPLLSVSAWQPSSS

SEQ ID NO: 25004 - protein, 572 aa, Oryza sativa
  unsure (1)..(572): unsure at all Xaa locations
  Clone ID: TF_OsC13353_1.pep
MDLHQLLKYRLTGANVVYEIPTENNLQNSPWQANPLKYEFSDSPYTPLSSQFECDNLSALTNTPDNQSSTETISAQPISPLEADSSYRQAGILLQENIQVGADPLYATSRHNMQHALREIETVLMAPDTDDATTSTKHEFEEIKPAQLVRQRSRTWSHESRQPLPGVGRSQFASGGYPTASYEFRPEKRQRELREDPQIIVKQLLTRCAEALSEDRTEEFHKLVQEARGVVSINGEPIQRLGAYLLEGLVARHGNSGTNIYRALKCREPESKELLSYMRILYNICPYFKFGYMAANGAIAEALRTENNIHIIDFQIAQGTQWITLIQALAARPGGPPRVRITGIDDPVSEYARGEGLDIVGKMLKSMSEEFKIPLEFTPLSVYATQVTKEMLEIRPGEALSVNFTLQLHHTPDESVDVNNPRDGLXPDGERAVPEGDYFGRAGVTHQHNAFLDEVWGDHGVLLRHVRVDRXPTCRGTTRRGSAWSSTASPRXIVNIIACEGKDRVERHELLGKWKSRLTMAGFRPYPLSSYVNSVIRKLLACYSDKYTLDEKDGAMLLGWRSRKLISASAWH

SEQ ID NO: 25005 - protein, 619 aa, Oryza sativa; identical to SEQ ID NO: 17744
  Clone ID: TF_OsC134269_1.pep

SEQ ID NO: 25006 - protein, 535 aa, Oryza sativa
  Clone ID: TF_OsC82607_1.pep
MSMQASNRPYRYPDNSQIPYYSRSSMHVGQNGTYHVQQNHEDLYASSDDGSQNGNSKAQGLQAQYCTLDSSSGNFVYPAHSSTSSHISGSPISQQDSHSEHTSGSPASASCVTEVPGLRFTTIEEIENAMFGPEPDTVSSDCSLLTDSAFYQDNWREHLGINTGDLKQVIAACGKAVDENSWYRDLLISELRNMVSISGEPMQRLGAYMLEGLVARLSSTGHALYKSLKCKEPTSFELMSYMHLLYEICPFFKFGYMSANGAIAEAVKGENFVHIIDFQIAQGSQWATMIQALAARPGGPPYLRITGIDDSNSAHARGGGLDIVGRRLFNIAQSCGLPFEFNAVPAASHEVMLEHLDIRSGEVIVVNFAYQLHHTPDESVGIENHRDRILRMVKGLSPRVVTLVEQEANTNTAPFFNRYLETLDYYTAMFEAIDVACPRDDKKRISTEQHCVARDIVNLIACEGAERVERHEPFGKWRARLSMAGFRPYPLSALVNNTIKKLLDSYHSYYKLEERDGALYLGWKNRKLVVSSAWR

SEQ ID NO: 25007 - protein, 197 aa, Oryza sativa
  Clone ID: TF_OsC364882_1.pep
MDHVGNSGLAALEGGGAGNPPEPAPHLGHPANEGSTSTKRGARAARGGDSWRGGVRGGGAGGAARAGAAVGGADESGRHGAGGVVRPCLFLLLAQEAALRHLCVAAGGGAPPPHSVVVCLDWIIGVENCINQLALFTVRLLLLASIIIVIQDAARLNLQPARRCHRSSPRPLAAATAPAPIIPPVTAAAEGDKKRER

SEQ ID NO: 25008 - protein, 599 aa, Oryza sativa
  Clone ID: TF_OsC56535_1.pep
MIISMANPEDFFWEALLKENEAPSPPPVFFDLPATPLANSDGSTDPSSLLDNQLLSYVTRMLMEDEMGSSAAVTNLQCVNRGSTEEANNMLPGSEVVRAFSKGMGEASKLLPRNNSFRTLETVDQVSSDGHCRGGKKKNHDRDEQQLEEELGRSSKLAAMTNAGTEEAGARELLDELMLHAHETCIKDMEKLRIDMDNEAEKTINKKGKKGSSSKVVDLRLLLIQCAQAMATDNQQSAGELLKKIKQHALATGDAMQRVAHYFAKGLEARLAGRGKHLYQNQMRMSLVEYLKVYKLYMAACCFTKVALMFAAMTIMQAVQGKKRLHIVDYGPRCGLHWPDLLRRLGSREDGPPEVRITIVDIPQPAFRPFQRIEEAGHCLSSCANEFRVPFRFQAVVAAKWETVGAEDLHIEPDEVLVVNDLWSFSALMDESIFCDGPNPRDVALRNISKMQPDVFIQGIINGGYGASFLSRFRGALLYYSALFDMLDATTPRDSGLRLALEQNVLGPYALNAIACEGADLVERPEKYKQWQARNHRAGMQQLKLRPDIVDTIRDEVNKYHHKDFLLGEDGQWLLQGWMGRILFAHSAWVRQSQDTSSG

SEQ ID NO: 25009 - protein, 414 aa, Oryza sativa; identical to SEQ ID NO: 17777
  Clone ID: TF_OsC220696_1.pep

SEQ ID NO: 25010 - protein, 524 aa, Oryza sativa; identical to SEQ ID NO: 17770
  Clone ID: TF_OsC98324_1.pep

SEQ ID NO: 25011 - protein, 476 aa, Oryza sativa
  unsure (1)..(476): unsure at all Xaa locations
  Clone ID: TF_OsC1713_5478.pep
MVQDEGSSSSVTSSPLHNFSNMPLHPAAAASPTPPWMVRELRSDERGLCLIHLLLNCAAAAAAGRLDAANAALEHIASLAAPDGDAMQRVAAAFAEALARRALRAWPGLCRALLLPRASPTPAEVAAARRHFLDLCPFLRLAGAAANQSILEAMESEKIVHVIDLGGADATQWLELLHLLAARPEGPPHLRLTSVHEHKELLTQTAMALTKEAERLDVPFQFNPVVSRLDALDVESLRVKTGEALAICSSLQLHCLLASDDDAAAVAGGDKERRSPESGLSPSTSRADAFLGALWGLSPKVMVVAEQEASHNAAGLTERFVEALNYYAALFDCLEVGAARGSVERARVERWLLGEEIKNIVACDGGERRERHERLEXRWARRLEGAGFGRVPLSYYALLQARRVAQGLGCDGFKNSTLGVAISTCRKKRPRSSSPCRKFHGIGSRWRGVSKFHQTSAKVGSSNLKSVPALLSTVTA

SEQ ID NO: 25012 - protein, 490 aa, Oryza sativa
  unsure (1)..(490): unsure at all Xaa locations
  Clone ID: TF_OsC1517_1452.pep
HRGLRPQLRIPVARSVQVSVGEGRRAAGGEDYGHRLPAAGVPASRPDRGDRPAAEQLRAPIRRAIQVPSHCCKVGDGPPRGPPPRPRRRRRRRRRGARGELPPLLERPAGRERGCGQPEPQRHGAQQHPRHEASRVRPVRRQWRVRRALLPDALQGDALLLLVAXSTCWTPPSRATTTSGCSSSENFIFFFATIVXACVLFCLLTIYYSAETLKLIVAGLLLEELLISRIRFIFFSNXRGGDIYIEQGLLTSAEGVHFTHTTLQTRVTQPVGINHVGRPPSFHDKAFRKPTQVYHMPTRGVPDQQQFYPSCFSDFKFEGVRRYSHRVHEYRDATRWLQGDMAELAPTWRLRGCHVGRREVDDDAGRNGRXRTTAASGGANHGDTGESEHTGWLHETRGDEPTARIRLRKLDGGKSRRRQLAGREEGNGDEVTRGRFPAVRASTRLRESDASVGLGGATPSEAGDERVLRSSSGDGGEHTASDGNGRGGAG

SEQ ID NO: 25013 - protein, 709 aa, Oryza sativa
  unsure (1)..(709): unsure at all Xaa locations
  Clone ID: TF_OsC1321_1.pep
MRAALFGAERSGVVDHGGGDKEELFWPAGKGGLVVVEPRSVLDCTRSPSPPYSTSTLSSSLGGGSADSTGVAAVSESSTAAAGATKWGAPGEHGGGGKEEWGGGCELPPIPGALDVGLVGGEGWDATATLGNAAGPDQSFLNWIIGAAGDLEQPGPPLPVLQQPLIDNAGFGIPAVDTMGFSLDHPLSGVASDLSSSGAHTATGGGGKASLGFGLFSPEATSLEQPPPSMLFHEGIDTKPPLLGAQPQFLLNHYQPQPPNPAAALFMPLPPFPEHNHQSPHLQPPLKRHHAIPDDLYLARNQQQSSAVAPGLAYSPPLHGPAPFQLHPSPPPIRGAMKSTAAEAAQQQLLDELAAAAKATEAGNSVGAREILARLNQQLPQLGKPFLRSASYLKEALLLALADSHHGSSGVTSPLDVALKLAAYKSFSDLSPVLQFTNFTATQALLDEIGGMATSCIHVIDFDLGVGGQWASFLQELAHRRGAGGMALPLLKLTAFMSTASHHPLELHLTQDNLSQFAAELRIPFEFNAVSLDAFNPAEXISSSGDEVVAVSLPVGGCGRAPALPAILRFVKQLCPKVVGPIVHGGVRADLPVSQHFQYCFESCGFLADSLDAAGIDADSACKIERFLIQPRVEDAVIGRHKAQKAIAWRSVFAATGFKPVQLSNLAEAQADCLLKRVQVRGFHVEKRGAALTLYWQRGELVSISSWRC

SEQ ID NO: 25014 - protein, 944 aa, Oryza sativa
  unsure (1)..(944): unsure at all Xaa locations
  Clone ID: TF_OsC112554_1.pep
MPFGGSAREGHAGTLLQHHLIHGVGLAAAGKLVSSSSAAAAAAGAGGFWEPRSVLDHRHSPSPSPPTSASTLSSPLADVAALAGANAKNVSVSPPPPGWGTGGGGGGGEEVVAAKEEWVHQLTPLDMGLGAGEGWDAAGNVLSDAAAAATSGMAPDNTFLRWIIGGGEDASAAMAGVMDPPVLELDHGGGGXRRRARRVRAVRAAAGXEDTKPVVPFAAGHPPPNFLLQHHHHHPQPHAAFFGAHHPSFDAAPPPSKRHHPMAAAPAPKLPPFPAGGFVPALKPKAEAANDEAAAAVEQLAEAAKLAEAGDAFGAREILARLNYRLPAAPTAGTPLLRSAFYFKEALRLTLSPTGDAPAPSASTPYDVVVKLGAYKAFSEVSPVLQFAHLTCVQAVLDELGGAGCIHVLDFDIGMGEQWASLMQELAQLRPAAALKVTALVSPASHHPLELQLIHENLSGFAAELGVFFHFTVFNIDTLDPAELLANATAGDAVAVHLPVGPAHAAATPAVLRLVKRLGAKVVVSVDRGCDRSDLPFAAHLFHSFHSAVYLLESIDAVGTDPDTASKIERYLIHPAIEQCVVASHRAASAMDKAPPPPWRAAFAAAGFAPVQATTFAESQAESLLSKLGSASASACADAECHVAMVLYCPLIKERERKRWNVHLVIVLVELNTPQAEKNQREVGGYGGEKNKILSEYNLLPLPVLEMQRKGGNHGVKRPCFTEMAAKHLRVRTGTSRTAAATLDGYTTLTWDSAPEWPWHRMHKPDRLRWAHWRVTGEPQCAAGAVAIGQASGHTGVRDTAGANWQETCIVVTEMDVKLADKFRKKWYHSSKLQKRRCTVGLIKQDLKVQNQGGESEASRHKGLQISFRQVQISLRKPNRKCKHSGQTVKLINENCYYLSTKRNNLKIKEVNYICYIYAEELHPLKVMFRNTQAKICQIDVQKS

SEQ ID NO: 25015 - protein, 447 aa, Oryza sativa
  Clone ID: TF_OsC48106_1.pep
KKKPVPSFDSLCLGAARYGTREQLPATRQTAQAASPSRARQRTGEEEEAAAETRGLRLLSLLLRCAEAVAMDQLPEARDLLPEIAELASPFGSSPERVAAYFGDALCARVLSSYLGAYSPLALRPLAAAQSRRISGAFQAYNALSPLVKFSHFTANQAIFQALDGEDRVHVIDLDIMQGLQWPGLFHILASRPTKPRSLRITGLGASLDVLEATGRRLADFAASLGLPFEFRPIEGKIGHVADAAALLGPRHHGEATVVHWMHHCLYDVTGSDAGTVRLLKSLRPKLITIVEQDLGHSGDFLGRFVEALHYYSALFDALGDGAGAAEEEAAERHAVERQLLGAEIRNIVAVGGPKRTGEVRVERWGDELRRAGFRPVTLAGSPAAQARLLLGMYPWKGYTLVEEDGCLKLGWKDLSLLTASSWEPTDGDADADVAVAGDTPHESHDS

SEQ ID NO: 25016 - protein, 544 aa, Oryza sativa; identical to SEQ ID NO: 17787
  Clone ID: TF_OsC84233_1.pep

SEQ ID NO: 25017 - protein, 986 aa, Oryza sativa; identical to SEQ ID NO: 17791
  Clone ID: TF_OsC54001_3.pep

SEQ ID NO: 25018 - protein, 715 aa, Oryza sativa; identical to SEQ ID NO: 17794
  Clone ID: TF_OsC1321_2.pep

SEQ ID NO: 25019 - protein, 560 aa, Oryza sativa; identical to SEQ ID NO: 17795
  Clone ID: TF_OsC340632_1.pep

SEQ ID NO: 25020 - protein, 617 aa, Oryza sativa; identical to SEQ ID NO: 17796
  Clone ID: TF_OsC4431_1.pep

SEQ ID NO: 25021 - protein, 593 aa, Oryza sativa; identical to SEQ ID NO: 17782
  Clone ID: TF_OsC545_35.pep

SEQ ID NO: 25022 - protein, 493 aa, Oryza sativa; identical to SEQ ID NO: 17789
  Clone ID: TF_OsC33690_2.pep

SEQ ID NO: 25023 - protein, 603 aa, Oryza sativa; identical to SEQ ID NO: 17801
  Clone ID: TF_OsC305550_1.pep

SEQ ID NO: 25024 - protein, 247 aa, Oryza sativa
  Clone ID: TF_OsC138508_1.pep
SKALADRRVPATSLKVTVVADPTSPFTPAMTQSLAATCERLKKLAQQAGIDFRFRAVSCRAPEIEASKLGCEPGEALAVNLAFTLSRVPDESVSPANPRDELLRRVRALGPRVVTLVEQELNTNTAPMAARFSDASAHYGAVLESLDATLGRDSADRTRAEAALASKVANAVGREGPDRVERCEVFGKWRARFGMAGFRAVAIGEDIGGRERARAGPARPGRDGTPDGGRLGVGWMGRVVTVASAWR

SEQ ID NO: 25025 - protein, 584 aa, Oryza sativa
  unsure (1)..(584): unsure at all Xaa locations
  Clone ID: TF_OsC1517_1409.pep
MAAAPKPEELVVAIEQPFSPSLFLDLPPTPHHDDDPNNVNDDLLLPFISRILMEDDIDDKFFYQFPDHPALLQAQQSYAQILHAPATSSSSDDTTINNNTTNSTSVPDTLAMPDHDADTQSAPDDMEMLYMAFLKGREEATKFLPTNNTLFSGFKAEPVLDIQPTFTFGPSGGGRGRKNRHAEEDDLETETSRSSKLMAPEHDDAAAADEIFDEIILNGYQMIIKGIDELRVAMGSQSQADKNGRRASRAKTAVVDLHTLLIHCAQAVATGDWRSATELLKQIKQNSSARGDATQRMACCFAEGLEARLAGTGSQMYQSLVAKRTSTVDFLKAYKLFTAACCIKKVSVIFSNKTIYNAVAGRRKLHIVDYGLSYGFQWPALFFLLGAREGGPPEVRMTGIDVPQPGFRPADQIEETGRRLSICARQFGVPFKFRAIAAKWETVRREDLHLDPEEEEEEVLVVNCLHGLNTLQDESVVVDSPSPRDVVLDNIRDMRPHVFVQCVVNGAYGAPFFVTRFREALFFYSAHFDMXDATIPRDNDDRLLIERDMLGRCALNVIACEGADRVDRPETYKQWQVRNHRAGL

SEQ ID NO: 25026 - protein, 493 aa, Oryza sativa; identical to SEQ ID NO: 17727
  Clone ID: TF_OsC180166_1.pep

SEQ ID NO: 25027 - protein, 983 aa, Oryza sativa
  Clone ID: TF_OsC545_17.pep
MAAHTVTDPLEELWNHTMSMDKTHLMCFYPSKITMGGVWTGDNPLDFSIPLLLFQILLITSTTRAATLLPRLPTYISQILAGFLLGPSVLGHLPHFSNLVFPVRSLFVLESMALLGLVYYTFIVGVEIEVSAITRAGIRSFGFAIGCTLPPFLVGALTGYVALSTDDKHKGDTFLNKLSFPIFLGSTFSSTAFAVLARNIAELKLAGTDVGQLTLSASLINDTFAWTGLTVATVLGHSRCTITQTTWTLTSGVVIFGASYLLLRPMLLRLARRAAEGEAVGEDRECWILIGVMVAALVADAGGTHAIFGAFVFGLAVPNGPVGVALVEKVEDFVRPPHRHKITNMHSAVLLMVAAMVAAVLKVVAAIGVADHQEQHHLAAPMVRKRPASDMDLPPPRRHVTGDLSDVTAAAAGAPTLSASAQLPALPTQLPAFHHTDMDLAAPAPPAPQQVAAGEGGPPSTAWVDGIIRDIIASSGAAVSVAQLIHNVREIIRPCNPDLASILELRLRSLLNSDPAPPPPPPSHPALLPPDATAPPPPPTSVAALPPPPPAQPDKRRREPQCQEQEPNQPQSPKPPTAEETAAAAAAAAAAAAAAAKERKEEQRRKQRDEEGLHLLTLLLQCAESVNADNLDEAHRALLEIAELATPFGTSTQRVAAYFAEAMSARLVSSCLGLYAPLPSPSPAGARVHGRVAAAFQVFNGISPFVKFSHFTANQAIQEAFEREERVHIIDLDIMQGLQWPGLFHILASRPGGPPRVRLTGLGASMEALEATGKRLSDFADTLGLPFEFCPVADKAGNLDPEKLGVTRREAVAVHWLRHSLYDVTGSDSNTLWLIQRLAPKVVTMVEQDLSHSGSFLARFVEAIHYYSALFDSLDASYSEDSPERHVVEQQLLSREIRNVLAVGGPARTGDVKFGSWREKLAQSGFRVSSLAGSAAAQAALLLGMFPSDGYTLIEENGALKLGWKDLCLLTASAWRPIQASGR

SEQ ID NO: 25028 - protein, 553 aa, Oryza sativa
  Clone ID: TF_OsC4418_1.pep
MSFIRRADPSTTYADNLYIHKFGTPNSNFAARRYASDTQLFRYGPEPYNPENSFYNQQASPMPYMVTADGHSPSSADNSCSDVAKDSPLVSNVSQQNSQSISDNQSSELEVEFDEDDIRMKLQELEHALLDDSDDILYEISQAGSINDEWADPMKNVILPNSPKESESSISCAGSNNGEPRTPKQLLFDCAMALSDYNVDEAQAIITDLRQMVSIQGDPSQRIAAYLVEGLAARIVASGKGIYKALSCKEPPTLYQLSAMQILFEICPCFRFGFMAANYAILEACKGEDRVHIIDFDINQGSQYITLIQFLKNNANKPRHLRITGVDDPETVQRTVGGLKVIGQRLEKLAEDCGISFEFRAVGANIGDVTPAMLDCCPGEALVVNFAFQLHHLPDESVSIMNERDQLLRMVKGLQPKLVTLVEQDANTNTAPFQTRFREVYDYYAALFDSLDATLPRESPDRMNVERQCLAREIVNILACEGPDRVERYEVAGKWRARMTMAGFTPCPFSSNVISGIRSLLKSYCDRYKFEEDHGGLHFGWGEKTLIVSSAWQ

SEQ ID NO: 25029 - protein, 313 aa, Oryza sativa
  unsure (1)..(313): unsure at all Xaa locations
  Clone ID: TF_OsC152890_1.pep
TEFYQLQTKPVRENLPSQSSSFASSNGSSVTFSEGFESLLSPAGVLPDVSLNDFVVQNQQALQFRRGFQEASKFLPDESKLVIDVDKLYSGDEGSRFLGEVRQEKKLVKVKTETSDVESAGHRGKKHFYGDDLDAEEGRCSKHSAQGIDTDHLVRDLMDKVLLCNGETCSKGVKELREALQHDVAKHSGGGHGKGSSHGKGRGKKQPKKEVVDLETLLIHCAQSVATDDRRSATELLKQIRQHAHANGDGDQRLAHCFANGLEARLAGTGSQIYXKNYTITRLPCTDVLXAYQLYLAACPFKKISPLLLIKQF

SEQ ID NO: 25030 - protein, 731 aa, Oryza sativa
  Clone ID: TF_OsC6079_1.pep
MGLDNNFGELSGMFCGLSYDGYTDHGSQSDYFRFADPQPAIVPQMDAGPSSAASSTASRAAVSSGTDNPEDWEFISDESLNYISRMLMEEDIDEKVSMYQEESAALRAAAKPFYDILGHKFPPSPDRQLVAWPLDSPSESSTSSYPHSLASSVTSSNISGAVDSSQRRYVGHSEYRSLSGHSSQPPVGPSSDVRNAMETLEDPLISNGRIPEYLFESFPTWDFRRGVDEAQKFLPGSDKVVIDLEAGGVAKRQEAGKAISLNVSKAEVLKVKKNRQSEDLDVMEGRNSKQSAFCSDEPDWIEMFDVLLRQTEKKATDLRKMMRFEASKNSPVAQPKGPSGTRSRGRKPTKKDVVDLRTLLIHCAQAVAADDRRTANELLKQIRQHAKPNGDGSQRLAYCFADGLEARLAGTGSQLYHKLVAKRTTASDMLKAYHLYLAACPFKRLSHFLSNQTILSLTKNASKVHIIDFGIYFGFQWPCLIRRLFKREGGPPKLRITGIDVPQPGFRPTERIEETGQRLAEYAEKIGVPFEYQGIASKWETICVEDLNIKKDEVVIVNCLYRFRNLIDETVAIDSPRNRVLNTIRQVNPAIFIHGIVNGSYSVPFFITRFREALFHFSALFDMLETTVPRDDAQRALIERDLFGREALNVIACEGSDRVERPETYKQWQVRNLRAGFVQSPLNQDIVLKAKDKVKDIYHKDFVIDEDSEWLLQGWKGRIIYAISTWKPNNN

SEQ ID NO: 25031 - protein, 495 aa, Oryza sativa; identical to SEQ ID NO: 17738
  Clone ID: TF_OsC382432_1.pep

SEQ ID NO: 25032 - protein, 473 aa, Oryza sativa
  Clone ID: TF_OsC316237_1.pep
MMQFTHTAPPPPPLHPNGHGLGLGLYLDVGATRGGGGARPWSSSSSTTTLGGSGYFPSSAAASKISLGNLNSTGCMEQLLVHCANAIEANDATLTQQILWVLNNIAPADGDSNQRLTAAFLCALVSRASRTGACKAVTAAVADAVESAALHVHRFTAVELASFIDLTPWHRFGYTAANAAIVEAVEGFPVVHIVDLSTTHCMQIPTLIDMLAGRAEGPPILRLTVADVAPSAPPPALDMPYEELGAKLVNFARSRNMSMDFRVVPTSPADALTSLVDQLRVQQLVSDGGEALVVNCHMLLHTVPDETAGSVSLTTAQPPVSLRTMLLKSLRALDPTLVVVVDEDADFTAGDVVGRLRAAFNFLWIPYDAVDTFLPKGSEQRRWYEAEVGWKVENVLAQEGVERVERQEDRTRWGQRMRAAGFRAAAFGEEAAGEVKAMLNDHAAGWGMKREDDDLVLTWKGHNVVFASAWAPS

SEQ ID NO: 25033 - protein, 602 aa, Oryza sativa; identical to SEQ ID NO: 17739
  Clone ID: TF_OsC165556_1.pep

SEQ ID NO: 25034 - protein, 703 aa, Oryza sativa
  Clone ID: TF_OsC33690_1.pep
MDVRFGPEEQIVWPASVLAGILMCAAVYDITREVSSRCYKGYNGLNELHKLEWNNRGFSTFHALVAAVVSFYLLVISDLFSKDVHGAIIIDRKSWMSDAMFGVSLGYFLTDLLMILWHFPSLGGKEYLLHHGLSMYAISLALLSGKGHVYILMVLITEATTPFVNLRWYLDLAGRKDSKLYLYNGVALFAGWLVARVILFVYFFAHVYLHFDQVRTVFPLGFYSMMAVPPAMSAMNLLWFRKICKGMVKAMSSANRSQCAKTDEGCAGEDDSPEFVEPPAAAAAAGTFEQRPELGACKEVYSEEGGAAEERTGVAMAGADVEQVAVEDEEEAHGVRMIALLMECAAAMSVGNLAGANGALLELSQMASPYAASCGERLVAYFARAMAARLVGSWVGVVAPMAPPPSCGAINAAFRALYNVAPFARLAYLACNQAILEAFHGKRLVHIVDLDVVPGGALQWLSLLPALAARPGGPPVIRVTGFGMSASVLHDTGNQLAGLARKLCMFFEFYAVAKRPGDADAVADMPGRRPGEAVAVHWLRHAMYDAAGDDGASMRLVRWLEPARFVSALHHYSAVFDAMGASRPDGEDASRHLAEHGVLGREIANVLAVGGPARSSGREGPGSWREVLARHGFAHAGGGGGGRAQLVAAACPGGLGYTVAGDHDGTVRLGWKGTPLYAPQEMKNGLSWIVASKTSGNKMSYGS

SEQ ID NO: 25035 - protein, 471 aa, Oryza sativa
  unsure (1)..(471): unsure at all Xaa locations
  Clone ID: TF_OsC68212_1.pep
MGEVKMSLKCSVDPKFRMPSLEAVFKMVEDKYLHSYKILPPEFSIGSLMNEICQCVVQLGSDHIAEHNTESDVAGNGRCSQNEPMTGSIPFVKPIACEDGGNRKCKSAGESFIVEDSENSSVAKQQTHLALANLKPIHDVTDISKGEERVRISVANEFASEKCPPSFYYIRGNLVFQNAYVNISVARIGDEDCCADCFGNCLSAPIPCACTRETGGEYVYTPEGLVRTPFLDECVSMNRFPEKCHKFFCKSSCPLERSRNEASPEPCRGHLARKFIKECWSKCGCNMQCGNRVVQRGITCNLQVFFTGEGKGWGLRTLDELPKGAFVCEYVGEVLTSTELHERTLQNMNNGRHTYPVLLDADWGSEGVLKDEEALXLDSTFYGNLGVFINHRCYDANLVEIPVEVETPDHHYYHLAFFTTKKVEAFEELTWDYGIDFGDGKDPVKAFQCLCGSKYCRGIRHPRKRGKAAAK

SEQ ID NO: 25036 - protein, 198 aa, Oryza sativa
  unsure (1)..(198): unsure at all Xaa locations
  Clone ID: TF_OsC38528_1.pep
MPRPAKIRKKHENVFDQLIKAIKAPVDFDLPPVLKEWKSNYYVPIKRNAYITRKRVEDDGIFCSCTPSGSSATCDKDCQCGMLFSCCSSTCKCENKCANKPFQHRTLRKTKLIKTEKCGNGVVAEEDIKKGEFVIEXXGEVIDDRTCEQRLWKMKRQGDTNFYLCEVSXNMVIDATNKXNMSRFINHSCEPNTEMQKW

SEQ ID NO: 25037 - protein, 682 aa, Oryza sativa
  unsure (1)..(682): unsure at all Xaa locations
  Clone ID: TF_OsC103012_1.pep
MEVSPVPKPPLEAALALRRSVRCLNRTRRPTYVEQEEPKESAGRRRGGKRKREEEKKEPVAQHAMKPVRMGDAASERKPSSEGKPMPAIAAEPVSCAGFARPAAEDDVLGNGKSAKLRVKETLRAFTSHYLHLVQERMLSDNALVEFQEEQKRAQAVLQEGQKRPSKRPDLKAITKMQESNAVLYPEKIIGELPGVDVGDQFYSRAEMVVLGIHSHWLNGIDYMGMKYQGKEEYANLTFPLATCIVMSGIYEDDLDKADEIIYTGQGGNDLLGNHRQIGSQQLQRGNLALKNSKDNGNPIRVIRGHISKNSYTGKVYTYDGLYKVVDDWVQNGVQGHVVFKYKLKRLEGQPSLTTSEIDYYVWSCFVYSVPFLVTLISCCMTCALLLSRLVCDDISGGQENLPIPATNLVDDPPVPPTGFVYSKSLKIPKGIKIPSYCNGCDCEGDCANNKNCSCAQRNGSDLPYVSHKNIGRLVEPKAIVFECGANCSCNNNCVNRTSQKGLQYRLEVFKTASKGWGVRTWDTILPGAPICEYTGVLRRTEEVDGLLQNNYIFDIDCLQTMKGLDGREKRAGSDMHLPSLHAENDSDPPAPEYCIDAGSIGNFARFINHSCEPNLFVQCVLSSHNDVKLAKVTLFAADTILPLQELSYDYGYVLDSVVGPDGNIVXLPCFCGAPYCRKRLY

SEQ ID NO: 25038 - protein, 812 aa, Oryza sativa
  Clone ID: TF_OsC497_1.pep
MAGTRQTTSVPMDNAAVVDAKPLRTLTPMFPAALGLHTFTAKENSSSIVCITPFGPYAGGTEQAMPASIPPMFASPAAPADPNQRQPYAVHLNGAAPANGTANNTGVIPDLQIAVAGTVESAKRKRGRPKRVQDSSVPSAHLVPSAPGGNITAVQTPPSATTDESGKKKRGRPKRVQDVPVLSTPSAPQVDSTVFQTPASAVNESVTRKRGRPRRVQDGADTSAPPIQSKYNEPVLQTPSAVTLPEDGKRKRGRPKRVPDGALIPLSHSGVSIDDDSGEIITGKRGRPRKIDVNLLNLPSLFSDDPRESVDNVLMMFDALRRRLMQLDEVKQGAKQQHNLKAGSIMMSAELRANKNKRIGEVPGVEVGDMFYFRIEMCLVGLNSQSMSGIDYMSAKFGNEEDPVAISIVSAGVYENTEDDPDVLVYTGQGMSGKDDQKLERGNLALERSLHRGNQIRVVRSVRDLTCPTGKIYIYDGLYKIREAWVEKGKTGFNVFKHKLLREPGQPDGIAVWKKTEKWRENPSSRDHVILRDISYGAESKPVCLVNEVDDEKGPSHFNYTTKLNYRNSLSSMRKMQGCNCASVCLPGDNNCSCTHRNAGDLPYSASGILVSRMPMLYECNDSCTCSHNCRNRVVQKGSQIHFEVFKTGDRGWGLRSWDPIRAGTFICEYAGEVIDRNSIIGEDDYIFETPSEQNLRWNYAPELLGEPSLSDSSETPKQLPIIISAKRTGNIARFMNHSCSPNVFWQPVLYDHGDEGYPHIAFFAIKHIPPMTELTYDYGQSQGNVQLGINSGCRKSKNCLCWSRKCRGSFG

SEQ ID NO: 25039 - protein, 123 aa, Oryza sativa
  Clone ID: TF_LIB4309-028-R1-N1-B3.pep
IGNRYDNSLAQGMSELMLGTQAGRSMAEGDESSGFTIDAASKGNVGRFINHSCSPNLYAQNVLYDHEDSRIPHVMFFAQDNIPPLQELCYDYNYALDQVRDSKGNIKQKPCFCGAAVCRRRLY

SEQ ID NO: 25040 - protein, 420 aa, Oryza sativa
  Clone ID: TF_OsC250784_1.pep
PGLQESARGNCLAPRGSYIRVLGGKAIGNKAAGDRRLERGNLALKNSIETKTPVRVIHGFKGHSKGEASHSKSKQISTYIYDGLCMVVDYWKEGPEGSMVYKYKLQRIPGQPELALHIIKATRKSKVREGVCVPDISQGRERIPIPAINTIDDTQPTAFKYTTEVIYPHSYAKEPLKGCDCTNGCSDSNRCACAVKNGGEIPFNSNGAIVEAKPLVYECGPSCRCPPTCHNRVSQHGIKIPLEIFKTGNKGWGVRSLSSISSGSFVCEYAGEVLQENGDEHVETDEYLFDIGHHYHDEVWEDPKFEGILGLESSTSKTTEDTEGSKTTEDTEGSTIDASKCSNVGRFINHSCSPNLYAQNVLWDHDDMKKPHIMFFATENIPPLQELTYDYNYGKVEDKNGKEKVKPCFCGSPDCSRRLY

SEQ ID NO: 25041 - protein, 1015 aa, Oryza sativa; identical to SEQ ID NO: 17834
  Clone ID: TF_OsC137835_1.pep

SEQ ID NO: 25042 - protein, 714 aa, Oryza sativa
  Clone ID: TF_OsC3086_1.pep
PCVRPRVRGRVGEEEVLRKMRVALPDDYSEKLLSQKNGTENLELPEVKDYQPRKVPGDEVLEQEVYGIDPYTHNLLLEMMPTELDWPSSDKHTFVEELLLNTLNKQVRQFTGSGNTPMVYPLKPVIEEIQKSAEESGDRRTSKMCLGMLKAMRNHPEYNYVAYRKGLGVVCNKTGGFGVDDFVIEFFGEVYPSWRWYEKQDGIKHIQNNSDDQAPEFYNIMLERPKGDRDGYDLVFVDAMHKANYASRICHSCNPNCEAKVTAVDGHYQIGIYTVRPIAEGEEITFDYNSVTESKEEHEASVCLCGSQICRGSYLNFSGEGAFEKVLMEFHGVLDRHSLLLQACEANSVSQQDLIDLGRAGLGTCLLAGLPGWLVAYTAHLVRFIFFERQKLPHEIFKHNVDEKRQFFTDINMDSEKNDAEVQAEGVLNSRLQNLTHTLDKVRYVMRCIFGDPKNAPPPLVRLTGRSLVSAIWKGEGSLVDELLESMEPHVEEDVLTDLKAKIRAHDPSGSEDIEGEIRSSLLWLRDELRTLSCTYKCRHDAAADLIHMYAYTKCFFRVRDYKTVKSPPVLISPLDLGPKYADKLGPGFQEYCKTYPENYCLGQLIYWYSQNAEPESRLTRARKGCMSLPDVSSFYVKSVKPTQERVYGSRTVRFMLARMENQAQRPWPKDRIWVFKSDPRFFGTPMMDAVLNNSPLDKEMVHWLKTRSNVFLG

SEQ ID NO: 25043 - protein, 678 aa, Oryza sativa; identical to SEQ ID NO: 17832
  Clone ID: TF_OsC34869_2.pep

SEQ ID NO: 25044 - protein, 768 aa, Oryza sativa
  Clone ID: TF_OsC55389_1.pep
MDYCDAWLKRKNESNLLSTVVPGASDNQKMQDTDEMSPKAICDSDAPESDMDFPPGFGPNQESAEHSHSACVEYVTEKTDGRSGSSITLFSGPLGRVQERIRTPVHAPEPSSPPGISVHETPSPAEMPRDEISDMAEMARDEISDMAVDTIPCPADMAASGTSTVPEVTTDKLIIPYVEHQSPSASHASIFEKLDAHEEAELDDSFDEVPPGTEAGLASLVIMEKNKYQPSKSVDSVLDIYRYTSWAFFRQILHESVMKEWASLFSGALSNCFDSWYARKNIVAKTMDDTLRPKEYTYYRKRKLRKNCEASSSEKPMDEQLSRPLRDLVECKVNMKNIHRSSKAGISQRVSVVEKPSKKRAKPSHNDNINLNIQQDLKLLSDKVPKRNRSSHPTSKPLVSSKVPTEDRTTSAMPAKKRKQKNLATESNLKTKAVILSPESHGCEAPTEKRTTAIMPVNKRKKNLSGESKLKAKPLTSPESYVCEAPIDNRTTSTMPAKKRKQKNLSNESNLKKKPLVLCPESYGCARASVSGWEWRDWARNATPSERAQVRGYRVRSILSAPENNVLKSSQVKGSSARTNRVKLRNLLAAAEGTDLLKIMQSKSRKKRLRFQRSKIHEWGLVALESIDAEDFVIEYVGELIRRQVSDIREDQYEKSGIGSSYLFRLDDDYVVDATKRGGLARFINHSCDVPRINELGSKVYKSGGNCNWVLPQYVCVMRACRLYWAEVHCRNVLGFTDRMVRWTNSGYPEEGQQHYYIDWIEDIEFTR

SEQ ID NO: 25045 - protein, 684 aa, Oryza sativa
  Clone ID: TF_OsC96998_1.pep
MEMDTSPSSSAPSSPAASSDSIDLNFLPFLKREPKSEPASPERGPLPLPAAAPPPPPPPPPPPPPPQVQAATVATPVPATPDLSAAAVMTPLQSLPPNPEEETLLAEYYRLATLYLSSAGAAGVIVPAAAPEASAGAVAQPGSGSGAKKRRPRSSELVRVSSLSVQDQIYFRDLVRRARITFESLRGILLRDDERAEVLGLTGVPGFGAVDRRRVRADLRAAALMGDRDLWLNRDRRIVGPIPGISVGDAFFFRMELCVLGLHGQVQAGIDFVTAGQSSSGEPIATSIIVSGGYEDDDDRGDVLVYTGHGGRDPNLHKHCVDQKLEGGNLALERSMAYGIEIRVIRAVKSKRSPVGKVYFYDGLYKVVDYWLDRGKSGFGVYKYKMLRIEGQESMGSVNFRLAEQLKVNALTFRPTGYLGFDISMGREIMPVALYNDVDDDRDPLLFEYLARPIFPSSAVQGKFAEGGGGCECTENCSIGCYCAQRNGGEFAYDKLGALLRGKPLVYECGPYCRCPPSCPNRVSQKGLRNRLEVFRSRETGWGVRSLDLIKAGTFICEFSGIVLTHQQSEIMAANGDCLVRPSRFPPRWLDWGDVSDVYPEYVAPNNPAVPDLKFSIDVSRARNVACYFSHSCSPNVFVQFVLFDHYNAAYPHLMIFAMENIPPLRELSIDYGMIDEWGAAFPS

SEQ ID NO: 25046 - protein, 150 aa, Oryza sativa
  Clone ID: TF_uC-osflM202124b05b1.pep
EIKGWAVRAAEPIPQGTFVCEYIGEVLKMKDDGAIRHVEREAKSGSSYLFEITSQIDRERVQTTGTTAYVIDATRYGNVSRFINHSCSPNLSTRLVSVESKDCQLAHIGLFANQDILMGEELAYDYGQKLLPGDGCPCHCGAKNCRGRVY

SEQ ID NO: 25047 - protein, 594 aa, Oryza sativa; identical to SEQ ID NO: 17824
  Clone ID: TF_OsC3937_1.pep

SEQ ID NO: 25048 - protein, 88 aa, Oryza sativa
  unsure (1)..(88): unsure at all Xaa locations
  Clone ID: TF_OsC4368_4.pep
LPILXNHSCEPNCYSRVISVLGDEHIIIFXKRDINPWEELTYDYRFVSSDQRLPCYCGFPKCRGVVNDVESEGQSAKIRVNTSELFHQ

SEQ ID NO: 25049 - protein, 1153 aa, Oryza sativa; identical to SEQ ID NO: 17816
  Clone ID: TF_OsC38685_3.pep

SEQ ID NO: 25050 - protein, 2139 aa, Oryza sativa; identical to SEQ ID NO: 17818
  Clone ID: TF_OsC61980_1.pep

SEQ ID NO: 25051 - protein, 174 aa, Oryza sativa
  unsure (1)..(174): unsure at all Xaa locations
  Clone ID: TF_OsC55389_2.pep
VKGSSARTNRVKLRNLLAAAEGTDLLKIMQSKSRKKRLRFQRSKIHEWGLVALESIDAEDFVIEYVGELIRRQVSDIREDQYEKSGIGSSYLFRLDDDYVVDATKRGGLARFINHSCDPNCYTKVITVEGQKKIVIYAKRRIYAGEELTXNYKFPLKEKKIPCHCGSTEVPRDQ

SEQ ID NO: 25052 - protein, 673 aa, Oryza sativa
  Clone ID: TF_OsC1123_2.pep
MDRASNFIPGPYQELVDAKPIRSLAPMFPAPLGINVNQSSTPPLVCVTPVGQFPVGFGSGILPTFGSTTAFTTTANGVSYTSYTNNGAIDATPISAYKTRPGIVSLDGDEPYSGSASGRKSKRSSGSAADGSNGVKFKRPKPVYKNFVAGKELAFLPPSSSDPREVVEAVHMTFEALRRRHLQLDEIQETSKRADLKAGAIMMASNIRANVGKRVGLVPGVEIGDIFYFRMELCIIGLHAPSMGGIDYMSAKFGSDEDSVAICIVAAGGYENVDDDTDTLVYSGSGGNSRNSEERHDQKLERGNLALERSLHRKNEIRVVRGFRDPFCLTGKIYIYDGLYKIQESWKERTKSGINCFKYKLLREPGQPDGAALWKMTQGWIDNPASRGRVILPDLSSAAEALPVCLVNEVDHEKGPGHFTYASQVKYLRPLSSMKPLQGCGCQSSVCLPGDPNCACGQHNGGDLPYSSSGLLACRKPIIYECGDACHCTTNCRNRVTQKGVRFHFEVFRTANRGWGLRCWDPIRAGAFICEYTGEVIDELKVNLDDSEDDYIFQTVCPGEKTLKFNFGPELIGEESTYVSADEFEPLPIKISAKKMGNVSRFMNHSCSPNVFWQPVQHDHGDDSHPHIMFFALKHIPPMTELTFDYGVAGSESSGSRRTKNCFCGSSNCRGVF

SEQ ID NO: 25053 - protein, 895 aa, Oryza sativa
  Clone ID: TF_OsC2056_1.pep
MASSSSKASDSSSQRPKRPDQGPSGKDAAGLVALHGKLAQLKRQVQSTRLAAIKERVEANRKALQVHTCALFDVAAAAEVASRGAEGGNALSRGAAEGHRRFVGWDSASGPGERELVHVQEENLVAGTLVLSSSGGSGASHRTVVQLVKLPVVDKIPPYTTWIFLDKNQRMADDQSVGRRRIYYDPIVNEALICSESDDDVPEPEEEKHVFTEGEDQLIWKATQDHGLSREVLNVLCQFVDATPSEIEERSEVLFEKYEKQSQSSYKTDLQLFLDKTMDVALDSFDNLFCRRCLVFDCRLHGCSQNLVFPSEKQPYGHELDENKRPCGDQCYLRRREVYQDTCNDDRNACTTYNMDSRSSSLKVSATILSESEDSNRDEDNIKSTSIVETSRSKITNSEYADKSVTPPPGDASETENVSPDMPLRTLGRRKISKHASKSNDHSPDKRQKIYSSPFPFAMSVLNKQSVPEIGETCPDSIESAVDQLPSLDDPNKKISTKDMCAGSTTNTTENTLRDNNNNLFISNKEHSISHWSALERDLYLKGIEIFGKNSCLIARNLLSGLKTCMEVASYVYNNGAAMAKRPLSGKSILGDFAEAEQGYMEQDLVARTRICRRKGRARKLKYTWKSAGHPTVRKRIGDGKQWYTQYNPCGCQQMCGKDCACVENGTCCEKYCGCSKSCKNRFRGCHCAKSQCRSRQCPCFAASRECDPDVCRNCWVSCGDGSLGEPLARGDGYQCGNMKLLLKQQQRILLGKSDVAGWGAFIKNPVNRNDYLGEYTGELISHREADKRGKIYDRANSSFLFDLNEQYVLDAYRKGDKLKFANHSSNPNCYAKVMLVAGDHRVGIYAKDRIEASEELFYDYRYGPDQAPAWARRPEGSKKDEASVSHHRAHKVAR

SEQ ID NO: 25054 - protein, 841 aa, Oryza sativa; identical to SEQ ID NO: 17820
  Clone ID: TF_OsC109084_1.pep

SEQ ID NO: 25055 - protein, 183 aa, Oryza sativa
  unsure (1)..(183): unsure at all Xaa locations
  Clone ID: TF_OsC380292_1.pep
DNSYRSLLVSCSRACHCSDECTNKPFRRQKKIEIVKWNTSXTQYCGWGSRALEAIEKDDFVIEFVGEVLEDETCEERLEDMRRRGDKNFYMCKVKKDFVIDATFKGNDCRFFNHSCEPNCQLQKWQVNGKTRLGVFASKAIEVGEPLTYDYRFEQHYGPEIECFCGAQNCQGNMSTPYILNFE

SEQ ID NO: 25056 - protein, 948 aa, Oryza sativa; identical to SEQ ID NO: 17871
  Clone ID: TF_OsC361962_1.pep

SEQ ID NO: 25057 - protein, 40 aa, Oryza sativa
  unsure (1)..(40): unsure at all Xaa locations
  Clone ID: TF_uC-osflM202075a05b1.pep
RAKRTSAVKQLKAQHRLIPSGPSIXNKALELWSLFDLSNA

SEQ ID NO: 25058 - protein, 230 aa, Oryza sativa
  Clone ID: TF_jC-osroLIB3475042f07a1.pep
HASAHASAHASAHASAHASAIISLPPKTVSLKTVDFTSEERAFYNTLEAESREQFKEYAAAGTVKQNYVNILLMLLRLRQACDHPHLVRGHESTSSWMSSLEMAKKLPVERQQSLLVCLQSCSAICALCNDAPEDAVVTICGHVFCNQCILEQLTGDDSVCPVSNCRVRLNSTSLFSRGTLECALSRSTCEFLSDDSCEDMVQGKQPRFDSSYASSKVRAALDILLSLPK

SEQ ID NO: 25059 - protein, 2067 aa, Oryza sativa
  Clone ID: TF_OsC11239_5.pep
MFKRQQSEHLQQAEKQAEQGQPSNSEQRSGDMRPPSMPPQGVPGQQLSSAGMVRPMQPMQGQAGMSNAGANPMAMAQLQAIQAWAKEHNVDLSNPANVTLISQILPMLQSNRMAAMQKQNEVGMASQQQSVPSQMNNDAPGHSNFPSQGAPSKPRQPLPPSTSVSGGAEPKMMNMSNMQMQQQLAAHNRDSSNDRAARPAMSMGNGGQMMHMPQSSGHANKIPEQPNPKNANSEAMQMQYARQLQQANRATAPSANSGETGGSQAPNQAARPPMGFTKHQLHVLKAQILAFRRLKRGDKKLPPEVLDLIMSGPPPDSQAQQVSGPPVTNRERSATSSADEHGRPVESGGIAPERSSLLKAPCLPKVEVSAPEDKTIPASGPMQVMKASPKEPLRIGPVSMPEQTNTTLIKSEQDPERGIQRTPGRSDYNGERGKSLPAESGSADAEQAKRAASSSSVPTPNRDVSRKYHGPLFDFPSFTRKHDSMVSANYNSNLALGYDVKDLLAQEGMIVLGKKREDNLKKISGLLAINLERKRIQPDLVLRLQIEEKKLKLLEFQARMRDEVEQEQQEIMAMPDRVYRKFVRQCERQRVELTRQVQQMQKASREKQLKSIFQWRKKLLEAHWAIRDARITRNRGVAKYHERMLREFSKKKDDDRNKRMEALKNNDVERYRQILLEQQTSVPGDAAQRYNVLSSFLTQTEEYLYKLGGKITAAKNHQQVEEAANAAAAAARAQGLSEEEVKAAAQCAGQEVMIRNTFSEMNAPRENTSVNKYYTLAHAVNERVTRQPSLLRAGTLRDYQLVGLQWMLSLYNNKLNGILADEMGLGKTVQVMSLIAYLMEFKGNYGPHLIIVPNAVLVNWKEVLAVKFNVLVTTYEFVMYDRSKLSRIDWKYIIIDEAQRMKDRESVLARDLDRYRCQRRLLLTGTPLQNDLKELWSLLNLLLPEVFDNRKAFQDWFSKPFQRDVPTHSEEEDDWLETEKKVIIIHRLHQILEPFMLRRRVEDVEGSLPRKVDCSALVTLSDAICHSALFVCYIVNSSCHLQESIVLRCRMSGIQGAIYDWIKSTGTIRVDPEDEKARIQRNAMYQAKTYKNLNNKCMELRKVCNHPLLSYPFMNYYGKDFIIRSCGKLWNLDRILIKLHRSGHRVLLFSTMTKLLDILEEYLQWRQLVYRRIDGTTSLEDRESAIVDFNRPNSDCFIFLLSIRAAGRGLNLQSADTVVIYDPDPNPQNEEQAVARAHRIGQTRDVKVIYMEAVVDNISSYQKEDELRNGGSGDLEDDLAGKDRYMGSIESLIRNNIQQYKIDMADEVINAGRFDQRTTHEERRMTLETLLHDEERYQETVHDVPSLQQVNRMIARTEEEVELFDQMDEEFDWTGDMMKHNQAPKWLRVSSTELDAVVASLSKKPLRNMAAGGISLDTNEKLEKRRGRPKGSGKYSIYREIDDDDFEESDDDSEERNTSSLPEEGEIGEFEDEEDNDDSVPDNKDQSEEEEPINDEGYDFSHGMGRRKAHRSEEAGSTGSSSGGRRLPPPAPSSSSKKLRSLSALDSRPGALSKRTADDLEEGEIALSGDSHLDLQQSGSWNHERDDGEDEQVVQPKIKRKRSIRIRPRPNAEKLDDRSGDGTVPQRGVHLAFQGDGDYDSQFKSEQAFADPASRQQDTVHRTVKQKRNMPSRKAPPATKAGKMTQLSGSGEGSAEHSKENWSNKVIESAGPNSSGTKMSDSMQRKVNLDCYLLALAKEPSMTPLISCGVFTLFYNHNNCKNVINKLWRRIDKEGHQIIPNISSWWRRNENSSFKGLASSTLDLQKIEQRVDGFEYGGVNEFIADMQQMLKSVVQHFSYRHEVRVEAETLHNLFFNIMKIAFPDSDFREAKGAMSFSNPGGGASGSAAQSTKQSASGQKRRSSTSEAEQHGSSTSRHNQHAPVGEVSGRAHTSKSEKDSRHSGPGSREQFTDSAGLFRHPTDMFIVKKKRDRRPSLGSPSSSGRTGPLSPTNAGRMGPAPSPRGARTPFQRDPHPSQQSMHSAGWGAHSVQQSDRGGSSSPGIGDIQWAKPTKRSRTDSGKRRPSHM

SEQ ID NO: 25060 - protein, 811 aa, Oryza sativa; identical to SEQ ID NO: 17851
  Clone ID: TF_OsC4787_1.pep

SEQ ID NO: 25061 - protein, 693 aa, Oryza sativa; identical to SEQ ID NO: 17853
  Clone ID: TF_OsC1528_1974.pep

SEQ ID NO: 25062 - protein, 3975 aa, Oryza sativa
  Clone ID: TF_OsC35792_1.pep
MASSQQVELEAAKLLQKLIQESKDEPAKLATKLYVICQHMKLSGKEQSLPYQVISRAMETVVSQHGIDMDALRSSRIPLAGGPQAGDSSGAMPKDKEIIGSQPPMVGTDASQNMARHSASISGRVPAGPNRSDVAGADIHQGSMSQKSGRSSGMESPASLQIEDTRSMNSHDSLKSDEKTSKKSSSKRKRVDPKAAGDLHSEDNSKSDAMSTGQNIRKGKQPGKAANLLNASFGWNQNAQGPVMKNTQGSVPNLMRPGVNVEGKVNLGSQGTFNSIIPFKEQQLKQLRAQCLVFLAFRNNLQPRKVHLEIALGVGPPASEGGSAGQRGSESRMADGSGKENGNSQENPAIFGRQSDISRLQSTSTGSVADVDSASKDPEIVKKKIKIAEHEKSFEAENIQQTVPIQGTDSEMHSQETISPMPSGQLHYFQGDTRKTTPEIYKADAENLNRNLGWRSADEGDEDLSEQDDLPLSPPKYTMTDKWILDHQKRRYEENKRKALELQKAHRRISASYEKLKENVSSSEDLSAKTKSVIELKKLQLLQLQRRVRSEFLQDFFKPNTTDLDRIKSVKKHRHGRRVKQLEKIEQKMKEERQKRIRERQKEFFADIEAHREKLEDSFKVKRERLKGFNRYVKEFHKRKERIHREKLDRIQREKINLLKNNDVEGYLRMVQDAKSDRVKQLLRETEKYLQKLGAKLQGSKSMDGRVSYASDSTANDIEDESYQPQHYLESNEKYYQLAHRYQMNGLRWLVSLYNNNLNGILADEMGLGKTVQVISLLCYLMETKNDRGPFLVVVPSSVLPGWESELNFWAPSINKIAYAGPPEERRKLFKEMIVHQKFNVLLTTYEYLMNKHDRPKLSKIQWHYIIIDEGHRIKNASCKLNADLKHYRSSHRLLLTGTPLQNNLEELWALLNFLLPNIFNSSEDFSQWFNKPFESNGDSSTEEVENELPEKIERLVRCWPSAYQKLLIKRVEENLGGIGAVKIEGYLPRHYLPSILRLCGKLEMLDRLLPKLKATGHRVLLFSTMTRLLDVMEDYLVWKKYKYLRLDGHTSGQERGALIDKFNNPNSQAFIFLLSIRAGGVGVNLQAADTVIIFDTDWNPQVDLQAQARAHRIGQKKEVLVLRLETVQTVEEQVRASAEHKLGVANQSITAGFFDNNTSAEDRREYLESLLRGGKKEEAAPVLDDDALNDLLARSEDEIDIFESIDKQRREEEMIYESSNIKSVKVVRRKGELGGLDTQHYGRGKRAREVRSYEDQWTEEEFEKLCQVDSPDSPQPGGISRDADVPKVVKLEVPPESSKEPEQAKKEPASSVGDSPPAKRRRGRPRRSDASLSPVTAPPNTGKQEAGTIIDGSSSAPTTTIHSVAPDVTIDSTALSATGNPDVGTEIKGTTPDGTIKPVICTDNKGTASIAVLEGSNAKEVGIPAHSVHEPVSSSAPHPPTPATSRGRKTQAGETPRRRGRKPKSLAASAGDVILSPVVAVGSGEAYASSVVSSYPQGNVSSSHANAMAGLQKDTIIYKPAALLPEGVKGTLTPSGGDKDEMVKTPLAEDIYAGTVTTSGNANSQLPMIAHNENAGLVQGGTDQNLSVATPTIPVVSEGSTKISEVVVADKPAEKQGARRRRKKTSGTGSEDTGVSTRQRAASRRLYGIGTADIAGTDMSTGEKIGIVKEIDGSCQDTSKGLPNIISPSYEKSGYDSQPSTPIAVPINEAALPSGFSEAHATHSELHPARESISSVGHEKLAGAHLEAPPSVSFQAPVQHETRKDYVGVHSEVATTHPETITTHSSVNPVIDHKLANVQFESHASLHTSGKDITTMPSEVDSGAPSKAPGRRRKGSAREPRTRSNSATAASERRARLAGSKQPDDIKMAEMSGNPSTAVCSSTQQQEDNTLKAAHATGSVGEEQNNAENRVREVSMPAGILEAKLELTKQTDQAGHNSEQEQEMVSAAKSASANDEEHKVHEVHQIIADHNALPSSAQYTLQDKIDSSADAGLVPCDKIASVVIAVDDQDPSNASDKDAPASTEDDGNGLQSECVHVDLVLAKQDNTKVEDTQKSNQPAEQGESLEMTGSKFRSETRLEKTEETVDKSGGDNLPTIEKNDDSPIERSSPSADKIAQVAYGGEAGTETTTVEAVSAMNSDGLQDVRNALSTHGLSTNDITVASEEHRDPESHLSGEVSMSGGSSELKLESLNQSESACQSGEVTLEDTHATLDIQIPALIESEEKKSPGGDVHGSEEQHMHEVLHNTVDGSISPSNREQDKLQVHIDTNTDVDIPSSDKDHSTDIVLAGCQAPCDASGKDKLSTCDASGKDMAAPTDDDLNCLQSEDTVIPVADAKDETMLVKAIQNDEMSMGSSHGLPATIQSTDSDRLAEEGESAEITGSKFSCGMEQEKMEEPLDKSVTDNQTSSQINDGSNNMDSQKVDSSLQAADGGDLLVSRGTSVETTTAINTDASDESISVSTQSVKEASTVEIGASTNDIAPACELRKDFESHVSGCVSKPVGLSELRLEELSQTKSVSQSIVANAEETSTRSDIETPAMDASESKSPESDVHELSERVEFMGPTPSANEKSNELHSQELVKMISAAETASTEGHREKDTCEVDHKIDCTIFSPIGDQDTRNRIDGDTDCGVPSCQRNAAFDSENEVSAEINLTGSQAPCDAPNKATPAPTEDDHNGQESEDTVIGAEQGTVEVEAMQIDGISKSYSSDSHATLQSSDSNQLVNSDSKFESSKKHDKTDETSNESRGDNPTHSCTNDDSHDKNLVGCSPSEDLNEDNSAQLADGDDLVGSKDTTAAHASGLKELTSGNYVASSSSHVVQDVTSISKMESVQAGSEEIYHGYSDETIHSARIKPVVGTEITENASVASAPVITIQPDIETEAGVTASLTVLEGSIAEEVDTQVESGHDLVTSTAPLSPAPLPGESHACTDVSCPVAVEVSETKLESANHTASQLGAACTETPNALLNTLIPALPESEETKLSGSDTDGKTIMAELASSSDEHDKVHEVGNETGDDNKLPSSVAEDAVQGEIDGSADMDSQIIAGSSEAEINNSTVATIADSQIPFDPSDKDTLAEDGNGLQREGTTVDVTGSKEDDMEAEEKQMDDSHLPAALQSTESSQPTEHAAPTQDDGNGLQCEGTTVDVSGSKEDIMEVEEKLIDDISGSPSSHLPVALKSTESNQPAEHAVPAEDDGDGLQSEGTAVDVVDSKKDDMEVEEKQIDISRGSSSFLPGALESAELNQPAEHTAPTEDHGNCLQSEGTAVDVPCSKEDNMEVEDQFDGISRGPSSFSPDTLESAELNQAAEHAAPTEDDGNGPQSEGTSVDVAGSKEDNIEVEEKIDDISRGSSSHLPDVLQSTPNQRAEQECLDNSDDVNTSVVSSHAPLSGPKFTCVKELEKADETLETSDAQVADEVCLQTNDGAHNMASGSCSTLEDKNEDSSAQIADCEDLLLRKGTTVDDLDGCVEGHSGLSTHSNDEVRNLVEIVKGMNDTTAGSEVHVDPESHVSDEVSMPVAPSELKVELKNQSEPACQFGAVIVEESNVSLGIQTPALAESEEMTSGGFMHGKEVCASEQTNIGAAAEPASTKDDHDMHEVDKEIVHCTISSPIGDQENLQGNIDGKMDVGLAACQTESDFVSGNDHSRETDLAGSQAPYDASDKEDTAADLIGPKQATLEIEKMQIDGIPEGPSSVPAVLQLTDSNQPAEQERLENSDSKFASTKDQGRVDGTSNLSGGDNAKCSLTNDDSQTVNLVGYSPSEDSNDDDSVQAADSDGVLGNKEGTDDVISAACTDDVSMLKTESIDRHGSDEVDHSTAPSAAIKQESGTEVTCDASVPVSESSISKEIGTSPECDDDQVATAAPHPPTPLSDATDVSADVQIPAGISEAKLEQPNETTSPSGAATEENNTVVSTQIPTLAESEDRTPADTAIQGTEVDSAEPASVSDDENKVTAADDSALPSTGPEDTADDKIDSSADASEK

SEQ ID NO: 25063 - protein, 240 aa, Oryza sativa
  unsure (1)..(240): unsure at all Xaa locations
  Clone ID: TF_LIB4371-027-R1-K1-E7.pep
PVLDARANIGKGARPYYKIFQAFGLVRKVEKGITRWYYPSMLDDLAFDSAALGIALEKPLDLVRLYLSRATLIVVPANLIDHWTTQIQRHVSSDTLNVYVWGDHKKPSAHNLAWDYDIVITTFSRLSAEWGPKKRSVLKQIHWFRVILDEGHTLGSSLALTNKLQMAVSLVASNRWILTGTPTPNTPTSQVAHLHPMLKFLHEEVYGQNYQSWDTGNHXPXEAXMERRRSRLLQLLQRTM

SEQ ID NO: 25064 - protein, 1274 aa, Oryza sativa
  Clone ID: TF_OsC11525_1.pep
MGGDEEEVAGDVRRKLGGYLPAVVSVSSDVGVEALAPLSPCSLFACGGVSLAPNPDGSGATPRSNGRACGGGGVVRQLRALVSSRCVEVEGRVLRAVARRGREGGGGDGEVEARAVVLFDVYLPVSVWSGWQFPRSRAAAAAAVFKHVSCNWDARNALLAFNWTSPDNPHCDDQYIWTCTDCHVLGCEVHQIPSVLNNDKSFDLHEIFKTLPSVMVEKRMQITRITPDEAASGVGIWSVPDDVLYKVLVRLKPRDLIRVAAACHHLRNLSASIMPCMKLKLFPHQEAAVEWMLRREQNLQVLEHPLYKGLCTMDGFPYYINVTSGEISTGSAPTVHDFCGGMFCDEPGLGKTVTALSLILKTHGTLAVPPPGMNVMWCMHKPDKKYGYYELSASNSSNGNIFLSGSKKLRKDVIREDTCSSESLNNGGSVVSTRSSRKRGRLVNPDLNMIAAHPSGKSPMSAPTGAHSTPATHVLKITKNLKHVRKNLMEAYSDGSVGNKRKRDATSELSETWVQCDACRKWRRLLDGTALDSSTAWFCSMNPDSARQKCSIPEESWDLKRKITYLPGFHKKGTPPGNEQNASFFTNILKEHAALIDSETMKALLWLAKLSPKKHIEMEAVGLTRPVLDARANIGKGARPYYKIFQAFGLVRKVEKGITRWYYPSMLDDLAFDSAALGIALEKPLDLIQRHVSSDTLNVYVWGDHKKPSAHNLAWDYDIVITTFSRLSAEWGPKKRSVLKQIHWFRVILDEGHTLGSSLALTNKLQMAVSLVASNRWILTGTPTPNTPTSQVAHLHPMLKFLHEEVYGQNYQSWDTGIHRPFEAQMEDGRSRLLQLLQRTMISARKQDLKNIPPCIKKITFLDFSEGHAKSYNELAVTIRRNILMADWNDPSHVESLLNPKQWKFRTTTIKNVRLSCCVAGHIKVAEAGQDIQETMDALMQLGLDPSSGEYQSIRYALLNGASCFRCRDWCRLPVVTPCRHLLCLDCVALDSEKCTLPGCGNHYEMQTPETRARPENPNPKWPVPKDLIELQPSYKQDDWDPDWQSTTSSKVAYLVNKLRSLKAENIKHGYSRNMANGACLSSQSSCQDHNNVEGRLPHTMPDKVIIFSQFLEHIHVIEQQLTIGGITYAGMYSPMPLGSKRSSLTKFKDDPACMALVMDGTAALGLDLSFVSYVFLMEPIWDRSMEEQVISRAHRMGATRPIFVETLAMRGTIEEQMLKLLQDSNACRQMVNKGTSSTDNEGARPHRSLHDFAESSYLAQLSFVKGSDAAEKL

SEQ ID NO: 25065 - protein, 1087 aa, Oryza sativa
  Clone ID: TF_OsC3788_1.pep
MAASVEAAAAAVVAPPASVGGDEVVVGGGGGGASEQARTLIGALNLLSRNLPLPPAVLHAVSSIYHGGDAWEGEGEEGGEEEVAAAAAAVGDGCGESGEGEEDRADASPGADEGCSFKAPYCHCDDWGVTLIQELEDAVLKNQGPYMSYSELTALKEDRFNTSIQHRLTELEGLPSTRGEDLQMKCLLELYGLKLLDLQKKVRTDISAEYWLHKKCAHPDRQLFDWGMMRIRYPFTMYGIGDSFSMDADDINRKKRFSEDSLFGIWEQQRISRLEEEEKNQAEIRKRKFFSEILNAAREYQLQVPASYKRKKQRNDGVLAWHVRARQRINRMEKSRLQVLKAGDQEAYLRMVEESKNERLKLLLGKTNELLEGIGKAVQRQKDAEHVSRPDGSELPKGSESDDCSQISGLKVESPDEESPSDVDADHHSSADHSKFNAGHRLDSTVHSIEEKVTEQPSALEGGELRPYQLEGLQWMLSLFNNNLNGILADEMGLGKTIQTIALIAYLLEKKEVTGPHLIIAPKAVLPNWSNEFKTWAPSIGTILYDGRPDDRKALREKNFGQRQFNVLLTHYDLILKDLKFLKKNFEEWFNAPFACEVSLNDEEQLLIIHRLHQVLRPFLLRRKKDEVEKYLPVKTQVILKCDMSAWQKAYYEQVTSNGRVSLGSGLKSKALQNLSMQLRKCCNHPYLFVEHYNMYQRQEIVRSSGKFELLDRLLPKLQRAGHRVLLFSQMTKLLDILEVYLQMYQFKYMRLDGSTKTEERGRLLADFNKKDSEYFLFLLSTRAGGLGLNLQTADTVIIFDSDWNPQMDQQAEDRAHRIGQKNEVRVFVLVSVGSIEEEILDRAKQKMGIDAKVIQAGLFNTTSTAQDRRALLQEILRRGTSSLGTDIPSEREINRLAARNDEEFWLVEKMDEERRQRENYKPRLMEGIEVPDWVFANDTLTEKIPADEPQNVLLTTKRRRKEVVYSDSFGDQWMKADDVVEETPRMAPRAKRSAYSSDVQEVDFSERRKRHKSLVNIADDASIPMWTPEKVRAGVSSYSKDENEDDAEDESTTSVLQGGSFTWKTLRRKRSSHFSNSSDSKGRSAF

SEQ ID NO: 25066 - protein, 303 aa, Oryza sativa
  Clone ID: TF_OsC12040_1.pep
MQGRLNLENRIIDSDERAVYQEALQNIIQDKREDDLPEGVLSVPLLRHQKMALAWMVSKENSSHCAGGILADDQGLGKTVSTIALIQKQRIQQSKFMSVDSDRLKAEALNLDDDDEAAPVADNKGEQTKNDEPRKDLGAGSSSTAAGTGDVETCASLMNTAPDKTVERNVERKKKSKASTSSTMQSMTRPAAGTLVVCPASVLKQWANELTDKVGESAKLSVLVYHGGSRTKDPNELAKYDVVITTYTIVANEVPKQNADDDTDQKNGEESSAGNKRKQPPKAQSKSKKKKKKLETSSLPRAD

SEQ ID NO: 25067 - protein, 176 aa, Oryza sativa
  unsure (1)..(176): unsure at all Xaa locations
  Clone ID: TF_uC-osflM202005g10b1.pep
DLVRPYFLRRTKESIESLLPNKADLVIWLKLTPYQIXLYETFMKSNLIDKTVKGSTFVATMLLQKICNHPQNLTAVDSCEEQLALKENRTLQGIVKKLEALIAKNTTKTSNXSSSCKLTFILQLLEKLKEEGHKVLIFSQTRLMLDEIEEALTNKGVHSARMDGTVTASKEKLLLR

SEQ ID NO: 25068 - protein, 1282 aa, Oryza sativa; identical to SEQ ID NO: 17848
  Clone ID: TF_OsC4554_1.pep

SEQ ID NO: 25069 - protein, 174 aa, Oryza sativa
  unsure (1)..(174): unsure at all Xaa locations
  Clone ID: TF_LIB3432-034-P2-K1-D8.pep
DAWADAWADAWAKITSAVKQLKAQHRLILSGTPIQNNVLELWSLFDFLMPGFLGTEKQFQATYGKPLLAAKDPKCSAKDAEAGILAMEALHKQVMPFLLRRTKDEVLSDLPEKIIQDRYCNLSLLQLKLYDKFSNSNAKQEISTIVKENELDQSTSQPKATRHVXXALQYLLKL

SEQ ID NO: 25070 - protein, 1006 aa, Oryza sativa; identical to SEQ ID NO: 17863
  Clone ID: TF_OsC257752_1.pep

SEQ ID NO: 25071 - protein, 900 aa, Oryza sativa
  Clone ID: TF_OsC138576_1.pep
MVPPPRRRGRLETGSAPAATNVASSPVLALPPADRFPPPLPSNAMSLHSLKETLQSSSFSQPQSESQPRSPPPLLARRPPKTSLSQQLLRLDASSSSSSFSVSPPPPPRTSPTSDAAADDAPPLPEEEDEVPCIRPRASLPPAASLDSRGPYEPLALSPPGERPVVQVPSSINCRLLVHQRDGVRFLYNLYRNNHGGVLGDDMGLGKTIQTIAFLSAVIGKDNDHGDQLVEGRKIAPILILCPTSVIRNWENEFAEWARCSVAVYHGPNRDLVLQKVETQRLEIVITSFDTFRIHGKILCGISWDLVVVDEAHRLKNEKSKLYTACLEITTRKRFGLTGTIMQNKIMELFNLFDWIVPGCLGDREHFRVYYDEPLKHGQRFSAPERFVQVADKRKKHLVSVLSKFLLRRTKEETIGHLMLGKEDNIVFCRMSDVQKRVYRRMLQQPDVQILINKDLPCSCGSPLTQVECCKRTEPHGIIWSYLHRDNPEGCSLCPFCLVLPCLGKLQQISNHLELIKPNLKDEIEKQKKDAELAAAVFDTDIELVGGGAKSENFMGLSDAEHCGKMRALERLLSLWTLQGDKILLFSYSVRMLDILEKFLIRKGYCFSRFDGTTPMNARQLLIDEFNRCPSKQVFLISTRAGNLGVNLVSANRVVIFDPSWNPAQDLQAQDRSFRFGQRRHVTVFRLLGAGSLEELIYSRQIYKQQLSNIAVSGKIEKRYFEGVQDDKKFQGELFGICNLFRDLSDKLFTSEIIEMHGEHGKGNTAETIGIREIVDTNIFGTQDQMKSSMTAIHNENKNLYHCGIVYAHRNEDVVNTRTNEASNCAEDKTVPRHLEELQSKKNETMHTIKAKSYSLVQKKKEFSRIASFMGMNDLEFSKWLLSVSPLQRHEVLDRYRNAK

SEQ ID NO: 25072 - protein, 2482 aa, Oryza sativa
  unsure (1)..(2482): unsure at all Xaa locations
  Clone ID: TF_OsC43095_1.pep
MLGPPRRGPAYKTKLCALWQRGNCNRDTCSFAHGHGDIRRPPSSRGAFTHHPDSADMLTQLLPEDSMTFFINSSLGISTICVDDNACAVPEGELGEEIIEPVISEAGLIGGFHLGGGIPLEESPGVIVPFMIEGHLLEKEILAIHDLLAGRECERRHEKKTDDGETNSSRSLSLSDNNDEKKKDKFSSGDEKEDHEKQLKQIRLDMEALRDDKTQMEVILDEKIDEVRKISSKVNDLEVQLRREKDECHRMTSKMKKFIKAHARFLKAQEEVKRSQARFERLGDLLASDILKRGANEEGSSVNEDLNERSPNTAATKKRSIPYSTSEEAKAVKKRRERDSDTMTRSDKYRSDVTDFDKTSKGTEATKSLYLKKKLWEDEKSKYFVNLQVKGSPVRHVLPSTGMAAHAIDDLNEAIELEDRHESIDALLENDADDKTRSPAIPLQPPPVVQNAYEQSGFEHISFDIPFGLSIYCAKFPLTQLAGSTQATRFAAARQIGEIAKSHPQELNVLLKKDICIIIILRRKRVSPYLRSKNWDTRVAAAHAIGAIAENVKHTSVKDLFASAEAEKHASGLSGIGDVGSTLRHADTTATSELAFGSFDINRVLEFGSPLLASGGQEYDIANDNGKNPAERLARQKQNLRRRLGLDVCEQFMDFNDVIKDEDLLAQKNYWGANMQNNGFYSFNTGQNIQHLVASMVPSAIALEHSVGMALSSICDDLITPLTFFQDTVDAITDEDNLEYSENGRWPFQQFVDQLIHDMFDPIWEVRHGTIMALREILTHQGACAGVYFPDLNSPFADLDDKNNLDSLKRAHGIDLNEDIDSGQLEPVLKRQKKEESNPEVMDIQLDKEPSNGDYSKTEASLSTEPTVSSGEPNLAHAKVESPFQVDGSANPSKVDPYCTPPHETLNSMPKLSSTHLPENSKFIKLMKLANYSAVKNWEFLQDCAIRFLCVLSLDRFGDYVSDQVVAPVRETCAQALGAVLKYMHPTLVCHTLNILLQMQRRQEWEVRHGSLLGIKYLVAVRQEMLKDLLNYVLHACKAGLEDPDDDVRAVAAEALIPAAASLVRLNDQMLHSIVMLLWDILLDLDDLSPSTSSVMNLLAEIYSQPEMVPKMLGTTAIGGDNEFDLNSVTLVAGEEKMGSNDNPYVLAALTPRLWPFMRHSITSVRRSAVRTLERLLEVGNTRNSAKLWLASILGDALQVVFQNLLLESNDEIIRSSERAWKLLLQCPTEDLESAASSYFSNWVQLATTPYGTALDSAKMFLPVALPRGSRSRAAAKIKSARLEHENTRMISFGSTGENTSQEKHSEASLSVSKIIVGSDSDKSVTHTRVLTSMALGLFASKLPEGSWQVVLGPLASDLMSLSGVQRQVASMVIVSWFKDLRKSDPAAVGTLLAFLSSLKGWMLDLLACSDPSFPTKDSPLPYAELARTYRKMRNEANNLFQSIESCALLKEYTSNLNFEADMLSVDDAINFTSKLLLPSEPDFSLDSDKIVLNNIESAKQGLLSTSGYLKCVQNNLHVTVSSLVASAVVWMAGLPSKLNPVILPLMAAVKREQEEILQDKAADALAELIFSCVGRKPGPNDKLTKNLCTLTCTDASETPQAAVINSIQVIEDQNLLSIGKRFSNHKSRGQMTSGGESKSEGFISRRGSELAFKHLCEKFGASLFEKLPKLWDCLTEFLKPVKTGDDLMKEDPSIAQLGRSCEDKEPQSLINNIQVVRSVTPHLAEPLRPQLLSLLPCILGCVRHPHVAVRLAAARCITSMAKSLTANVMVIVIENVIPMLSDSSSVCARQGAGMLLSLLVQGLAVELVPYAPFLVVPLLRCMSDPDGSVRQTVTHSFAALVPLLPLAKGSLLPDGLSERLSSSAEDAQFLEQLLDNSQIDDYKLSIDLSVELRRYQQEGINWLAFLRRFKLHGILCDDMGLGKTLQASAIVAADIAESRARNDEQDPKSLIICPSTLVAHWEYEIEKYIDSSIMKPLQYIGSSQDRIILRSQFDKFNVIITSYDIIRKDIDFLENVFWNYCVLDEGHIIKNSRSKITSAVKQLKAQHRLILSGTPIQNNVLELWSLFDFLMPGFLGTEKQFQATYGKPLLAAKDPKCSAKDAEAGILAMEALHKQVMPFLLRRTKDEVLSDLPEKIIQDRYCNLSLLQLKLYDKFSNSNAKQEISTIVKENELDQSTSQPKATRHVFQALQYLLKLCSHPLLVTGESPPDYLVDLLKEIGMGTGDELHDLHHSPKLVALQEILQECGIGSEISSPDASAAIGQHRVLIFAQHKALLDIIEKDLFQSHMRSVTYLRLDGSVEPEKRFEIVKAFNSDPTIDVLLLTTHVGGLGLNLTSADTLVFMEHDWNPMKDLQAMDRAHRLGQRKVVNVHRLIMRGTLEEKVMSLQRFKVSVANAVINAENASLKTMNTDQLLDLFASTPASRKASVLPSSSGGDQSKDSKGKSGGNGLXSILNGLDELWDQSQYADEYDLNQFLAKLNG

SEQ ID NO: 25073 - protein, 1445 aa, Oryza sativa; identical to SEQ ID NO: 17861
  Clone ID: TF_OsC72210_1.pep

SEQ ID NO: 25074 - protein, 229 aa, Oryza sativa
  Clone ID: TF_LIB4309-046-R1-K1-A2.pep
VFPKYERRLLAAASLLLSADAQGQPPHAAAQLGVGVTAELKPHQVDGVAWLIRRYQLGVNVLLGDFLGLGKTLQAISLLSYLKIHSISPGPFLVLCPLSVTDGWLSEFNKFCPSLRVIQYVGDKLHRRDLRRMMFQDVQKSSSSSHSTELPFDVMMTTYDIALMDQEFLSQIPWHYVVIDEAQRLKNPSSVLYNVLEQRFIMPRRLLLTGTPIQNNLSGLWALMHFCMP

SEQ ID NO: 25075 - protein, 248 aa, Oryza sativa
  unsure (1)..(248): unsure at all Xaa locations
  Clone ID: TF_LIB4309-004-Q1-K1-B9.pep
GLTSAYRFDFSAKGGEEEQEDSEEKRKVDVVSKLHAILRPFLLRRMKEDVEHMLPRKKEIIIYANMTDHQKQIQNHLVEQTFDQYLHEKSEIVLRKPGIKAKLNNLLIQLRKNCNXHPDLXWSLRMTHQXLYPXPVEKLLEQCGKFQLLNRLLSLLLARKHKVLIFSQWTKVLDIIEYYLETKGLQVCRIDGSVKLEERRRQIAEFNDLNSSMNIFILSTRAGXLGINLTSADTCILYDSDWNPQMDL

SEQ ID NO: 25076 - protein, 1342 aa, Oryza sativa; identical to SEQ ID NO: 17868
  Clone ID: TF_OsC1528_2146.pep

SEQ ID NO: 25077 - protein, 1407 aa, Oryza sativa
  Clone ID: TF_OsC4180_1.pep
MASPPPFDICGDLDDDPTPPAPTPLAAPTPNGLNDRLLRLTRTHQRGPSQNPNPNPNPNPKPPPPPPPQEPEPAKVKLAGRRRLCKLSTAGDESAGDDDSIRDILDDLTTRLDSLSVDRPTARPRPHVSPLPCALHADPDPSQSQLNDGTKPSSSFVDCDDDDDDAGGAYGGFGVKEEVTRKVFKASSSFGGRGNDDKMKAKGAYAFDTVSRKTTTESKASKFFGDYDDEDDIDQDAENGKENHADDVGWEKTEDFKMEPTGTGVTRKPYNLPGRIFNMLYPHQREGLRWLWVLHCRGTGGILGDDMGLGKTMQVSAFLAGLFHSRLIKRVLVVAPKTLLTHWTKELSVVSLKDKIRDYSGPNANARNYELKYAFKEGGILLTTYDIVRNNFKMIKGNFTNDFDDEEETLWNYVILDEGHIIKNPKTQRAQSLFEIPCAHRIVISGTPIQNNLKVQSKELRERIKPYFLRRMKNEVFLDSGTGEDKKLAKKNELIIWLKLTSCQRQLYEAFLNSELVHSSMQGSPLAAITILKKICDHPLLLTKKAAEGVLEGMDAMLNNQEMGMVEKMAMNLADMAHDDDDVELQVGQDVSCKLSFMMSLLQNLVSEGHNVLIFSQTRKMLNIIQEAIILEGYKFLRIDGTTKISERERIVKDFQEGPGAPIFLLTTQVGGLGLTLTKAARVIVVDPAWNPSTDNQSVDRAYRIGQMKDVIVYRLMTSGTIEEKIYKLQVFKGALFRTATEHKEQTRYFSKRDIQELFSLPEQGFDVSLTQKQLQEEHGQQLVMDDSLRKHIQFLEQQGIAGVSHHSLLFSKTAILPTLNDNDGLDSSRRAMPMAKHYYKGASSDYVANGAAYAMKPKEFIARTYSPNSTSTESPEEIKAKINRLSQTLANTVLVAKLPDRGDKIRRQINELDEKLTVIESSPEPLERKGPTEARTLKDWESLKAKEEEAGGRARGEGRKGSELNSTPFRLNSTSSTLVVFKVPSTFTTGRGALAAAAANGRFVPMAPTSQPQPQQEVEVEVDEDEELVNMVVEAGVGAIKMKMKIPRRVLGSLYPHQRDGLAWLWALHCTATGGILADDMGLGKTIQEGGILLTSYHIVRNNYMLLRGNGNGNNVDNNEEEPLWDYVILDEGHIVKNTKTQRAQSLFQIPSAHRIVLTGTPIQNKLKMSWFELRYEKPILCGNDKNATDQEKQMASNAAKRRLYEAFLNKDPVRSQTGALKGSSLEASTILRKICDHPLLLTKRDTDDFLEEMGAMLNNRDMCMVERILEDNLYADKRLQIVQGASCKIAFILPLLRNLVEEGHYVLIFSQTRVMLNLIQDAVSIEGHKFLRIDGTTKISERKKILKDFQEGLDSPILLLTSHVGGLGNTLTKADRVIVVDPAWNPIVAKQKVDPRALNSPSTRV

SEQ ID NO: 25078 - protein, 80 aa, Oryza sativa
  Clone ID: TF_LIB4309-030-R1-K1-F3.pep
WDQTLFISGTPIQNNLKEMWALFYFCCPEVLGDKEQFKARYEHAIIQGNDKNATNRQKHIGSNVAKELRERIKPYFLRRM

SEQ ID NO: 25079 - protein, 329 aa, Oryza sativa
  unsure (1)..(329): unsure at all Xaa locations
  Clone ID: TF_OsC55194_1.pep
CRICASRNWGHHPPVSRWRAAACGEREKNRRLAQSSTTLAERLHFSLGPRLRSPLPRPPPPRVRVVLRLPLPRTSPIAALLPHGLRHVFRSGVVTAPPAEDEDFATAADLQFEPPLKVVKYPDPILRARNKRINTFDDNLRSLTDEMFDVMYKTDGIGLSAPQVGVNVQLMVFNPAGVKGEGEEIVLVNPVVYKMSKRLLVYEEGCLSFPGIYANVVRPDNVKIDAQDVTGAKIKVKLSGLSARVFQHEFDHLQGILFFDRMSLDVLESVREGLKDLEKKYEESTGLVXLKVLRTTKEERISLVSQDEXLSVLAVFQNILLSFTLKIVY

SEQ ID NO: 25080 - protein, 1432 aa, Oryza sativa; identical to SEQ ID NO: 17874
  Clone ID: TF_OsC112724_1.pep

SEQ ID NO: 25081 - protein, 667 aa, Oryza sativa
  unsure (1)..(667): unsure at all Xaa locations
  Clone ID: TF_OsC73310_1.pep
MAGLGGGWGGGYDDDDDWGLSAEQLDQLERDAYRKLAERKASSSAASTATSPLPSAAYSPVKNSHHHPASRVSQESCFGKVESLSPSRLSQPNASGNAVNNSQGNMSKVSVHLFLHSTGVIAAKFQYHQKLVNIPKEDIMVRLPRTGGLNKXRTLIGXSNNKGVCNLDGVVNVISXDVVLVKQELTPSLYSGDLLDLDGKIPTDVESKLMPFQREGVRFALQHGARTLIADEMGLGKTLQAIAVASCLHDAWPVLVISPSSLRLHWASVVLPQTGGSNKAGYRLVYSNTKGDFNLDGVFNVISYDVVPKIKDMLLDLDFKIVIADESHFLKNAQAKRTMHSLPVLQKAKYVVLLSGTPALSRPIELFTQLQALYPTVYKNVNEYGNRYCKGGFFGLYQGASNHEELHNLMKATVMIRRLKKDVLSQLPVKRRQQLETVKIKIQSCDSQETMDSLKFAQKNLINKIYNDSAEAKIPAVLDYLGTIIEAECKFLIFAHHQSMLEAIHQHLLKKKVKCIRIDGQTPVPVRQTLVTDFQNKDDIKAAVLSIKAGGVGLTLTAASTVIFAELSWTPGDLIQAEDRAHRIGQVSSVNIYYLLANDTVDDIIWDVVQGKLENLGQMLDGQEKTLDVSQSDTRPSPSKQKTLDAYLKRCSNSTEADQPKLKNPRF

SEQ ID NO: 25082 - protein, 1132 aa, Oryza sativa; identical to SEQ ID NO: 17875
  Clone ID: TF_OsC5164_1.pep

SEQ ID NO: 25083 - protein, 199 aa, Oryza sativa
  unsure (1)..(199): unsure at all Xaa locations
  Clone ID: TF_LIB4309-023-R1-K1-C11.pep
LFEIPCAHRIVISGTPIQNNLKEMWALFYFCCPEVLGDKEQFKARYEHAIIQGNDKNATNRQKHIGSFVSKELRERIKPYFLRRMKNEVFLDSGTGEDKKLAKKNELIIWLKLTSCQRQLYEAFLNSELVHSSMQGSPLAAITILKKICDHPLLLTKKAAXGVLEGMDAMLNNQEMGMVEKMAMNLADMAHDDDDVEMQ

SEQ ID NO: 25084 - protein, 539 aa, Oryza sativa
  Clone ID: TF_OsC86959_1.pep
GLQEFGTRQKNGEESSAGNKRKQPPSARSKSKKKKKKLKDSDIYLASGAVARVRWFRVVLDEAQTIKNFRTQVAKACCGLRAKRRWCLSGTPIQNAIDELYSYFHFLKYDPYSTYNSFCTMIKHPIARNAVHGYKKLQTVLRIVLLRRTKETLIDGEPIIKLPPKTINLDKVDFTKEERAFYLTLEERSRQQFKAYAAAGTLKQNYANILLMLLRLRQACDHPLLVKGHQSEYKGDGSIEMAKQLPKEMIINLLAKLEVGEFCSVCSDVPEDAVVTMCGHVFCYQCIYERITTDENMCPSPNCGNTLSTDSVFSSGALRICMSGVSSSHASGSSSLDDESSSISQTSYISSKIQAAIDILNSIINTYALTDSDTVESNPSRVAPVKAIVFSQWTGMLDLLELSLNSNLIQYRRLDGTMSLNSRDKAVKDFNTDPEVRVMIMSLKAGNLGLNMVAACHVILLDLWWNPYAEDQAIDRAHRIGQTRPVTVSRLTIKDTVEDRILALQEEKRAMVSSAFGEDKSGGHATRLTVDDLKYLFRF

SEQ ID NO: 25085 - protein, 1001 aa, Oryza sativa
  Clone ID: TF_OsC1528_2344.pep
MAAAGRDPPATPSSRMYYCRQRKASSEVNANVFVPGGQNGISFPASNRAHDWGYGGVREEWEASYARKLQLINFLSSLHQRTANSLITTRMDANMDTPLEQKQKDSSAIIVLDSDDEDEAERCEQLASENNKQQAPSGPTSPCTTWIVSSAKDQVNGTLHVDGVQSTQIVPYGQNAPLINQSPLQTSWQPSIQYERVILQRRPEEQRVQDLVAASHAEKIAETQVFLTLPTLPNERKRRKSEPTTLVDGDGGTNLGKGKRKNHQNQAAVDSILDLQQTVVPLQQNDVPSQSYRTMIEEEKPVKESDGLEDLWKDFSLAAECTKLDTNEDMSNEKDVDDENEMDDDCNHDIRIHEDLGHVCRICGMIVRKAETIIDYQWKKKNLLWGIFSLLKYFLKWESVFITNYIDIDTALEYIASRTRTNYYESRSKDADDIDTGAVKVSEDFIVSDIAIHPRHAKQMRPHQLEGFSFLVKNLVGDKPGGCILAHAPGSGKTFMLISFIQSFLAKYPSARPLVVLPKGILGTWKREFQRWQVEDIPLYDFYSVKADKRTEQLEVLKSWEARMSILFLGYKQFSRIICGDGDGNIAAACRDRLLMVPNLLILDEGHTPRNRETDVLASLKRVQTPRKVVLSGTLFQNHVSEVFNILDLVRPKFLKMESSRPIARRIMSQVAISGIRSLKGVHDSAFTESVEDTLLNDDNFTRKSHVIRSLRELTKDVLHYYKGDILDELPGLVDFSVFLKLSTKQKEIVHKIEAYEKFKRSAVGTALYIHPCLSEISEGDAADRATNLTDATVDSLIESIIIKDGVKAKFFFNILSLANSAGEKLLAFSQYILPMKFLERLLVKRLGWHVGKEIFMISGDTSADDREVAMDQFNNSADAKVLFGSIKACGEGISLVGASRVIILDVHLNPSVTRQAIGRAFRPGQQKKVFVYRLVAADSPEVKFHETAFKKEVIPKLWFEWSELCTTEDFKLNQVDIDDSEDELLEANAIRQDIKALYRR

SEQ ID NO: 25086 - protein, 1454 aa, Oryza sativa
  Clone ID: TF_OsC52680_1.pep
RSPPSRGGAAANGGGLSYSTLFNLEPLLNFKVPLPEDLDRYRRSSPNGSMSSQGQGSLSDQYNGINDASHGLHRKRKRNLDGASDDDEVDAYSNQITEEHYRTMLSEHVQKYRRSKFKEDVFSSDPPQVIVPQKHKNGSARVTKYRSDTRNVAMLGGVEATAEYNGTKSTNAYGGFNKVVASLDSSYLDMGDNVSYKIPEGYDKLALSLNLPVFSDIRVEETFLNGTLDLRTLAAMLSTDQKFETTNRGGLAEPQPQYESLQERVKVQKFSLQVTEDPFAIPEGAAGRIRRFIISESGSLHVHYVKVLEKGDTYEIIERSLPKKQIIRKDPSEIAREESEKTIKLWHAIAVKGIPRHHRNFMALLKKRQVDAKRFSENCQREVKFKVSRSLKLMRSAAIRTRRLARDMLIFWKRVDKEQYELRKREEKEAAEALKREEELREAKRQQQRLNFLLSQTELYSHFMQNKAGESAPSDEASVPEEDEEDPEEAELKREALRAAQHAVSQQKRMTNAFDSETGRLRQSSDSGIPTDDLASMEPNKIDLLHPSTMPEKSSVQTPELFKGALKEYQLKGLQWLVNCYEQGLNGILADEMGLGKTVQAMAFLAHLAEDKNIWGPFLVVAPASVVNNWAEEILVNEEKLLRRVKWQYMVLDEAQAIKSSSSQRWKTLLSFNCRNRLLLTGTPIQNNMAELWALLHFIMPTLFDSHEQFNEWFSKGIEGHAEHGGALNEHQLSRLHAILKPFMLRRVKIDVIAEMTKKKEEIVPCRLSSRQQVFYQAIKNKISLNELLDGSRGNLNDKKLLSLMNIVMQLRKVCNHPELFERNEGSSYFYFADIPNSLLSPAFGELQDVHYAGKRNPIMFEIPKLVYKGIVSNMEMPVRGCGFLYGSFNRMFNIFSPSYIHQSAFPEAISPNNTVLLSGAFGFTRLINLSPVEASFLATCSLFNRLAFSAVRWNKKYTDELVDVFLDSESTDLESTHNDLTTVRAVVRLLLSPTKAESSFLRTKIETGPSDSPYEALVLSHHERLVSNIRLLRSTYAFIPPARAPPINVWCADRNFAYKLTDEMHDPLAKKLVLGFARTSEFNGPREPTSPHSLIEELHTDLPFPEPMLQLPYRIFGSSPPMSNFDPAKMLTDSGKLQTLDILLRRLRAENHRVLLFAQMTKMLDILEDYMNFRKFKYFRLDGSSAISDRRDMVRDFQNRNDIFVFLLSTRAGGLGINLTAADTVIFYEIDWNPTQDQQAMDRTHRLGQTKEVTVYRLICKDTIEEKILQRAKQKNAVQELVMKGKHVQDDHLMRQEDVVSLLIDDTQISHKLKEISMQAKDRLKKRRTKGIKVDKEGDLMLEDLDDQTSGAAEHDNTSSKKKKSSQKKLPKLQDNGSVDKNAEAEGGEVEDEDSIAAPRPKRSKRLMKNLNEDKEPEQEPTTDGDNPAEAAENNISPDDNDTEEAKDRTPSA

SEQ ID NO: 25087 - protein, 801 aa, Oryza sativa; identical to SEQ ID NO: 17843
  Clone ID: TF_OsC303753_1.pep

SEQ ID NO: 25088 - protein, 1874 aa, Oryza sativa
  Clone ID: TF_OsC10987_1.pep
MLMLMDPPARSRRCTLLTRALLLAVAALALRLIYAAFLAGMALYPPLPAAAVLGSKTYLHSAVATPDAWRTRDWRKAVDYHATLLAPHLADGILSPTSRAVCLGAVQEALAMRELGVSTAVAVARKRSPPLAVAGNDRRLPFQDSSVDFVFAARALDSSKRPADLAAESARILKPDGHLVVLTTSAADAFSLRALQALLPSLRLLRSRQIKGPDDSTLRELVFQKIQDSTDDPVNKCTIGDHKLQLLTHAEPLIQEEPRKPWITLKRNIKNIKYLPTLADISFKRNYVYVDVGARSYGSSIGSWFRKHYPKQNHTFQVFAIEADPAFHSEYAAKKAVTLLPYAAWVKNETLNFEINADPGKEDEAKANGRGMGRIRPMAGKKMSGEVRSVPAFDFAEWLKRTVSEQDYVVMKMDVEGTEFDLIPRLFDTGAICLIDELFLECHYNRWQKCCPDRAEAFEMAKGVSCFYWSIQFPNFKDHLCFRNCSNASSTRHFSYRSLLIRTEKPVTTRNHAYAEVVVFVLDQNPMFFLFLRFFYPAIQRGPNCWSSANSTVMRQAFEVFYDGSWHGVNCIRIRNGNLFVKFIYSGSTVEHNVDGDCLRLRSRRATCSDCSNVLKPGVDVCVQSSHTPEASSQGGTNASVLLRHDARLITIKKNHQEDKCLCLFVVILYKNQCPGNAEKVITDRRAEVVTINDIFLLQKLQPEVHEGSMKWSFSKDRLSLNKGRLISARFSSEITHLIVLSILRGMEFNIKLVEGQIVYQIIKGDQAQWNLDSMAIPPGFGNTMEIISFQLRDEALRPTITNIPITHVKKNNITEDMRFTVKSEMDSELDRALDVEILYEHVDLRRSKRLKTQPDRFTSYDTPRFLSGYKKKEASSSPTKHVRGAVHCDSPVDDSKKEVESCCVEIPGNVTQKQTGVHSPMVDEKSNSPEGQHKNTTKRTTCSLVKEKASSPEGQHEKTTKRTTCALPVKEKASSPEGQHKNTIKRTTCSLPVKEEPSSVEIEEKSSKEQSAPEFHIPRTPAQNKEKHNRPPFSCKPKLFTSSGTLGVNCEPAFCQKVGGKRKRHMCEREYKQMIDQCIGNIESEMERDSMFNFDANMMNYVQHSYREEDFTWPPSADNQEVEEDELEELWKEMDYSLTTLALLEQKQVMAQSRINMLVDNFDGLRLDCLTLTDDYRCYYQKKEKFAESGSVNESTDYFGKVGGIPCHHECILDEELGLACRLCNVVCTEAKDIFPEMFNGNDYKDRPGCSNICLDDDILDPSLLANLAPELSELKNSGSVWSAISDLDPKLLPHQRKALDFLWKNLAGSIQVEGMDNSNVSTGGCVIAHTPGSGKTLLLISFLVSYMKAHPRSRPLVLTPKAAIHTWKREFEKWGISLPLHVFHHANRSGKPLGAMDSKLRSLLNNFHRPTWTNMRLMDSLDKLFKWHAHPSVLLMTYSSFLGMTKQDSKVRNRYREFIAEVLMNNPGLLILDEGHNPRSNKSKLRKLLMKVKTEFRILLSGTAFQNNFEEYFNTLCLARPRFIGDIMSELVPERKRETVGRRAKHQEAVARRAFVEKVGQKIESDNKHIRSDGISLLNKLTRGFIDSFEGAKLINLPGIHVYTVFMKPTDIQEEMLAKVTMPKLGSSRFPLEVELLITIGSIHPWLIKTTKAVSTFFSPAEVKKVERYKRDFAAGCKAKFVIDLLHKSSFRGERVLIFCHNVSPITFLVKLIEMVFGWRLGEEVLVLQGDQELPVRSDVMDKFNGDSAGKRKVLIASTTACAEGISLTGASRLVMLDSEWNHSKTRQAIARAFRRGQERTVYVYLLVASGTWEEEKYNSNRRKAWMSKMVFLGRYVDDSSQNRVTDIDDEVLKELADEDHTGTFHMIVKQD

SEQ ID NO: 25089 - protein, 1148 aa, Oryza sativa; identical to SEQ ID NO: 17844
  Clone ID: TF_OsC108092_1.pep

SEQ ID NO: 25090 - protein, 1122 aa, Oryza sativa; identical to SEQ ID NO: 17845
  Clone ID: TF_OsC3901_1.pep

SEQ ID NO: 25091 - protein, 1158 aa, Oryza sativa
  Clone ID: TF_OsC3901_3.pep
MGKPGKYGDGDDDDSEEEQLSPSSSAGEEEEEEVEEEEGEEQQEEQGEEEEGFSGDEEEQEVEGEADGEQVEEEEEEESSVGEEEAEAEGEEEEEEVEEEQGAGEEEEEEVDEEEIEAVTTGAGGDDDDEEVGDDGGAEEESQSTEDDEVAAGKDGGGEDGDKLEDATGNAEIGKRERAKLREMQKLKKHKIQEILDAQNKAIDADMNNKGKGRLKYLLQQTEIFAHFAKGNQSTEKKSRGRGRHASKMTEEEEDEEYLKEEEDALDGAGGTRLVSQPSCIKGKMRDYQLAGLNWLIRLYENGINGILADEMGLGKTLQTISLLGYLHEFRGITGPHMVVAPKSTLGNWMKEIQRFCPVLRAIKFLGNPEERNHIRENLLVPGKFDVCVTSFEMAIKEKTALKRFSWRYIIIDEAHRIKNENSLLSKTMRIYNTNYRLLITGTPLQNNLHELWSLLNFLLPEIFSSAETFDDWFQISGENDQHEVVQQLHKVLRPFLLRRLKSDVEKGLPPKKETILKVGMSEMQKQYYRALLQKDLEVVNAGGERKRLLNIAMQLRKCCNHPYLFQGAEPGPPYTTGDHLIENAGKMVLLDKLLPKLKERDSRVLIFSQMTRLLDILEDYLMYKGYQYCRIDGNTGGEDRDASIEAFNKPGSEKFVFLLSTRAGGLGINLATADVVILYDSDWNPQVDLQAQDRAHRIGQKKEVQVFRFCTEYTIEEKVIERAYKKLALDALVIQQGRLAEQKAVNKDELLQMVRFGAEMVFSSKDSTITDEDIDRIIAKGEEATAQLDAKMKKFTEDAIKFKMDDTAELYDFDDDKDENKLDFKKLVTDNWIEPTSRRERKRNYSESDYFKQALRQGAPAKPREPRIPRMPHLHDFQFFNTQRLNELYEKEVKYLVQANQKKDTVGEGDDEDQLEPLTVEEQEEKEQLLEEGFSTWTRRDFNTFIRACEKYGRNDIKNISSEMEGKTEEEVQRYAKVFQERYKELNDYDRVIKNIEKGEARIYRKDEIMKAIGKKLDRYKNPWLELKIQYGQNKGKLYNEECDRFMLCMVHKLGYGNWDELKAAFRMSPLFRFDWFVKSRTTQELARRCETLIRLVEKENQEYDERERLARKDKKNMSPAKRSSSRSLDTPPQSSSKRRRQSYTEANAGSGRRRRG

SEQ ID NO: 25092 - protein, 958 aa, Oryza sativa; identical to SEQ ID NO: 17846
  Clone ID: TF_OsC1528_2264.pep

SEQ ID NO: 25093 - protein, 54 aa, Oryza sativa
  unsure (1)..(54): unsure at all Xaa locations
  Clone ID: TF_LIB4506-028-R1-K1-C10.pep
TRPGVVDTTQALXQVRTQRTNCVNVDSPLQNNLMEYYCMVDFVREGYLGSXPXF

SEQ ID NO: 25094 - protein, 64 aa, Oryza sativa
  Clone ID: TF_LIB3431-031-P1-K1-H7.pep
SVLGSSMEPGKFLTILCHSATMMKIPFYTAGLRTLRVSICRTLFTTSCALQLNKLIKLVPIAVW

SEQ ID NO: 25095 - protein, 121 aa, Oryza sativa
  unsure (1)..(121): unsure at all Xaa locations
  Clone ID: TF_jC-osflLIB3477P006e01b1.pep
MGRGRVELLRLVNKITWRAPFAECGXGLLKKAYQLCALCDAEVALIISYNRGQLYESCSGQSMTRTLERHPKARYGGPDSAIHNKENESVQSSRNEYLTLKAQVVXLHRTLRNLLGEDPET

SEQ ID NO: 25096 - protein, 180 aa, Oryza sativa
  Clone ID: TF_OsC39886_2.pep
MARKKMKLLRIVIDVKRRVTFRKHLKGLMKKVSEFATLFLMVYGEVEVQATKVWPSVWEATRVLEHFKAMPQLGRYKKMIDLEGILNKQIDKLKEKLHKLGREADESETKLLLIEAINGRHPSLDGLTIEQIISLGRMANSRLKIVNDRLKKLRAPSSFASVLPCPPPPPPPRRPASPPP

SEQ ID NO: 25097 - protein, 547 aa, Oryza sativa
  Clone ID: TF_OsC1664_1.pep
MHPPIQHHQAETLRSADSTTHLNLNREISSVQRQRAARLLTFARLVEPSRARSERIHIDAALMSALVDRWRPETHTFHLTVGEMVPTLQDVSYLLGLPIAGPAVGPTMVNAGWADDLLASFGGVLPVALEDLTDGHGPTKSWLNQFRQDVFPDDQEEWIVQRHLVAYLLWLFGWVMFTGTHADSVDKHFIHFAEQIAELPIAEIPQYSWGSAVLAATYAGLCDACVRNSKQSSLPGCPLLLMLWAHERFDIGRPQLDSYANYGLREMYRSGVDDIDDRPTMGSLWTHREPQWVSGTTRRVYTQFVADFDQLTPDRVRWTPYTQHDVNDRAPHGLADLCTRDMQLWRTTCHLVLDVHVEPHNVHRVLKQLGMYQDFPPRDGRPLADSLHRYFRKGLGLSYELVIVTTVQPTVQEWEHAADNLALQTPPDDGSYYGAYLRWYRSVTRWRCFPPQRDSTVPHQAAITDTFAPQPRSAYKSMAEFVEHVHVESDTLLQRLEARPPVVRSDDVASVLRNFRARAAALLRRVSCRSAADVVQTSGRRLSRPEI

SEQ ID NO: 25098 - protein, 385 aa, Oryza sativa; identical to SEQ ID NO: 17895
  Clone ID: TF_OsC76961_1.pep

SEQ ID NO: 25099 - protein, 417 aa, Oryza sativa; identical to SEQ ID NO: 17896
  Clone ID: TF_OsC12322_1.pep

SEQ ID NO: 25100 - protein, 152 aa, Oryza sativa
  Clone ID: TF_uC-osflM202089a01b1.pep
MGRVKLQIKRIENIPNRQVTFSKRRNGLIKKAYELSVLCDIDIALLMFSPSGRLSHFSGRRRIEDVLTRYINLPESDRGGTIQNREYLINMLTQLKCESDVTEDLTNTSSKAPVNSNIEELQHEIRRCQHQMQLTEEQLRMFEPDTARSASM

SEQ ID NO: 25101 - protein, 164 aa, Oryza sativa
  Clone ID: TF_OsC1638_1.pep
MARRGRVQLRRIEDKASRQVRFSKRRAGLFKKAFELALLCDVEVALLVFSPVGKLYEYSSSSIEGTYDRYQQFAGARRDLNEGSTSINSDENASIHSRLRDITAWSLQNNADESDANQLEKLEKLLTNALRDTKSKKMLAKQNGEGSRSRANSSGSRGQEEGSA

SEQ ID NO: 25102 - protein, 275 aa, Oryza sativa; identical to SEQ ID NO: 17901
  Clone ID: TF_OsC330374_1.pep

SEQ ID NO: 25103 - protein, 137 aa, Oryza sativa
  Clone ID: TF_uC-osflcyp126b06b1.pep
MDGGMGMGGERWTRRDPSWFPETRYAAEHLGFPTRWRSIGMGRGRVELKRIENKINRQVTFAKRRNGLLKKAYELSVLCDAEVALIIFSNRGKLYEFCSTQSMTKTLEKYQKCSYAGPETAVQNRESEQLKASRNEY

SEQ ID NO: 25104 - protein, 351 aa, Oryza sativa
  Clone ID: TF_OsC49770_1.pep
MGLIGSDRRRPGIRMGRVKLPIKRIENTTNRQVTFSKRRNGLIKKAYELSVLCDIDVALLMFSPSGRLSHFSGRRGVEDVILRYMNLSEHDRGEAIQNREEIQQEIYSSQQQLQITEDRLRMFEPDPAAFGTSSEVDGCEKYLMELLTRVVERKNNLLSSHMAPFDATTAAMQGADGTQMYVSQADGLATFGGDAAMWGPDGGADPGHPMFSASDPLIYLRDHDVYDANSQVAGLHGGDPCAAGGAAAAAAAVGCVDDDVAGGHAAAADAWRQAYTCTELLSTLIPTTPFPLMPHCLGPEDQYLSMEHGMVAAAQEPVEASTASCSYVPSDENSGTPVMAYDSNPPPANIA

SEQ ID NO: 25105 - protein, 209 aa, Oryza sativa
  Clone ID: TF_OsC39886_1.pep
MARKKVKLQGIVIDVKQRVTFMKSLKGLTKKVSEFATLFLMVYGEVEVQATKVWPSVWEATRVLEHFKAMPHLVRYKKMTDLEDILNEQVNKLKEQLHKVGRDADESETKLLLIEAINGHRPSLEGLTIEQITSLGWMANAHLKIVNDRLKKLREEGLIPASVSLSSTEVPIQREGLLVDVARGIGSMGYNRFGGSSGSGTAGSNGDMA

SEQ ID NO: 25106 - protein, 223 aa, Oryza sativa
  Clone ID: TF_OsC8260_1.pep
MEKAAANQAGKVLKKGKKKQAKDELDRQKQAEKKRRRLEKALANSAAIISELEKKKQKKREEQQRLDEEGAAIAEAVALHVLIGEDSDEPCHLMLNKHRRCNHWDHSAGFDFAVDAQGADIYPPDGLIQCADHVYAPKGRCIDWGIGQPLPSWGEVKDLQLQAPCYQGMFHQSVACPGFIAAQAVSSLQIGGDSSDITSPSQGATVVNRMLGATNRLNLYREI

SEQ ID NO: 25107 - protein, 92 aa, Oryza sativa
  Clone ID: TF_OsC354917_1.pep
MAVELGPELLGALANSGNSASPTSPTSTSHQNRPSAFACKIFAVMPRIRAFSAATSALVSPTAYLSISRSTSLPNPPLWTGAGSASSPGTGP

SEQ ID NO: 25108 - protein, 48 aa, Oryza sativa
  Clone ID: TF_uC-osflcyp174g12b1.pep
MGRGRVELKKIENPTNRQVTFSKRRMGLLKKANELAILCDAQIGAIVF

SEQ ID NO: 25109 - protein, 604 aa, Oryza sativa; identical to SEQ ID NO: 17916
  Clone ID: TF_OsC341899_1.pep

SEQ ID NO: 25110 - protein, 77 aa, Oryza sativa; identical to SEQ ID NO: 17917
  Clone ID: TF_OsC392063_1.pep

SEQ ID NO: 25111 - protein, 235 aa, Oryza sativa
  unsure (1)..(235): unsure at all Xaa locations
  Clone ID: TF_LIB4506-004-R1-K1-A10.pep
MGRVKLXIMRIVNMLNRLVTFSMRRNGLVKKAYELSVLCDIVMGLLMFCPSDRLSHFSGRRRIEDVLTRLINSPRKXHEEXNYVKYMRVFRSHMLTQLXARATLTEDLTNTSSKAPVNSNIEELEQEIRRCQHQMQLTEEQLMMFEPDPARCASMEDVQASDKFIAGILSRVQEMKRYLLCNMGSFDVTASTSAMQHLYLPQQHQHGDITDDGFGSDEVASWVSEGSRLQPRRWR

SEQ ID NO: 25112 - protein, 74 aa, Oryza sativa
  Clone ID: TF_OsC345886_1.pep
SERVAAHDGGPDPPKRPGELRQLRLPERLDVGGLPPPPEPPPRDVAQPRHLHLGLVRRPPQRLGLAVVDTGAGA

SEQ ID NO: 25113 - protein, 450 aa, Oryza sativa; identical to SEQ ID NO: 17918
  Clone ID: TF_OsC91_2112.pep

SEQ ID NO: 25114 - protein, 490 aa, Oryza sativa
  Clone ID: TF_OsC256615_1.pep
MEREFCGEMESQICQFGTFLEVNNQHSATPKGKTIPVKCTDCLPGVASRSLTVIPLEVPHDVLLSAREAKTQYNSTFEHNLSETNFVTGTYNGAHHANVKDVPPDIYETEFRHQFPRIETSFSIIGAHFLSSMVRRGRRKGVRYIEEDRDRSLTLSKRRDGLFKLANDLSLLTDASVAICLHDSNKAQFFGAPSVKPVVDAFVSEAEPFADEQLKAKLTSMQSELVQLENEEEEKDKKTEESIQRFKEAQEESLGMGMAKHLFSRLEDLSHDDMRELLDVLLPLQQDFKKRLPPLRRGSKLQIGGSSAWAHQQPSCSRFLASHRPFTPLLPGGTSGVPMIPPPPVPGSPWSQIFPLRPPLFPSPELVPSQQLPPVSPPQNTVAPPPMHAPLVQQPLTNQSSAVPLLTQWQMRFGDQPPAEVQACTPVEQPQNDNAVHTPTFSDSFLLELLADVSDDGIATAEPLCSPPIDDQFLADIDWLAELDTIDGNL

SEQ ID NO: 25115 - protein, 59 aa, Oryza sativa
  Clone ID: TF_uC-osflM202096e01b1.pep
MGRRKVQLKRIEHNMNRAVSESKRRHGCDKNCHEIVARVKGMVVLMRLAETGELYELSI

SEQ ID NO: 25116 - protein, 50 aa, Oryza sativa
  Clone ID: TF_uC-osflcyp139b07b1.pep
MGRGREELKRIENKNNRLVTFEKRRNGLHKKANEFYVLCDAEVCLIIYSN

SEQ ID NO: 25117 - protein, 268 aa, Oryza sativa; identical to SEQ ID NO: 17885
  Clone ID: TF_OsC383105_1.pep

SEQ ID NO: 25118 - protein, 241 aa, Oryza sativa
  Clone ID: TF_OsC136517_1.pep
MGRPRGGTSKGKQKIEMCCIDGKEKRQVTFSKRRRGLFKKASEISTLSGASIAIVSFSKAGNVFAFGSPSVDAVLRRHVVAGPSTSTSHAHAGGDVFADDGGDNPEVLNALKRATDEAAAEVAAEDARQSGVEGKITEAMAAGRRRFWWDAANVEALGEAELPVFERALHKLRGAVAQGGNNPIQERWDRIPAQGSPGGSYGWEDLSPTGKLYNQPPFAYRLPVMQSIVSDQLGVVRAMLL

SEQ ID NO: 25119 - protein, 135 aa, Oryza sativa
  Clone ID: TF_jC-osleLIB3474029f03b1.pep
MGRRGREELRRIEDRVRRGICFRKRLAGLEKKVEELAVLCDAHVGFVDLSCSGDDANPHHFAAPATIENIVERYEHSQAAQKGVHGRCILQKRKSKDFQVLKETIDKGPINDDMRPIDEKDISTLNMDQISQNEI

SEQ ID NO: 25120 - protein, 483 aa, Oryza sativa; identical to SEQ ID NO: 17887
  Clone ID: TF_OsC373794_1.pep

SEQ ID NO: 25121 - protein, 185 aa, Oryza sativa
  Clone ID: TF_OsC42645_1.pep
MVASRRKMESEEARKVCFSKRRADLFKMASELSVHFNADVAAVVFSPAGNRAYSIGDPSVMDRFLSSLPAPAPPAETEPEPEVDWSVMEELSRLCGQLQAMVDAHKARLEKAEEKLRESGAAAWMMDLEAEVGRMAPEDVLALVTKLAVLRDGVAERAHEMLREALLAVAAPTPTTPTTPPPAGF

SEQ ID NO: 25122 - protein, 68 aa, Oryza sativa
  Clone ID: TF_LIB4309-018-R1-K1-C9.pep
FASSFRKQRYAAFIMRLREPKTTALIFASGKMAWFNFLHRDCKCSVLFICLLTCELVCYLSNGQLLIL

SEQ ID NO: 25123 - protein, 241 aa, Oryza sativa; identical to SEQ ID NO: 17922
  Clone ID: TF_OsC714_2.pep

SEQ ID NO: 25124 - protein, 203 aa, Oryza sativa
  Clone ID: TF_OsC714_1.pep
MAAEAAAALEGSEPVDLAKHPSGIIPTLQNIVSTVNLDCKLDLKAIALQARNAEYNPKRFAAVIMRIREPKTTALIFASGKMVCTGAKSEQQSKLAARKYARIIQKLGFPAKFKDFKIQNIVGSCDVKFPIRLEGLAYSHGAFSSYEPELFPGLIYRMKQPKIVLLIFVSGKIVLTGAKVRDETYTAFENIYPVLTEFRKVQQ

SEQ ID NO: 25125 - protein, 121 aa, Oryza sativa
  Clone ID: TF_uC-osroM202023b12b1.pep
MAAAEAAAEAAAALEGSEPVDLVKHPSGIIPTLQNIVSTVNLDCKLDLKAIALQARNAEYNPKRFAAVIMRIREPKTTALIFASGKMVCTGAKSEQQSKLAARKYARIIQKLGFAAKLRTS

SEQ ID NO: 25126 - protein, 218 aa, Oryza sativa
  Clone ID: TF_OsC104933_1.pep
MAAAAVDPMALGLGTSGGGGGGESAVGGDGAEPVDLVEHPSGIVPTLQNIVSTVNLDCRLDLKKIALQARNAEYNPKRFAAVIMRIRDPKTTALIFASGKMVCTGAKSEDHSKLAARKYARIVQKLGFPAKFKDFKIQNIVGSCDVKFAKRFTLPLRTCSRCSLNTGKLSSAEGMICRQNGEFAPAVHTILRTCPGPDFETCTWRHSFFFPLFFVAVG

SEQ ID NO: 25127 - protein, 119 aa, Oryza sativa
  unsure (1)..(119): unsure at all Xaa locations
  Clone ID: TF_LIB3434-047-P1-K1-E1.pep
RLDLKKIALQARNAEYNPKRFAAVIMRIRDPKTTALIFASGKMVCTGAKSEDHSKLAARKYARIVQKLGFPAKFKDFKIQNIVGSCDVKFPIRLEGLAYSHGAFSSYEPELXPGLIYRM

SEQ ID NO: 25128 - protein, 192 aa, Oryza sativa
  Clone ID: TF_OsC12862_1.pep
MAATTTGRVVALGAVAVVVALTFLAGGADADCYDFCFKDCMARENNMVDYCSYACDKTCQPDKPTLYSSSSSSRLAGDMECQLSCALGSCHRLLPDGKGAVEACFGQCYDGCKTTAAARLPRPLRAGHYVLSSPPDDVDHDPDHRYVFSSPHDDVDHDPDQVFASPPDDIDRHVFAAPPDVLAALPGEPDHA

SEQ ID NO: 25129 - protein, 259 aa, Oryza sativa; identical to SEQ ID NO: 17924
  Clone ID: TF_OsC420086_1.pep

SEQ ID NO: 25130 - protein, 307 aa, Oryza sativa; identical to SEQ ID NO: 17934
  Clone ID: TF_OsC45299_1.pep

SEQ ID NO: 25131 - protein, 450 aa, Oryza sativa
  Clone ID: TF_OsC903_2.pep
MRGQNLASCFNFRSSPFRLTVGERELKLEEDKNQLSKGLDPWTSNPTASASTLHYLLQEKERAQQAHEQLQIYQQQQGFGSFLQHRIRQPASRGPGGGGGGGDGGGSSGESTPVEALATAFGAGRIVRSAAGRKDRHSKVCTARGLRDRRVRLAAHTAIRFYDVQDRLGYDRPSKAVDWLMRNAKAAIDELPDRAEAPPPPAAASTEQPEATEQATSTSYGFGNTTGGTMTSAASAAAGSFLPHSLGADRVSDSVKSLFPSSSTASGAASAGHDEYRGSPPDLLSRTTSNQQPQELCLTLQSNQHQIFSHVSSNHHGMISSAGVPGWPDHSQRMQAWHAPENSTGDGRGGGNGDGYMFAMPSRQGLDQSQLFSHGEPLQSSGRGWASARAWLDPLAVAAIHHQPSTMAAGQVGFGHLVGGAGGGGGFMGFLAPAAQRLEGEEEHGSEVIR

SEQ ID NO: 25132 - protein, 337 aa, Oryza sativa; identical to SEQ ID NO: 17936
  Clone ID: TF_OsC12862_2.pep

SEQ ID NO: 25133 - protein, 59 aa, Oryza sativa
  unsure (1)..(59): unsure at all Xaa locations
  Clone ID: TF_5003300.pep
GKDRHSKVYTAKGIXDXRVXXSVSTAIQFYDLXDRXGYDQPSKAIEWLIKAAAXXSASS

SEQ ID NO: 25134 - protein, 277 aa, Oryza sativa
  Clone ID: TF_OsC12862_5.pep
MQVVAAVTGNRRMQGLGPKRSSNKDRHTKVDGRGRRIRMPALCAAWIFQLTRELDHKSNSETVQWLLQQVEPAIVTAMGTGVGTDIQGPSLPSPNCALSRSHHHHHHMWAAAAAPPAASAAFAGLSQDGHIGVLSARSLSQFYHQVGDASAAVVTPAAPWMVAGLSPSKCLGESSIFFTPQSAHDMLFERLLDELMYLCLCSFLQVYNSRELDGLDHRCRVSALFVIAGRCVDIQVFLQLERSSFFPFYESDDPLMCDKYDVRQTDPHPRAVSATQI

SEQ ID NO: 25135 - protein, 388 aa, Oryza sativa
  Clone ID: TF_OsC2035_1.pep
MLPFFDSPSPMDIPLYQQLQLTPPSPKPDHHHHHHSTFFYYHHHPPSSPSFPSFPSPAAATIASPSPAMHPFMDLELEPHGQQLAAAEEDGAGGQGVDAGVPFGVDGAAAAAAARKDRHSKISTAGGMRDRRMRLSLDVARKFFALQDMLGFDKASKTVQWLLNMSKAAIREIMSDDASSVCEEDGSSSLSVDGKQQQHSNPADRGGGAGDHKGAAHGHSDGKKPAKPRRAAANPKPPRRLANAHPVPDKESRAKARERARERTKEKNRMRWVTLASAISVEAATAAAAAGEDKSPTSPSNNLNHSSSTNLVSTELEDGSSSTRHNGVGVSGGRMQEISAASEASDVIMAFANGGAYGDSGSYYLQQQHQQDQWELGGVVYANSRHYC

SEQ ID NO: 25136 - protein, 373 aa, Oryza sativa
  Clone ID: TF_OsC1117_1.pep
MEAQAQDKAEEGEEEGTRQQHAQAGPVGAAGGGGGGGAAAVAMSAIPMNSWLVPKPEPVEFFGGMAMVRKPPPRNRDRHTKVEGRGRRIRMPAACAARIFQLTRELGHKSDGETIRWLLQQSEPAIIAATGTGTVPAIATTVDGVLRIPTQSSSSSGPASSAVVDGEESSAKRRRKLQPTRAVAGASPLATAAPAAYYPVIADPLLQGSGGAAISVPSGLAPITATGAPQGLVPVFAVPATGSPAVAGGNRMIPQATAVWMVPQPAGAAGAGNQPTQFWAIQSAPQLVNFAGAQFPTAINVADFQQQQQQQPVSTTIVQNSNSGEHMHFSGADSHEQQRRGRKEGNSGGVVDHPEEDEDDDDDEPVSDSSPEE

SEQ ID NO: 25137 - protein, 343 aa, Oryza sativa
  Clone ID: TF_OsC900_3.pep
MDVTGDGGGGGQRPNFPLQLLGKKEEQTCSTSQTAGAGGGGVVGANGSAAAAPPKRTSTKDRHTKVDGRGRRIRMPAICAARVFQLTRELGHKTDGETIEWLLQQAEPAVIAATGTGTIPANFTSLNISLRSSGSSLSIPSHLRLAGLAGPRFGGGARAADAWDRVVGLGFGGAADAPSSATSSSSSPLLLSFHSGSSQIPAGTVWMVPSSNAQAAGGGAPPGGGGESIWTFPQSGSGGGGGAATVYRGVPSGLHFMNFPATPMALLPGGQQLGLAGAGGGGEGHPGILAALNAYRAQAAQPDAGAAAQNGAQGSSQHRQHQHHGGGGGGGDERHESMSASDS

SEQ ID NO: 25138 - protein, 213 aa, Oryza sativa
  Clone ID: TF_OsC900_1.pep
THPQREGGRQAARRHQIHSPLLFQTTTSLTSLKNPIKERYSWFISVYIYHGLIDDHGRSPETPEVARRPNFPLQLLEKKEEQPCSSSAAGGGTGPSSAGGNGNNGSGPGGAGGEMQQLRKAAPKRSSTKDRHTKVEGRGRRIRMPALCAARVFQLTRELGHKTDGENEWLLQQAEPAVIAATGTGNPGNFTSLNISLRSSGSRCPPRRTSRVT

SEQ ID NO: 25139 - protein, 445 aa, Oryza sativa; identical to SEQ ID NO: 17948
  Clone ID: TF_OsC219434_1.pep

SEQ ID NO: 25140 - protein, 211 aa, Oryza sativa; identical to SEQ ID NO: 17950
  Clone ID: TF_OsC6287_1.pep

SEQ ID NO: 25141 - protein, 311 aa, Oryza sativa; identical to SEQ ID NO: 17951
  Clone ID: TF_OsC1116_2.pep

SEQ ID NO: 25142 - protein, 357 aa, Oryza sativa
  Clone ID: TF_OsC934_1.pep
SCSLQGAQLTASERFRVAQSELLLVGPSNSGASSPGSSVSIDPLQTKRRRISHEVAQASAMEEVVVGGKERKRPRGALVGVGGGGASAATAAAWRTSRVARAAAGGKDRHSKVVTSRGLRDRRVRLSVPTAIAFYDIQDRLGVDQPSKAIEWLIRAAAAAIDALPSLDCSLALPAAASSPPPPAADDAEVSTSETSKSSVLSLANAPCDNGGGAFAELLHCSNTNGSKPLQQQQQATLAYYAAAQSAHMAAPMSFEVMAMPPHLAFSQEQQQHATVAAFDRGTLQSNASLWPPPPQPPPSQHPFLLQRFAAAPAEVAGLPFFLAGGVGGAAAAAPAATTNGGERRLQLWDFKEERKT

SEQ ID NO: 25143 - protein, 422 aa, Oryza sativa
  Clone ID: TF_OsC900_2.pep
GTSGGLRAAAAAAEGGMEQQAAPSSSTSTSTNSSRSTSDHHAAAAAAAAAAAAQVAHQHHPFYYAAAQGGANTMPAPASFMGSLAIVPAAAAPGGGGGQVQAAAAPVASSEKKAVVAAGAGAKRPTKDRHTKVEGRGRRIRMPALCAARVFQLTRELGHKTDGETIEWLLQQAEPAIVAATGTGTIPANFSSLAVSLRSAASHSSSPRAAPFHHLQQQQQHDVAAMLGFHHHHHQLLPPPPPHQHPEPTPQDPGAGEFMRKRYREADDLFKDTSRQDPVDGATGEAEQKARAAAAAAAPPPTAPSAMWAVGPNTTGATAAFWMQPAWAFPHGAGAGAAGNTVQAPLQFMSRSSFPTAMNVTMADNNNSSNNNLGMLAALNAGGGGRSGEHQHQHEGQSPAEMDHQRRANGGGGEAGGAASSQ

SEQ ID NO: 25144 - protein, 646 aa, Oryza sativa
  Clone ID: TF_OsC901_1.pep
CPIHGIASSLVPHSSPGYGIRRGGWTRIGAATVAAGKKAAGDLDPRHHHHRVTHGGDGGGVGGGGSGGQEEADEQQQQQHDHHRLLQLHHHQGVQQDQEPPPVPVFHLQPASVRQLSGSSAEYALLSPMGDAGGHSHHHQHGFQPQLLSFGGVGHHHHLHQFTAQPQPPAASHTRGRGGGGEIVPATTTPRSRGGGGGGGGEIVAVQGGHIVRSTGRKDRHSKVCTARGPRDRRVRLSAHTAIQFYDVQDRLGYDRPSKAVDWLIKNAKDAIDKLDVLPAWQPTAGGAGAGNAAAPPSSSTHPDSAENSDDQAQAITVAHTAFDFAGGGSGGTSFLPPSLDSDAIADTIKSFFPMGGTAGGEASSSTTAAQSSAMGFQSYTPDLLSRTGSQSQELRLSLQSLPDPMFHHQQHRHGGGGGGGNGTTQQALFSGAANYSFGGGAMWATEQQAQNQRMLPWNVPDPGGGGGAAYLFNVSQQAAHMQAAAAALGGHQSQFFFQRGPLQSSNQPSERGWPETVEADNQMSHHQGGLSPSVSAAIGFAAPGIGFSGFRLPARIQGDEEHNGGGGGNGDKPPPPSSLAPPLPSRNCRLHSGGAKFGGSTSALLLMLLHIGWLVGWFSIDLFCCCACHWFLFQEFTRSFLELGL

SEQ ID NO: 25145 - protein, 315 aa, Oryza sativa
  Clone ID: TF_OsC902_1.pep
GTSRVRATGGKDRHSKVYTAKGIRDRRVRLSVATAIQFYDLQDRLGFDQPSKAIEWLINAASPAIDTLPSLDPAAFAAIPHAAADAAPTRRRSQQQQQQLSNKSGCSSTSETSKGSDKEVTVASAPAQAASFTELLIAGVAASSAGGGAIGNGADCVGIAHPGKGGAEGASTYGFSAASSFGDAPPIGMVPAPPFNFSAPGADMAAHYSLAQDQLAAPPPPAGGDYNLNFSMSSGFLGANRGTLQSNSPSNMSGHHHHHHQQQLQRLDGSTISFLLGHAAAAAHPAASEGQITSTAALQLWDGFRHSGMKEKSKN

SEQ ID NO: 25146 - protein, 119 aa, Oryza sativa
  unsure (1)..(119): unsure at all Xaa locations
  Clone ID: TF_OsC934_2.pep
MAAAWRTSRVACVAAGEKDKHSKVVTSRGLPDRRVRLSVPTAIAFYDIQDRLGVDQPSKAIEWLIRAAAAAIDALPSLDCSLVLPNAAXAPHPPEAEAVERAAFGGAGAHEEGYGGGVA

SEQ ID NO: 25147 - protein, 370 aa, Oryza sativa
  Clone ID: TF_OsC1116_1.pep
MLLQETRQRKEGGLACLLVCCTSHSWRQSHVQLQMLCQEMNKRNLQQAHVPSSPCVWRGRAPARSAPPSRRCTCRCSPAESSLSPPPPPPLNDCIGHWRLLLFSPVAVQPIPHTPHHYPTCPCPTPPLRSSPLLMTTRPDGGGGGGGAPDKQLVPASNANGTALAVRKPPSKDRHSKVDGRGRRIRMPIICAARVFQLTRELGHKSDGQTIEWLLRQAEPSIIAATGTGTTPASFSTSSPSSLRSNSTSNSNDLLLPRAAPFILGKRLRAADDHTTSPAPAPDATAPTQAFWALPARADFGQLWSFAAAPEMMVAAAAAPAMPGEASAARVGNYLPMAQGNLNLLASFSGGPGGAGATAATGRPEEESAR

SEQ ID NO: 25148 - protein, 326 aa, Oryza sativa; identical to SEQ ID NO: 17931
  Clone ID: TF_OsC45299_2.pep

SEQ ID NO: 25149 - protein, 116 aa, Oryza sativa
  Clone ID: TF_OsC201546_1.pep
MAMSALKFCGECSNMLYPREDKETHTLLYACNSCEHQEPATDTCVYKRVLRKPAGEPKDILKDAATDPTLPRTRSIKCYNCGHPEAAFFQAPTKGEKGLTLYFICCNPSCGHRWRD

SEQ ID NO: 25150 - protein, 114 aa, Oryza sativa
  Clone ID: TF_OsC138347_1.pep
MSTMKFCRECNNILYPKEDRDQKILLYACRNCDHQEVADNNCVYRNVVHHSAGEFTQVLQDVAGDPTLPRTKAVRCAVCGHGEAVFFQATARGEEGMTLFFVCCNPSCGHRWRE

SEQ ID NO: 25151 - protein, 114 aa, Oryza sativa
  Clone ID: TF_OsC6358_1.pep
MSTMKFCRECNNILYPKEEKDRRLLLFACRNCEHQEVSESKCVYRNEVAHAAGERTQVLQDVASDPTLPRTKTVRCAACGHGEAVFFQATARGEEGMTLFFVCCNLTCAHRWRE

SEQ ID NO: 25152 - protein, 189 aa, Oryza sativa
  Clone ID: TF_OsC11113_2.pep
MPESVIGEDEPATAFTRRRRLALPPPSPSPVLHRRPSERRPPSPANHRLEEKEHFAGDGGGGGMAFWQARDFLFCGVCGTLLKFDSVRSASCPLCGFKRKAKDIEGKETRYTVTAEDIRRELKLDPYVILETTLKEEDVIVERATVNKECEKCKNPELQYYTKQLRSADEGQTVFYKCANCRHEFNENQ

SEQ ID NO: 25153 - protein, 156 aa, Oryza sativa; identical to SEQ ID NO: 17955
  Clone ID: TF_OsC11113_3.pep

SEQ ID NO: 25154 - protein, 373 aa, Oryza sativa; identical to SEQ ID NO: 17958
  Clone ID: TF_OsC110921_1.pep

SEQ ID NO: 25155 - protein, 367 aa, Oryza sativa; identical to SEQ ID NO: 17957
  Clone ID: TF_OsC44273_1.pep

SEQ ID NO: 25156 - protein, 121 aa, Oryza sativa
  Clone ID: TF_uC-osflcyp081e09b1.pep
AYNGVDVNRGKDGLWPGCGMLLQIQPATGGNRLRFYCPTCPYVCPVKNKIVKKARLVKKEVEPIFSDSDAMKNAPKTTTTCPRCQNGDAYYRQMQIRSADEPMSTFYKCCREECQFDLRED

SEQ ID NO: 25157 - protein, 885 aa, Oryza sativa
  Clone ID: TF_OsC42013_1.pep
MEAQADAGGDDLAAMREQCRSLEEAIGFRRETQMGLVASLQRLVPDLVPSLDRSLRIIAAFNDRPFVPTPNPDGGHGKSPAALKPHHRRALPDPARSTRRKTSPGSSPASVAAAPGGLDAVRTMVAVCLLELVPFAEIDAAALARRMQAESSSASEAERTALADLAAELGGSAASAVVLALRRIAEDTGGVQIEEAMIGGKSMTMVWAIDRNKLLKELPESATLPLLQPPPAPQMPPSETDAGSAMIPRTPQQQQPQPDMWPHSMPPIFPRPRGMTMQGMQRVPGVPPGLMPLQRPFMGPAGVITMGGGVGPSPNQQKQKSEEDELKDLELLLNKKTYREKQNTKTGEELLDLIHRPTAKETAVAAKSHTVSPVVVNELAVADLGFEPRGLNVKTIAYKEMGDTRSKSSKIYSMFKTKGGSQLKEYCTNLTKEDCRRQSGSFVACDKVHFRRIIAPHTDTNLGDCSFLDTCRHTKTCKYVHYELDQTPDIPPMMAGALAPPRQIRLQRAEYCSEVELGEAQWINCDIRNFRMDILGQFGVIMADPPWDIHMELPYGTMADDEMRTLNVPALQTDGLIFLWVTGRAMELGRECLELWGYKRVEEIIWVKTNQLQRIIRTGRTGHWLNHSKEHCLVGIKGNPLVNRNIDTDVIVAEVRETSRKPDEMYPMLERISPRTRKLELFARMHNAHAGWLSLGNQLNGVRLVDEGLRARYKAAYPDSEELLEGAHTGSPMRPRGGEGVAVSLPGETHTTVGFPGRIRAPNPMGLSGAIGLHLGPCQLFSKLSPRMTISPAGPGPLRGPDPTGAGAISDPWIVKKARLVKKEVEPIFSDSDAMKNAPKTTTTCPRCQNGEAYYRQMQIRSADEPMSTFYKCCREECQFDWRED

SEQ ID NO: 25158 - protein, 562 aa, Oryza sativa; identical to SEQ ID NO: 17961
  Clone ID: TF_OsC298014_1.pep

SEQ ID NO: 25159 - protein, 538 aa, Oryza sativa
  unsure (1)..(538): unsure at all Xaa locations
  Clone ID: TF_OsC167645_1.pep
MYCSHCQDNCPVVKDPDKNYTCCGLCGKVLDDQVYDGEPTFQKGADGQARLAGSILSSIESGNSVSHERTINKGREEIRQIVSSLHVAGGDTIISMAHRYYTLAVDKNFTRGRRTTHVAAACLYIACRQSKKAYLLIDFSDHLQISXLCQVLLLAEHPVIQKLIDPSLFIHRFXNTGRKPSGLCGAALYIAALSHGYDYTKADIVAVVHVCEATLTKRLIEFENTDSGSLTIEEFLAKADEQVLVTKISPKSGEVLCKHKDKAEHFAHGLCEKCYNKFMKLSGGLEGGSDPPAFQRAEKQRLEAAKNAKGTAASKEAALESVCEARESDVENNITTPPKNIIGDKHSTIPSVKVAGDSVATEDPEGEGKNDKADEGPESLSDIDDAEVDGYLHNEEETQYKKIIWEEMNKEYLEEQAAKAALAAELAARGVVVEEGKRKRRRHNEDGKNATPAQTPAEATQNMLKRKRLGSKINDEAVNKLYNTKDEDGKADKEMDFNDEYGQDTGDGETFEGGYDYPDYNYDGYGDGAYGDYDGVDF

SEQ ID NO: 25160 - protein, 312 aa, Oryza sativa; identical to SEQ ID NO: 17959
  Clone ID: TF_OsC715_1.pep

SEQ ID NO: 25161 - protein, 47 aa, Oryza sativa
  Clone ID: TF_LIB3599-014-Q6-K1-A11.pep
RCKEKRENIHTYFRKGKESGKNRTEHAKTCRYCDELNRLYFRYVYCS

SEQ ID NO: 25162 - protein, 79 aa, Oryza sativa
  Clone ID: TF_8857106.pep
AGQLVPVPAPRAKADAWAAAGGDGSGTTAPSRWPKEEVQALIDLRMEKEEQYNDMGPKGPLWEEIAAGMQRIGYNRSAK

SEQ ID NO: 25163 - protein, 410 aa, Oryza sativa; identical to SEQ ID NO: 17968
  Clone ID: TF_OsC14298_1.pep

SEQ ID NO: 25164 - protein, 86 aa, Oryza sativa
  unsure (1)..(86): unsure at all Xaa locations
  Clone ID: TF_OsC46205_1.pep
KRSTKDGRAGHGDGKTXRFFTELEALHGAAASARPPPPVSLAPAPVAMAPXATPAGLSALRIRHSASPSPVAPLRPSPPRSIPPAS

SEQ ID NO: 25165 - protein, 547 aa, Oryza sativa; identical to SEQ ID NO: 17969
  Clone ID: TF_OsC198059_1.pep

SEQ ID NO: 25166 - protein, 432 aa, Oryza sativa; identical to SEQ ID NO: 17971
  Clone ID: TF_OsC88912_1.pep

SEQ ID NO: 25167 - protein, 385 aa, Oryza sativa
  Clone ID: TF_OsC26571_3.pep
IAAVPPPPLQPTPVASAAPPPPIQVQPHHIMPMTPQPQLQPPQPQSKEANTVVRAAPPPQEQHDTAASGGGGGASSSRWPKAEVHALIQLRTELETRYQDSGPKGPLWEDISAGMRRLGYSRSSKRCKEKWENINKYFKKVKESNKKRPEDSKTCPYYHQLDALYRTKAANAAAAASASPAPATTTVLAPVPLSQTPPHVDHGGSNGNGNGWASANNGGGGSSSGGMQTKASNNGTATAGGLPVVSVAGGNGNGNGVAATTDNKGSKQVPVAKETAGQRQPQPLAMNHNYGNDRMADDMDSDSMDDDDDDDEFDDDENDDDIGGGKMQVQYETSSHFQRPQLQNQNVVVGRPNASGGGGGGAPTTPAGPPPPAATSGTSFLACVQ

SEQ ID NO: 25168 - protein, 977 aa, Oryza sativa
  unsure (1)..(977): unsure at all Xaa locations
  Clone ID: TF_OsC26571_1.pep
MAIYYLEREGLTHNMPMHGHFYTPLPLNHWHADTTNAADMTRGPMRMWAPHVSGMNFIFFISKEKVLMRVEMVSSPDVLIIPSPPFPSGNTRGGGGGGGGSSPARGPQPAPPHPAPGQHPPLLQPARRARPQAAGGPPGVLAPQPARSAPPPAAPLPRLPRRRLRGHCNRAAQRAADTEPARAPGAEHTARRRQPHPRPLRRHGGHDQAADATDRAHAAAAGGGXQFGAVAPEMSPFSPALHASAEAASPISSRPPPAASSPSPAAQQQQHRTRTNFDELAGGDXRGGGGGFPDAEALAAAAVGEEGASGGAGGNRWPRQETLALLKIRSDMDAAFRDATLKGPLWEEVSRKLAEEGYRRSAKKCKEKFENVHKYYKRTKESRAGRNDGKTYRFFTQLEALHGTAAGVVAAPSPVTSLAPPPATAVGVSGGVRAPAEPPPAVVMGNVMSFSTSNTEEYSDEEDSDDEGTEDMGGGGGDERGKRKRLSEGGAAAGVGGGGGGGGGSGKMMRFFEGLMKQVMERQEAMQQRFLEAIEKREQDRMIREEAWRRQEMARLAREQEILAQERAMAASRDAAVVSFIQKITGQTIPMPPIIAAPAITVMPPPAPSQXPPPVPQPKRRGQPQPPPPPPQPPPITSAPHQQQQQQPQLKXTKSPLPVTPRXQHATCGLMTRRQAAEGHDDNCGVRGGGGGQPSSSRWPKAEVHALIQLRSNLDNRYQEAGPKGPLWEEISAGMRRLGYSRSSKRCKEKWENINKYFKKVKESNKKRPEDSKTCPYFHQLDALYRNKAALNSSSSSAAAAAPALPPPEHAEPAVTVAAPISQTPPPPPPQPVTTTKNGNGTSSTNGANGEGGGGGSGGMQMQASNGSVVAGNKFFTGAAAXAKAEDIVKEMMEQTPQQFTTDGTDSDNMDDDYNDDDDEDDDDVKMQYGIQFQNQNPAAASTAXTAGGNPGTRGPHHGADEHPPTTGSGSFLAMVQ

SEQ ID NO: 25169 - protein, 202 aa, Oryza sativa
  Clone ID: TF_OsC331190_2.pep
MDPFHHLNSSFSNPYHPLLASPPHHFAPDPLPPPPPPPPPPLLPADPPSLERERLPQWSHAETAAFLAIRADLDHSFLSTKRNKALWEAASARLHALGFARTPDQCKSKWKNLVTRFKGTEGAAAVAAAGTDQMQGGQGGGAAARGASSSFPFHDELRRIFDARVERARALERKKVKGKDPDDDHDGGGDGDEDDEEEADHH

SEQ ID NO: 25170 - protein, 711 aa, Oryza sativa; identical to SEQ ID NO: 17978
  Clone ID: TF_OsC19996_1.pep

SEQ ID NO: 25171 - protein, 435 aa, Oryza sativa
  Clone ID: TF_OsC10945_1.pep
MEGSNPPGNMTQGPSYGSLDLHGISKQMHPPNSGNQGFNQPQIPGNFTIPMDRVTEPDNISDGVQLGQHGKIAHHHHHHRHHSKNHGSDEEEHDMNEDAADGKDKKGSPWHRMKWTDSMVKLLITAVSYTGEDPGADLGGGRRNYSMMQKKGKWKAISKVMGERGCHVSPQQCEDKFNDLNKRYKRLTDILGRGTACNVVENHSLLDHMDISEKMKEDARKILNSKHLFYEEMCSYHNNNRISLPEDPALQQSLQLALRCKEDNDFMRHASGDAELDDDQSEDSDYEENEEEHRAVDTNIRGPSMHKRMWHVVDHGDVGFVTSCSNDGSGRSDPYDVLDINKPFPDGCDLALVQKDLALKAAEIQKHRLQIETKAVQLAKQRLKWEMFRKNKDLELEKLALENEQMMLQNKRFELDLRHKELELEIKIKGNANHP

SEQ ID NO: 25172 - protein, 608 aa, Oryza sativa; identical to SEQ ID NO: 17983
  Clone ID: TF_OsC26571_4.pep

SEQ ID NO: 25173 - protein, 385 aa, Oryza sativa; identical to SEQ ID NO: 17986
  Clone ID: TF_OsC78604_1.pep

SEQ ID NO: 25174 - protein, 128 aa, Oryza sativa
  Clone ID: TF_OsC1713_3539.pep
MAIQLYRWAPSSSLMADLTVADWLLRLHGCATSSLLIVMALFGFIKQLIEYNIIAFCHPSTVFIFGKSTREIMARMIEAHGFGGDENGSSADNRWLRQDTLELLTIRPEMDTVLQEATLNGAIWEEIS

SEQ ID NO: 25175 - protein, 908 aa, Oryza sativa
  unsure (1)..(908): unsure at all Xaa locations
  Clone ID: TF_OsC57118_1.pep
RERERGDAGAGHSLSLLSPPPTPPCAMVALASLSSLSPCGLARRRSASSAASISCCAAPPPPSAKGSQESRTPRRRVRKTEGATKSLEDSVKRKMEQFYEGLDGPPLRVLPIGGLGEIGMNCMLVGNYDRYILIDAGVMFPDFDEFGVQKIIPDTTFIKKWSHKIEAVIITHGHEDHIGALPWVIPALDSSTPIFASSFTMELIKRRLKEFGIFLSSRLKVFRVRKRFQAGPFEVEPLRVTHSIPDCCGLVLRCADGIIFHTGDWKIDESPVDGKIFDRQALEELSKEGVTLMMSDSTNVLSPGRSISESVVAGSLLRHISEAKGRVITTQFASNIHRIGSIKAAADLTGRKLVFVGMSLRTYLDAAFRDGKSPIDPSTLVHLIESRFLLKVKVEDMDAYAPNDLLVVTTGSQAEPRAALNLASFGGSHALXLSKEDVLLYSAKVIPGNESRVMKMLNRLTELGPKIVMGKDAGLHTSGHAYHDELEEVLQIVKPQHFLPVHGELLFLKEHELLGRSTGIRHTTVIKNGEMLGVSHLRNRRVLSNGFVALGKEDLRLMYSDGDKAFGTSTDLCIDERLRIASDGVIFVSMEIFRPQKELASSQSGLKGKFKITTRCLWLDNGRLLDALYKAAYAALSSCPVNCPLSHMERMVSEILRKMVRKYSGKRPDVIAVATENTTVSFVEDSETKSSGKFGSFSAPRHSSRSSGRSLEESDKSCPENTEGEAKENLPDVLRTTRDDATTSSNGEAFFSSDLHKPKTLEHFWDSFKSPTAVKIARIVNGSAQGSKSKIGKISIVGKDSSDPSSAPVKSSKKNKWKPEEIKSLIQMRGEMNEQFQTVKGRMVLWEEISSSMLSQGISRTPAQCKSLWTSLVQKYEESKKDEESVKTWPYFLDMDRVLSSQGEMATQ

SEQ ID NO: 25176 - protein, 152 aa, Oryza sativa
  unsure (1)..(152): unsure at all Xaa locations
  Clone ID: TF_OsC1326_7.pep
LCRPPAGGEEAGGELLLRDRELRGRTRRRGRRVPPHLLNXHHSFYDGLYVGGVADARIRPALRTLKQNMSLLLSVLIDRVQPVAVQEASEAARRSDGKGAAQRELLEHNGLLGGEEGDRSGSRAGNRWPRQETLALLKIRSEMDVAFREAIL

SEQ ID NO: 25177 - protein, 122 aa, Oryza sativa
  Clone ID: TF_OsC1713_4560.pep
MALFGFIKQLIGYNIIAFCHPSTVFIFGKSLRGYCGDYGYPIPTRHARWSHGSSLNHDRLASVKGDENGSSADNRWLRQDTLELLTIRPEMDTVLQEATLNGAIWEEISRICDVFFVGDFVM

SEQ ID NO: 25178 - protein, 277 aa, Oryza sativa; identical to SEQ ID NO: 17973
  Clone ID: TF_OsC248026_1.pep

SEQ ID NO: 25179 - protein, 65 aa, Oryza sativa
  unsure (1)..(65): unsure at all Xaa locations
  Clone ID: TF_LIB4309-015-Q1-N1-E2.pep
VVRNTQHPRSYYRCTQHNCRVNKRVQRLAQDPRMVLXSSEGRHVHSPSREEDGPARASADMTFIW

SEQ ID NO: 25180 - protein, 50 aa, Oryza sativa
  Clone ID: TF_LIB3433-042-P1-K1-H2.pep
MRKVDTFAPHNDGHQWRKYGEKKINNCNFPRYYYRCTYKDNMNCQQRSRF

SEQ ID NO: 25181 - protein, 147 aa, Oryza sativa
  Clone ID: TF_uC-osflcyp011c08b1.pep
LSQPGVAEREVAHVYVLIKTHQPVLGGHQQPQQLAHGPLIHSMRALNVALSVMNQPHASSSSAAAAAAAGHHYPAMTMIRAESTPANRPAADASYNHGDGRQEDHHPPNEEGLTVRTSDCGFTTQMALHEDGYQWRTYGQKKIQGTH

SEQ ID NO: 25182 - protein, 78 aa, Oryza sativa
  unsure (1)..(78): unsure at all Xaa locations
  Clone ID: TF_OsC143436_1.pep
RVERDGXDPXYVVTTYDGVHNHGTPGCVGGGGHLPYPTSAAPPWSVPAAAASPPPAQEQAWGAPLHAAAAAHSSESSF

SEQ ID NO: 25183 - protein, 194 aa, Oryza sativa
  Clone ID: TF_OsC547_384.pep
PYLMGDVLRAQATASAEEVAGGVWPCELDDHLIGELLGDDGLFVPAAEHPTLYYSFGAGSSAAAAAAPCNGGGSADHERRPRPAPAVSRDLCSVYSGPTIRDIEKALSSSASPRPPYPSGRRYSSLYLVEAESKYTSKVRSCGGKMPADGYKWRKYGQKSIKNNPHPRSNLLLTVKFGKPGVVIGLESASASKS

SEQ ID NO: 25184 - protein, 148 aa, Oryza sativa
  unsure (1)..(148): unsure at all Xaa locations
  Clone ID: TF_LIB4371-040-R1-N1-F8.pep
MHSKKKMHVSLILLCLQYCREGTRTMASSSSHGATKNRPWTLTLGQRNSPRRRRRVTWPGTAATARWRRRRRPAASVSRAGGSSDDGYNWRKYGQKQMKGXSENPRSYYKCTFPGCPTKKKVEXSPDGQVTEIVYKGAHSHPKAAAER

SEQ ID NO: 25185 - protein, 217 aa, Oryza sativa; identical to SEQ ID NO: 17995
  Clone ID: TF_OsC352149_1.pep

SEQ ID NO: 25186 - protein, 61 aa, Oryza sativa
  Clone ID: TF_OsC46056_2.pep
PRVRIFLIDFCRKTSTEKKRHQIRVSSTGGVENPPVDDGHSWRKYGQKEILGAKHPRLVFF

SEQ ID NO: 25187 - protein, 59 aa, Oryza sativa; identical to SEQ ID NO: 18018
  Clone ID: TF_OsC352156_1.pep

SEQ ID NO: 25188 - protein, 493 aa, Oryza sativa
  unsure (1)..(493): unsure at all Xaa locations
  Clone ID: TF_OsC1528_2199.pep
MSDEFDNSIDPAEIYTTDMFMAEHSVLNSFAGRIDKRIKARLEGGTSRRTSGPRKYINRNHEGAHDQLFADYFAEDPLYSAATFRRRFRMRRHVFLHIVDELGKWSSYFTHRVDCTGRLGHSPLQKCTAAIRMLAYGTAADALDEYLKVPQSTALECLENFVEGVVEVFSSRYLRRPTAEDLERLLQVGESRGFPGMLGSIDCMHWRWKNCPNAWKGQYTRGDQKYPTIILEAIASYDLHIWHAFFGIPGSNNDINVLNQSPLFIEAIKGEAPQIQFAVNGTXYNTGYYLADGIYPEWATFVKSIRSPQLEKHKLFAREQEGKQKDIECAFGVLQARFNIVHRPARSWSQKVLRKIMQACVILHNMIVEDEGEMAEDPIDLNAAPGTSIVLPPEVHAGSNDHPSFSDMCTIYELAVVFXRTFEGGLTWGSRTLTDRTGRNSSPCRQSAPPPPRPPRSRPRRSPSVPPRTPRTPPLGPMSARSTAAERLRRLLR

SEQ ID NO: 25189 - protein, 361 aa, Oryza sativa; identical to SEQ ID NO: 18013
  Clone ID: TF_OsC46056_1.pep

SEQ ID NO: 25190 - protein, 219 aa, Oryza sativa; identical to SEQ ID NO: 18021
  Clone ID: TF_OsC143437_1.pep

SEQ ID NO: 25191 - protein, 540 aa, Oryza sativa; identical to SEQ ID NO: 18017
  Clone ID: TF_OsC116595_1.pep

SEQ ID NO: 25192 - protein, 117 aa, Oryza sativa
  Clone ID: TF_OsC175690_1.pep
RNLIDPLDYDRKNAEHTGSTVAQAPHNDGHQWRKYGQKWISRAKHSRSYYRCANSKVQGCPATKTVQQMDSSGNGTPELFNLVYYRLLSCRGEGFPRPHLVVTAHHSMGTYQSKRMQ

SEQ ID NO: 25193 - protein, 249 aa, Oryza sativa
  Clone ID: TF_OsC4053_2.pep
LTRKLNSIHKSSKSFPRTFLFYIDPCFFDFPIAPIRSENNNPSPIHVHKHAFVKRRGRPTWRGGPRRRPGGRPPFRGGGGGGPRRGGSPCGNSPTGGPPAFLRGSCWGCTCSNSLGGGCCCSPLAHTSSTRSRGVRIHGAQVREAGGRLAVAAPHAAAALDRPLDPWEQRVQTAMVRREHHAMVRPGGGGVVVDQLRQLGKLVLQARQWRKKGRRGRRRVRAERRVERGREASRLQLAPFHARIHAATN

SEQ ID NO: 25194 - protein, 659 aa, Oryza sativa
  Clone ID: TF_OsC17758_1.pep
MALELSLVSASPPGGLAASPPPPAAIPGKEQQVAGVGILLQISMLVLSFVLGHVLRRHRFYYLPEASASLLIGLVVGGLANISNTETNTRTQSGFSLSPKPFFANFGAIVTFAILGTFIASVVTGVLVYLGGLTFLMYKLPFVECLMFGALISATDPVTVLSIFQELGTDVNLYALVFGESVLNDAMAISLYRTMSLVRSQAAAGENFFMMVFQFLETFVGSLSSGCITAQNILNYFKGTFGIVVLELDLSLLLYPFPKFYMETLFAKHERLCMLSIDHVKLQYLCITIYHLLIACFTVNYFIYYLILCNLDHSVYLFKYAGLDIDKYMLAEGLGLSGIVSILFTGMVMKHYTFSNLSNNSQRFVSAFFHLLSSLAETFVAVNVFSCAYLVNMSRPEHRRIPLKHQKALWFSGLRGAMAFALALQSANELPGGHGKTIFTTTTAIVVLTVLLIGGSTGTMLEALDVIGDENRSIENYDDNNGYIPPTYEEGSSSGGGLRMKLKEFHKSTTSFTALDRNYLTPFFTSQTDEDDDVFEIGHYATPKSGFRQNAILPNGFVKMPCTRDTKHLFCHLRQFSPFLPNFASGLTKIPLRAGSRPVLRNTSSGCAAAAACADQYSAATSPKPSAGRRMLTMRVAPAAWAAALAGSRCASRGLWCTR

SEQ ID NO: 25195 - protein, 319 aa, Oryza sativa; identical to SEQ ID NO: 18031
  Clone ID: TF_OsC346291_1.pep

SEQ ID NO: 25196 - protein, 348 aa, Oryza sativa
  Clone ID: TF_OsC277_1.pep
MDPWISTQPSLSLDLRVGLPATAAVAMVKPKVLVEEDFFHQQPLKKDPEVAALEAELKRMGAENRQLSEMLAAVAAKYEALQSQFSDMVTASANNGGGGGNNPSSTSEGGSVSPSRKRKSESLDDSPPPPPPPHPHAAPHHMHVMPGAAAAGYADQTECTSGEPCKRIREECKPKISKLYVHADPSDLSLVVKDGYQWRKYGQKVTKDNPCPRAYFRCSFAPACPVKKKVQRSAEDNTILVATYEGEHNHGQPPPPLQSAAQNSDGSGKSAGKPPHAPAAAPPAPVVPHRQHEPVVVNGEQQAAAASEMIRRNLAEQMAMTLTRDPSFKAALVTALSGRILELSPTKD

SEQ ID NO: 25197 - protein, 308 aa, Oryza sativa; identical to SEQ ID NO: 18034
  Clone ID: TF_OsC104544_1.pep

SEQ ID NO: 25198 - protein, 309 aa, Oryza sativa; identical to SEQ ID NO: 18035
  Clone ID: TF_OsC89344_1.pep

SEQ ID NO: 25199 - protein, 424 aa, Oryza sativa
  Clone ID: TF_OsC7069_1.pep
MEGMEEANREAVQSCHRVLTLLSSPHSQLVPNKDLAAATGEAVAKFCSVASRLNNGNGLQGHARVRKIKKPLPIFDSNLFLESPALAVAMAAKTPNSSPITSLQLFPRYHQMEGSSSKDPVRIPAQFPKRLLLDNPAVDSDGPSRGPPLQLIQPVSVAPPAGTPHPALPSAHLHFIQQHQSYQRFQLMQQMKMQSEMIKRSGLGEQGGSNGGGKGVNLKFDSSNCTASSSRSFLSSLSMEGSIASLDGSRSSRPFQLVSGSQTSSTPELGLMQRRRCTGREDGSGRCTTGSRCHCAKKRKLRIRRSIKVPAISNKVADIPADEFSWRKYGQKPIKGSPHPRGYYKCSSVRGCPARKHVERSGLQGECGKATDKRSDRQPFVSVLLCPKSKPCKSEMACFLVATSPLGKLELMPDTQGPTAPSTP

SEQ ID NO: 25200 - protein, 565 aa, Oryza sativa; identical to SEQ ID NO: 18038
  Clone ID: TF_OsC47923_1.pep

SEQ ID NO: 25201 - protein, 623 aa, Oryza sativa; identical to SEQ ID NO: 18041
  Clone ID: TF_OsC2081_1.pep

SEQ ID NO: 25202 - protein, 210 aa, Oryza sativa; identical to SEQ ID NO: 18042
  Clone ID: TF_OsC123567_2.pep

SEQ ID NO: 25203 - protein, 507 aa, Oryza sativa; identical to SEQ ID NO: 18044
  Clone ID: TF_OsC44619_1.pep

SEQ ID NO: 25204 - protein, 315 aa, Oryza sativa
  Clone ID: TF_OsC209019_1.pep
MGFAKTTTETDIKLFLMGPCGASKQNNSKRGGSRTVARAEASSNDSSQEARRLFGACHVRESANPHARVPMYMAAAAAGASTPFNFCRHGSHAEYDAVFSGSWMARRPSAAPHGGGASGSGSGSGYGAASYVAPTFGAAFRQQHLDLLDYLSDDQGVPAPPPAAVPSASYVTPAPAMAPAEPVVPDAVAAAGGYPRSVAAAAAAVAGEGRDRTTTDKIAFRTRSDDEILDDGYKWRKYGKKSVKNSPNPRNYYRCSTEGCNVKKRVERDKNDPRYVVTMYEGIHNHVCPGTVYYAAQDAASGRFFVAGISHPDLN

SEQ ID NO: 25205 - protein, 194 aa, Oryza sativa; identical to SEQ ID NO: 18051
  Clone ID: TF_OsC140224_1.pep

SEQ ID NO: 25206 - protein, 389 aa, Oryza sativa
  Clone ID: TF_OsC457_1.pep
METPREPLTGRSRTVPPGIDTVRVIDGRPRLRPPPAGCSNGDGSIRSRMTSSMSPAPAPAYAQVMEDMEKGKELAAQLQGLLRDSPEAGRFVDQILHTFSRAMRALDKAAVSAAGGEGSEVQSEVTCGGGASAGGKRKAPAADRKANCRRRRGVFEKGIEEIGKIRKTRTQQSSGNSVVVKNLDDGQAWRKYGQKEIQNSKHPKAYFRCTHKYDQLCTAQRQVQRCDDDPASYRVTYIGEHTCRDPATAPIIAAHVIHQVAAGDNDDGCGGLQAGSRLISFVAAPAAPVDAAAAPTTSTITTVTAPGPLLQPLKVEGGVGSSDQEEVLSSLTPGSSAARGGAAAAESRVPSGRTRAMSRPPCTGATTPSPAWSSSRTTRLSSIWTTLWV

SEQ ID NO: 25207 - protein, 406 aa, Oryza sativa; identical to SEQ ID NO: 18054
  Clone ID: TF_OsC340734_1.pep

SEQ ID NO: 25208 - protein, 419 aa, Oryza sativa; identical to SEQ ID NO: 18059
  Clone ID: TF_OsC47923_2.pep

SEQ ID NO: 25209 - protein, 318 aa, Oryza sativa
  Clone ID: TF_OsC177829_1.pep
MDDDGDGSSSPTDDSAAAGLLPLFSRSPAEDLEEKLRRAMEENARLTRALDAILAGHHAHQRALLAPSLSPPPPSATARAPSVSTSCAAREDAAPAVAAAAASTACPSRQQPPTAEPRPKVRTVRVRADAADATDANSMAETVKDGYQWRKYGQKVTRDNPYPRAYFRCAFAPSCPVKKKLQRCAEDRSMLVATYEGEHNHALSTQTTEFVASGCTTSQHAGGSSSSPLPCSISINSSGRTITLDLTNQAGSGSIASCGVEAAAVSGELVTVLSPELRRHLVEEVVQVLKNDAEFVEAVTNAVAARVVDQIPHIPVHL

SEQ ID NO: 25210 - protein, 117 aa, Oryza sativa
  Clone ID: TF_OsC17758_3.pep
RRSYYKCTTVGCPVRKHVERASHDTRAVITTYEGKHNHDVPVGRGGGGGRAPAPAPPTSGAIRPSAVAAAQQGPYTLEMLPNPAGLYGGYGAGAGGAAFPRTKDERRDDLFVESLLC

SEQ ID NO: 25211 - protein, 618 aa, Oryza sativa; identical to SEQ ID NO: 18061
  Clone ID: TF_OsC11608_1.pep

SEQ ID NO: 25212 - protein, 342 aa, Oryza sativa
  unsure (1)..(342): unsure at all Xaa locations
  Clone ID: TF_OsC732_1.pep
MDAAWRGGVGCSPVCLDLCVGLSPVREPSAARHELLDRPAGCRGGGDSKSGAFLQAKIVEAKVTQMSEENRRLTEVIARLYGGQIPRLGLDGSASPPRPVSPLSGKKRSRESMETANSCDANSNRHQGGDADHAESFAADDGTCRRIKVSRVCRRIDPSDTSLVVKDGYQWRKYGQKVTRDNPSPRAYFRCAFAPSCPVKEEGAAERGGQLAXVATYEGEAQPPAPVSARRRAPGGGGGGRWLAAVLHLHQLLRPDHHARPHQERGSRAGGRGGASAAAAGPQGGVPGGRVAGVPDRAGGADGQRAHQRPQVHRRARRGDPPEAARILASFTILQFFLQEKT

SEQ ID NO: 25213 - protein, 280 aa, Oryza sativa; identical to SEQ ID NO: 18062
  Clone ID: TF_OsC47394_1.pep

SEQ ID NO: 25214 - protein, 106 aa, Oryza sativa
  Clone ID: TF_uC-osflM202091c10b1.pep
RRSVEKRVVSVPIAECGDRPKGAGEGPPPSDSWAWRKYGQKPIKGSPYPRGYYRCSSSKGCPARKQVERSRADPTVLLVTYSFEHNHPWPQPMSSSCHASMSSLGR

SEQ ID NO: 25215 - protein, 415 aa, Oryza sativa
  Clone ID: TF_OsC1773_1.pep
MGYPAASAPAPPSPFPVPHGLSPTAFLGGSPGLFSPTGNFEMSHQQALAQVTAEAVHSPYSMINQSDFSLPFSSTTTSVLASQHVNSSANVSSPREIPTLPSHTDNSNIESTEVSHGFQTTALTEDKPADDGYNWRKYGHKAVKGGEYPRSYYKCTHLSCPVKKKVERSSDGQITPILYRGQHNHQRPTKKSPKMVALYLNEADVSREKEDASIRSEQGSQDYSGKFKASNDGGPSSSRRGDRGEQISGSSDSKHQGEEEVKVEGRATSDGNANKRHVPAPAQRIIVQTTSEVDLSDDGYRWRKYGQKVLKGNPHPRSYYKCTYQGCDVKKHIERSSQDPKAVITTYEGKHSHDVPAARNSSHSSANANVSSSSNLPPKGQGATVVVQRWFAECIFSFFLPVKGGGGMAGNLGGV

SEQ ID NO: 25216 - protein, 339 aa, Oryza sativa
  Clone ID: TF_OsC62508_1.pep
MASSTGGLDHGFTFTPPPFITSFTELLSGGGGDLLGAGGEERSPRGFSRGGARVGGGVPKFKSAQPPSLPLSPPPVSPSSYFAIPPGLSPTELLDSPVLLSSSHILASPTTGAIPAQRYDWKASADLIASQQDDSRGDFSFHTNSDAMAAQPASFPSFKEQEQQVVESSKNGGAAASSNKSGGGGNNKLEDGYNWRKYGQKQVKGSENPRSYYKCTYNGCSMKKKVERSLADGRITQIVYKGAHNHPKPLSTRRNASSCATAAACADDLAAPGAGADQYSAATPENSSVTFGDDEADNASHRSEGDEPEAKRWKEDADNEGSSGGMGGGAGGKPVREPR

SEQ ID NO: 25217 - protein, 310 aa, Oryza sativa; identical to SEQ ID NO: 18068
  Clone ID: TF_OsC329265_1.pep

SEQ ID NO: 25218 - protein, 319 aa, Oryza sativa
  Clone ID: TF_OsC146479_1.pep
MDGEWSDGAAVSSPTMSGGGGREQMKGGEDVAAADCPGSPVSPSPAAAQRSAAGAAASPSGRSRRSAQKRVVTVPLADVTGPRPKGVGEGNTPTDSWAWRKYGQKPIKGSPFPRAYYRCSSSKGCPARKQVERSRNDPDTVIVTYSFEHNHSATVPRAQNRQAAPQKPKAQACSPPEPVVEVEPEETHQYGVTAGPATGGGGGAAAIEVRDEFRWLYDVVSVPATSTSPSDIDAADEMQLYDQPMFFGGAVVGTAALLPDEFGDVGGLGGEGLGEEEALFEGLGELPECAMVFRRRAGDGLEMGGGVKIEQPAESTAMT

SEQ ID NO: 25219 - protein, 326 aa, Oryza sativa
  Clone ID: TF_OsC10544_1.pep
MITMDLMGGYGRVDEQVAIQEAAAAGLRGMEHLILQLSQTGTSERSPAPAQEQQQQVDCREITDMTVSKFKKVISMLNRTGHARFRRGPVVAQSSGPAASEPAPVRSSPSAVSRPMTLDFTKAASGYGKDAGFSVSGISAASSSFLSSVTGDGSVSNGRGGGSSSLMLPPPPATSCGKPPLSSAAAAMSAGAGHKRKCHDHAHSENVAGGKYGSTGGRCHCSKRRKHRVKRTIRVPAISSKVADIPADDFSWRKYGQKPIKGSPFPRGYYKCSTLRGCPARKHVERDPTDPSMLIVTYEGEHRHSPSAAGQDHPPAPPPPLALPLA

SEQ ID NO: 25220 - protein, 314 aa, Oryza sativa; identical to SEQ ID NO: 18063
  Clone ID: TF_OsC171299_1.pep

SEQ ID NO: 25221 - protein, 500 aa, Oryza sativa
  Clone ID: TF_OsC57056_1.pep
MGTPAKLPSPPSLPIARQCCCHLLQLGRRGGAGVARASAKKKNPWLDPFDDGPDDEFDYRGAFSGGKQEEDPRPPEDPANPYGFLRFPAGYNPELDSLASKVRRDVRRACCVVSGGVYENVLFFPVVQLLRDRYPGVVVDVVASARGKQVYEMCKNVRYADVYDPDDDWPEPAEYTHQLGVLKNRYYDLIISTKLAGIGHALFLFMSSARDKVGYVYPNVNSAGAGLFLTEMFRPPTTNLADSGYNMYQDMLEWIGRPAKGVPEHPVPPLRVSISKKLRAFVEDKYSRAGVEKGKFVVVHGIASDSFANMRSRGDDDCLLPLEHWAEIAKEIRFFTSPHSLTQARLLLHLHFQLGTDCEKVELKPKKWWCLGSSEDNGLKPLFVIPHQKHREEVEETVGKDTNILFITTPGQLTCLINDSVGVVATNTAAVQLANARDKPCVALFSSKEKARLFLPYLEEKKGCTVVASETGKLIDIDVEAVKKAVKEFKAAPSVALAQT

SEQ ID NO: 25222 - protein, 203 aa, Oryza sativa; identical to SEQ ID NO: 18079
  Clone ID: TF_OsC338525_1.pep

SEQ ID NO: 25223 - protein, 148 aa, Oryza sativa
  Clone ID: TF_OsC153308_1.pep
MASNSQMNNRGAGGGRGQGDDEEPTPTPPPAPPPETAPSTVGGGGDGVQLVMPEDGYEWKKYGQKFIKNIQKNRSYFRCRDQRCGAKKKVEWHPHDPGLNLRVVYDGAHHHGSPSSAAGEGGTSAAAAANQYDLSTQYFGGAGGPRSQ

SEQ ID NO: 25224 - protein, 650 aa, Oryza sativa; identical to SEQ ID NO: 18082
  Clone ID: TF_OsC2081_2.pep

SEQ ID NO: 25225 - protein, 264 aa, Oryza sativa
  Clone ID: TF_OsC132992_1.pep
MALIATGATATATAAPVASPAASSMASELMAQGRESAAVLEALLHGASLPPAHGGAHALAAEILRCCDRALAALRAGGDAESSSADTKRKPATAQPSTRRRRRYIYMYVSSRSCDGARDRAATQQEIFCRATASGGGAAAAAEPARVEKARTSEDGFLWRKYGQKEIKNSKHPRLYYRCSYKDDHGCTATKQVQQSEEDPSLYVITYFGDHTCSCQTAAAAAMDDDDDDENSQHFVINFGPATASRSGSPPLLYDDGDDGDVCA

SEQ ID NO: 25226 - protein, 514 aa, Oryza sativa; identical to SEQ ID NO: 18087
  Clone ID: TF_OsC339450_1.pep

SEQ ID NO: 25227 - protein, 224 aa, Oryza sativa
  Clone ID: TF_OsC35308_1.pep
MALDSVPSYPSDLGSSRARTPQQQRVSPRKEERTWTTDTYAPYDDGHQWRKYGEKKLSNSNFPRFYYRCTYKNDMKCPATKQVQQKDTNDPPLFSVTYFNHHTCNSSSKIVGSTPDSTVQSRKAISICFNSHGQTGEQPTFLSSSASLLSPSMQSYSSNQQPDMNTYSRQFQWADTSSSTSNAPVKMEADDYAEASASPSTTGALSRTLLPIGQSRCIEYFHFL

SEQ ID NO: 25228 - protein, 225 aa, Oryza sativa; identical to SEQ ID NO: 18095
  Clone ID: TF_OsC348254_1.pep

SEQ ID NO: 25229 - protein, 299 aa, Oryza sativa; identical to SEQ ID NO: 18090
  Clone ID: TF_OsC313723_1.pep

SEQ ID NO: 25230 - protein, 333 aa, Oryza sativa; identical to SEQ ID NO: 18074
  Clone ID: TF_OsC227792_1.pep

SEQ ID NO: 25231 - protein, 363 aa, Oryza sativa
  Clone ID: TF_OsC62577_1.pep
MEEEVEAANRAAVESCHRVLALLSQQQDPALLRSIASETGEACAKFRKVVSLLGNGGGGGGGGGGGGHARGRMAGRSRPSAVLREKGFLESSSGGGQLGMMMSGAATPSTSSAAHLRNRIGGGSGVPPDSLRGLDLVSSSSKGGAHQFDPPKLVQPLSVQFQFGATAHRYPFQQHQHQQKLQAEMFKRSNSGISLKFDSPSATGTMSSAFMSSLSMDGSVASLEGKPPFHLISGPVASDPVNAHHVPKRRCTGRGEDGSGKCATTGRCHCSKRRKLRIKRSIKVPAISNKIADIPPDEYSWRKYGQKPIKGSPHPRGYYKCSSVRGCPARKHVERCVDDPAMLIVTYEGEHNHTRLPTQSAQT

SEQ ID NO: 25232 - protein, 372 aa, Oryza sativa; identical to SEQ ID NO: 18076
  Clone ID: TF_OsC246772_1.pep

SEQ ID NO: 25233 - protein, 1747 aa, Oryza sativa
  unsure (1)..(1747): unsure at all Xaa locations
  Clone ID: TF_OsC22739_2.pep
MDNQSGQPQYGMADHGFRPFSASISAPSTAQQHTGSSSNTAVIQVATPPSHTDYGNIYLADDGYHWRMCGQNTIQGEPCQTIFYYQCAQANCMVQKSVARSADGQTTQTFSMGVHNHPQRGPTPPRSPSVDPPVPFSSPSCSPPRSPVECAERGCASLSPARANPPSEFEHVPPGDPELRVNREICVLPFSAAMREREAQLRRAVVAVVVGAARTPSAAQVHDELCSEFSLSPHSFSVRRFFPEDFLVTFQSDEIFDRVARRRSIPLGQFRLLVAPWSRQLHAREGSMLFRVRLHLEGIPGHAWDEATAAAVLGSSCRIISCDPVSSSASDMAVFKLYAWTSDPASIPKEKWLRIVEDGGPVVTPQGTCERYLDYVVLIHLTAMEDHISPPEPYLPFAPSSGDSGRPSSDDSDDGPPRRHFFHTSRGRRDGSPPPPQSGQGSTGGGGGGGHRAAPVAVMPAELCSGRLLRRAGALAPEKPVRAVAGAEAAMARRRRPRGRRRQQKVLKWKSKFLKLSPVRSCCRWQPRKGQDTSEPVSVAKAKESSALQSLSLGSVVGQEDREFVLPVSAASEADSAVSSRRDMVGLAASPVGLEAQQGGLVLSTVAGPAVESAGSRPEVQSQPSPLAMEEAHHDASTFLQGSVSAHADPFLSVVLAAKPSMAMAAPGESALPPPDSVPDATLGVEAVSAPLVCPEQHLAASSTPLSQVFSPVSALPTASAVVVVAEIGGPFPDEVVPVDEMAASPPAPSTAVFAAAVEEASAPPPTLITFSRRAKKAIPPALLPPPAPQQPPQPAPLQTPRRSVRQALQATHGAPTFSRCQSVLAKKMGEKDTAVPAAPAPTVCTIQQYNELFEKELSQDQMLALADLFGICLPPPASAVETKLDAISVPLATQFLGPNLADFCYLPSIQTRGGVLLAWDRSVVSCDSHSLGEFSLTARLSFCDGNSCWITVVYGPQPDADKVRFLQELRDTRSTRDGPWMVVGDFNLIYQDQDKNNSNLNRRMMGRFRRAINDLALNELHLNGRSFTWSNGWEHPTLERLDRIFVTSDLEELFPQSFLKALPSVISDHCPLLLSTLPSLPAKGRFRFENFWCKLEGFEEVVQEAWSADCRLQDPISRLDFKLRSTGRALQSWSDKKVGNVKLQLEMARELIGRFDRMEESRGLSGQERFLHRELKRKYLALASLERTMARQRSRISWLREGDANTRFFHQHAAWRRRRNFVQQLEHGSQVATAPDEKAALAHDFFDGVLGSVSHRNFSVNLDFFESRGQHIEELEDPFTEDEVRKAIADSPHDKAPGPDGFSGMFYHRCWVIIKDDPCLVHSFVKLFTKILSRRLSPKLDSLVAKNQSAFIKKRCIQDNFMLVRQSAKYLHDRRTPSVLLKLDIAQAFDSISWQFILEVLEHKGFGVRWRSWIAMLFRTASSRVLINGEPGCPIIHRRGVRQGDPISPMMFILAMDVLSSILAKAENVGLLRPLGIPFRVSLYADDVVAFIRPAVEEIHVATEVLSIFGEASGLRTNFAKCSALPIQCNEADLQILHDELPCQVASFPCTYLGLPLSIFRLKKEDLQPLIDKIGRRLPFWMSHLMTPIGRTTMVKAVLSSIPIYLLMAINAPKWVIKGIDKIRRGFLWAGKATANGGVCRVAWARVCSPIEYGGLGILDLERLGIALRSRWLWQQRTSSDKPWQGLNIPVSQKERNLVSISXFAQWAMGSWYGSGRIVGCRALQFGRWRPQSTQLFPLGSGTDER

SEQ ID NO: 25234 - protein, 563 aa, Oryza sativa; identical to SEQ ID NO: 18098
  Clone ID: TF_OsC1517_1507.pep

SEQ ID NO: 25235 - protein, 335 aa, Oryza sativa; identical to SEQ ID NO: 18100
  Clone ID: TF_OsC73968_1.pep

SEQ ID NO: 25236 - protein, 528 aa, Oryza sativa
  Clone ID: TF_OsC17758_2.pep
MQPQFNGGKRSRAAPDNGGDGEGQPAEGDAKADSSSGAAAVAVVAAAAAAVAEDGYSWRKYGQKQVKHSEYPRSYYKCTHASCAVKKKVERSHEGHVTEIIYKGTHNHPKPAASRRPPVHPPPPSPATTTTTPLPPGDAQADHAPDGGGGSTPVGAGQAGAEWHNGGVVGGEGLVDATSSPSVPGELCESTASMQVHEGAAAAQLGESPEGVDVTSAVSDEVDRDDKATHVLPLAAAAADGESDELERKRRKLDSCATMDMSTASRAVREPRVVIQTTSEVDILDDGYRWRKYGQKVVKGNPNPRSYYKCTHPGCLVRKHVERASHDLKSVITTYEGKHNHEVPAARNSGHPAGSASPGGGAGSSSQPHGVGVGGRRPEVPSVQESLMRLGGGCGAAPFPPHFGLHLPPPPPRDPLAPMSNFPYSLGHAPSPALRGLPPPPPPPPSASALAVAGLGGVVEGLKYPMLAPPSVHSLLRHRQGGGMEAVVVPKAEVKQEAMRPAAAVAGAGRGAAVYQQAMSRVSLGNQL

SEQ ID NO: 25237 - protein, 396 aa, Oryza sativa; identical to SEQ ID NO: 17999
  Clone ID: TF_OsC143704_1.pep

SEQ ID NO: 25238 - protein, 707 aa, Oryza sativa
  Clone ID: TF_OsC1528_1720.pep
MDRDHAGGPPPVHGTDCPDRPGGRSDGAGGGLAWLCSAQNRPAGLGERRRRAAAGDGKRRRGRRRQPARKRRRTAEDDDARADRSGAHGRERGKEGGERDSSLARTAAGAKEEGGGDNRRCGGADGRRWHPRREQRWVRGGLWISQGFINPEEDSQPEDTGLQYFNELFCRSFFQNGPSRDDDHKDKFVMHELFHDLACSVSKDECFSSGEAFCSLPENICHLSVVLPDSKSVVLTKVQRHLQSLMVVKRSASEYPGSFVPLLKILGLNDLLMKCRFLRALNLSCTTIRELPSSIMKMKHLQFLALNNTKIQSLPAEIGQLQTLQTLELKYCCCLIELPESTMNLTKLRHLDVQKEPGNVHVSMPHGIGQLTDLQTLTVFNTGDDLSHCSIGDLKNLSGLRGHVHITGLQNITASDDAKEANLVGKQFLGALTLEWCWSSQDMEDDSDKEIANQVLHNLQPNTNLQELSIRNYSGNLFPNWIQDSSLSMLVSITIDDCQDCNEIPHLGDLPFLKYLLIHKMDKYTVKYLLKKTTTDDGWNWRKYSEKDLLGSKYKRSWYRCNQKQSTGCVARKIVEPNNDDPNTWLVTYLYEHNHKQEARPCDKPSPSDLHVQLASGNTQWCVLRGFYGGVRQMTVGSNTQLHERDYTGNANHSGIIARQTWIEMLRRGCTAGHSQRRAVTYWIYCDDSSSIKDKLEIVDVDVLYQQ

SEQ ID NO: 25239 - protein, 358 aa, Oryza sativa; identical to SEQ ID NO: 18025
  Clone ID: TF_OsC318264_1.pep

SEQ ID NO: 25240 - protein, 246 aa, Oryza sativa; identical to SEQ ID NO: 18027
  Clone ID: TF_OsC82840_1.pep

SEQ ID NO: 25241 - protein, 583 aa, Oryza sativa; identical to SEQ ID NO: 18028
  Clone ID: TF_OsC93838_1.pep

SEQ ID NO: 25242 - protein, 307 aa, Oryza sativa; identical to SEQ ID NO: 18000
  Clone ID: TF_OsC271102_1.pep

SEQ ID NO: 25243 - protein, 320 aa, Oryza sativa; identical to SEQ ID NO: 18001
  Clone ID: TF_OsC278621_1.pep

SEQ ID NO: 25244 - protein, 316 aa, Oryza sativa
  Clone ID: TF_OsC61691_1.pep
MAAGEEVMDRSTSAEDGYCSAGTDSPRAESVDEQGAAEESSPRGGQKRELPSPSASPSSPLPPAAKRSRRSVEKRVVSVPIAECGDRPKGAGEGPPPSDSWAWRKYGQKPIKGSPYPRGYYRCSSSKGCPARKQVERSRADPTVLLVTYSFEHNHPWPQPKSSSCHASKSSPRSTAPKPEPAADGQQPEPAENESSASAELEVPEPEPEQESEPVVKQEEEQKEEQKAVVEPAAVTTTVAPAPAVEEEDENFDFGWIDQYHPTWHRSYAPLLPPEEWERELQGDDALFAGLGELPECAVVFGRRRELGLAATAPCS

SEQ ID NO: 25245 - protein, 170 aa, Oryza sativa; identical to SEQ ID NO: 18003
  Clone ID: TF_OsC102358_1.pep

SEQ ID NO: 25246 - protein, 555 aa, Oryza sativa; identical to SEQ ID NO: 18004
  Clone ID: TF_OsC26646_1.pep

SEQ ID NO: 25247 - protein, 283 aa, Oryza sativa; identical to SEQ ID NO: 18005
  Clone ID: TF_OsC387129_1.pep

SEQ ID NO: 25248 - protein, 183 aa, Oryza sativa
  unsure (1)..(183): unsure at all Xaa locations
  Clone ID: TF_LIB4371-013-R1-N1-H3.pep
QGGSNGGGKGVNLKFDSSNCTGXSSSRYFLSSLSMEGSIASLAGSRSSRPFQLVSGSQTSSTPELGLMQRRRCTGREDGSGRCTTGSRCHCAKKRKLRIRRSIKVPAISNKVADIPADEFSWRKYGQKPIKGSPHPRGYYKCSSVRGCPARKHVERCVDDPSMLIVTYEGDHNHNRVLAAQPA

SEQ ID NO: 25249 - protein, 609 aa, Oryza sativa
  Clone ID: TF_OsC337842_1.pep
MTWDNRIKEESSLLIALLIRLRHPDIDLDASGEVALGFKTVPHFSCTKRDKGTQDYQKEARSMSSKKKRAAIDLSLEAERRRPEERGGGSDREASDGAAAAAEEDGDVKQREGPKEETGGEEEKVVEVVVDQGEDGSNEEIKYRTQQAEMIEEDKQPAAAANVDDDGGDSDGVGASAEEKHMVTEATGGEGDDGGDSRTPMAQDELSEMQEEMERMKEENRMLRRVVDKTVRDYYELQMKLAAYQQQPAAADEPKETEVFLSLGATAAASAGCGGGFPEAKSKEQAAWRRRSVGSDDSDCGKEDLGLSLSLGASSSYDDDQKAVEARPHDVDGAAAAAMIGGDGSRPAPRGQSVNPANRKTRVSVRVRCQGPTMNDGCQWRKYGQKVAKGNPCPRAYYRCTVAPGCPVRKQVQRCLEDMSILVTTYEGTHNHPLPVGATAMASTTSAAATFMLLSSTTSSSSVSDASAAPSSSYLSPYLLNSASPLLMPGATGGGGGMQHLNLFGNSPSSSSLLAPQAPGSSKYPWSPNHPPLAGAGGNKRPFWSAGGDGDKPAPAALAENVGAVMSDPNKFSAAIAAAINNFMGKDGESSSGKSSSKWGVVESLPPHE

SEQ ID NO: 25250 - protein, 319 aa, Oryza sativa; identical to SEQ ID NO: 18012
  Clone ID: TF_OsC61565_1.pep

SEQ ID NO: 25251 - protein, 108 aa, Oryza sativa
  unsure (1)..(108): unsure at all Xaa locations
  Clone ID: TF_LIB4371-039-R1-N1-B10.pep
EHMPPVPLTQKRHRVPSXYHTFIKVHIRSIXATDXSLSRTKAFGTGSKNFAHFWSIPNGVGCPHSSKKPDRAMDAPSPQKVLILDCLSSQDNRVDPTCLLISCCKYLH

SEQ ID NO: 25252 - protein, 207 aa, Oryza sativa
  Clone ID: TF_OsC14991_1.pep
MSAQIAPAEQVCYVHCNFCNTILAVSVPGNSMLNIVTVRCGHCTNLLSVNLRGLMHSAPALQDHHHHHLQESGLSGCFRDQSGYPEFGFSAASSSSKLRLPPAAAAMVSYSQQNQQLEQALHARPPEKRQRVPSAYNRFIKEEIRRIKANNPDISHREAFSTAAKNWAHYPNIHFGLSPGHEGGKKLVDVDPIPTAPSSKKIQGFYS

SEQ ID NO: 25253 - protein, 194 aa, Oryza sativa; identical to SEQ ID NO: 18105
  Clone ID: TF_OsC256574_1.pep

SEQ ID NO: 25254 - protein, 186 aa, Oryza sativa
  Clone ID: TF_OsC1295_1.pep
MSAQIVPAPEHVCYVHCNFCNTIFAVSVPSNSMLNIVTVRCGHCTSLLSVNLRGLVQALPAEDHLQDNLKMHNMSFRENYSEYGSSSRYGRVPMMFSKNDTEHMLHVRPPEKRQRVPSAYNRFIKEEIRRIKANNPDISHREAFSTAAKNWAHFPNIHFGLGSHESSKKLDEAIGAPSPQKVQRLY

SEQ ID NO: 25255 - protein, 169 aa, Oryza sativa
  Clone ID: TF_OsC1294_1.pep
MSVQFTSEHVCYVNCNYCNTILVVNVPNNCSYNIVTVRCGHCTMVLSMDLAPFHQARTVQDHQVQNRGFQGNNFGSYDIASRNQRTSTAMYPMPTSQQQVSPIRPPEKRQRVPSAYNRFIKEEIQRIKTSNPEISHREAFSAAAKNWAHLPRLHFGLSVADGGGGGGSN

SEQ ID NO: 25256 - protein, 80 aa, Oryza sativa
  unsure (1)..(80): unsure at all Xaa locations
  Clone ID: TF_jC-osflLIB3479001b04b1.pep
YGXXYKYGRXPMMFSXKNDTEHMLHVQPTXKRYRVTSVYNIFIKEDIRRIKSYNPGIRHKKXFNTGCKNWAHFPNIHFWV

SEQ ID NO: 25257 - protein, 256 aa, Oryza sativa
  Clone ID: TF_OsC17966_1.pep
MSSSSSSSAVFPLDHLAAPSPTEQLCYVHCNCCDTILAVGVPCSSLFKTVTVRCGHCANLLSVNLRGLLLPAPAPAPANQLHFGPSLLSPTSPHGLLDEVAFQTPSLLMEQAASASLSSITGRSSSSCASNAPAMQMPPAKPVQQEPELPKNAPASANRPPEKRQRVPSAYNRFINDEIQRIKAGNPDISHREAFSAAAKNWAHFPHIHFGLMPDQGFKKTFKPQDGSEDILLKDSLYAAAAAAAAAAANMGVTPF

SEQ ID NO: 25258 - protein, 266 aa, Oryza sativa
  Clone ID: TF_OsC17966_2.pep
MMSSAPETFSLDHLSQHQQQQPPPLAEQEQLCYVHCNFCDTILAVGVPCSSLFKTVTVRCGHCANLLSVNLRGLLLPAAASTANQLPFGQALLSPTSPHGLLDEVPSFQAPASLMTEQASPNVSSITSSNSSCANNAPATSMASAANKATQREPQQPKNAPSANRTSEKRQRVPSAYNRFIKDEIQRIKASNPDITHREAFSAAAKNWAHFPHIHFGLMPDQGLKKTGIQSQDGAGECMLFKDGLYAAAAAAAAATAASSMGVTPF

SEQ ID NO: 25259 - protein, 308 aa, Oryza sativa
  Clone ID: TF_OsC1270_1.pep
MRVQCDVCAAEPAAVLCCADEAALCSACDRRVHRANRLASKHRRLPLVHPSSSSSGDGGAAAAPLCDVCREKRGLVFCVEDRAILCADCDEPIHSANDLTAKHTRFLLVGAKLSPAALAEQPLPSSDCSSDDDAAAAATEEEYHSSAASTGAAVSAPLDASSNGAGGGGGVGGSSISDYLTTICPGWRVEDLLPDDDAFAAAAAQAGKEKDERVPFLDADLFDVVAGRPEKKGGAWAPHVPHLPAWCLDEVPVVVAASAAPAATPVKAKQGHVRDSHWSDSDAFAVPEFSPPPPPAKRARPSSQFWCF

SEQ ID NO: 25260 - protein, 250 aa, Oryza sativa; identical to SEQ ID NO: 18108
  Clone ID: TF_OsC280_1.pep

SEQ ID NO: 25261 - protein, 337 aa, Oryza sativa; identical to SEQ ID NO: 18107
  Clone ID: TF_OsC1270_2.pep

SEQ ID NO: 25262 - protein, 384 aa, Oryza sativa; identical to SEQ ID NO: 18109
  Clone ID: TF_OsC1273_1.pep

SEQ ID NO: 25263 - protein, 335 aa, Oryza sativa
  Clone ID: TF_OsC1273_2.pep
MLKLEPEFPGLPQRCDSCRSAPCAFYCLADSAALCATCDADVHSVNPLARRHRRVPMGVVAAPGAGGAFVVRPAGGVNSSWPIREGRRCDYDDDDADAAGEEDEEATSWLLFDPLKDSSDQGLPPFGDALVADFLNLGGGAGEKEDASSSKDCSSSHGKSSEGSHEFAVPGEPVPERQGFGAVSMDITDYDASNFRRGYSFGASLGHSVSMSSLENMSTVPDCGVPDITTSYLRSSKSTIDLFTAAAGSPVAAHSIMSPPQFMGAIDREARVHRYREKRKTRRFEKTIRYASRKAYAETRPRIKGRFAKRSDTDLEVDQYFSTTADSSCGVVPTF

SEQ ID NO: 25264 - protein, 408 aa, Oryza sativa
  Clone ID: TF_OsC101635_1.pep
MGALCDFCGEQRSMVYCRSDAASLCLSCDRNVHSANALSRRHTRTLLCDRCASQPAMVRCLVENASLCQNCDWNGHSAGSSAAGHKRQTINCYSGCPSSSELSKIWTFVSDIPNVAPEPNCEQGISMMSISDSGVSNQDNAAGDSSLLDIASATLMSDLGTAGKPKSLIGSSSEAGVNLLPLATDQMAGSVDSTSAKVPYTADQDMFSKDSIYEDFCVDDVDLSFENYEELFGTSHIQTEQLFDDAGIDSYFESKEIPSGNSDEQPKLMQPVTSNAVSADSGMSIPGAKGDSSLCIPVRQARSSISLSFSGLTGESSAGDYQDCGVSPVLLMGEPPWHPPGPEGSFAGATRDDAITRYKEKKKRRKFDKKIRYASRKARADVRKRVKGRFVKAGEAYDYDPLCETRSY

SEQ ID NO: 25265 - protein, 314 aa, Oryza sativa; identical to SEQ ID NO: 18122
  Clone ID: TF_OsC91_2417.pep

SEQ ID NO: 25266 - protein, 103 aa, Oryza sativa; identical to SEQ ID NO: 18123
  Clone ID: TF_OsC376286_1.pep

SEQ ID NO: 25267 - protein, 170 aa, Oryza sativa
  Clone ID: TF_OsC267651_1.pep
MLTAVSAFSQEGRGVAATSGGGGPFTGWCSSRRRRPEAPAAMDRYNGGGGGGEEGDEQLDLNLSLQPSQANEPPGYFTCTYCDKKFYSSQALGGHQNAHKFERSVAKRTRELAAARRQQAADEEARRGAGTTTTREPTGNASSSYQRASPPAEARRRDLLTDDIDLSLKL

SEQ ID NO: 25268 - protein, 320 aa, Oryza sativa
  unsure (1)..(320): unsure at all Xaa locations
  Clone ID: TF_OsC33740_1.pep
MDVDFWGVVIEPCNKKEIFCPEDTLYHLTSVALDEAYGLKDSNVKVFVEVNDEKFAIGTLSSKRHPHIKVDFCFKKNFQLFHTSLISKVAFCGYQVKNLGKFTDSEGDESDEEVPPDNMIKEAQKSKLPAKSATVASAMQKAFVKEIEHYEKSKADDDNNERYRDISVVGESTGNEDSSDDADYEGKSSDEEETTAKEGESTDEKETPAKEGESSDEEETPAKNTKEENEPVVTPLKTFPHXDGKIEAPITDNKTGTNTSKRGSHLQVTNPHPAKQAKRTPIKNDTPKRSASYVCNSCKKTFNSSGALKDHSKAKHPATN

SEQ ID NO: 25269 - protein, 1678 aa, Oryza sativa
  Clone ID: TF_OsC9089_1.pep
LTPPRQFARRGAAAAAADPHPSRERAGRRRSSCCIRRIAQCEVIEIHTDFLVKQHYGAKGVDQWTGYGHDTTGVPTSFTQCFLNLGHGISSHLDCEGQFCELENLLDAKIYTYDALITELQNKRSDMYKDADDITKESKRRLSKSIAKICYCLDDVGLICASEATKICIERGQEKGWLKEVVDATDQQTDANGSRLFAENSALHMKFFEEALHLIDKRLQQGIDMLLNSESGCVEAAKTGYISPKLYELIQIFHSFSNSRHARCLIFVDRKITARVIDRMIKKIGHLAHFTVSFLTGGRSSVDALTPKMQKDTLDSFRSGKVNLLFTTDVAEEGIHVPECSCVIRFDLPRTTRSYVQSRGRARQEDSQYILMIERGNVKQNDLISAIVRSETSMVKIASSRESGNLSPGFVPNEEINEYHVGTTGAKVTADSSISIVYRYCEKLPQDKCYSPKPTFEFTHHDDGYVCTLALPPSAVLQILVGPKARNMHKAKQLVCLDACKKLHELGALDDHLCLSVEDPVPEIVSKNKGTGIGTTKRKELHGTTRIHAWSGNWVSKKTALKLQSYKMNFVCDQAGQIYSEFVLLIDATLPDEVATLEIDLYLHDKMVKTSVSSCGLLELDAQQMEQAKLFQGLLFNGLFGKLFTRSKVPNAPREFILNKEDTFVWNTASVYLLLPTNPSFDSNVCINWSVIDAAATAVKLMRRIYSENKRELLGIFDSDQNVGDLIHLANKSCKANSLKDMVVLAVHTGKIYTALDITELSGDSAFDGASDKKECKFRTFAEYFKKKYGIVLRHPSQPLLVLKPSHNPHNLLSSKFRDEGNVVENMSNGTPVVNKTSNRVHMPPELLIPLDLPVEILRSFYLFPALMYRIESLTLASQLRSEIGYSDSNISSFLILEAITTLRCSEDFSMERLELLGDSVLKYADEGQLSSIRCHMICNATLYKLGIERNVQGYVRDAAFDPRRWLAPGQLSIRPSPCECPVKSEVVTDDIHIIDDKAIVLGKACDKGHRWMCSKTIADCVEAIIGAYYAGGGLRAAMAVLKWLGIGAEIEEDLIVQAILSASVQTYLPKDNVFEMLEAKLGYSFSVKGLLVEALTHPSQQELGAKYCYERLEFLGDAVLDILLTRYLFNSHKDTNEGELTDLRSASVNNENFAQVAVKHNFHHFLQHSSGLLLDQITEYVNRLEGSSMDKVELLSDGLPKGPKVLGDIVESIAGAILLDTKLDLDVVWGIFEPLLSPIVTPENLELPPYRELIEWCGKHGYFVGINCRDQGDTVVATLDVQLKEVLLVRQGFSKKRKDAKAHASSLLLKDLEEKGLIIPKNASKTEQFEKHCGSTNPFNNLHVDAMDTQTPKPTKEKNAADSRNISDPLLGKPLHVIVKTSKGGPRIALYELCKKLQWPMPTMESEKVQPSFSSVCSSPGGSSQKATPQAFAFASTITLHIPNADVISLTGDGRADKKSSQDSAALFLLYELQRRGIEVKPGKAVSFNTTSVFLCDEDENMSDICDIMGKHLGRPVAEEGKKDNSDDGMDLSSSDDDDDSLDSSSSDDDDDESGDEDDGSDELPAEMESSEEEDGSDGQDESSSSMVSTDEEDESDEEDEIPEKPESSKLTAAGSTLSSGDKNTHPAKEDGKTPAISKPNKETPESSGTHACKYCSKAFSSDKSLRSHQKARHPAK

SEQ ID NO: 25270 - protein, 245 aa, Oryza sativa; identical to SEQ ID NO: 18127
  Clone ID: TF_OsC312792_1.pep

SEQ ID NO: 25271 - protein, 178 aa, Oryza sativa
  unsure (1)..(178): unsure at all Xaa locations
  Clone ID: TF_OsC1713_4288.pep
GINALLSLSSPAXATSMAPTSSSTPAGSRALAAEGVFECKTCNKSFPSLQGLGGHRTSHTRLQAKLLSDPAAAAAERDRARIHEGETGTTTVVLTAADVDDSGGATVPQPPEAMLDLNYPPPVAVPPSPAAARARRSAAPICSLPAACASAAALPACLLNRVAPPPPPGFTKPTEHTD

SEQ ID NO: 25272 - protein, 427 aa, Oryza sativa
  Clone ID: TF_OsC12651_1.pep
MGKKKKRVEKVFCYYCDREFDDEKILVQHQKAKHFKCHVCHKKLSTAGGMAIHVLQVHKESVTKVPNAKPERESTEIEIFGMQGIPPDVLAAHYGEEEDPSSKVAKVEVPSLRPPVMPNPAGMVYPPRPAYGVAPPMYNPALNPLMARPPIWPAPPPQPWFTQPVVSVPQMASGLAPQQPLFPIQNMPAPMTSAPANLLQTSFPMAHVGVPSPVTPQVSQPLFPVSTSAGNGAVSSPYVASVAPGSIPTSSPSVAPAGVGYAATNQGTGGPAAVPPPASNNKAPATQPGANEVYLVWDDEAMSMEERRLSLIKYQVHAETSQEFQVGIYIVLPGGARVLRPDELLLDHYYYHHSSSSDPYYSTPILPPYGDAFSPPNPPPPPPPMSPSDLISPIIPAPTFTYSSPPPPPLYYPPPPDISPSPPPSIP

SEQ ID NO: 25273 - protein, 605 aa, Oryza sativa
  unsure (1)..(605): unsure at all Xaa locations
  Clone ID: TF_OsC83960_1.pep
MHEASEVKIPARPRSNTICNPRLDVIVAANHSVFIKGVLSLAICMQVSTAVGSCDYASTVPAAIVSSGSGVVNHTSYCTCRSIDIMLQLPLPWPLALHLNCXKWSGVVVLCSSNIQSIRKQQAKKQHHSLHELAKRIAMVEPGRARETKVTASASSSAGSDAAVMKKKKKKKKKLVVASRKVDEKDKKQVDYKCSRSSGRDECCKVESRHQQCTEPESPSYRNSSSSSHAGHHHHRAADGKKLGCNSASICKVKQDNPMQQHMRRAEDELKVKDKPPVAEPYCKRRASVSACNISSERSVKKSVKQQQQEASSSLQSSASISASSCSSTAGGGGSFRGMQQLSLRRLSGCYECHMVVDPISGVFRDSSSMRATICSCPDCGEIFVRPDSLHLHQSIRHAVSELGAEDTSRNIISIIFQSSWLKKQSPVCAIDRILKVHNAARTLARFDDYRAAVKAKAMAHRHPRCTADGNELLRFHCATLSCDLGLHGATHLCDHLSCAACAIIRHGFRPPAPGAGIRTMATSGRAHDAVVSSGSEGDRRAMLVCRVIAGRVRREEAAAAAAEEEEEEYDSVAGTTPGLYSNLDELDVFNPTAILPCFVVVYRA

SEQ ID NO: 25274 - protein, 154 aa, Oryza sativa
  unsure (1)..(154): unsure at all Xaa locations
  Clone ID: TF_LIB3598-028-P1-K6-G8.pep
MVLDGAAPMLSSSPAASGEEVGARKPQQRCGGAEGWSKRKRSRRRHRDRAAAPPPHGGGEEHLALSLLMLARGHRDPSPAPQEQHGCSVCGRVFSSYQALGGHKTSHRPRTPPTMAAVVVVDEPAATTASPAVSSSNSGFCXGGGGGNMVHECS

SEQ ID NO: 25275 - protein, 512 aa, Oryza sativa
  unsure (1)..(512): unsure at all Xaa locations
  Clone ID: TF_OsC154858_1.pep
MALSTLLLPSSSSSSSKTATATDTSDRRRHHHHHNHTKRKKKPPPPPSLXAPPSHSPCCVGAGAGGLGAKHRGDNLQVELAXSATVRSARSTASSRCTTXARTVAPFEAAPVSSSWEQLKSLLSCRSATAAARVHDPAAPSSALSRLRSHGAGACGASLCAIRDVVDAASSASAASTAAASLDRDTTPLTRSSRRAHRAATSSSGGGGGHHASLRGLSGCYECRAINVEPMSRRYPRPRELCACSQCGEVFNKADSLEHHQAIRHAVKIGWQKYIKRYLCLAIFCMLAVASASPFVEVSELGPEDSGRNIVEIIFKSSWQKRDRPICQIDRILKVHNAARTVARFEAYRDAVRTRCRATAARAAADGNELLRFHPAALACPLGLNGATSLCDDDDACGVCAAIRHGFAPWAGAHPLGVRTTASSGRAHDCGAAAAAAQQAGGCRAMLVCRVIAGRVRRNDDDGGAEEEEGAFDSVAGDEAASSVYGNLEELFVANPRAILPCFVVIYRVVPE

SEQ ID NO: 25276 - protein, 439 aa, Oryza sativa; identical to SEQ ID NO: 18178
  Clone ID: TF_OsC254894_1.pep

SEQ ID NO: 25277 - protein, 327 aa, Oryza sativa
  Clone ID: TF_OsC64601_1.pep
MQATDHADTERALAFVAMSVEDKHAGVVKRKRTKRPRHHAAPASSSESTTTEEEDMAHCLILLAQGAAVPPVLAAPAPAPPPPQPPVVVVKSERYTSRKYTEAATTADGVRAGFYVYECKTCNKCFPTFQALGGHRASHKKPRLPGADDDNVNNVTNTNAIVVKSKPPLTTTTTPSAPSPPPPQADAVVVPDVTTVLSLNNVAAAGSIINKLRVHECSICGAEFGSGQALGGHMRRHRPLHAPPERAATTAATTAATATAPDTKKEGSTSINLELDLNLPAPSDEESVSPPPPPPPPVLLALGGQFNDGKKPILQLTASAALVGCHY

SEQ ID NO: 25278 - protein, 1292 aa, Oryza sativa
  Clone ID: TF_OsC63096_1.pep
ITCAAGRNYNTKANDEVGPNIPESLGELGQHTQKKNIAPKDVWERSSGWRLSKSQWKLQAIARAPGSLTRFMPDDVPGVTSPMVYIGMLFSWFAWHVEDHDLHSLNFLHTGAPKTWYAVPGDRAVELEEVIRVHGYGGNTDRIASLAVLGEKTTLMSPEVLIDNGVPCCRLVQYPGEFVVTFPRAYHVGFSHGFNCGEAANFATPQWLKFAKEAAVRRAVMNYLPMLSHQQLLYLLAVSFISRNPRELLSGIRTSRLRDRKKEDRELLVKQEFLQDMISENELICSFLGKKSVDNVVLWEPDLLPSLTALHPCSSCSKAPEKKGEDGPRIGSTQSSSKDDSSSDGTACMTGTQSKGLSMDSKQAPEGEKLDTDDGDDLPFDLSIDSGSLTCVACGILGYPFMAILQPSRKALEEISLVDKERYKLSCEKEICSNVLPCSPNDGSSGCPLIANRSSSPVENANLSHQDVKPIRSDISLMGKEFNGTLGKHIGTSCSCSSENTIHPYGDTETPEKKIPSDCPGSELSKQSGRGDVNVPDVEGSEETISWNTGCAFARPRIFCLQHALEIEELLASKGGVHALIICHADYVKLKALAISIAEEIEFQFDYKDVALANASKSNLHLINISIDDEGYEEEGTDWTSRMGLNLKHSSKIRKETPESQEQPPLSFWGLFSKPSPISVVSNLKWLCRKARTPYKVIGYASSPDVVATPDKVKPAVTKTQIDTSGNAHENIGSEQTLQQDCVLQESNDVADMCKRPKVNDQDGHSLINIPIAVAEYPMMHQVCERPDSPTTVAVSAGKPTREQCGAESTELSTVKQFLDNGLIAEGGSMNFISNHEHLESDNATSVCKDEQLQVQQDQLAMVLCNNPNTELVAGELHGGAASSTLENEDSCGNTSYCSDTVLKNSEPDTDDQPETCDRSVVLVTPKSSCDQMISSSDRSCSLTLDCPVSTDAAFSSEKLSMAHDLMGSELQAVHNSKAEVVASLTDVKGAKLNSIHTTQLPHESPSSDFIISEGAQSASTTAIPRKNGTSMHTESNSIDILLGVLADESKVSSGKDEVGKASLTLMTLAGNDQSADDVTQDEVAEITDPSHGFCSSDIVSRSIGSSNRTNIICYARRKHKRKSGSEFNINSPQSLGSFVRSPCESLRPRTRPAIVEDMTNETKTAEASTANKRKKAKVEAFQCDIEFCDMTFETKAELRAHQRNICTDESCGKRFSSHKYLKRHQCVHRDERPFKCPWDGCPMTFKWLWAQTEHIRVHTGERPYKCSAPDCGQSFRYVSDYSRHRKKFNHY

SEQ ID NO: 25279 - protein, 522 aa, Oryza sativa
  Clone ID: TF_OsC43957_1.pep
MDSGLGRSSETSLKALPSMASNATRNTDPDQQGVRFSSTDQPPCFARPGQSFPAFPPLFGVQSSSLYLPDDIEAKIGNQFESNPSPNNPTMDWDPQAMLSNLSFLEQKIKQVKDIVQSMSNRESQVAGGSSEAQAKQQLVTADLTCIIIQLISTAGSLLPSMKNPISSNPALRHLSNTLCAPMILGTNCNLRPSANDEATIPDISKTHDYEELMNSLNTTQAESDEMMNCQNPCGGEGSEPIPMEDHDVKESDDGGERENLPPGSYVVLQLEKEEILAPHTHFCLICGKGFKRDANLRMHMRGHGDEYKTAAALAKPSKDSSLESAPVTRYSCPYVGCKRNKEHKKFQPLKTILCVKNHYKRSHCDKSYTCSRCNTKKFSVIADLKTHEKHCGRDKWLCSCGTTFSRKDKLFGHVALFQGHTPALPMDDIKVTGASEQPQGSEAMNTMVGSAGYNFPGSSSDDIPNLDMKMADDPRYFSPLSFDPCFGGLDDFTRPGFDISENPFSFLPSGSCSFGQQNGDS

SEQ ID NO: 25280 - protein, 1205 aa, Oryza sativa; identical to SEQ ID NO: 18183
  Clone ID: TF_OsC82170_1.pep

SEQ ID NO: 25281 - protein, 385 aa, Oryza sativa
  unsure (1)..(385): unsure at all Xaa locations
  Clone ID: TF_OsC87628_1.pep
MALDGKPPVPPPSTPPMDSWACGGRRSKRRGGGGGSSGSSGSSGGGGGGESEEEYLAACLLMLAHGVRDEAEVVGVAAATAKPQHGYECSVCGKVYGSYQALGGHKTSHRKPPSPAAEPAAGEEPSSGGVAGEAKVHRCSICLRTFPSGQALGGHKRLHYEGGAVGDAVKEKNSLKTKAAVATAVLKDFDLNLPAAATTAGDEAESSPPEAKRARLLXSRLIHFWLGDGDGWHDKHAVFRWLASSSGGNNIMGPHDSPARCVEYSYSPTCRYGTFATGGCDSFMAFGMALAKVPQPSNTHVTSLLVFQQGWPSASLSHPGARSISLTFLLRYQSYETHWVSTGYTIPNGYGHGYEFLPANSIGYQSGGQKRVRHKPDAIFICNVN

SEQ ID NO: 25282 - protein, 513 aa, Oryza sativa
  Clone ID: TF_OsC2514_6.pep
MRPERRSRRRPGRPSAGRARAAQAGPAAGAAAASAQQQRSCSPGRRAMWNLTSASGDQASVSSHPAPPPAKKKRSLPGNPDPEAEVIALSPRTLMATNRYVCEICGKGFQRDQNLQLHRRGHNLPWKLKQRNPKEVVRKKVYVCPEAGCVHHDPARALGDLTGIKKHFSRQHGEKKWKCDKCSKRYAVHSDWKAHSKVCGTREYRCDCGTLFSRRDSFITHRAFCDALAEESARAVTAAAAVAGQQQHGGGMLFSQVADVLDHQAAMAMGGHGLMQELCLKREQQQQQQQFAPSWLTAQQQQQQLEAMAGAGNPAAMYGSARLDQEFIGSSTPESGGAQQAGLSFGFSSTSSAPPHPAASSAHMSATALLQKAAQMGATLSRPSSHAHMAAAAAASTHNSSSSAATTNAPPPPPTSNVSSTCVGAGGYGLAFEASHFIAADESSRGARSDRDTGNGVAGAGNDGLTRDFLGLRAFSHGNIMSMAGFDPCMSTTSASSAAPYDHHHHSNKPWHS

SEQ ID NO: 25283 - protein, 247 aa, Oryza sativa; identical to SEQ ID NO: 18191
  Clone ID: TF_OsC182396_1.pep

SEQ ID NO: 25284 - protein, 170 aa, Oryza sativa; identical to SEQ ID NO: 18192
  Clone ID: TF_OsC32707_1.pep

SEQ ID NO: 25285 - protein, 578 aa, Oryza sativa
  Clone ID: TF_OsC3319_1.pep
MTYIPVRDGLSVTGVSSVTELERLARLEEEGEFLVVREEVGVVTGGARAEADIMLSSCAPTAVPPQDASGAATEPFRSLQIATASAGSAKKKRRPAGTPDPDAEVVSLSPRTLLESDRYVCEICNQGFQRDQNLQMHRRRHKVPWKLLKREAGEAARKRVFVCPEPTCLHHDPSHALGDLVGIKKHFRRKHSGHRQWACARCSKAYAVHSDYKAHLKTCGTRGHTCDCGRVFSRVESFIEHQDACNAGRPRAAEASSSPGRGGGVVVGAPAAASSSQQQQLFAVPASLSRTASSASPSSDLVVSPVAWPATGGGGPAMVSPRAAAPAPAGGSIAAFHHRFTDPALSPPTPCGGRRGGCHTTHSLELQLMPPRTTTTCAGGSLGGTPVATAVGYYASSSPHSPAAALPSRQPVADAMRLQLSIGFGGARDDGNNNSSSSSGEVSASATRLKEAAHEQLRLAMAEKAAADEARAQAKRQAELADQELATARRMRYQAQVELSRAHVLRDHAIRQVDATQLQITCYSCSHKFRARAAAMSSDVARSYVSSVVTEGGDADDPLDVVDATRRRLQHANSMGIM

SEQ ID NO: 25286 - protein, 171 aa, Oryza sativa
  Clone ID: TF_OsC722_1.pep
MTITREEAESKEMESLRVHASALLSLSSPAASASQPTSSSSTTEGVFECKTCSKRFPSFQALGGHRTSHTRLQAKLLSDPAAAAAAAAERDRARVHECAVCGVEFSMGQALGGHMRRHRGETGTTTVVLADADDSGGATVPQPPEPMPDLNYPPLEDAGDGSEPELLNLLV

SEQ ID NO: 25287 - protein, 144 aa, Oryza sativa
  Clone ID: TF_jC-osleLIB3474010a01b1.pep
MCSGDDIDGDMRVEATQHRDIRRYKCEFCTVVRSKICLIRAHMVAHHKEELDKSEIYKSNGEKVVHEGDHTCQECGASFQKPAHLKQHMQSHSDERSFICPLEDCPFSYIRKDHLNRHMLKHQGKLFTCSMDGCGRKFSIKANM

SEQ ID NO: 25288 - protein, 396 aa, Oryza sativa
  Clone ID: TF_OsC1528_2323.pep
MCSGDDIDGDMRVEATQHRDIRRYKCEFCTVVRSKKCLIRAHMVAHHKEELDKSEIYKSNGEKVVHEGDHTCQECGASFQKPAHLKQHMQITGWDDHLVKLQQDCLLTLFQERSYICPLEDWPFSYIRKDHLNRHMLKHQGKLFTCSMDGCGRKFSIKANMQRHVKEIHEDETATKSNRQFVCKEEGCSKVFKYASKMKKHEESHVKLDYVEVVCCEPGCMKTFTNVECLRAHNQACHQYVQCDICGEKHLKKNIKRHLRAHEEVPSTERIKCSLEGCECSFSNKSNLTKHIKASHDQVKPFACRFTGCEKVFPYKHVRDNHEKSSAHVYTQANFTEMDEQLLSCPRGGRKRKAVTVETLTRKRVTMHGDASSLDNGTEYLRWLLSGGDDDSSQTH

SEQ ID NO: 25289 - protein, 198 aa, Oryza sativa; identical to SEQ ID NO: 18197
  Clone ID: TF_OsC14_2.pep

SEQ ID NO: 25290 - protein, 341 aa, Oryza sativa
  Clone ID: TF_OsC83619_1.pep
MTKHPRDGEVISLSLSLTLGAAADSGERKKPRRGSSPAASGSGDFVCKTCSRAFPSFQALGGHRTSHLRGGHGRSVGLAPATAKGTTKKVQEKPAAAATHECHICGQGFEMGQALGGHMRRHREEAAAAAAAVQMLPLSGGGHRAGPNLEVFELGHVRSGIGATTLAVTKESDTRGLGINGASSCQALEGGRANATSGVAVSEECKARFQELRAGRAHRFVVFKIDDAMRQVVVDRVGPRDAGFDELTASLPADGCRYAVYDHDFTVSDATATAAAGEGGEAPRSKIFFVSWSPAAADVRSKMVYASSNEGFKKELDGVQIDLQATDPSELTLDVLKDHTS

SEQ ID NO: 25291 - protein, 217 aa, Oryza sativa; identical to SEQ ID NO: 18177
  Clone ID: TF_OsC171199_1.pep

SEQ ID NO: 25292 - protein, 228 aa, Oryza sativa
  unsure (1)..(228): unsure at all Xaa locations
  Clone ID: TF_LIB4309-044-R1-K1-G6.pep
DPDAEVIALSPKTLLATNRFVCEVCNKGFQREQNLQLHRRGHNLPWKLKQKNPAQAQRRRVYLCPEPTCVHHDPARALGDLTGIKKHFCRKHGEKKWKCDKCSKRYAVQSDWKAHSKICGTREYRCDCGTLFSRRDSFITHXRAFCDALAQESSRLPPTSLSSLTSHLYGASNAGNMALSLSQVGSHLTTSLQDGGGHHHHPSPELLRLGGAGGGGGGRGWEQHRRAV

SEQ ID NO: 25293 - protein, 636 aa, Oryza sativa
  Clone ID: TF_OsC2514_9.pep
MEVMPPNRTGTEGEPGPAVEPAPAGAGAAPVVKKKRNLPGTPDPDAEVIALSPGTLLATNRFVCEVCGKGFQRDQNLQLHRRGHNLPWRLRQRGPGAAPPRRRVYVCPEPGCVHHNPTRALGDLTGIKKHFCRKHGEKRWTCQRCGKRYAVQADLKAHTKTCGTREYRCDCGTLFTRRDSFVTHRAFCGALVEETGRVLAVPAPPSPRPPDLEAEENVDKDKDKEEEVKEKEKEKELEENEDSPVAEVDEPQPSQAVAEVPQQCAPSPPPPPPILQEHPQPVVAVVPNVDEQEVVAKPAVIAKIEVEDERDEEVCFQEVDRYKDAELEDSNLLDNDTPMLPCFLPSPSEAIGTDGSSTSCGTGSSVTNAIAPATTTSTFAGLFASVTTSSTPQSRSLRDLIGVDPTFLCLAIGAPSSLFPQTNASDPCSFAPPPAPHMSATALLQKAAEVGASQSSSSFLKEFGLAASTSSSPPSKLSQGRFTTGNTPTTSHPHPHPHPHPHPPQGRFMDNVPQPPPPAKLPHRMFTDNSVQQWHHRSNQQMEMEPGPMLPGGLGLGLTYDTGNSGLPDLMMGPSALYGPKPATLDFLGLGIGGTMGGSTANGGLPALMVGGELDMGSAQAPWEEAKRKTNGRTIL

SEQ ID NO: 25294 - protein, 238 aa, Oryza sativa
  Clone ID: TF_OsC13219_1.pep
MRVPAPVRDEFVVDEEPEDVALCLVMLSRDTGRPWNSRPSDEYSSLMYNSSYHHHHDAVSDDDLELSLSSPYADTEIRTKKRRKTTGAASTAGGEKRGRYECHGCGRAFLSYQALGGHRASHKRINSNCSLVKPPADQPEPSIETSFSSASTSVSPADTMISAATISKTVKKATKFVCPICSKEFGSGQALGGHKRSHSIAGELYERGHADGIVKLEQPLLADRFLDLNLPAPGGDDG

SEQ ID NO: 25295 - protein, 306 aa, Oryza sativa; identical to SEQ ID NO: 18208
  Clone ID: TF_OsC3878_2.pep

SEQ ID NO: 25296 - protein, 395 aa, Oryza sativa
  unsure (1)..(395): unsure at all Xaa locations
  Clone ID: TF_OsC4331_1.pep
PRAAGKKVGVGNEVHHPPTRRRRWRRLRRATNGCHGADAGHGSRGSLWRPRRRGRRRRSRRRRRGCPRRAPPVGCSRRPHGRRPPPHRRIYIRRIRAPLFLRHPLRLLRDLLRCPPRRPQRRLPPLFHRRLPPGSTSASGYYRPGAPPRGGLRASGTXQEAAKGDGDYDVVELDASELLAEHVHFCDICGKGFRRDANLRMHMRAHGDRFKTLDALSRPGQPKPPAGREVRFSCPYAGCNRNRAHRRFRPLKSAVCARNHFRRSHCPKLYACERCGGKKRFAVLADLRSHLRHCGEEAQWRCSCGTTFSRKDKLFGHLALFEGHTPAIAEPNKGVATAAAEASISMMEEGGVEANCDREEDEEGGFDPKFFQEWMEELRGGAVAPNWSAPSEAGH

SEQ ID NO: 25297 - protein, 269 aa, Oryza sativa; identical to SEQ ID NO: 18209
  Clone ID: TF_OsC478_3.pep

SEQ ID NO: 25298 - protein, 377 aa, Oryza sativa
  unsure (1)..(377): unsure at all Xaa locations
  Clone ID: TF_OsC111363_1.pep
MPMPIGPGIRGYPDPWVKLPSPGTREGTVVVPEPGTRILKPEPAKTCLLHYRFYCLVRVEGFSFSQXGSVELGAEEREGLIRAHVLEHHKDEVDDLDDYLGRGGGETCKEMDHDCKHWIPENSKMREGLEWTNGCPFSYSRKDHLNRHLLTHQGKLFACPMEGCNRNKKEFICPEENCGKTFKYASKLQKHEESHVKLDYSEVICCEPGCMKAFTNLECLKAHNKSCHRHVVCDVCGTKQLKKNFKRHQRMHEGSCVTERVRCHLKDCKLSFSKKSNLDKHVKAVHEQKRPFVCGFSGCGKSFSYKHVRDNHEKSSAHVYVQANFEEIDGERPRQAGGRKRKAIPVESLMRKRVAAPDDDAPACDDGTEYLRWLLSG

SEQ ID NO: 25299 - protein, 420 aa, Oryza sativa; identical to SEQ ID NO: 18212
  Clone ID: TF_OsC3319_2.pep

SEQ ID NO: 25300 - protein, 181 aa, Oryza sativa; identical to SEQ ID NO: 18198
  Clone ID: TF_OsC24770_1.pep

SEQ ID NO: 25301 - protein, 311 aa, Oryza sativa; identical to SEQ ID NO: 18199
  Clone ID: TF_OsC328939_1.pep

SEQ ID NO: 25302 - protein, 401 aa, Oryza sativa
  Clone ID: TF_OsC11776_1.pep
MEYAAPAGAGAGGYYYYPPSQQHKPRRPPRPAARWVKHWIPQDLATSSGKCALYKWVREDVYKNLKDGKAVPEPEAVKPEPTTEILFLCSYENCGKTFVDVAALRKHAHVHNERQYICQEPGCGKKFVDSSKLKRHHLIHTGQKDFICPHPGCGKAFSLDFNLRSHLKTHALENYHVCPFPACGKRFTSDSKLKSHVKGHEKTGTPITAQYVPSSDKPQSSSKPATPATTKPTTPAATKTTTPASTKPTTPAPTSFAERPYVCPYDGCGKAYIHSYKLNLHLKTQHPEHGQEENGRIAAHASEHAVNDRANQYNYAEIVDLAPNPKRSKTNSGHKTPSSNKAYNVKISSVLPADISGVKNQWPGKYEDDSEETEEDQGNNIEDGWRYGNQNADDEETEYED

SEQ ID NO: 25303 - protein, 226 aa, Oryza sativa
  Clone ID: TF_OsC343306_1.pep
MGERPLAIAAGRDPMFVTAYAVHPDGHDSDFLDFLLELMAVGKMKERVNVLISLPTMEVATNTATRSPVKLMLVLTLSPASKVIAKGGGGVKRVHLDGGAFQCRTCGRRFSTFQALGGHRTSHKRPRVRADGLDLLLGARPGKLGAGGASTPVVHRCDMCGKVFATGQALGGHMRRHRPLVSRNGTMSTTWTAAAAAAATMSGSSSEERDDDDDDDVHNYNFIHFF

SEQ ID NO: 25304 - protein, 438 aa, Oryza sativa; identical to SEQ ID NO: 18217
  Clone ID: TF_OsC3878_4.pep

SEQ ID NO: 25305 - protein, 122 aa, Oryza sativa
  Clone ID: TF_uC-osroM202007h05b1.pep
MMQTAGRRRHRWVKEWVPQDLVVAGGPCALYKWVREDRLSALKSRDKEQEAELAKPEPTTEVLFLCSYEGCGKTFVDAGALRKHAHVHGERQYACHYAGCDKKFLDSSKLKRHFLIHTGEKN

SEQ ID NO: 25306 - protein, 366 aa, Oryza sativa; identical to SEQ ID NO: 18218
  Clone ID: TF_OsC3878_1.pep

SEQ ID NO: 25307 - protein, 476 aa, Oryza sativa
  Clone ID: TF_OsC337334_1.pep
MAVNSGDRARARGHHGDDDEEGVAVVGEDYPYCSDSDSDDDDDVDRYVFLARQPAPPVDRDDAEADAGAEGTGCCKRKRRVVDDDDHDDGFSPRQPALLDGSGGQAAEEEEDAEGSSDDDDAMAPRGEAGGGGRGRGVGKVSRKKARLVDLIRSPLLPAELDGSDKAAPPPPRGVCPKKIAVVVQAKNRKRRRFVDGGEEQEPQPQPPVRGKRSRGPDLEASEGLQTASAAAAAAAAEAAERASKRFVCSICGRCFGSHQALGGHVLGHKKKAKNAAIAAAARDATTTAVTEAVAPASQRQSFFAADINGQDERGCDGAEGSRYDDDEEKSPVVVDDVAACHDADVDESRGHGKAESASAIDAGGDAGNNKVAHGDGEENDKIAGVVVASSHDGDSDVGKMKIVQHKCDECGKVCLTGQALGGHMSKHRRTRPAANGGEGPATATVADGGAQTVRLIGDDVCLQRAVAIAGFHSAQ

SEQ ID NO: 25308 - protein, 149 aa, Oryza sativa
  Clone ID: TF_rsiceg_8849.y1.abd.pep
TRGFPSTHSAHSSISSASYGADGYYGGEGSVTDYSSASESVDLTHSRTLPRPSALLGANMPPAPQSMMGQVSSKVSSSSQKKHKCKICDKRFTRPSSLQTHMYSHTGEKPFACEVEGCGRHFSVVSNLRRHRKVHKNDGGADHPSPEDA

SEQ ID NO: 25309 - protein, 159 aa, Oryza sativa
  Clone ID: TF_OsC48690_4.pep
MTAALQALLDPTALSLGLPTPAINKEEYLAICLAALACTRAGKALVGVGGQQQVQACNKWLCPAPAAPEELRFRCTVCGKAFASYQALGGHKCSHRKPPSPGDHYGAAAAAQQLASAGDSKEDSASSAAGSTGPHRCTICRRSFATGQALGGHKRCHYW

SEQ ID NO: 25310 - protein, 651 aa, Oryza sativa; identical to SEQ ID NO: 18225
  Clone ID: TF_OsC57972_1.pep

SEQ ID NO: 25311 - protein, 680 aa, Oryza sativa
  Clone ID: TF_OsC78077_1.pep
MVGGDLTGAFPLRPCLQGHHGSCGRGALPHYDPQVRRLEVDSAGFLLHLLSLCYFQRPNKTWVGKRRGERGKFGSPRFRQVGYSEGEWMYWRADLVGARGWVGRIKLPHKRHVNVTWDKDLVKGATFRRTRGIAAIMQPSPSSPRAPPPTAAQASGYKHFCRVCNKGFTCGSALGGHMRAHGVGDGDGLGADDDDDDDDDSLGDEAVRRARGGADDPWNAGGPSSSGAATHVYELRTNPNRVTRSRQVCKNCGKEFTSWEHFLEHGKCSSGEDDDDEDDVDHSLQPWSPSPEADGEEDSAPAAGWLKGKRSRRCKGTGVDLSPTPSACAAGEEEDLANCLVMLSSSKVDQAGVTEAEQRSSSSASKEHKRLITFMEPTTYVLDTVMALPPPAPAPQYVSTVPRGMFECKACKKPQEGEGLLRCQAGEQPPEVAEPSHHAEVADRSEDNPAKATSDARRNVHASIDGDGNAGTSDAAAELSMAIVPIEPPVAALAAAPLKKKGKMHECSVCHRLFTSGQALGGHKRCHWLTSSSADHTASVPPLADDLVPLSFRPMLDAPEPALDLSIAANPPLLASAATVRPKVGGSSFHLDAPPPVYIPSSPAIPSQRNKATATTGSQNANDAVGLSTAAAEDEADSTTVKRARLSDLKDVSMAGETTPWLQVGIGSSSRGGADDNDKE

SEQ ID NO: 25312 - protein, 655 aa, Oryza sativa
  Clone ID: TF_OsC2514_1.pep
MASNSSAAAVAALFGIRDGDHEDQIKPLFAQQQQHHHHQPPMAPSNAAAAASAAGSAAGQAAVAAPPAKKKRTLPDPDAEVIALSPKTLLATNRFVCEVCNKGFQREQNLQLHRRGHNLPWKLKQKNPLEAVSRRVYLCPEPTCVHHDPSRALGDLTGIKKHFCRKHGEKKWKCDKCSKRYAVQSDWKAHSKICGTREYRCDCGTLFSRRDSFITHSAFCDALAQESARAGRAGREGGGAAGRRGARRLGGEGGAGSREATRGGPEGERLPPAAAGHLYGSAGAANMALSLSQVGSHLASTLQDHGHHHHHHGASPDLLRFGGSGGGAMAARLEHLLSSSSASAFRPLPPPQQQPPAPFLLGAAPQGFGDGGDGSGPHGFLQGKPFHGLMQLPDLQGNGTGGPSPSGPGLYNLGYIANSANSSGTSSHGHASQGQMTNTDQFSEGGGGGGGGGGSETSAAALFGAGGNFSGGDHHQVSPAGMYANDQAMMLPQMSATALLQKAAQMGSSTSSANGAGASVFGGGFAGSSAPSSIPHGRGTTMVDQGQMHLQSLMNSLAGGGNADHQGMFGSGSMIDPRLYDMDQHEVKFSLQRGGGGGGDGDVTRDFLGVGGGGFVRGMSMARGEHHGGGGSDMHGPLEAEMKSASSSFNGGRMQ

SEQ ID NO: 25313 - protein, 345 aa, Oryza sativa
  Clone ID: TF_OsC46145_1.pep
MMQTAGRRRHRWVKEWVPQDLMGSLAVAGCLNSMGEDRLSALKSRDKEQEAELAKPEPTTEVLFLCSYEGCGKTFVDAGALRKHAHVHGERQYVCHYAGCDKKFLDSSKLKRHFLIHTGEKNFVCPHEGCGKVLAFSLDFNLKAHMKTHSVDNYHVCKYPECARRFTQESKLRAHIKQQHEKGGLQNPGGSATNRSGLADHSHNSHTPKPSAAPPTPSADRPYVCPYDGCAKAYIHEYKLNLHLKKEHPNHYQDAGAQAASSKMSKRRSKPSLTAKMPLPKVPKRRGYTEPYQPPVSVVEEHQWPRNVLYEDDSEETEEEGDNVGDGARYRAASSDDDEETEDEE

SEQ ID NO: 25314 - protein, 504 aa, Oryza sativa; identical to SEQ ID NO: 18227
  Clone ID: TF_OsC3319_3.pep

SEQ ID NO: 25315 - protein, 395 aa, Oryza sativa; identical to SEQ ID NO: 18231
  Clone ID: TF_OsC3878_5.pep

SEQ ID NO: 25316 - protein, 538 aa, Oryza sativa
  Clone ID: TF_OsC2514_4.pep
MANARVMRDGEMIDGDGDRSSVRSRGGADPDAEVIALSPKTLLATNRFVCEICNKGFQRDQNLQLHRRGHNLPWKLRQRSGKEVRKRVYVCPEPTCVHHDPSRALGDLTGIKKHFCRKHGEKKWKCDKCSKKYAVQSDWKAHTKTCGSREYRCDCGTLFSRRDSFITHRAFCDALAEESAKARAAPPPPADEDGTSASAGAPPPQAPLPPPAPVPAPAPPPPPAAAPAPAAQPEQRDRDAALDQFATPAPAPAPPPVTAPPPPPVAAPNDCVSSSSSGVAPTSQSLLSSMFAPPSVAQAPQYADPIGVGAGGHQERAVPAKPPALCLAPNASSSLFTAPVPADRQQFAPPPPPSPSPHMSATALLQKAAQMGATSSSSSFLRCVGLDMSSSSSAPPSSSGQQQQHHHHHHQETMQVPLPASSLPEWPPRLQPEPSPMLSSGLGLGLPYDATGGPVSLPELMMGQSTLFSAKPATLDFLGLGVSPTGASTSRGFPTFIQPIGGAVSLAGSATVAAETFGAAHGGQANPWERNPSSSPIL

SEQ ID NO: 25317 - protein, 513 aa, Oryza sativa
  unsure (1)..(513): unsure at all Xaa locations
  Clone ID: TF_OsC154556_1.pep
MDAGGVELSGVMHRCRVCGKGFSCGRSLGGHMRSHISFGEAAAELGANGGVVGYGLRENPKKTRRLSEFDGDGDGEEVEVEEGGDGGELRACRECGKLFSSWRSLFGHMRRHASGGGGRNHDDDDDDDVDVEDEFGGGEEEEIVAPAPAAVTVIAAPPRRRRRSMRVAAPAPAPAPPRPVLLGGFEKEQEDVALGLLMLSRDTGVWRSPVARADRSYLAWTMARHRWYVQAVALLVVLKAAAGSAAPPTTTRSRSSSTVVAGMVFXRPVQGRRQRPLRLPALRCAGGDRVRRRGEPGDGAGVQHQLVRGILRPHGGHARDEPLPLPRNGYGYGYNSDEDSALLQYGGDVAKSRKRRASYHSPNSISSKKKQQPRAAAPAKRTRYECPGCGKVFASYQALGGHRASHKRINTSCSAPKVSPATAAAAAPAPEPSSETYASLSTLSPSASPGSAAAGIGDRKANNKSSAEEEKFGGACSSDELYAELELEQRSPAAAAGFLDLNFPPASSEVGVN

SEQ ID NO: 25318 - protein, 531 aa, Oryza sativa; identical to SEQ ID NO: 18164
  Clone ID: TF_OsC2514_2.pep

SEQ ID NO: 25319 - protein, 277 aa, Oryza sativa
  Clone ID: TF_OsC348190_1.pep
MRFLVLWCSRLCSWLVGLVLFVANFSVLLPVSVEFCFLSSEDLSVLQAEETIAEFMFALSYNVHRISSLATVETIESSSFPEQPGVPHLFCFLFSTRIVETRSKKHPDMAPRGKPWKHCCNKCDKSFRSGNALGGHMSCHRSVGNQPKSTSSPPTLVRDAALRKPRTDNSDEEMKFGDLPAAAMKDNSHRCNTCGKSFGSGQALGGHMRRHYVRKCNRQRGVADHAGSVLMKVQKLKLRLDPILFDVTLPALTDGDCCISVGVKPEPQLWCVTSNLQ

SEQ ID NO: 25320 - protein, 1349 aa, Oryza sativa
  unsure (1)..(1349): unsure at all Xaa locations
  Clone ID: TF_OsC391117_1.pep
MSLQPPAVEPPEWLRTLPVAPEYHPTLAEFADPIAYILRIEPEASRYGICKIVPPLPRPPEDDTFRRLQAAFAAAASSNGDPSPTFPTRLQQVGLSARNRRAASRRVWESGERYTLEAFRAKAAEFEPPRHAAPPRNPTHLQLEALFWAACASRPFSVEYGNDMPGSGFASPDELPDAANATDVGETEWNMRVAPRARGSLLRAMARDVAGVTTPMLYVAMLYSWFAWHVEDHELHSLNFLHFGKAKTWYGVPRDAMLAFEETVRVHGYADDLNAISEPLCDCNSLXTVLSPEVLLSAGVPCCRLVQKAGEFVITFPGAYHSGFSHGFNCGEASNIATPHWLQVAKEAAIRRASTNCGPMVSHYQLLYELALSLRPREPKNFYSVPRSSRLRDKNKNEGDIMVKENFVGSVTENNNLLSALLDKNSCIIVPNADFFVPSFPVALESEVTVKQRFTAGPCSISQQGAENMAADHVAVDKVTEIQDMSGSLYPCETSLVGCSNRKLYETKYGQRDAAALCLSTSEIQSRGIDTARSHPAGGILDQGRLPCVQCGILSFACVAIIQPREAAVQFIMSKECISSSAKQGGIGASDDTSNWIDQSHEISPPPGPASGTDDNVKHAVSLAHVSDRCRELYASNTDGCTSALGLLASAYDSSDSDDETTEDVSKHSKKNDSVNQSTDPQILETSASCSSTVQCQKTNSHLHEEECEARATSLMKPVSHNSRPISQSNRDTDIDHFIELGKSGTQCSGYLDLVDDLTTSVLKSSSDTCVSAAKASMDPDVLTMLREKKTCVYNYMSNYTKGINCKYPRAESAAKVIAEELGIKHDWKDITFKEATEEDVKKIQLALQDEDAEPTGSDWAVKMGINIYYSAKQSKSPLYSKQIPYNSIIYKAFGQENPDSLTDYGCQKSGSTKKKVAGWWCGKVWMSNQVHPLLAREREEQNSSVVYGKAMFTTISHGKVQDEASTRCNTSNRTPSRRTSRRKKGVSAEKSKPKNKRSTASDEASMLCSGLGMNSGVIHDQTENSDDYDKHGNGDEIEEGTNPQKYQQRKLQNVTRKSSSKKRKDEKRTDSFHELYDEDNGVDYWLNMGSGDDATLGNSRQQSPDPVKVKSGGKLQGKRKSSKYKSNDDLLNEENKLQKMNKKSSSKKQKNDKINRQLQEDQTEDDHMDHLVDVAVADEVTLDNEDKITEDKIDDVKVKSRGKSQNGKRKGSKHQATDGLRAGNKVAKFPCDIEGCDMSFSTQQDLLLHKRDICPVKGCKKKFFCHKYLLQHRKVHIDERPLKCTWKGCKKAFKWPWARTEHMRVHTGVRPYECQEPGCGQTFRFVSDFSRHKRKTGHSSDKRRKNST

SEQ ID NO: 25321 - protein, 254 aa, Oryza sativa
  Clone ID: TF_OsC48690_1.pep
LIRFYEKPRAKPSRWRSRSPRRRLVRSPHATAPNPSAAAPDPPPPPPWSSSWSSSPPDPPPPVLSAAELAPERGGEQPVSSPPPDPPAAPEELRFRCTVCGKAFASYQALGGHKSSHRKPPSPGDHYGAAAAAQQLASAGDSKEDSASSAAGSTGPHRCTICRRSFATGQALGGHKRCHYWDGTSVSVSVSASASAASSAVTASASGSGSSSVRNFDLNLKPVPETVAAGVRRWGEEEEVQSPLPFKKRRLSSP

SEQ ID NO: 25322 - protein, 726 aa, Oryza sativa; identical to SEQ ID NO: 18170
  Clone ID: TF_OsC359_7099.pep

SEQ ID NO: 25323 - protein, 558 aa, Oryza sativa; identical to SEQ ID NO: 18169
  Clone ID: TF_OsC78077_2.pep

SEQ ID NO: 25324 - protein, 719 aa, Oryza sativa; identical to SEQ ID NO: 18373
  Clone ID: TF_OsC198558_1.pep

SEQ ID NO: 25325 - protein, 261 aa, Oryza sativa
  unsure (1)..(261): unsure at all Xaa locations
  Clone ID: TF_OsC135231_2.pep
MATVGQPDAMRRITVHYVNPPPIAGAGEAHVDGLDDEVLDYVIGDVLQDQEGLYQSILYGKYGDDMRGARNTALAQSDGLHYYYHGENSSGEATTSRNSEIDQQIEYDLVFARQLQAMDNLTIETPADEDDDISCVPSPSDSETDEPAEGNNEEAATQDDNDDPDNMTYEQRQALVESVGNENRGLSDLLISYLETWKYKSGFFPRKANHDNCPICLSAFRRRETLITLACKHSYHEGCIARWLKIDKACPVXKYEVFGPS

SEQ ID NO: 25326 - protein, 996 aa, Oryza sativa
  unsure (1)..(996): unsure at all Xaa locations
  Clone ID: TF_OsC13232_1.pep
MATPLADEGSIAAAVMPRSPSPPAAAAGSAAEAPMLIFVYFHKAIRAELERLHAAAVRLATERSGDVGELERRCRFLFSVYRHHCDAEDAVIFPALDIRVKNVAGTYSLEHKGENDLFAHLFSLLKLDVRNDDGLRRELASCTGAIQTFITQHMSKEEEQVFPLLIKKFSHEEQADLVWQFLCSIPVNMMAEFLPWLATSVSSDEHQDILNCLHKIVPDEKLLQQVVFAWIGGEAVKTISHDFCSPCSKSNVRCKDAIDQTDKYGCSHEHFKTGKRKRAESSYSQLVMHPIDEILCWHNAIRKELSDIVEETRRIQQSGDFSDISDFNVKLQFIADVCIFHSIAEDQVIFPAVNDQVSFEQEHAEEERRFNKFRCLIEQIQITGARSTAVDFYSELCSQADQIMEKIERHFKNEETKVLPQARIHFSSEKQRELLYKSLCVIPLKLLERVLPWFVSKLNDQDAEAFLQNMFLAESFRSLSLNYSAPSLYSSLFSWETDAAFSGPDNISRPIDTIFKFHKAIRKDLEFLDVESRKLIDGDESSLRQFIGRFRLLWGLYRAHSNAEDEIVFPALESKETLHNVSHSYTLDHKQEEELFKDISTILFELSQLHADLKHPLGGADAVGANHIHPYNRIDWSKKNNELLTKLQGMCKSIRVTLSNHVHREELELWPLFDKHFSVEEQDKIVGRIIGSTGAEVLQSMLPWVTSALSLDEQNNMLDTWRQVTKNTMFDEWLNEWWKRSPTSSGPSSDASHPEEDHFQEKFDQSEQMFKPGWKDIFRMNQSELEAEIRKVSRDSTLDPRRKAYLIQNLMTSRWIAAQQKSPQPQSEDRNGCTVLPGCCPSYRDPENQIFGCXCHDKVSDHTMERXHKCREKMLEMNCPICCDFLFTSSAAVKGLPCGHFMHSACFQAYTCSHYTCPICSKSLGDMTVYFGMLDGLLAAEELPEEYRDRCQSFQLPGPNSLENQEKPNQMGTKGVSSQGIGGMWGNKIVGTQIWK

SEQ ID NO: 25327 - protein, 1193 aa, Oryza sativa
  Clone ID: TF_OsC13232_2.pep
MATPTPMAGEGTLAAVMPRSPSPTASAAAGSAAEAPMLIFLYFHKAIRAELEGLHAAAVRLATERAGDVGALAERCRFFVNIYKHHCDAEDAVIFPALDIRVKNVAGTYSLEHKGENDLFSQLFALLQLDIQNDDSLRRELASCTGAIQTCLSQHMSKEEEQVFPLLTKKFSYEEQADLVWQFLCNIPVNMMAEFLPWLSSSVSSDEHEDIRSCLCKIVPEEKLLQQVVFAWIEGKTTRKVTENSTKSNSEATCDCKDASSIDHADNHISSHEDSKAGNKKYAESIDGQVERHPIDEILYWHNAIRKELIDIAEETRRMQQSGNFSDISSFNARLQFIADVCIFHSIAEDQVVFPAVDSELSFVHEHAEEERRFNNFRCLIQQIQIAGAKSTALDFYSELCSHADQIMETIEKHFCDEETKVLPQARMLFSPEKQRQLLYKSLCVMPLKLLERVLPWLVSKLSDEEASSFLENMRLAAPSSETALVTLFSGWACKARSEDKSNSGEYLCLTSGEMRCLLDEVDGLEKCRPFCPCASRSNTDASLHPQTENGSRPGKRGNDAESVPGTNGSDLSQTDDTEARPCSKKPCCIPGLRVETGNLAISSSLASAKSFRSLSYNSSAPSLYSSLFSWETDASLSCSDGISRPIDTIFKFHKAIRKDLEYLDVESGKLIDGDESCLRQFIGRFRLLWGLYRAHSNAEDEIVFPALESRETLHNVSHSYTLDHKQEEQLFGDISDALAELSQLHERLTHPHIEVSEAEKNDFNSSDEIDWTRKYNELATKLQGMCKSIRAALTNHVHREELELWPLFDEHFSVEEQDKLVGRIIGSTGAEVLQSMLPWVTSALTQEEQNMMLDTWKQATKNTMFGEWLNEWWKGAPTSSDSSEEASSAPEDSHLQDKIDQNDQMFKPGWKDIFRMNQSELEAEVRKVSRDPTLDPRRKAYLIQNLMTSRWIAAQQKLPEPKSEECSEGAGIPGCAPSYRDQEKQIFGCEHYKRNCKLVAACCNKLFTCRFCHDKISDHTMERILMLPDHTRESDTGDDVHGLGVDFFHCMKCNCCLGMKLTEHKCREKRLETNCPICCDFLFTSSAAVKGLPCGHFMHSACFQAYTCSHYTCPICSKSLGDMTVYFGMLDGLLAAEELPEEYRDRCQDILCNDCERKGRSRFHWLYHKCGFCGSYNTRVIKIDRADCSTSD

SEQ ID NO: 25328 - protein, 259 aa, Oryza sativa
  Clone ID: TF_OsC4555_1.pep
MPQGDHIELHQKRHGRRLDYEERKRKRAAREVHKRSRDARQLLGAKGKRFAKKRYAEKAQMKKTLKMHDESTSRQKVDDVQEGALPPYLLDRDQTQRAKVLSNTIKQKRMEKAGKWEVPLPKVRPVAEEEMFKVLRTGKRKTKQWKRMVTKATFVGPGFTRKPPKYERFIRPTGLRFTKAHVTHPELKCTFNLDIISVKKNPNGQMYSTLGVLTRGTIIEVNVSELGLVTPAGKVVWGKYAQVTNNPENDGCINAVLLV

SEQ ID NO: 25329 - protein, 4737 aa, Oryza sativa
  Clone ID: TF_OsC2965_2.pep
MDPGGMLLEDFGQRVDLTRRIREVLANYPEGTTALRELIQNADDAGASRVRLCLDRRAHGAGSLLAPALAQWQGPALLAYNDAVFTDEDFASISRIGDSRKVSQVWKTGRFGVGFNSVYHLTDLPSFVSGKYIVLFDPQGAYLPNVSAANPGKRIDFVSSSAITLYNDQLSPYRAFGCDMKAPFQGTLFRFPLRTAEQASLSRLSRQVYTEDDILSLFAQLYEEAVYNLLFLKNVLSLEMYVWESGMSEPKIVYSCSIGSQHDNLRWHRQALVRFSGTAAESSEQKIDSFSMDFVSKSFLGEKFEKKSYTYFIVQGMASALSKIGIFATTAAKDYDLHLLPWASVAACISNVGPEEVILRQGRAFCFLPLPVKTGLSVHVNGYFEVSSNRRDIWYGADMDRGGKLRSDWNMLLLEDVVAPLFRELLLQLRTVLDSKISYYSLWPTGLYEEPWSILVEQICKFIYTSPVFHSEIKGGTWITPAESLLHDEGFSRSDDLSEALVMLGMPVVRLPGAIADMFPKFHSKYMLKIVTPATVRHFLKDFENLGTLEKSQKLILLEYCLADLDSGNIGKCMNGLPLIPLANKQFGIFSGISQENQYYVCDSIEYELLSAVSDRIIDRSIPPVILDKLYQIASSSQVNISLIEGRTFLQFFPWLFPPGWKCRNQVPWDPESGGSSPTAAWFKLFWQYIGDCSYDLDLFSDWPILPSTSGHLYRASTVSKLINTGSLSNLMKELLTKLGCKILDTKYLSTCQHLSNYVYDGDASGVLHSIFGVASLEGVDLQALFQRITPAEKNELYQFVLDAKWYLGPHLSDMSINLCKKLPIFRVFDGGSPSSYGFSDLSTSRKYLPPLGVAEQLLNDDFVFCISPSDEDIIMRYYGIERMPKSNFYQRYVLNRLDELQTEFRDSVLLTILQDLPQLSLENPRFKEALKVLRFVPTTNGVLKSPQSLYDPRVEELYALLQESDCFPHGLFQNPEVLDMLLCLGLRTSVSIDTIIQSARHIDSLVHKDHHKAHSRGKVLLSYLEVHAHKWYVHKPFDGRKKVNMLAKVTTVLRSRDTSWEADLEKFWSDLRMICWCPVLVTAPSPALPWPSVSSMVAPPKQVRMQDDMWIVSASSRILDGECTSSALSYSLGWLSPPSGSVIAAQLLELGKNNEIVTDQVLRQELALVMPKIYSLLSNLIGSDEMDIVKVVLEGCRWIWVGDGFAKTDEVVLTGHLHLAPYIRVIPIDLAVFKDLFLELGIKEQLDPVDYASILTRMATRKASTSLQAEELRTAVLVVQHLAEFRFQDHQTQIYLPDSSARLCLSSELVFNDAPWLLDFDEDITGNAPSIAFNSKKYVHNFVHGNISNDVAERLGVRSLRRLLLAESSDSMNLSLSGVAEAFGQHEDLTTRLKHIVEMYADGPGILFELVQNAEDAKASEVVFLLDKTHYGTSSILSPEMAEWQGPALYCFNDSIFSPQDLYAISRIGQDSKLEKPFAIGRFGLGFNCVYHFTDIPGFVSGENIVMFDPHASYLPGISPSHPGLRIKFVGRRILEQFPDQFTPFLHFGCNLQQPFPGTLFRFPLRNEAAASRSQIKREQYTPQDVEMLFSSFSEVVSEALLFLRNVKNITLYVKESDSQEMKLVHRVSKHNSYEMAKEPHALNTMLAFINGNQPSGMDRNQFFNKLNKTKDSDLPWSSQKVSIFEQSPAACLVHSWILTESIGGGHARKLSTASGSKSHFFVPWASVAAYLHSVTVDNTKELSGEAEVNLDDLVLKQLSLGSSKDRKFFEGRAFCFLPLPINTSMPVHVNAYFELSSNRRDIWIGNDMAGGGRVRSEWNLALLEDVAAPAYGHLLAAIAQELGPSDLFLSFWPTAVGVEPWSSMVRKLYVSIAELGLHVLYTKARGGHWVSTRQAIFPDFSFSKAIELAEVLSEAGLPVVSVSKQIVDSFLNVYPSVHLLNPHLLRNLLIRRKRGFRNREEAILVLEYCLSDMGDPSFPDKLQGLALLPLANGSFTTFTNRGEGERVFFSSQMEFELLKDSIPHLVVDNSLPDAILKKLYDIACSARSNIYLFTCNFLLELLPRILPPEWQHAKQLFWSPGHQGQPSVEWMVSLWNFLRHSCEDLSIFAKWPILPLVDGKLMQLGNASNVIIDDGWSENMYSLLQKLGCFFLRSDLQIEHPQLANFVQEATAVGVLNAVQSVASNFQDIKELFMGISLAETHELRSFIFQSKWFSGNHMNSSHMNTIRNLPIFESYKSRELVSLTSPRKWLKPEGVHEDLLNESFIRTESAKEKSILVSYFAIREPQKAEFYKDHVLPRISEFLSQPAVVSAILRDVKLLAENDTSVRAALHETPFVLAASGAWVHPSRLYDPRVPELHKLLHKETFFPSEKFMTTEVIELLASFGLKSKLGFSTLLDIARSVSLQQDDALEHGKRLLTYLNFLEFKASNMEDKKTFHGDDNQEASKTDGSFEAENDGDGYDPEETILSLFSNFDHDLPEDEFWSELKNISWCPVHVAPLLKGLPWFISEDHVAPPITTRPKSQMWLVSSKMRILSADSCSMYLQRKLGWLDPPNANILSSQLVEISKSYDELKMFSEDSTNDAVPQKEIQLIYSKLQDIIDTADTNILKRNLDGHPWVYIGDRFVPPQALAFDSPVKYHPYLYAVPSELSEYKRLLSVLGVKQTFDAADYLNVLQCLQSDAKGEPLSTEQLSFVHRVLEAFVDCYPDNQAPDMMVNSLLIPDSFGVLTPARNLVYNDAPWMNADPTSKSFVHLSIGNDLANRLGVRSLRGSSLLDNELMTDLPCMEYAKISELLALYGESDFLLFDLIELADHCNAKKVHLIYDKRDHPKQSLLQQSLGDFQGSSLTVVFEGTIMSREEVCSLQLPPPWKLKGNILNYGLGLLSSYFVCDTLSILSGGYFYIFDPLGLTGGTTSTATSSARFFSLIGNDLVERFHDQFTPMRVTQEASLSSANSTVIRMPLSSKCLKELEAGCNRVKHIFDRFTQNPSSTLLFLRSIIQVSLSTWEGGASQPTLNYSVLVDPSVATLRNPFSEKKWRKFQLSRIFASTSAAIKMQAIDVHVIDNGCNYIDKWFVALCLGSGQTRNMALDRRYLAYNLTPVAGVAAHIARNGVSTNIHASSCILSPLPLSGSISMPVTTLGHFIVRHNGGRYIFGSSHDKSLSDLEMHKNKLVEAWNKELMLCVRDSYVEMVLEFQKLRKDPLSSAIESRSAHSVSTILQAYGDRVYSFWPRSKQHPASLTGYGSTVTNVNSPRASKADWQSLVEQVIRPFYVRLADLPVWQLYGGNLVKVDEGMFLSHSGSGDDDNLPSASVCSFIKEHYPVFSVPWELVREIQAVGVNVREIRPKMVRDLLKASSSILLRSIETYMDVLEYCFSDMDPYRFSDLHIHEESRVSNQQSEIMNSSISNSMPSSSSSVSYHRNTQRQGASGGDALEIVTYFGKALYDFGRGVVEDISKTGGSASHRTQAAENNVLSSIITELKGVPFPTSTKCLTRLGSTELWIASEEQQLLMRPFLHHFIHHQCLQKPFLELLLTTQVIHRPLKLRSFSPHLLSGHLKHIFDERWVHLAVEKKSPWIPWDNNANSSTAGPSPEWIRLFWKIFSSMSGDLSLLSDWPLIPAYLDRPVLCRVKECHLIFVPPADDSNPDSGDSAARVVDTSAHPGDETGEAEQNSILDTAFQSMNSAFPWLPALLYKLNIPVFDLSFPECGTICNLFPSRDRTLGQIIASKLVAIKNGGHLPLPLSLSSEDCDKLFALFVSEFRLSSNHLYQREELDVLRELPMYKTVTGTYTSLSGSDHCILSPTAFFHPADSRCLSSTANADLFLQALGVEQLSDQEILVRFALPGFGNKSAQEQEDILAYLYSNWKDLQLNSSVVNTLKETNFLTSANEFCTELFKPRELLDPSDALLTSVFSGERHKFPAERFLSDGWLVILRKAGLRTSTEADMIVQCATKIESMGNDIVSSSEDPSDFEADFSGSKNEIPFELWSLAESVVNVILANFATLYDSSFCEKIGKIAFIPAEKGFPSIGGKRGGRRVLASYSESILSKDWPLAWSSAPILTNQAIIPPEYSWGAFRLRSPPAFTTVLKHLQSVGRGNGEDTLAHWPTSSGIMTVEDAFLRILQYLDKIWGTISSSEKNELQTLAFIPVANGTRLVTVKSLFARLTINMSPFAFELPSLYLPFVTILREIGMQETLTNTYARELLLDIQKACGYQRLNPNELRAVMEILDFMCSGVNQATDGSEDIFDSVIPDDGCRLVSAVSCVYIDPYGSHLLSNIDTSRIRFAHPDLPQNICNTLGIKKLSDVIVEELDGKEELKMVNSICSVTLDKIKEKLLSKSLQDALRIVMIGVSNHFPSFEALNLAQIESVLKDISQNLQFVQRLHTRFLLLPMLQDVTRSSQRPPFPEWSSNGKHRSVCFVNKSTGQILVAEPPNFLTIHDAIAIVVSYRLGAPVILPIASVFACPDGTEKEVLKILRLGTDIGVSKREGRYNGSLGAELLSQDARQVQFLPLRPFYSGEIVAWKTGKEGEKLRYGRVPEDVRPSAGQALYRFPVETSAGETCMLLSSQVYSFKSVSMADLSPAPLQLDSGRAAGGQQGFSPINTGTEAADDVATGLEYGKVSSTELVQAVHDMLSAAGVRMDATKETLLQTTLSLQDQLKESQVALLVEQEKAEAAVREADVAKSAWSCRVCLNAEVNMTIIPCGHVLCNRCSSSVSRCPFCRTQVSRMMKIFRP

SEQ ID NO: 25330 - protein, 543 aa, Oryza sativa
  Clone ID: TF_OsC359_6081.pep
MGQVAYAASSHLSRHPPWKRCPHGVSFHSAAAASSLSRQIAQLSCSCPSSTSSLGASTIAALLDARVGAAAAAASADDDGIVVGTSSSSKKLRNISHKLMRIADAAVGEVPQWSRGSALLAALYRALCESCTKTDPSATFGGCPLFLSIWAAERIAIGRPEVDQHAYEESLYEERPEVDYPTMGTLWCRRQRRWAHVQVRRSYPEFVMEFDRLLPTDVVWEPYSAAATQARASLGLSTLCTRDQAYWMTTVPMVFDICVEPHAPFRVMRQFGFRQPFPVPFPTTVPAAVHRVTFAPLEQQPHVASTRDLYARHRDQDFARAVDDINRVVVNGSTTIQRLGVGIPVPVEEHLTTYTWMVESMRSILRVLTCRVDDVARADAAVQRPPVLTGPRPAAHVPRPTPPPHGGFRAPFSTPPSSARPSVVPPTAQFWQYTGTSSQAAGTSSQGPPLDHAGTSSDRLLPSTLLFDITDFDFASGSTEDVIGPSQLGGAPPVQTQDQAQATPPRDTRATRAVPPDRFTYSQDHVRAQARRTKRGRGAGQGQ

SEQ ID NO: 25331 - protein, 236 aa, Oryza sativa
  Clone ID: TF_OsC13033_1.pep
WLIASIILLLYIVLDADLPICSFAAGGNCPYGEECPQMHGDLCTTCGKMCLHPYRPDEREEHTKLCEKNHKRLESLKRSQEIECSVCLDRVLSKPTAAERKFGLLSECDHPFCISCIRNWRNNSPTSGMDVNSALRACPICRKLSYYVIPSVLWYFSKEEKLEIIDNYKAKLKSIDCKYFDFGTGTCPFGSSCFYKHAYRDGRLEEVILRHLDADDGSTVIAKNIRLSDFLSRLHL

SEQ ID NO: 25332 - protein, 404 aa, Oryza sativa
  Clone ID: TF_OsC2967_1.pep
MAFAAEPMDLEVSPDSSPAAAAAAAVCSICLDAVACGDGVAARSTARLQCGHEFHLDCIGSAFNAKGVMQCPNCRNIEKGHWLYGNESQPCSHSDTGDWLNGETFDYPFSFEFGWCPFNTPLTSVFGESESEPNPFLEYIGSLHGFHHPMYAPSSSTASTESIPFHQRPTGTEGHATTDLRNTQVFNESEPRNHEREQQYLGSVQMPGTLNHSTAPFGIGMPRYDGGNQQRLRPHMHDNSLFHRPTARRASNLAHLRSLTAASETRGHGHGMTSHAVQQTIPSSMASNPQPPATRRVRPRALSITSFIAASSSAEIRAPHDFPLTETASTTNGNIRNGVGAPRHANQSYSWSSETFWPQTGEPHWWSPMAPVHNRSYDNFSGRSATELLSIYGAQNGLPTPRFL

SEQ ID NO: 25333 - protein, 1902 aa, Oryza sativa
  unsure (1)..(1902): unsure at all Xaa locations
  Clone ID: TF_OsC32063_1.pep
MGKHKGRAASSGLAASLLPHAQGAVPIVGFGGYHGASRVEPAAPSSSTDPDASILLPPDVDSEVLQHLRRLGRKDPTTKLKALSTLSIRFAQQHSQEVLQIASQWAFEXMRLLLDYKNEIRRATRDNMPGLDXTVNGGADPHVKVFMCPSWFSQCDPVLEAAXAARHSFEAAFPQSDKRLDALMLCVKETFLHLNENLKLTTQALSDKATPMDELEDMHQRGGIEAGQVTGTVCHKSLQQPSDEHKQLFVGWVISSSLLAMATLIDILLGVKLQNCVRDNSSSENTSLSKVLSGTLSSAESAFSMNKYFLDFLKSKSAIIRSATYSLLASYIKHVSHVFNEEAMKVLSPALLGAFNEKDPSCHSSMWDAFLAFSRRFPEAWSYCNIHKVVFSRFWHFLQNGCYGSKQASYPLLVQFLESIPSKAVTTEQFVFDFLHNLWAGRNQRQLSAADSLAFFTTFKQSFLWLLKVLPRHSGGGSSDDIPIKLITYFLAKVVWHDYLRIPSSKNQDISLSGLSDEAISGDCQLSHKESLLASSTRYPTYYLQDLGKCIIEILDEISAMENHLLNIACETLLKDCLDIIHQRESLPNFQYHVEQVVSFFISLDQLIVQKGKTWPLESLARPLNEQSVPAIKSMIQKDTPIVVKLLSVLVEIFRPVPLFLKNSQKESEESVQDECFFDQWCTIIKYTSAKQKHPVDNKNSHVDDQFELLTLILQKVRERIAGGKLRNLQKNGSLPEHWRHDLLDSAAESVFCDLPATDSHVHYVCAALGGSDQDDQICFLSADTVHKMLGSILKCLTSVLMTSTFEWARFAYVVLLPTEPKDSKVIGAQSFSSNIKMAHFAFKVLEGSLFALRRLEEDSLFPSVLAALFIIEWEYSMALTLDEEHDLKGYKEDIDVGSSACNSSDDHLDEGIHLKANLAESIHTFCQSLSPSFWSDLHPFTLNNLLNILAQSVRCALFQTLELPTESTSVLCSEWMVNMLKLISLDHTKLQSFFYLLLSEGEYWPLWVKPSLQNENAPVKIKFEPVITNETGLKHHQFVAFVDKLVLNLGFGEVILGVPGNTCYNTSQSIDTTSTVPSLSRAWVAAEILCTWKWKGGSVFSTFLPSMIQHLKMESCAEVSILSILLDTLLEGAFHECNQWVLFNAWHISDNEIEKIQDHFLRALVALLFSINSINECIWRESEALVFFEKLLSNLFIGSTVNRKCVKTLPFVMSTIIKPLSGKLKLNEASCYTDLVGQNILSWLDVAISCLSSSPREVLQQDIVDWMQVVLSCFPLNITCGTQKLEVKIEREISDTERSLLLTLFQKYKIFCAIEAPSLSTSGTTLSTMVELLGVKLIAVMVGYCWTELQENDLHFVFHTVQKWIESAVLLVEEMTDAINDAVINQKSNEDTLEKLKLVVSSIDELTLSFGEFALVTLCHLNHLVDIQETENFQSLQIIKSGDFADRNNNMMESMLRLFLASGVSEAIAKSSCEEASSIIASSRVAYMHFWELVASFVIYASPQTRRCALESMELWGLAKGSVSGLYSILFSSQPISHLQFAAYSLLLSEPLCQFSLIKECSLGSNRPLTQESCMGQSIELMPDSEKTLDLREELSSLIEMPTSELLQTDLLAHDRVDAFIAWSLLLSHLQLLPPASITRERHIPLRTGAPCGKKKDAELMPEAEVAAQASKNAIITCSLLPCIESLWPVGTWQMASLAGGLYGMMIRLLPSYVRTWFTSLRDRSLSSSIESFTRAWCSPPLLLDEFSQVKDSLYADDNFSVSVNRSAYEIVATYKKEETGIDLVIRLPSCYPLRHVDVECTRSLGISEVKCRKWLLSLTAFVRNQNGAIAEAIHTWKSNFDKEFEGVEECPICYSILHTSNHSLPRLACKTCRHKFHGACLYKWFSTSNKSTCPLCQTPF

SEQ ID NO: 25334 - protein, 391 aa, Oryza sativa; identical to SEQ ID NO: 18533
  Clone ID: TF_OsC302675_1.pep

SEQ ID NO: 25335 - protein, 439 aa, Oryza sativa; identical to SEQ ID NO: 18545
  Clone ID: TF_OsC63595_1.pep

SEQ ID NO: 25336 - protein, 93 aa, Oryza sativa
  unsure (1)..(93): unsure at all Xaa locations
  Clone ID: TF_8955298.pep
MSGGISGFGGDKPKNWGAWRRIACHGLRGRGTSSKERNFGVGGRRPCCFCQEXMLXGRFXTLDCGHXFHVGCVRQWLVXKXTCPXCKXXXLKF

SEQ ID NO: 25337 - protein, 145 aa, Oryza sativa; identical to SEQ ID NO: 18573
  Clone ID: TF_OsC71294_1.pep

SEQ ID NO: 25338 - protein, 355 aa, Oryza sativa
  Clone ID: TF_OsC93699_1.pep
MGGSSSTSRRRRDEYYAARPPPPPHHYYTYPPPPPPPPHHHHHPPPPPPPPHHHHQHPYRPPPPPHHATSSSSYYYHHPPPPHAYHGPWHPAPRPPHPEQPALTGPPPEFVDHQQARKVKNDVNLHKDTIRLVPDVTDPDRRLVAFTFDAVTDGSITIYYFGRVRKNCTFSSVYPELQTPTKIPFQKGLAQKFVQTSGSGVDLGFFSLDELSNPSGEVFPLVVYAEACPPPEESHQPNSTRAQITLAVIEKHHNDLRVKVVKQMLWSDGEKYELQEIYGIVNSTEADVPDADDSDMGKECVICLTEPRDTAVFPCRHLCMCSECAKTLRFQTDKCPICRQPVEKLMEIKVRSPEP

SEQ ID NO: 25339 - protein, 557 aa, Oryza sativa; identical to SEQ ID NO: 18235
  Clone ID: TF_OsC100587_1.pep

SEQ ID NO: 25340 - protein, 231 aa, Oryza sativa; identical to SEQ ID NO: 18236
  Clone ID: TF_OsC392270_1.pep

SEQ ID NO: 25341 - protein, 826 aa, Oryza sativa
  unsure (1)..(826): unsure at all Xaa locations
  Clone ID: TF_OsC140765_1.pep
MATSSVAAMPHDSTPWRDPSRASSRQPARGFFNILVPPPQSPRPRCPDHQHHHHHHHHHDAAGGAAAAAAAAAAEPTPRRRKQILDRWAAAAAAASATASAEAPAPQEQRRRARDAELSALASATRPVTARAAVFREPSPAPSDASXGAGAGCGGGARCGAELPPAAPRASSLIQRWREIEAVGPATPRPCDLASDSDGGSPRGRVGCIVKKLSGTSSIPDDELDAANKEVAMSQSAPPSPAPMRAGVEPPTNIAGINGSRPTQLVVRTVRGRRAMEELVAMMAHCRRCELAAVADRHVVSRFSHKGRIQSPKDGAIWLFGRSCSQLALLIIVMCKSHYHVSFCRLYLCEHKYFLSLFVPYVASANIVMLFDTLQSMLRLRLLRQGFKVKDEVWTLPKPVRPRLPKHEHEAYTTSQCLTQAFLSKCIAGNQHKGGQVLAEKSTGSVERLVSSDGLGNEQNDGQNSNSENQCQEGCKNMVKLCTQNQEYSEPSSFVRYDEHSTVDDVSPSTISTLHELCTPSSRGDNLREEDNQSLNGSWEERALWISSLGWPAPVEAMSPDSWNQDEIGDIENHTQNEFNDRPWIDSPNSWRSLCVATQADSGALSGNADICNLLESKNVSKSLESDFSNKMNNMLLTILRKQRQQHMIDDFEGYYDERLYWRQNDEQQNADQRVSAQCSLAPVSHLHQQEGWQHSSFEHQHHENQNFLEMEVRVRSEMAQVHHEIYELRKLVESCIASQVKIQHSIKEEMCSALREAGLMPSQPDTPAKRGSCCICHQTQVDSLLYRCGHMCTCFNCADQLKSSNRSCPICQSPIEDVVRAHMNF

SEQ ID NO: 25342 - protein, 378 aa, Oryza sativa
  Clone ID: TF_OsC46309_1.pep
MASGTDEKAKMEGLTSAAAFVEGGIQDACDDACSICLEAFCESDPSTLTGCKHEFHLQCILEWCQSVCQELLEAVERERNVRTNQTRNTTIFHHPALGDFEVQHLPVVGNDAELEERILQHLAAAAAMGRSHHLGRREGHRGRSGSHGRPQFLVFSSHPNMPSAGSVSSSSVQGEVDNESSPVHTTGELSLHANTHEEAGNQSPGMLTYDADQDAVVSSGNSTPVSSPRFFNRRHSTGQSTPVNNDRAGPSDLQSFSDSLKSRLNAVSMKYKESITKSTRGWKERLFSRHSSVADLGSEVRREVNAGIASVSRMMERLETRGSNGRTSDGPAISTSEVIPSTESSNERVTENNPTTAATSSGNTSASSAPCVTTTGSN

SEQ ID NO: 25343 - protein, 1076 aa, Oryza sativa
  unsure (1)..(1076): unsure at all Xaa locations
  Clone ID: TF_OsC67131_1.pep
MSSPGRSGFSPGLAQLLSSRDEAKVSSQKSHLVSYHDEIGHQDIERTLEHIFDLPHKSVVRPPGPIDVGFVRSVLRNQARKFDLGGKDSRKYDDGVLIVDKGAGQTKVVLDDSSICGKFKSIWGPLLVESSASFSSARANTCVWNGKWMYEVTLETSGVQQLGWATLSCPFTDQKGVGDSDDSYAFDGRRVTKWNNDPEQYGQMWAVGDVIGCCINLDAGEISFYRNGNFLGVAFDGIRKVGPRKGYYPAISLSEGERCHLNFGSHPFRYPVDGFNPIKDFGILHQRDSSCIPDVFRLLEVQNLEKSESAYFEKLRRVKKFAPLRELFRPISEGICAEFFGAAEGSQGCSEYITWGSFITLLTDVFRVREPHDFLCLDQVLELFLQFPGCSSLLQELIVALSCMCKAAPLVLTECPFSGPYPFLALACHILRHKDVMHLWWKSEDFAFSFEGFLTMKIPNKQDLQYLVPSVWWPGSSEDEVSMTLSMTTLSDAIKXSFTFGTVNPKRRKMDHADCLIHFCSIWRRRQLGASEFFPSAFLEDCIAMVVKSERLIFSLXKDQVIVKTKKDSITGLQKEASAQGGKPVPPKEGFTESNTRWFILEGPLVFFPRISLNKSLTIFLKKKKKITVGLRFKENAKYIPSTSKGPCKSMHEKSAHIASECSAFYFVSQQSQSISLLEETDRQIREKSCMEQVRRLKEARNSYHEELVDCVRHCVWYRATVFSSWKQRGMYATCMWVVELLLVLSDSSSIFHYIPEFYVESLHGLASFVTLVVKHFDDPRIYKEFMFNVLLRETCIHEEELFLSFLNRLFNTLSWTMTESSMSIREMQEKRRVADLQQRKCSVIFDISCSLARILEFCAREIPHAFLMGPDMNLRRLAELVVFILNHIILAADAEFFDMTLRRPGQHQEKTNCTMILAPLVGIILNLMESSSTSGHRELNDVITVFTSMDCPATIHFGLQYLLSYNWSNVLRGDASLAKLAQLEEFSHYFMHITMSADGNEEQGFSTASNEEDNCCICYNSDSDTTFEPCHHRSCYGCITRHLLNSQRCFFCNAVVTSVTRIADSRIESRSPLAP

SEQ ID NO: 25344 - protein, 494 aa, Oryza sativa
  unsure (1)..(494): unsure at all Xaa locations
  Clone ID: TF_OsC44374_1.pep
MEPPAGGSSDHRRGAGTGAGAGGAASPSGLRRYGFRFSASSLLQAPLAALLEYSGVVPSGPGAPQAGPPSALSSSPSSSSSSSEADGLLSAAAAGDGEVSIRIQGGPGEADAAGVAGAASSGEDSIEATAAGDVDPASAAAGRGGGADAEASGGGADGASGNGGGDRAYQRYDVHHVARWIEQILPFSLLLLVVFIRQHLQGLILILLCSCHCVIISGFFVTIWIAAVMFKSNDILRKQTALKGERKIAVLVGITVIFMIHVFGVYWWYRNDDLLRPLFMLPPKEIPPFWHAIFIIXVGISNQMPLADTMVRQAAMAIKCMLLMYYKNSRGRNYRXMLTLVEYLLLLYRALLPTPVWYRFFLNKEYGSLFSSLTTGLYLTFKLTSVVEKVQSFLAAVKALSRKDVHYGSYATAEQDTPLNSHSILFKELVFCWNLVQEKMHVPVLLRCKHIFCEDCVSEWFERERTCPLCRALVKPADIRSFGDGSTSLFFQLF

SEQ ID NO: 25345 - protein, 78 aa, Oryza sativa
  Clone ID: TF_LIB4833-026-R1-N1-C5.pep
MEHALPCSDLHHLRVGKTAEQSCSVCLKNFEEGDYIWSMPCSHTFHQLCILGDRSCRVCHPAAPPSTEEKPEAPRTVN

SEQ ID NO: 25346 - protein, 833 aa, Oryza sativa
  Clone ID: TF_OsC37567_1.pep
MAAFATAHPGERASIQAALGSLPRAPSSTMYYRFGSHGLQVLGENREPSASGGGGQAQATQQQQGTSSGVADNRREHAFDFGVGSSSSSSGRRHAMGAAPSVATGISGSKRVAREEGGHSCGFEFEGSDQGRHAARGQACGLGGLDQGPSGGSAHDEDARGYGFGDARCVGQRKDAAPTHQLRIGAGRDQGRSVRLRRDAREDGRGRRLEEGNRAGDGYVAASVQAHGDACVEDQGAGSSSVQQLPSSVDGSDGMIAFEVGKELTLHGSVVSSPWNELWLGKPLIFHDLDLVRAMKDQGGMPNERIDLSGKITSILLSHPGPVSYFRIDSSVINNGAQQKIEEWCDVLRKKNVETVVMANCQWPSHPIEFPLQSLNCSSLRTLHLCFFNIPDMYLDHVSSLAVIDLACCRISDENLFALVCQCVSLRELDIGMFSEGKERIRSESLKFLQIWRSSVSHITIQWAPKLEKVIIGAAQGMKSFSSRTSSSTWISILGAPMLREVWFNLSSQTRSIDNVYLDVGHVPITSLRKLELSIAFKERKGRHALLNFFRSCTELKELVLWREDKVYFEEECDVHSDDWSSALKDIACLKSHLQVLKLFDYGGGETEIAIASAVLEHGASIENLTIMSTTSNADDILSQAKQKLEKVERDSQITGDKKKYSIRDSQENWRQKIQIIQRVAVKQALIPREFIQSINSPRGLRFLLRGWGSSRVTDPAGAVAQDAELMESVGAGHRPDVVALLEILEAHRAALLCRLAHSQVVKIAAGECMFHGVRGGGGGGGGGILAKVAGLHTMHWRIPYHPTRDLLDEVALGICRGGCGIHACANASRSRG

SEQ ID NO: 25347 - protein, 995 aa, Oryza sativa
  Clone ID: TF_OsC382714_1.pep
MADTGSLEKMGRELKCPVLGSLSLLSSAVSISCNHVFCNDCLTESMKSTSSCPVCKVPFRRREMRPAPHMDNLVSIFKSMEAAAGTNVVSTQEAPVVKLADGSDCVNSGKNSKRSQKSLTRKRKVTSEMEKNTAKDATASASQPTTKPSFSTNKRIQVKPFPESETPIRAEKIMKPEEPKNNLNNDVEGKNKAVASGQPGSPSLSPFFWLREQEEQEGCTAETLSETQSLDTPLRHNAPSFSDIKDSDDEIPLNTTPNSKAAATELFDSEIFEWTQRPCSPELYSTPLKKQSKAKSKLDQIEEKGDEEDVHIGGSFDKLGNASNAAQLVNTKATKQKRKKTSPSNKNSAKLSNRAEPCIKKSDANQQGSNRRKSAALKSCQKSSSAVGRNTSGRRNKASSNSKPIHGSSDNSPESYLPKEGLDVEAPDKPLSERIQNLEKTSRRKGSARKLEMAGKTISDTTEKNSEPRSKRVRRMSDHAIAKPVEVPSGSGNETEIPQLHTLTKGSIQRKSSNARRHSKVCGEQEGKNKLENTTMTPIILHGKCQNKEAVCTAPSVRTASVKYKQAKFSEQPDCFGTENFGNLQACPARNVLLKKCEVSTLKVSCAFCQTDVITEESGEMVHYQNGKQVPAEFNGGANVVHSHKNCLEWAPDVYFEDDSAFNLTTELARSRRIKCACCGIKGAALGCFEMSCRRSFHFTCAKLIPECRWDNENFVMLCPLHRSTKLPNENSEQQKQPKRKTTLKGITGFSRSSQIGSNQDCGNNWKWPSGSPQKWVLCCSSLSSSEKELVSEFAKLAGVPISATWSPNVTHVIASTDLSGACKRTLKFLMAILNGRWIVSIDWVKTCMECMEPIDEHKFEVATDVHGITDGPRLGRCRVIDRQPKLFDSMRFYLHGDYTKSYRGYLQDLVVAAGGIVLQRKPVSRDQQKLLDDSSDLLIVYSFENQDRAKSKAETKAADRRQADAQALACASGGRVVSSAWVIDSIAACNLQPL

SEQ ID NO: 25348 - protein, 94 aa, Oryza sativa
  unsure (1)..(94): unsure at all Xaa locations
  Clone ID: TF_LIB3432-023-P1-K1-D7.pep
ELLALGDRMGTVSTGLSEDALSKCLDRSMYMATTSGTHEDCERKCSICQXEEYSDGEEVGKMVCKHYYHFSCIKNWLRQKNWCPICKSVALNTN

SEQ ID NO: 25349 - protein, 369 aa, Oryza sativa
  Clone ID: TF_OsC45320_1.pep
DQPIMSSLCPFAKLASAGATCPVKSDNKTTSCPVTANNHTDDDDNEKTGNANTDPRVVPAKCPFGYDSNNTFKLGPLSCVVCHALLHQSSKCTPCSHKFCKACILRFKDCPLCGADIQGIEPDDELQGLVDRFIDGHARIKRSHAAGDGEAASDKTKVIYEHVSMERGAFLVQQAMRAFRAQNIESAKSRLSMCAEDIREELKSKEDNQELCSQLGAVLGMLGDCCRTLGDAPSAITYYEESAEFLSKLPKKDLELVHTLSVSLNKIGDLCYYDGDLHSARSYYARSLDVRRSAVKEHSAVASQVIDVATSLAKVADVDRNLGNESMAVEGFEEAIKCLENLKLESGEASLEQRRLSVLDFLQKQLDDK

SEQ ID NO: 25350 - protein, 79 aa, Oryza sativa
  Clone ID: TF_LIB4309-027-R1-N1-G2.pep
ALQDLKGYPTDLSDDGSKWDPVRKGTCCVCSDAQIDSLLYRCGHMCTCSKCANELIRSGGKCPLCRAPIAEVVRAYSVM

SEQ ID NO: 25351 - protein, 177 aa, Oryza sativa
  Clone ID: TF_uC-osflM202026e07b1.pep
LLPPWRGTRLLVLAVPTHVSPDDFVRFCGPYIEHASDIHVVRDDGVEDRYSVLVEFEDQKSADGFYLDLNGWRFSSSEVEVCHVLFIVAVQYTPSTKPAVTPPVGSTELPTCPVCIERLDQDISGIMATTCDHSFQCSCVSMWVNSSCPVCQFCQKQSKNPTCSVCQTSGNLWICII

SEQ ID NO: 25352 - protein, 2036 aa, Oryza sativa
  Clone ID: TF_OsC34959_1.pep
MAEDHDAEGVRMTGEGAADGCDAHSLAGGEEEIGDQRRRRRASSTHRPPPPPRGYLRGRWPSSTSPPLGPSTPAHEGLATEDERSGAPDAPPAVGERGGASRVLDGEAGDAEVVGESANAVLAVIPLGGGKRGTDAGGGMAEEPPETASDLEAALDVARTAASPSTEVAMKVVSLSHDAEQGMRQFVTEVVSVGRFRHRNVVPLLGYCRRRGELLLVYDYMPNGGLDQWLHGQVHLRRRCPVLRATIYLQRCLGIASSPLQRVAGMLGDNAWERIQLLWNFQEDVQDMKSKMTDLKVALSYADKHSRETDDDALVLRHWLNKYKSVAYDMEDTLDELLTNAMIWENNPCTVKLFFSSINPLIVRITMSSKMRNIRMKLDKIAEDQKKFPSMQLANPTGQDSTDKWRETFIGHTDEIEMVGRAREKKEILIKVLQNDGGQEISIIPVVGLGGMGKTTLAKAVYTDKETHMFDVKAWVHVSMEFQLNKIVSGIISHVEGSTPANIADLQYLKSQLDRILCNKLYLIILDDLWEEGWSKLEKLMEMLQSGKKGSKIIVTTRSEKVVNTLSTIRLSYFHTVDPIKLVGMSIDECWFIMKPRNMENCEFSDLVDIGKEIAQRCSGVPLVAKALGYVMQKHRTREEWMEIKNSNILDTKDDEEGILKGFIQDTDGQPLQKVAMEYVNELLGMSFLTIFTSPTVLASRMLFKPTLKLHMHDMVHELARHVAENRNTKRDNLNFHYHLLLNQNETSSAYKSLATKVRALHFRGCDKMHLPKQAFSHTLCLRVLDLGGRQVSELPSSVYKLKLLRYLDASSLRISSFSKSFNHLLNLQALILSNTYLKTLPTNIGCLQKLQYFDLSGCANLNELPTSFGDLSSLLFLNLASCHELEALPMSFGNLNRLQFLSLSDCYKLNSLPESCCQLHDLAHLDLSDCYNLGKLPDCIDQLSKLEYLNMTSCSKVQALPESLCKLTMLRHLNLSYCLRLENLPSCIGDLQLQSLDIQGSFLLRDLPNSIFNMSTLKTVDGTFTYLVSSKVEKLRENLKLEGCCKLDGGSTDLCSRITELKKTHCHELEIQGLEDFKHLEGIEHAILLNSLKLTKLIFSWQPKQYTNETAHHKTVLGMLVPPRSVHHLAIKGYCGIELPKWMLDIRSYLPHLTTIFLHGLMECNRLPPLGCLPHLRALLMTKMPKIKSVGPEFYGDYGSCQKLRMIILASMDNLEEWWTTRSSKQDNELSLIPDLQMLWASDCPKLKFLPYPPRSLTWFIENSNHVLPEHGFGNLTSATYPLHLSIERAPNSREMWRRAQHLSSIESLTLMSIAGLRALPEAIQCFTSLWRLSILGCGELETLPEWLGDYFTCLEEISIDTCPMLSSLPESIRRLTKLKKLRITNCPVLSEKCQGEDRHKIAHILEPIFLLADTVSRVLVTANWRSKPLDFRWHLSLLKKRKGWLSCRSSLSVAAYQAGLNLDICLSVRQVSRWGSEKFRTGGGAHIRESVPPNHMEDYPSGRSKAAIGFLRRGGGFSSRNQSTEERTIQNYDGPGITTRLNPMKTRLSDNQERPRYLRDSFRSSTSMAIHGSSSKVPLRKFGDEKRRQTLLAGVDIAESSSRNAGGKHLEGSNKRIVVDDRSSDVLHTETEGLATEQDQLIAPNAGVSDSASSSDISEHAVESLVRSAAPSSRTRRQKDKELNLGQSGVCSSSCTNRPTISRYAPADVKRPCNHASGVQQHGHNNLDCTSVPNFLPSGCSSGSVYSRRFDAMRKRTSDGGSFSRSRGLSGTASLDDSPPAYPAIAGPRIRTTTTERASQQNALRSRRNFQDSAVSVRTRRPPWGARFRISEEREDGMISQRDSSIGNQQSDQVHSSSEEASTESSSRPFSAELPHAIYSSRGEGSNAFTARRRRSSSLYEERPPQTFHDLFRERNGRRHISIEGIAEVLLALDRIEQEAELTYEQLMVLETNILLGAFTSHDQHSDMRMDIDNMSYEELLALGDRIGSVSTALSEEQFVKCLRRSIYIPVATKANAQVVDDIKCSICQGVYCY

SEQ ID NO: 25353 - protein, 419 aa, Oryza sativa
  Clone ID: TF_OsC88477_1.pep
MGANCCIAAKERPQPCVTPIEVSAFRNVRHSPSWSFRWDNRTHIEDIMEMPALFSNHSSGSIRPETKSGSIAPTDGFSNGGSPSDMFNKLKCHKSDRKRESSKIARSDLRAGRSTTSNSSPEAKLSRKSLDTVSVASDSKMSISVPSTPPAISRADPSSSSRGHSLPTDADSMRKARRSPGYQLYRQVSDSKIPSLRSLNEGASPEGRPSSSMLSVCSNDLSAVGSHGESSDGWSMRTFSEMVASSQRERWSVDSELLGSVSSKMTRSNASNNPTTHSPDQEVCKLCLKLLKERSTWNAQELAVVAVLLCGHVYHADCLDSLTAEADKYDPPCPVCTHGEKCTVKLFGKLESKTKNKIPKNVIVDVNLDGSSKHQKEKIPLEEELYSQARASMRELKSSRIGANDMTWLLNDLRIEGFS

SEQ ID NO: 25354 - protein, 532 aa, Oryza sativa
  unsure (1)..(532): unsure at all Xaa locations
  Clone ID: TF_OsC84895_1.pep
MNELVEPSSTICGHIFCKQCIKASIQAQKKCPTCRRKLTMNNFHRVYLPSADPKQGASTTRAAAATTQCIIHPTAPFNTHVSIPLTPTTITRGQAGEQEARKKKKTWWCRGGHTDVDAEGPAAPSATPRKRFSGVAPPAALIFFVLVFAGGAIVTLDHKELRPREMVVSETETRAPTSEVQETETRAPTSEVQEAGTGAAAGGVQRAELAGSSICENQCRPSGSEPLPKGIVQDKSNFEMEPLGGNPERRAAVARPAKSLLAIPVGIKQKAVVDKLVSKFPGDRFTVMLFHYDGEMDGWRELGWSDRAIHVAAKDQTKWWFGKRFLHPDMVAEYEYIFLWDEDIEVDGFDPIRYLRVVRRERLEISQPALDHRSQIHHRLTLRARKGQVHRRFYKTRGGGRCDDNSTGPPCTGWVEMMVPVFSRAAWRCAWHMIQNDLIYAWGLDFKLGYCAGGDRRLAVGIVDSEYVLHRGIPTLGDGGGKPAAKRXSSTATKAATDRLAVRQRSYTELQIFNRRWKAAAEGDVCWTDPYP

SEQ ID NO: 25355 - protein, 374 aa, Oryza sativa
  Clone ID: TF_OsC74850_1.pep
MAAAAEAEEEVRQEVEAVASVYGDDCRVVRGFPPHLVVHVRPRTADDSSQQFVELFLGIKASSQYPKAPPHVYAVESKGLDENRQVYLISSIQNKARELSCYPMLVTLCEEAVEMLSNMNHPAGDCPLCLYPLVKENDGSALPFMKLMSCYHCFHSDCIMRWWEWLQNDDTDSKKSSTAATTEVIHASEGLDLSSSAKHHNVSQHKGLCPVCRKVFDEKDIEHVRDLLGANTSQLASLSIDLDEDEKEVLHSESEKIRQEKFASLFNLQQERNGLIEPKKDLSIQPGMYIPRPPSAPTASEGDTVDDSCEDTTTSTSGTEPLNQTNSTGGTTKHNSSSGHRRRHRSHASRRQPHGQGQPARQQWQRKGGDTSHQ

SEQ ID NO: 25356 - protein, 138 aa, Oryza sativa
  Clone ID: TF_OsC116722_1.pep
KVEAPSTDTICPEGQEKLKLKSLFPISFTEENTDQKNKKSVEKSYMCPSCKSTLTNTMSLVTISTCGHVFCKKCSDKFLVTDKVCLVCNKPCKERNFVPLEKGGTGFAAHDERLEARDFKHLGSGSGLGLVKPAPKNY

SEQ ID NO: 25357 - protein, 126 aa, Oryza sativa
  Clone ID: TF_OsC57414_1.pep
PQVVDTACPSNSRQQALHFILLLTSKLSTELVIRRNLTRTLGGGGEAEERGRSATPPGPRNPRSGGGGWGAPSASPIRHGGDGRAGDHRIGAPPRRWRQQRQGGGERERERESAGLPRACRIPAAR

SEQ ID NO: 25358 - protein, 116 aa, Oryza sativa
  unsure (1)..(116): unsure at all Xaa locations
  Clone ID: TF_LIB3432-009-P1-K1-C1.pep
FDSTKDISALHCGHTIHLECLYEMRSHQQFSCPVCLRSACDMSHAWQKLDQEVAASPMPVIYQKKXDMDPMQRLWDDIERAIPHIGTQVPRMQLLQHPADKSRPCCRVLQSLNSEE

SEQ ID NO: 25359 - protein, 387 aa, Oryza sativa
  unsure (1)..(387): unsure at all Xaa locations
  Clone ID: TF_OsC252488_1.pep
MAMEAGAPRGAAATTSGGGGGAPEAGAELGSSGAPVTWGRVWRAGQEAAAHALLLCFTALLALKLDGLFRGSWWVLFTPLWLFHAVIARCRFSLPAPSSPQSCQMASCHSIVATPLLVAFELLLCVYLEGHDEPFIDLKLVFLPLLALEIITLVDNFRMCGALMPGHGETMTDEAIWERLPGTPSNAKFFPLRAVFLPILLLQVTTVSFAIWIFFERLVTKLRAKKITDGYISFSSKIDELFMMMQHGSRLIAWWSIDEDSKEEQAHLCYANNSGYSTFCSYPPEMVKEMPKKVLDKEVXKTQDKILGAIXMAKLSPLQCDKLKNALILCRICFERDICIVLLPCRHYVLCEACSDKCRSCPICRVSIENKLPVCDAMSSADSISDT

SEQ ID NO: 25360 - protein, 704 aa, Oryza sativa; identical to SEQ ID NO: 18259
  Clone ID: TF_OsC380357_2.pep

SEQ ID NO: 25361 - protein, 532 aa, Oryza sativa
  unsure (1)..(532): unsure at all Xaa locations
  Clone ID: TF_OsC565_9.pep
ERVASAGAASSSGSWGDEHAFFKRDENEISPYSWNITGTYKGSWNFAGSTNGSSRFLEFTKLKGDAVLELLSTPTKISGVHYVQGSVTFHDVLDNAHDRGVAQIRLEGVYIWPFRQLRMVANSGADGEPLQEEDYFLSNPYHLLRIFSSQVFQETSEEKNRRKNSLTYDMEKHCSVEIAAKVVRVSSNLNEGEHEKYRLEGLMESTAVDDDGECFSPILLNATSLNVEVYYNKAVNYTLMVTFISFLQVLLLIRQMEHSNTQSGAAKVSILMIGQQAIMDAYLCLLHLTAGILVESLFNAFATAAFFKFVVFSIFEMRYLLAIWKASRPLNSGEGWEVMRRELSVLYSRFYGILLGGILLMYELHNFLRPLLFLMYSFWVPQIVTNVIRDTRKPLHPQYILGMTITRLAIPLYIFGCPSNFMRIEPDKTWCIAVTIFMGIQAAVLLLQHYFGSRCFIPHQILPEKYCYHRKVEDNTNQPIDCVICMTTIDLTQRTSEYMXAPCEHIFHSGCLQRWMDIKMECPTCRRSLPPA

SEQ ID NO: 25362 - protein, 181 aa, Oryza sativa
  unsure (1)..(181): unsure at all Xaa locations
  Clone ID: TF_OsC68848_2.pep
DTSAPSKTSGQVPVVTSSSSTYNGWDVPGTSSGQSSSKHNKSQNSTFVVPQEALPSLPVPTAPPLAVGTFYDGPIQYPSIDSTPVDVTMPSADGGTAVSSAKPAENEXDAKPAESDANASNSGNTPPGTCVICLDAPVEGACIPCGHMPGCMSCLKDIESKKWVCPICRAKINQIIRLYAV

SEQ ID NO: 25363 - protein, 233 aa, Oryza sativa
  Clone ID: TF_OsC15124_2.pep
NELLIAQELAHSRVPGRKGRSAGRGRDEVGTWSLDLEDMKMELQARKQREAALEAALAEKEHLEEEYKKKFDEAKKKELSLENDLAGMWVLVAKLKRGALGISDLNVDDRSINLADITNGTKENKADKNVAVVEKQLSDNTVKSLTAEEYRNPEFEPLLVRLKAKIQEMKEKETDSLGDKDGNSHVCKVCFESATAAVLLPCRHFCLCKPCSLACSECPLCRTRIADRIITFT

SEQ ID NO: 25364 - protein, 643 aa, Oryza sativa; identical to SEQ ID NO: 18262
  Clone ID: TF_OsC102400_1.pep

SEQ ID NO: 25365 - protein, 378 aa, Oryza sativa
  unsure (1)..(378): unsure at all Xaa locations
  Clone ID: TF_OsC88980_1.pep
MSARDRETAVALARLAAALDGAVLGLGTAALAVASWVKWLAASGQLRRIASAPAAAIPDLRSLLAEYGGRRRXGDQPILAEVRGHVRAAPRGKYLVPPGSGEHCVVAKHTQLCLFNEWRGIFGWTFDLHALFFKSIKEQIITSFRWVPFVYVDPENLTGMVHVKLDLAMQPLPLTTVYHKLTPVDSTPYTLFQTIIGNGYPIALLDEEKILPVGKEITAIGYIRPHKASVEISSCSEIPFFLSDLTKDEMEAELSSRAKTLFWASVVLGTMSVCLLGFATYRSWKKIKERREARQAQEVFRQTTDEVTDDQSSDEEAGEMGDGQLCVICLRKRRKAAFIPCGHLVCCCKCALIVERQFDPLCPMCRQDIRYMIRIYDN

SEQ ID NO: 25366 - protein, 219 aa, Oryza sativa
  unsure (1)..(219): unsure at all Xaa locations
  Clone ID: TF_OsC63513_1.pep
PGLQAHNRKRSQNRLEGPGLSVSQKVXYCISTVGGQYIWSRLQSFSAFRRWGDSEQRPLARRAWGLVQHAEGLYRASSFFNLLLFLYGARYKTIVERILKAXLVYESPNMNRAVSFEYMNRQLVWNEFSEMLLLLLPLLNSSSVKKFLLPFSKDKSASSSGDEADCPICRSSPSIPFEALPCQHRYCYYCLQTRCAATNSYRCARCNEIVVAIQRQGSS

SEQ ID NO: 25367 - protein, 260 aa, Oryza sativa; identical to SEQ ID NO: 18266
  Clone ID: TF_OsC32218_1.pep

SEQ ID NO: 25368 - protein, 164 aa, Oryza sativa
  Clone ID: TF_LIB4833-034-R1-N1-D8.pep
RMWNFASSAWGSGLGKKNTPNCTPSNGDCSDDEASSCTSREEGLECPICWESFNIVENVPYVLWCGHTMCKNCILGLQWAIIKVPTVPIQLPFFVSCPWCNLLSLRIIYKGNLAFPRKNYFLLWMVEGMNGERARSRSAIHSEQQTTWALSSSRASGMEVIRIP

SEQ ID NO: 25369 - protein, 162 aa, Oryza sativa
  Clone ID: TF_OsC25814_1.pep
MKLRSPAFLRTDKDFFSQSIMQVRGLPCAHNFHVECIDQWLRLNVKCPRCRCSVFPNLDLSALNNLRPSSEPDRPSASEVTAATMARYVRSSQPAGQSYLLRLQGLLLRQVVVRHGGGDDMASAENGASHVAAAVTAPATTGGVESELPSIVVDGGHQLPDR

SEQ ID NO: 25370 - protein, 163 aa, Oryza sativa
  unsure (1)..(163): unsure at all Xaa locations
  Clone ID: TF_OsC192480_1.pep
MHKRTDFYQRITAPSQFTCSPIQESSEKNXEISKNRCPEPRNRRQQSLRIQQELVKNRDLSHDRXGGNARISRIQSRLGGRRQTARSPATAAXPTRCRRGGAVRWXATGGRSTGGRCGYIRGGCARRGRPPCHRGRSSRAPSCGQQDIADETIGEETQKQSAT

SEQ ID NO: 25371 - protein, 263 aa, Oryza sativa; identical to SEQ ID NO: 18268
  Clone ID: TF_OsC88712_1.pep

SEQ ID NO: 25372 - protein, 456 aa, Oryza sativa
  unsure (1)..(456): unsure at all Xaa locations
  Clone ID: TF_OsC4354_1.pep
MQRRRAQTWAGVGKTAQAAAAHAALFCFTLLLALKVDGRTAYSWWIIFIPLWLFHGIVARGRFSMPAPSLPHGRHWAPCHSIVAAPLLIAFELLLCIYLESLRVKSKPTVDLKIVFLPLLAFEVIILADNFRMCRALMPGDEESMSDEAIWETLPHFWVAISMVFLIAATTFTLLKLSGDVGALGWWDLFINYGWFNPMIHKSPNPGEASSSSAAIRYRDWESGLLLPSLEDHEQERLCGLPDIGGHVMKIPLVIFQVLLCMRLEGTPPSAQYIPIFALFSPLFILQGAGVLFSLARLLEKVVLLLRNGPVSPNYLTISSKVRDCFAFLHRGSRLLGWWSIDEGSKEEQAHWGHPTXCGYPLEVVTNLSEARLGAGVWRLXAALGEQSEITKCTKXQEFERLQNEKVLCRICYEGEICMVLLPCRHRTLCKTCSDKCKKCPICRVPIEERMPVYDV

SEQ ID NO: 25373 - protein, 165 aa, Oryza sativa
  unsure (1)..(165): unsure at all Xaa locations
  Clone ID: TF_jC-osroLIB3475009f05b1.pep
YSYGSKSFSKPSTYPQSSTSSSSYPHYETAQSSSPAVPSSTYDNQVCPICLVNPKDMAFGCGHQTCCDCGQSLESCPICRSPISTRIKLYXQWQFGSFANGWHTGDHLVSHWAMDCIGCFKCNPCKAFERLADKPVKYWVCIDKDRKASNPLLQDCGAGDVSSIE

SEQ ID NO: 25374 - protein, 67 aa, Oryza sativa
  Clone ID: TF_LIB4371-053-QB-K6-F7.pep
MYRNGGFGSVPASSKAMAELQEAQVSEARESDCAVCFEGFDQGEKLTRMPCSHCFHATCILDWLSLS

SEQ ID NO: 25375 - protein, 94 aa, Oryza sativa
  Clone ID: TF_LIB3434-055-P1-K1-B3.pep
HASVNNKVVLPNCSHAMCMKCYRQWRSRSQSCPFCRDSLKRVNSGDLWMLTDDRDVIDMATITRENLRRLFMYIEKLPLVAPDNIFYAYDSHVK

SEQ ID NO: 25376 - protein, 216 aa, Oryza sativa
  Clone ID: TF_OsC183489_1.pep
MALVYSESSLTGIQLIICKAARPGDQAQPNRKLPRNSSNLKTPKEFHATDPWGHMVRVYQLLLKGRDALMKLGITGKKYTQPARCYMIAFVLVYTNTINHLWLMPLALELPLPTAHWAKWCGCLRIDPLEYAVEMESVVAGAPDERAIVAGELTIRAAAVECHPAYTTGFILGVPCPRSHRMPLKNLDLHLWSGCLRIDPTSVCSGDGKRGCRSPR

SEQ ID NO: 25377 - protein, 105 aa, Oryza sativa
  Clone ID: TF_OsC46775_1.pep
RVPLPPPFASYNTISRAAPSRANSFRSMPSHPRDEAPVDSAITASVTSPPSVDARAAEPQLCPVCLSKPRDMAFGCGHQTCAECGPQVEHCPICRRPIDTRVKLY

SEQ ID NO: 25378 - protein, 292 aa, Oryza sativa; identical to SEQ ID NO: 18278
  Clone ID: TF_OsC1795_20.pep

SEQ ID NO: 25379 - protein, 139 aa, Oryza sativa
  Clone ID: TF_OsC37567_2.pep
MDPTAGTGSSTKKIPSWMVTELPMLSTEANRLPQIPSWMIRKPLMLCMEAGRSGKAAAAATATADAMEQSCSVCLKSFEKDDCIWSMPCSHTFHQLCILGDRSCRDMNANEECKELSLVEDEASTAREASELGRTRGSF

SEQ ID NO: 25380 - protein, 326 aa, Oryza sativa; identical to SEQ ID NO: 18286
  Clone ID: TF_OsC49416_2.pep

SEQ ID NO: 25381 - protein, 153 aa, Oryza sativa
  Clone ID: TF_jC-osleLIB3474039b05a1.pep
AKQLPCMHLYHSSCILPWFSSRNTCPVCRYELPTDDAEYERSKQATTNVRDIQVVEENSDEQEVQVTRQMAVGAIEETNTSEHNVRVDEQPSSARRRSGWLFIAAAPVVSLIGFALVLCFTNPARSGRRQLYCRSPSATEVHVGTKKSWWSMF

SEQ ID NO: 25382 - protein, 173 aa, Oryza sativa
  Clone ID: TF_LIB4371-036-R1-K1-F5.pep
IVTDSGKIQALLIRVWGLAVSVIPNIIRIMSTASTARSRKRAHDGSRQKVDVINLETTAPVVNTGSQHEALILRGTRTSPIDVEALDDKRRSRKIMRRSVAVVDPEKDTGPGGYGVAGAIFSRGRNFQGAVHVICLSPIGKKGPASRKMWPKPVRRMPRLLQRNQPLPVLGGV

SEQ ID NO: 25383 - protein, 136 aa, Oryza sativa
  Clone ID: TF_uC-osflM202003c01b1.pep
MRHLLQSSEHLTAATATAAASGGRGVHTDTFLILAAVLCFLLCVVGLALVARCSRLCNPSSFAVEAEEAMPPAPCKGLKRKALLSLPTVSFAEAAAAEEEEERPECAICLAEFARGDEVRVLPPCGHGFHAACVDV

SEQ ID NO: 25384 - protein, 233 aa, Oryza sativa
  Clone ID: TF_OsC349_4.pep
KKSHLPIPTWSGGIPESGSIESSRCRPWRPTSTRRRPPSPPPPAPARDPPLPPAPTPASPTSASRSRSGTPSRGRFSSRPNLLLLLALPSHPRVRHGQGRRRRGRAPLHRRRLLLRGQEGQALRDQEVERCLPLGLGHRRGQLRHLPQPHHGPLHRVPGEPGERHQRGVHRRLGSLQPCIPLPLHQPLAQDPSSVPSRQQRVGVPEVWSLDNSLSGAKAASSFSYQVLALSDN

SEQ ID NO: 25385 - protein, 151 aa, Oryza sativa
  Clone ID: TF_OsC1795_44.pep
QCKCDFFFFWLLFREGFIHKAHKKCYTRRSTLLLRGIYTVQAQTARNGKKRDKVRGESAKKAKSSLSSFLRPHGEATRRRWRVAGAGRLVGESNRVESNPLAKSGPRRRRRPAARRSRRGGGSGRAGRWRGRSQAMSRGRRGGRCDRRGGG

SEQ ID NO: 25386 - protein, 173 aa, Oryza sativa
  Clone ID: TF_OsC134110_1.pep
MASPSSSSVISIFLLVAGVALMLVVHIVVVFWALRRGRGASRGEEEAAPGRAAEGNGGGARGGGGKGLSADEIGALPCHDVVKGGGGGDCAVCLEELEAGDRCRRLPRCEHSFHAPCVDSWLRKSRWCPVCRADVVGRAPEGERKMAAAAAAVKTTVAGRSSSPATGEIVAER

SEQ ID NO: 25387 - protein, 244 aa, Oryza sativa
  Clone ID: TF_OsC17323_1.pep
MRTASTATRRVSAGAPLPTSLPFSSSPSRQPGMGFPVCCYSELLLPKQLLHLLLLLGYIRRFLLWAFHAVGLGDLLDLGDEQQAVLQDHAREHRAPAQALPPQQQHRRAEFRTVPAMVIEEVLPVVRFDELVAAAPAVCGGGDCAVCLSGIGGGDEVRRLSNCRHVFHRGCLDRWMEHDDQRTCPLCRAPLIPDEMASALWAAAGVPDASDFDFSYFGAPLTPMPTPTLLRPHELLLTGLGGYQ

SEQ ID NO: 25388 - protein, 188 aa, Oryza sativa; identical to SEQ ID NO: 18384
  Clone ID: TF_OsC337952_1.pep

SEQ ID NO: 25389 - protein, 407 aa, Oryza sativa
  Clone ID: TF_OsC25814_2.pep
MAVICFEESIHLLLCLIGFRIMVSINWKRYRLCAHPLHIWIVVDYTTVFIFRLLMFVDNGLAAGMGLALDNVYTCLFVKFGHLRHFHLPEEGQKWGFLIWLLFSYCGLACIACVAVGKWLSRRHALQQRAQQGIPVSEYGVLVDMIRVPDWAFEAVGLEMRGMGQDTAYHPGLYLTAAQLDKISMYLFASDLRDAKKSLKTSGFVLRSKVTLKSSVIEQNDFKLVLLLQREAVEALIQELPKFRLKAVPTDCSECPICLEEFHVGNEVRGLPCAHNFHVECIDQWLRLNVKCPRCRCSVFPNLDLSALNNLRPSSEPDRPSASEVTAATMARYVRSSQPAGQSYLLRLQGLLLRQVVVRHGGGDDMASAENGASHVAAAVTAPATTGGVESELPSIVVDGGHQLPDR

SEQ ID NO: 25390 - protein, 379 aa, Oryza sativa; identical to SEQ ID NO: 18399
  Clone ID: TF_OsC29695_2.pep

SEQ ID NO: 25391 - protein, 274 aa, Oryza sativa
  unsure (1)..(274): unsure at all Xaa locations
  Clone ID: TF_OsC7412_3.pep
EARRPFTALSQVDADLALARVLQEQERAYMMLRMGGGVGEGSDYGSSDAGSYEXEDEAEEDYEEELEHHLRVHHHEHAVGEGRGEGERDGEGAEGSEFEEEGFDEEYDEEEVEPELDPAEYEDDEAYARALQDAEEREVAARLMALAGISDWRPVEPVEEHANDPQDAWQEVDPDEYSYEELVALGEAVGTGHRGLSAATLASLPSVTYKAEGVQDGNTEQCVICRVEFEDGESLIALPCKHSYHPECINQWLQINKVCPMCSAEVSTSDSNQA

SEQ ID NO: 25392 - protein, 513 aa, Oryza sativa
  Clone ID: TF_OsC76986_1.pep
MAGSTLFRWLFLLLAIVSLAAADSGSGEAETTVPGQIRLSCGASASATDGDGRAWDGDAVSTFAPSVTGVAADASYQDPSLPSPVPYMTARVFSSSYTYSFPVKPGRVFLRLYFYPSAYGNLGAAAAAADALFGVTAGGITLLRDFNASQTALAVGYAYIVREFSLNVSSGATSLNVTFAPSPRGAPGHGSHHYAFVNGIEVVPTPDMFTTPVPAFANGGRPNPMPLRADTAFQTMYRLNVGGEAITPRDDAGGFYRTWDNDAPYIFGAAFGVTFAKDSNVSVRYNPPSVPKYAAPEDVYATARSMGPNAQINLNYNLTWILPVDAGFYYLLRFHFCEIQYPITKVNQRSFFIYINNQTAQSQMDVIVWSGGIGRAVYTDYLVVTAGSGQMDLLVALHPDLSSRPEYFDAILNGLEVFKLHKYGTHSLAGPNPPIPLKQVFSTVDGSRSESRKKSVVCAAVGGVAAGCFLAVLVAFAVAWAVRRRQRKAAAEKPADGLLGPTKGSALYDPVQK

SEQ ID NO: 25393 - protein, 130 aa, Oryza sativa
  Clone ID: TF_uC-osrocyp036f12b1.pep
LSEAVGLEMRGMGQDTAYHPGLYLTAAQREAVEALIQELPKFRLKAVPTDCSECPICLEEFHVGNEVRGLPCAHNFHVECIDQWLRLNVKCPRCRCSVFPNLDLSALNNLRPSSEPDRSSASEVTAATMA

SEQ ID NO: 25394 - protein, 370 aa, Oryza sativa; identical to SEQ ID NO: 18400
  Clone ID: TF_OsC20421_1.pep

SEQ ID NO: 25395 - protein, 217 aa, Oryza sativa
  Clone ID: TF_OsC409067_1.pep
MDPPARRLMDSRAAQLAAPLPDPYSAETFEDLLRELGVDPSIHTIVRSAGRWMDPAAAAARVPVRFHRTLQRLGIDPNSDARSIRDMLQEFYRVVYHGEVYWAGRVIRPRPSSMPTPVIGRRRRAADGDAPMQPPSKYARVHAVSRDVLLGLALTKACDARQEECAVCLSDFEEKDRLRTMPCNHSFHEICLFRWLSDSCLCPLCRYALPKQQQVRL

SEQ ID NO: 25396 - protein, 170 aa, Oryza sativa; identical to SEQ ID NO: 18393
  Clone ID: TF_OsC343295_1.pep

SEQ ID NO: 25397 - protein, 213 aa, Oryza sativa
  Clone ID: TF_OsC17119_2.pep
MSLTNAPSSMVSIVTPVTDRDSGRTVAGVPPVLVGASVSSAPELRGRAYLVHHVFYEDGSASADGGGGVAPASRASIAALREVEEEDDDGEEASDCAICLDDGEESRETCGSGRRKEMPCGHRFHGECVERWLGIHGSCPLCRHEMPPATAAEAEEEEVVVAMVHGERVVMRGRRVVLSVLVMGRAHDDGEGPEQRGTDPIPPLPRVLIDDVD

SEQ ID NO: 25398 - protein, 250 aa, Oryza sativa
  Clone ID: TF_OsC206824_1.pep
MNGSRQMELHYINTGFPYTRAAGFGACLEGLTYAHADFAIADAFHDQANPYWAMMHTNSYKYGYSGAGNYYSYGHVYDMNDYMHRADGGRRIWDNATPVNNTESPNVVLQGGETPHANTSSTTEECIQQQVHQNSSSPQVIWQDNIDPDNMTYEELLDLGEAVGTQSRGLSQERISLLPVTKYKCGFFSRKKTRRERCVICQMEYRRGNLQMTLPCKHVYHASCVTRWLSINKVCPVCFAEVPGDEPKRQ

SEQ ID NO: 25399 - protein, 137 aa, Oryza sativa; identical to SEQ ID NO: 18394
  Clone ID: TF_OsC350539_1.pep

SEQ ID NO: 25400 - protein, 212 aa, Oryza sativa
  Clone ID: TF_OsC3972_1.pep
MGFPVGYSELLLPRLLLQVLLLLGHLHRFLLWAFHAVGLGDLIDNPPGLAATEQDMMLQGRGGGMAEGWASSSALQHRRPEFRAIPPMAIEEALPVVRFDELVASAPAAVCGGGDCAVCLSGICGRDEVRRLSNCRHVFHRGCLDRWMAHEQRTCPLCRAPLIPDELLPAASGLPDPSDYDLSYYPSPLPLAPTPTLLRPHELLLNGLGGFQ

SEQ ID NO: 25401 - protein, 153 aa, Oryza sativa
  Clone ID: TF_OsC12910_1.pep
MEAQMEAMPEIVVIAVSHLEHSLIDSLIYWRFGVDESDEDASSDRHRGMRMDIDDMSYEELLALGETIGTVSTGLPEDELSNCLKRIHYVPSASTSHEDGDIKCIICQEEYLPAEEVAEMACKHYYHLACIQQWLRQKNWCPICKSVGSATKH

SEQ ID NO: 25402 - protein, 375 aa, Oryza sativa; identical to SEQ ID NO: 18464
  Clone ID: TF_OsC29912_1.pep

SEQ ID NO: 25403 - protein, 338 aa, Oryza sativa; identical to SEQ ID NO: 18465
  Clone ID: TF_OsC185398_1.pep

SEQ ID NO: 25404 - protein, 363 aa, Oryza sativa; identical to SEQ ID NO: 18467
  Clone ID: TF_OsC12034_1.pep

SEQ ID NO: 25405 - protein, 645 aa, Oryza sativa; identical to SEQ ID NO: 18466
  Clone ID: TF_OsC5703_1.pep

SEQ ID NO: 25406 - protein, 523 aa, Oryza sativa
  Clone ID: TF_OsC1528_2358.pep
MVSCSSRADAPPRRRAAARGLGLGLAGCFGGGSSGAATGGGGGGGATAASSSRAHEVESWQAARAVAEMDFRASVAAKDIRISSESDPRVHPSSSTISHHLRFNHLNSHENKEDALGTEIAETSVRQSSSGKEVMPRGNFSNEVAYAEITSREGISHIGRDILEPAANNAETDTVCIPEVGGPVSESGFSSSQRASERIMADLEAGEIAHGTSSTTIMSSERSDTSQSSLTSVLPATSTAPSTIGESLPDTVPSREDVPIFSGTQGEIGGNTLHDDMMSIFSNDGPARVRDSSSNEMRRSHRRVLWDTFSRRSSRGYLDSDTDDLGFYSRWLDLGDELFADEIEEARFFHRRRHGSIRVSQYSRSRIREHRRAVFDSGTDQSTVACPLGIHQIGRCTCDSFLIAEESSARASISRIVMLTEALFEVLDEIHRQPASLSLSMVSAQAPESVVNSLPCKSYKKQTAQCSDDMEQCHICLTEYEDGDQIRSLPCKHEFHLLCVDKWLKEVHRVCPLCRGDVCEGAA

SEQ ID NO: 25407 - protein, 325 aa, Oryza sativa
  Clone ID: TF_OsC1867_1.pep
MVRGVEQGGPAMDESSSSSSPSPVSAPAGQAAMTAGGIATVAAVLIVFAALTLAFVLLQCYCDERRRAVTTTSTSGRGRRPRPRRRSGSGGDGGTGGGVDPEVLRSLPVTVYSRSTAAAAAKEEEEEDDDGVECAVCLAELEDGEEARFLPRCGHGFHAECVDMWLGSHSTCPLCRLTVVVPPPPLPPVPPEPPASYTVSLPASVLLGLSDHGAGAVTMTAEGRSTLVIEIPESAASTTPRDAAARSSPSLARLRSLRRLWSFGRQGAAGSTSSCSCATGGDNDDGDVEHGVSVTVAIRAVEAATPARPPEAEAGARTAAAHVRN

SEQ ID NO: 25408 - protein, 191 aa, Oryza sativa
  Clone ID: TF_OsC4209_1.pep
MSSSSASAVPPEDDVCSVCHDRFRIPCQANCSHWFCGECIIRVWNHGPSVQPCKCPICRRLINLLVPANVSIDNDDDPQIQHVLGEVQHYNRIFGGTPRNLTQRLQDLPFFIRRLFRELLDPQRTLPLVFRARMVMMVALSAIYVLSPIDILPENVLGLFGFFDDFLVLLIVFLHLAAVYRSLLLYRHGGH

SEQ ID NO: 25409 - protein, 197 aa, Oryza sativa; identical to SEQ ID NO: 18414
  Clone ID: TF_OsC387972_1.pep

SEQ ID NO: 25410 - protein, 164 aa, Oryza sativa
  Clone ID: TF_jC-osroLIB3475P014f09a1.pep
SCPIIVDDINDDVVIYSASSFPQVRQQAPRTEPVVTIEDDSETTPGQAGDAVDEHVDILLSLTLGRYPRHGHQRSSNISTSPVIHIIDTPSNALPEPEKAVPKEPTFNCPVCMNELVEPSSTICGHIFCKQCIKASIQAQKKCPTCRRKLTMNNFHRVYLPFAE

SEQ ID NO: 25411 - protein, 143 aa, Oryza sativa
  unsure (1)..(143): unsure at all Xaa locations
  Clone ID: TF_LIB4309-041-R1-N1-C4.pep
PPRPCPWDDLDFSHHTEHHPLVVGHDKXSXTFHKSGSLGESKNADSISNSKAVKDDGPSTAVKDDGSSVKHHSDGLHIGKEQVHDLFDFEDDCPICLEEYDYENPKMTLQCNHNFHLCCIYEWMERSQACPVCSKVMLFHEDS

SEQ ID NO: 25412 - protein, 123 aa, Oryza sativa
  Clone ID: TF_LIB4506-014-R1-N1-H7.pep
SVVEKVQSFLTALRALSHKDFHYGSYATSEQVSATGDMCAICQEKMHTPILLRCKHIFCEDCVSEWQPMLMPQLCADKKAGKQAGRCFRCVRLCCSRLRAEQPYVVLNQSPRLPHQLKAKKST

SEQ ID NO: 25413 - protein, 233 aa, Oryza sativa; identical to SEQ ID NO: 18415
  Clone ID: TF_OsC8285_1.pep

SEQ ID NO: 25414 - protein, 385 aa, Oryza sativa
  unsure (1)..(385): unsure at all Xaa locations
  Clone ID: TF_OsC99441_1.pep
MGAVSMSTTTRLPLVAALLSAAACVAAAQPATAEAAPETPGVGIKVSFRPXXXXXXXXFTMIFSLTFLLLMYAKFCHPSSPVAAPAPTVVPAAAADDGVAKPVIESLPFFRFAALRGARQGLECAVCLARFDDADLLRLLPRCRHAFHLDCVDRWLESKASCPLCRARVDAEDAALGLKYASSARFVPAGGASESERFDGDQDLLGIFVERVPSSRMEPAAAAHCPDLDRYKHRIVVSDAVFKSRWSEINSSDLIALDTELLRSMETMEVEMEMELYKETEEEETDHDHQRKTLLAASGGRSSVDAAARARMISSSSSSGSVRSMSEMVSLPRLRAAMRERLAHEDRWVPIARRTARWFAGRESRHDEAAPVVDSPPASHSNSLV

SEQ ID NO: 25415 - protein, 266 aa, Oryza sativa
  unsure (1)..(266): unsure at all Xaa locations
  Clone ID: TF_OsC326943_1.pep
RPTRSPCFPATSARKTAVAAAAXECAVCLEAFQAGDRCRVLPRCEHGFHARCVDSWLRQSRVCPICRAEVEVSGYAGKPAAAVAEASQATTLEIVTERLGGTERLEVSNVCEVHPLDSVDRMKGDNSNVFLVAGLSLVVVVHVLVLLWALWWGYGRSRLALARARVVGQHDVARGGLSAEQVGELPCHVVKEGAGECAVCLEAFRAGDRRRVLPRCERGFHAQCVDSWLRVSRLCPICRAEVAASRGKEGDAPVAEAASLEIVAER

SEQ ID NO: 25416 - protein, 138 aa, Oryza sativa
  Clone ID: TF_OsC18246_1.pep
CGQSRPRRPSARSTGSRRTWSRCPATAPSPTRRRRRRTRRAVCARCAWPAEYAAGDEVRVLPSCGHEFHRECVDRWLLTRAPTCPVCRAPVVARVEGPDDDAKEDYCGDGESVERHGGGGGDIGFLSVAGESRVLPAI

SEQ ID NO: 25417 - protein, 174 aa, Oryza sativa
  Clone ID: TF_OsC104843_1.pep
MATPNTYSVHISSETHRIEAWLASDEALARQLQEEENAHDAIATREFAGNASLEPSSPAVEYRPPNNAAQVATEDNVDPDNMSYEQLQALGEAVGNQSRGLSDDLICYLVPFKNKCSFFSRKKNDEECVICKSTYKSRQKLIRLPCSHCYHADCITRWLKINKACPVCNEEVFG

SEQ ID NO: 25418 - protein, 109 aa, Oryza sativa
  Clone ID: TF_OsC85903_1.pep
VDHASSSENLSEGGILGPGTKKERIVSAEDAVCCICLTKYGDDDELRELPCTHFFHVQCVDKWLKINAVCPLCKTEIGGVVRSFFGLPFGRRRVDRMAGRGIASSRFTV

SEQ ID NO: 25419 - protein, 211 aa, Oryza sativa; identical to SEQ ID NO: 18424
  Clone ID: TF_OsC394643_1.pep

SEQ ID NO: 25420 - protein, 60 aa, Oryza sativa
  Clone ID: TF_jC-osflLIB3477P007c06b1.pep
GFFPRKAYHDNCPICLSAFRRRETLITLACKHSYHEGCIARWLKIDKACPVCKYEVFGPS

SEQ ID NO: 25421 - protein, 210 aa, Oryza sativa; identical to SEQ ID NO: 18428
  Clone ID: TF_OsC105234_1.pep

SEQ ID NO: 25422 - protein, 386 aa, Oryza sativa; identical to SEQ ID NO: 18430
  Clone ID: TF_OsC157607_1.pep

SEQ ID NO: 25423 - protein, 320 aa, Oryza sativa
  Clone ID: TF_OsC253211_1.pep
MDADRDPIFPVQQMPSLLFPPPPPRPLALDSTSSASSSFVPHHPSITSFPILVLTVLGILTTSVLLLTYYIFVIRCCLNWNSSSSSDTRTAGLISRRRRGAASSSLPAVAEPRGLEEAAIQSLPAFRYRKAIKDTTADSSECAVCISEFQEEERVRLLPSCLHVFHVDCIDTWLQGNANCPLCRAAIATNDSQLPLDQFVRPEVVVIQVITGAEEEGAQAPQQEANTAASDPAVDATSTNQQVSSKKTKNQNAWHVSISKGDECIAVRRDRNVLPLRRSFSMDSLGGAGEVHLQIQNILQRSTHFHRDISDSSSSSTGTL

SEQ ID NO: 25424 - protein, 371 aa, Oryza sativa
  Clone ID: TF_OsC29884_1.pep
MSSQPVARVLPRGGGGGFRAFPESAPASLRFSVGRRRAARLGARARGCPPEGEFPPSAHPQHYPGWPGSLGAPHPCGLQPAMLTPYVEHQKAITIRNDVNLKKETLRIEPDEECPGRFLVAFTFDATLAGSMTVYFFAKEELNCNLTAVKEDLIKPVTVSFKEGLGQKFRQPSGTGINFSVFEDSELLKQGDMDVYPLAVKAETTMPVDQKLEGEDQKMKTPNSQITQALFEKKESGDYQVRVASQILWVNGTRYELQEIYGIGNSVEGDADANDPGKECVICLSEPRDTTVLPCRHMCMCSECAKVLRYQTTRCPICRQPVERLLEIKVNNKAEEQQQPSPDSPIKVNSKAEEHQQQPSQSLPIPHREEV

SEQ ID NO: 25425 - protein, 170 aa, Oryza sativa
  Clone ID: TF_OsC35881_1.pep
REVALRVPAVGLRRGGCARAAGKKQKAICIERYRRRDEDQKMVISEIDDNIEEECGICMEINGKVVLPTCSHAMCIKCYRDWRSRSQSCPFCRDSLKRVNSADLWIYTDNRDIVDIATVRKENLRRLFMYIDKLPTVIPETVFDVYDSHCCRNCGALGVHAAPLVEAVSS

SEQ ID NO: 25426 - protein, 148 aa, Oryza sativa
  Clone ID: TF_OsC428898_1.pep
MLFLKELPIWQAFGFSLLTGALAGSTLYAVCVLLLCCVDRRRRHAGAPPPDPKIWLPDHAHHRRRRDESSEMECSICLGELEEGERCCTLAACRHEFHKECIYRWLANRNTCPLCRHIPLPPASSPPPAPPPHHASPPPSNVPPAAHV

SEQ ID NO: 25427 - protein, 527 aa, Oryza sativa
  Clone ID: TF_OsC49150_1.pep
MLQRNMVWTHQVASPENQVQPENFYHGGAGSNLSNLSVQVAVGVPGNTDFRSHYESINLQHQHVQNPYPHVGVASSSVFPSTMYNPCISTTAVDRYVPPIQSFGLGNPLLLPLYHQLAQGSMDENGSSGNFCDSVREFIKRKNALLVGGHHFVNSFASSSSSAYVPPNPLHRSWNASFEANILPSTGVSNPPEYSSADSLNNSNSMASHPELVHHGNYVFPAGHMSQYNAWIAQASRTGGVPQWEHGNAAANPPGGFVHSGTIDMPNGGLQGYQAGPFANYYGPLPHFHQNPLNSMQHPALFNHIQMQVPHQHCLSNNLLHHPSGNGLPLDPRILAISSNSGHTFGPTAQPSLANQVNAGSSRIQPYEFLFFKLDNTKFKGYQNLVEKYHLILFLNAPFVDLSRLYEAGVIDEHRDMRLDVDSMTYEELVALEERIGNVNSGFTESYIEENLKSSSYVPDADCMPDQSSVEKDACIICQEEYEAKELVGTLGCGHKYHAMCIKGWLMVKNLCPICKTTALPADRRNG

SEQ ID NO: 25428 - protein, 295 aa, Oryza sativa
  Clone ID: TF_OsC60245_1.pep
MAGAPMASPPPYDNPTAGFPIAIVIAIGFMVTSLILASYYFLVVRCWLRGTGGGGAAGAGLLHRSRRESAAERVAAVFFTDYEAEVGGGLDPDVVAALPVVKYRRAASGKSASPQECAVCLSEFVRDERLKLLPSCSHAFHIDCIDTWLHHNVSCPLCRTVVTGGAIGLLVRDDQYDASSRELAAGERRIDAAARMGHGISSCRFPKTGAEQEPIRRSFSMDCFLGDLGRKPPPPPPKDPAGSEAGPSHPDAAGSSSIVGTAGAGETSGRFRRLLSSFGLGRSSRSTVLPIHLDP

SEQ ID NO: 25429 - protein, 251 aa, Oryza sativa
  Clone ID: TF_OsC200433_1.pep
SISAACSGRQLQAPHTQLLRLHVHFTGVAISNPKPKDFIGLRGEWSCCAAAAAAVFDGEKPRKRRTMNTPNSWLFADNSKYSTRARLLFMGLSFSIGILSFLVYLAIWYTCTRRRRSRQLRGGGSASADQEAPEANSHGMSAAAIAALPTFGYEASAAAAAALDCAVCLGQVDAGEKVRQLPKCGHLFHAECVDAWLRAHSTCPMCRAAVEGPATAAIAKKASSGGGATDTPPVVAPAPPAAAEALPLPPV

SEQ ID NO: 25430 - protein, 902 aa, Oryza sativa
  Clone ID: TF_OsC1713_5244.pep
MAPASLAPSPCRRGGAMLRDRAFDAGYKDDVFVCSSLLHLYARWGAMGDAVKVFVRMPRRDRVTWSTMVAGFVSAGQPLDAIQMYRRMREDGVKGDEVVMIGVIQACTAARNVRMGASVHGHLLRHGMRMDVVTATSLVDMYAKNGLLDVACRVFGLMVHRNDVSWSAMISGFAQNGQSDEALRLFRNMQASGIQPDSGALVSALLACSNIGFLKLGRSVHGFIVRRFDFNCILGTAAIDMYSKCGSLASAQMLFNMISDRDLILWNAMIACCGAHGRGQDALTLFQEMNETGMRPDHATFASLLSALSHSGLVEEGKLWFGRMVNHFKITPAEKHYVCLVDLLARSGLVEEASDLLTSMKAEPTVAIWVALLSGCLNNKKLELGESIADNILELQPDDVGVLALVSNLYAATKKWDKVRQVRKLMKDSGSKKMPGCSSIEIRGTRHVFVMEDQSHPQREEIVSKVAKLDLEMRKMGYIPRTEFVYHDLEEEVKEQQLSYHSERLAIAFGLLNTGPGTRLVIIKNLRVCGDCHDAIKYISKIADREIVVRDAKRFHHFKDGVCSCRDYWLPRTSMARGCVLLYVYPTDPPRRGPSEEVQPRKAATSVRPSRGTRRRGSGAVPVAFAIPGRGRHLSRRKRPGRWRQRLLLPTRWGARVADDHPRPLHCTCPMWEQHPAWPVRNATPLRCRRHPRRLLCALICVVGLAAVARCARNRRNSGGAGAGAGSASPSHSPAHAGHFGGGGSGGGGVTTTTAATTAAKGLKKKALKALPKLAYADAVAAAAAARGTVVGEEEEGKVEVLAECAICLSEFGEREEVRVMPQCGHGFHVACVDTWLRSNSSCPSCRRPIVLDDPSPPKRCRKCEAIVLEAVVAASSSSSSSAATATGSGGGGGGGGGRFLP

SEQ ID NO: 25431 - protein, 349 aa, Oryza sativa; identical to SEQ ID NO: 18443
  Clone ID: TF_OsC342884_1.pep

SEQ ID NO: 25432 - protein, 209 aa, Oryza sativa; identical to SEQ ID NO: 18446
  Clone ID: TF_OsC355497_1.pep

SEQ ID NO: 25433 - protein, 171 aa, Oryza sativa; identical to SEQ ID NO: 18452
  Clone ID: TF_OsC32419_1.pep

SEQ ID NO: 25434 - protein, 238 aa, Oryza sativa
  Clone ID: TF_OsC91373_1.pep
MDRTSAVPGRVSDPGSAWFGGGERSSSAGPGRNVRLIATAVAAFVSVLGLALFLHLYVCHVRRRNRRRAAEAAALATANAGAPPKQVGLDPSAIAALPTAAYGKVAGGDAAGGTTECAICLGAMQEADAVRVLPACRHVFHVACIDKWLASSSSCPVCRAGVEPPPPPPSTAAARCVHEKQDAEKEEAAAGSSAPVRVLGASLMKMLSRERPSPRRQPGVHAVEMEDLESQLPRPQQQ

SEQ ID NO: 25435 - protein, 1119 aa, Oryza sativa
  Clone ID: TF_OsC4340_1.pep
MLAKLFKWEALNQRSVPYGMTMMDHHPPPPSPPRDSGGSLEVRLFYVRLSPRGPTPPPRLALALRSSRGGDEEEAPTPLSLPLRLDRRDPASGEATYVSTASARLPPPSAAFEVADHRGAALLRGSLRRCPDAKPDSSPAWAIDCIPAAGAEAETSAFEVYVAGCCAGEPAVLTCALRLATPEEQKAAGGLVRRRSPTSNAAGDEDVNGSIQHPEGWYSDDDDGQLTWFNAGVRVGVGIGLGVCVGVGASGFFSPPLPNPTTRRGGGGHRSHPPDATAADDDDAAMTGAAAWPVCTICYEDLRPLSDQHLHCLPACGHVFHALCLEQWLEYCPGGKKKLTCPICKQPCGAAHPPTRLFFQSTGACPTQTASSSPSRHEPTDGGADRDELAAEVARLEQKAASLGRVLDEQRDGIQKLNAEASAAAGPPNLGGSCVAMWREKAAEAEVMKESVRREKECVQHLLNAKTEELSRKSSECGRLQEKGLSLAKELAALKLSTDMNLQEEEILKLASLGNHGNAANAVDVLTRSLALRNKSYKELMIQCNVLGRSESRSQQRFEKAKELIKKLKARVQDLEKEQEEKENGVIRDLRSAKKFKADQTNSGNTTVNNGFSGLAAGCGDYPMKLDEVVQDPCDKPGPSPEAKNDLNIKDKMDDKHADVIDLDADDSVFQHEHKKGLSAKPFGNDATRMAPGTGPQQVHNFNSLSDDFQIPIRNLGGEGTGKSVGKWCKGVATPGSLNTNANKRNLIAVGPDGRGGKDSKTQALWPKAQKVGSRAIVPSLGEVAVALRRKAAEMASTAAAASSQGCISWALRQRGLGGGGARAVPVLPRRRFCVSAAAGAGFDNENREYVIVGGGNAAGYAARTFVEHGMADGRLCIVSKEAYPPYERPALTKGYLFPPDKKPARLPGFHTCVGSGGQRQTAEWYKENGIEVLYEDPVVAFDGKTHTLKTSSGKILKYGSLIISTGCEASRLPAKIGGNLPGVHYIRDVADADSLVSSLGKAKKTVVMGGGHSQIALKPVPFELFPLSASIAAADHSKGSVLSSPAEGGGDGFHGRGGVVAGVHLVGAAGAWAWWWWCAGCPGASPWECLRLSGGGYGGSKGYSRVCCRWWRHQGWLP

SEQ ID NO: 25436 - protein, 376 aa, Oryza sativa
  Clone ID: TF_OsC339987_2.pep
MCCHSHPDLTGLLLLVSCSLHRRRPGQQLSTMARKLRGQAASSGTQNSNGLSNSSLELPSEHHFLAARTGMNGFAPTGYQQPPPPPAASASPGGWIASTAIFMSIFFSTFLLAMAVSVYCCLLCRDRVRSDRDDTGAAAERARGGGTVAPLPVEALPPAYPYVVGSSEDGGATAASGGGGRECAVCLGAVREGEMVRRLPACEHVYHADCIDRWLAAHRTCPLCRRELDPGKNPPDQLPRAHPPSPATRRAEVDEEVGRRHRARPPKVLVTEPPLLLVTEPRRCRSSSSATSHPPAPQDPPSRESALRVPSRRIRRLQALPLSVPPSARLVATGSAASRVTEAPPVDQATARHELHRRSSRGPAGGRMERWRKEGE

SEQ ID NO: 25437 - protein, 190 aa, Oryza sativa; identical to SEQ ID NO: 18501
  Clone ID: TF_OsC339987_5.pep

SEQ ID NO: 25438 - protein, 155 aa, Oryza sativa; identical to SEQ ID NO: 18502
  Clone ID: TF_OsC99948_1.pep

SEQ ID NO: 25439 - protein, 701 aa, Oryza sativa
  Clone ID: TF_OsC1548_1.pep
MAEHLASIFGTEKDKVNCPFYFKIGACRHGDRCSCLHNRPTISPTVVFANMYQRPDMITPGVDAQGQPIDPRQMQEHFEDFYEDIFEELSKFGEIENLNVCDNLADHMIGNVYVQFREEDQAAAAHTALQGRFYSGRPIIVDFSPVTDFREATCRQYEENSCNRESHNEAGAAAQAQAHAIGGSDMIVMTIEDVTITLVVVEGGVEAADMKGMMMEEGVGTVVALQGVRGVQSGRAARSAGPRSNSGIVKGTKSRGDRLCPSLARACDRTAMRRLTKRLLPSFRGAGRACHRRMARYRQAGTGTPGGGGGFLLICSTGDALFDETEFTFGKVEIFNTMHSCFKFSNDLGNQLKTIFFKKENKGGMQGKSKSMYNPCMSTTSMNQYVSHTQSFGLPSNQVVLGSMDEESAQHGNYAFPTSHISQCFQPTSNTWISQSANGIADGIPQWEYVNGMNNAPGMTETVNGSFREYQNGPSTLCRGPLPYFHQHAGMHAHNLLDHTQVQAPYQQCHNNPVLHGVNHSGNRFHLGPRIPVLFSNSERTFGPPHHPLLANPVNHRNIRILPPEHATIMDFSRLYEVSNVVDEHRDMRLDIDSMTYEELLALEEQIGDVNTGLAKSYIVEKLKTSLFVPGSSCMSNKSSESSMENDACIICQEEYQVKECIGTLDCGHRYHEDCIKQWLMVKNLCPICKTTALSTGRRSG

SEQ ID NO: 25440 - protein, 562 aa, Oryza sativa; identical to SEQ ID NO: 18471
  Clone ID: TF_OsC12376_1.pep

SEQ ID NO: 25441 - protein, 285 aa, Oryza sativa; identical to SEQ ID NO: 18473
  Clone ID: TF_OsC50914_1.pep

SEQ ID NO: 25442 - protein, 1506 aa, Oryza sativa
  unsure (1)..(1506): unsure at all Xaa locations
  Clone ID: TF_OsC389823_1.pep
THEALLCRIILALGKPETIANVFSFISLGGFDSGFRDREDFYYWXLHFAQAIEKKPRFVTKXTAKIMENEAKLDLLLKKMEKTERKREEGEKRQAXEMRLFKEAVESWIPAVEKKVDVLQSTVDLLQMQVNQLESSSANKTEQTTPAGTLDSPGVRPNGSTGLDGHRVQILNREEAEGFTPKPIPANGTYASHNVSPIPFHLDASAMNSFQSALSVGMTGGVAPMTCPKFDGDNPIMWKSNCEAYFDVYGIHPGNWVKVATLNFTGNAAFWLQAVRSQLEGVTWSELCEKICTRFNKDRQQALIRQWIKICQTGSVADYVEQFDCIMHQMMAYDPSLKPVYFVTKFVEGLRHAIRSAILLQRLGDLNVACTLALLQEEALEGDKPKESKKSDGYQKQSVKGAMPLPLPPTTKGGPPIISNDRRGTELSNHSREYDRLSALKSYRRSKGLCFVYGEKWGRDHKCASSIQLHVVQELLDVLQGSSQSEQAVSEPPESDTLMAISXQAINGTDSNHSIRLRGWVQGIEVLMLIDSGSTHSFVYQQIGLKLSGVKAMPVLARVKVADGGFLTCSLHIIDCDWLTQGIHFKSNFRLLALGAYDVILEMDWLERFSPMRVDWVHKWLEFQLNDSMVRLQDTLIPXSKPVFIRPYRHTPGHKDEIERQVQEMLQNGVIQHSSSAFSSPALLVKKKVGSWRVCIDYRQLNNITQKGTYPMPVIDELLDELAGARYFSKLDLRAGYHQIRMAEGEEHKTAFQTHSGHYEYKVMSFGLTGAPGTFQGAMNDTLSPVLRKCALVFFDDILIYSPDLPTHLTHLRQVLQLLSNHQWKVKLSKCAFAQEHISYLGHIISGAGVAKDPSKIQSIVDWVRPTTIKKLRGFLGLAGYYRKFIKNFGAISKPLTQLLKKDAPFNWTAEVEQAFQLLKQSLVSAPVLALPDFQQPFTLETDASDLGIGAVLSQNQHPIAYVSKPLGPRTQGLSTYEKECLAIMMVVDHWRPYLQFQEFLILTDHHSLMHLAEQRLNTPWQHKAFTKLLGLQYKIVYRKGKHNVAADALSRNVPAEVSEFLALSECSPVWLQDIIXGYDQDPVSVKLLTELAVNPASHPQYKLHKGLLKHKGRVWVGNNSSMQQQIISALHDSPMGGHLGFPVTYHRIKSLFSWPHMKDTIQQQLNACSICLQSKPDRAKYPGLLQPLPVPDGAWQIISMDFIEAMDVAKVFMLNVYKLHGLPQAIISDRDKIFTSTLWEQLFIRSGTKLHLSSAYHPQTDGQTERVNXCLEIFLRCFVHATPSKWSEWLHLAEFWYNCSYHSSLYKSPFXEVLYGYPPTHFGIREDACSIPDLAQWLSERKLMAQLLKQHLNRARQVMKYQADKKRSFQEFXVGDWVFLKLQPYVQSSVAKRANHKLSFKYYGPYQIIAKVGQVAYKLQLPLDCAVHPVFHVSQLKGSCGFKHPVQSQLPGPTSSIQFPVQVLDTRLHKKDEATWEDEANLRQRFPAALTWGQVRASIICMSTT

SEQ ID NO: 25443 - protein, 83 aa, Oryza sativa
  Clone ID: TF_OsC388462_1.pep
QHVQRRRRWVAGVVPASSTAVAAALQEAVSSEARERECAVCFEDFEEGEMLARMPCSHCFHGSCISDWLRVSHLCPLCRFPPH

SEQ ID NO: 25444 - protein, 114 aa, Oryza sativa
  Clone ID: TF_OsC82536_1.pep
FIFENRIYNKTIINNCLTKKKKETAKKADDDLEHIPTELQEYSMTSVTEGIDAIATTRVVVTGDVSDSKHALTGHSFNRAFSGSGGALDIVVSSVRAYLSAHEQDVQFCWGYQG

SEQ ID NO: 25445 - protein, 323 aa, Oryza sativa; identical to SEQ ID NO: 18472
  Clone ID: TF_OsC200748_1.pep

SEQ ID NO: 25446 - protein, 407 aa, Oryza sativa
  Clone ID: TF_OsC72063_1.pep
MAVPPVESETRSEETDNFPLLADHMENTGHHAHAVDIPWDSSPSTSRRDNHNGFDQLPRILEGSPGTSTPSNSQNGPLARRDDNRGRRQPSPLNSGCWISVELVVNVSQIIAAICVLSVSRNEHPHSPLFEWVIGYTVGCTATLPHLYWRYLHRNLPTTGQEPTVQNIPPNNTPEANSYGVTGTNGVSRNNEATVNPRFQAFADHFKMALDCFFAVWFVVGNVWVFGGHSSAHDAPNLYRLCIAFLTFSCIGYAMPFILCALICCCLPCIISILGFREDLNQNRGASAETINALGTCKFKSKKTRDGDGNEVGVGVVAAGTNKERVISAEDAVCCICLARYVDNDDLRELPCAHFFHKDCVDKWLKINALCPLCKAEIDGVSTSAPAIGFGRRHSDNRVGNDIESQL

SEQ ID NO: 25447 - protein, 252 aa, Oryza sativa
  unsure (1)..(252): unsure at all Xaa locations
  Clone ID: TF_OsC38650_1.pep
MGGFCCCLCTDDFEEYAHPNNPIYRQGVCLRNFFHNFFGGYTATFQRLESRPSNPAQGAAPLASTNPSTNITDNSLSETYHLVSRPPPYDTDPRYARVQREGLVSRREKSINLTQEESLALRRNGSSSGIEHLAAQKKWSSTEPEGEYKVHRSESTKSLSAKSYNSSFAVVTSEDEDVCPTCLEEYTPDNPKIIAKCSHHYHLSCIYEWMERSDTCPICGKEMEFCETPXEISRWLYQWKAKDLQCDMLESL

SEQ ID NO: 25448 - protein, 231 aa, Oryza sativa; identical to SEQ ID NO: 18379
  Clone ID: TF_OsC341901_1.pep

SEQ ID NO: 25449 - protein, 338 aa, Oryza sativa
  unsure (1)..(338): unsure at all Xaa locations
  Clone ID: TF_OsC8961_1.pep
MAEEAAAGGLYYCHMCASTVSAVAAAEGEVEIKCPYCHSGFVEEIESARGVATGGGGAISSVWAPIIDGMVGGGGGDAVRRHRRSRRLADAAGADDGYYRDLALLDFSESRRRTAALLLLMQEFRERQLQRLESATATISAAAAEAGAVVGTSRDAEGVALADYFLGPGLDALMQRVGDGDAGRQGTLPAKKEAVESMPTVEVAAGGDCDSACAVCLEDYAAGERATEMPCRHRFHAKCIVPWLKMHSSCPVCRFQLPTDDDDDSSKSARGGAAHSGGGRRLSQPSPXVDGGGLGRLPAVKRYICSGFYHAEILQHFYLNRVSNFTLYLTAVSFAQYI

SEQ ID NO: 25450 - protein, 266 aa, Oryza sativa
  Clone ID: TF_OsC101000_1.pep
MELESEQHGCEHYTRGCRIRAPCCGEVFGCRHCHNEAKNSLEIHLNDRHEIPRHEIKKVICSLCDKEQDVQQYCSGCGACMGKYFCEKCNFFDDDVSKNQYHCDGCGICRTGGVDKFFHCDKCGCCYSNVLRDSHHCVEGAMHHNCPVCFEYLFDSTKDISVLHCGHTIHLECLNVMRAHHHFACPVCSRSACDMSDAWKKLDEEVAATPMPEFYQKKMIWILCNDCGATSNVNFHVLAQKCPGCSSYNTRETRGCGRPAAARSTV

SEQ ID NO: 25451 - protein, 179 aa, Oryza sativa
  Clone ID: TF_OsC49416_1.pep
LISGFLLVNRMQVYADGTTALPEWEREASIRQFYGVIFPSLLQLPSGITELDDRKQRRLCLQKFRKVEERVSEVDLERELECGICLEVNAKIVLPDCAHSLCMRCFEDWNTKSKSCPFCRACLKKVNPSSLWLYTDDRDVVDMDTLTRENIRRLFMFISKLPLVVLHVVDLDIYEYRIK

SEQ ID NO: 25452 - protein, 128 aa, Oryza sativa
  Clone ID: TF_OsC2447_2.pep
IISSLFSGRIVWEKVSPALQRAVQSQMSLLSTPFIDTNDLFETGNTGGMSRDLINRIPKTTFSAATNPDQETDNCCAVCLQDFGASQFVRVLPHCQHTFHARCIDNWLFRHASCPLCRAGVHIDHIHM

SEQ ID NO: 25453 - protein, 373 aa, Oryza sativa
  Clone ID: TF_OsC76986_2.pep
MASLPPPAPPAIGGDPLAATIPPSLPSPAPSSSSLNLSPSLLIITALLAFVFFASVSIHFLLRCLARPSHPAPSPLPRASAAAQRATTASAVEAGEATAASAVGRSQGGGGGGGGGGGGDDEKERLVASLPVFTMASALAALPKSSPDCAVCLSPFAPEAELRLLPACRHAFHASCVDAWLRTTPSCPLCRATVSLPHPPLPTAAAAAASNAAQQDPLDSRSSNNSRSFRVEIGSISNRRSSAAADDRRTYSLGSFDYRVDEEVEAVVSRIARPAAAKSTTGSVTPAPGEALAEAAGSRGWLREYVDRLASSASSLSGRWSGRWSARWSQSHHSNRQEDSWRWDPEAAVMSAPRGVDDDEPGFVTLYRWIVGV

SEQ ID NO: 25454 - protein, 77 aa, Oryza sativa
  Clone ID: TF_OsC64502_1.pep
MERSCQAKEPGNYFTYFSPSAEDEDVCPTCLEDYTSENPRIVMQCSHHFHLGCIYEWMERSEACPVCGKKMEFDETT

SEQ ID NO: 25455 - protein, 382 aa, Oryza sativa
  Clone ID: TF_OsC2127_2.pep
MRGGGGGDAGTSSRGGGSGGAPARPRRFPEAAQPEIMRAAEKDDGYAAHVTEACRDAFRHLFGTRVAVAYQNEIKLLGQSLYYLLTTGSGQQTLGEEYCDISQVATSHGLPPTPARRILFILYQTTVPYLAERISSRIVARGIALEDSQLDDHSESDSSSIGTAAQPSPIRNSPSRSLSFSHLSRLRGRVHTLWEWVLRKWPSMLPFAQDFIQLTIRTNLMFFYFEGLYYHLPKRAAGIRYVFIGKPLNQRPRYQILGIFLLIQLCILGAERLRRSRGVPVLNEDGNIISDIRHGKTADLATSSELLRLSVSSTSCYATEFYLKKKATKHPVVRANAPFVSVPVRIPLPQPVAMSSAGVALWSGVMRSLNAPYAELRLHIRV

SEQ ID NO: 25456 - protein, 146 aa, Oryza sativa
  unsure (1)..(146): unsure at all Xaa locations
  Clone ID: TF_OsC2127_9.pep
IGKPLNQRPXYQILGIFLXVQVCILGAERLPRSNLSTIASSINQISSGGYPSSTRPGVPVLNEDGNIISDIRHGKTADLATSSEASSGKSKCTLCLSTRQNPTATTCGHVFCWSCIMEWCNEKPECPLCRTPITHSSLICIYHSDF

SEQ ID NO: 25457 - protein, 155 aa, Oryza sativa
  Clone ID: TF_OsC392272_1.pep
SPEHGDHRTIAAAPRHVQEAAGSHGSGRGLALYFGAPPALPEADRRTIAAAPPEGYSNGRFGSVPACSEAIAALEETSAGEAKEKDCSVCLEAFEEESDKPMRKMPCCHAFHESCIFEWLQVSRLCPLCRFALPTQAEAEAGLWPLPTPGSGSGT

SEQ ID NO: 25458 - protein, 200 aa, Oryza sativa; identical to SEQ ID NO: 18493
  Clone ID: TF_OsC48373_1.pep

SEQ ID NO: 25459 - protein, 717 aa, Oryza sativa
  Clone ID: TF_OsC91370_1.pep
MAFGREKGIQGNTMRESRAIEGPHVLRQTLSNGCNCSTKLFMAVKEAGGPNAKAGCSIVVLEKQSWRKEEKEMETRGVRKRQLRRTFHGGGGRLTRGADVDESHAAHESRRGANGRICLRGGGHVRGISAPCAETGLRKVEDSGRSISTTGFLRRGSSVSLKDQGNEERPNKTKLNPMNARWADSKEKPRYLREPFRSSGTKAACPSSSKAPVRKYFEEKQGRTFLGEADNAESSSRRTEANRLQCSKKAVVEEDVHPYGQQDEPEDLLSTSTTEDQPAELDPELLDSSVSSGVSAHAIGSVVRNAALRSKSRQQKGKEELCQIRPQTASAFVNRSTIPRNSTNGVKSSNAAGPGVQRRTLKNLGCTSISDVLPSGCSSANSIHNKRAEVMRNRAFDGESSSRPRGLNGHSSLGHSPAMYSGITGPRVRTAEQSASQQTRTSSRSIQESADSSRIRRPSTQHARVRVPNEREDSVFALRETLARDRQPEWAHFSLGEAAPRRSMRPFSMELPHEIYSSSRQGSSNQTARSRSSYRPDESPPQMFHGLLVERENYRRINMEGIAEVLLALDRIEQDDELTYEQLLVLETNLFLSGLGLHDQHRDMRMDIDNMSYEELLALEERIGSVSTALSDEQLVKCLKRNVYKLPNSDLEANRAVLDDAKCSICQEEYIEGEEVGRMQCEHQYHVSCIHEWLRQKNWCPICKTSAIPSEMDKGGT

SEQ ID NO: 25460 - protein, 501 aa, Oryza sativa; identical to SEQ ID NO: 18497
  Clone ID: TF_OsC4561_1.pep

SEQ ID NO: 25461 - protein, 502 aa, Oryza sativa; identical to SEQ ID NO: 18498
  Clone ID: TF_OsC49241_2.pep

SEQ ID NO: 25462 - protein, 181 aa, Oryza sativa
  Clone ID: TF_OsC280106_1.pep
MEILVSALLLLLVPPLSALLAVAAPSLAWPSGSSSVRKLIAKKVAPEQAARDELLRVARYSSASAAAAASAVQQPGGGESSRPAAAAADDGGRPDQCAVCLSDIEEGDEVRELRCRHLFHRGCLDRWWLSARPPATCPLCRCRLLQSPSAAADDGDGDGEEDSDSDMVMFMAYLRSSSTWL

SEQ ID NO: 25463 - protein, 271 aa, Oryza sativa; identical to SEQ ID NO: 18509
  Clone ID: TF_OsC180148_1.pep

SEQ ID NO: 25464 - protein, 179 aa, Oryza sativa
  Clone ID: TF_LIB3599-059-Q6-K1-A9.pep
HASAHASARRADASASRPHPSPVDFDADFPSDFDRPIEHSRSGLEPLAVAAIPTMKYNCEAFHSEDDTQMFCCNRCSICLSEYKEKDILRIVPICHHNFHLYCLDAWLLKQTTCPICRISLKELPDGKSTVSSAPTMSQPPTLPESSVNPTSHFLPVHQEHRSHQDGPDMPESVEVVIE

SEQ ID NO: 25465 - protein, 202 aa, Oryza sativa; identical to SEQ ID NO: 18513
  Clone ID: TF_OsC120717_1.pep

SEQ ID NO: 25466 - protein, 178 aa, Oryza sativa; identical to SEQ ID NO: 18515
  Clone ID: TF_OsC344717_1.pep

SEQ ID NO: 25467 - protein, 115 aa, Oryza sativa; identical to SEQ ID NO: 18514
  Clone ID: TF_OsC4737_1.pep

SEQ ID NO: 25468 - protein, 423 aa, Oryza sativa; identical to SEQ ID NO: 17204
  Clone ID: TF_OsC359_7750.pep

SEQ ID NO: 25469 - protein, 260 aa, Oryza sativa
  Clone ID: TF_OsC335815_1.pep
MPSSSSSSVAAAPSGSNGTRRDGGSGSVTGCLPADQACFALSSSASSPGYLHASATTTRRDASATVARACCTTASYVVVLGISFGSLLAILLILCIIRWYLVWRSARPRRDDGAADEAVGSAKKRSAGLDDDAIAALPVFAYKQREEGGGGAVGAAEEEEEERECAVCLPVMADGEAARRLPRCMHVFHRGCVDVWLREHSTCPVCRAEVVVRPAGAARVEKLPESSASRALTSPVPAPAPRPTGTVVDDGRERDLEAQQ

SEQ ID NO: 25470 - protein, 474 aa, Oryza sativa; identical to SEQ ID NO: 18516
  Clone ID: TF_OsC164176_1.pep

SEQ ID NO: 25471 - protein, 188 aa, Oryza sativa; identical to SEQ ID NO: 18518
  Clone ID: TF_OsC18246_2.pep

SEQ ID NO: 25472 - protein, 293 aa, Oryza sativa
  Clone ID: TF_OsC394647_2.pep
MAATHPGSSREHASAAAMTLCLARWQGGGNDHSGSTWRGGNGEEETSAAARCGAEAVAVATMLGGGDEAMTVAAQRQEEVTALAAVASWRSQRHEVKADGEQAAGEENQAAGVLEHIPGPGEPGNSIVQERVIISNPMNTLLFLHIYTGGKASSAGGDVSAAVVSSMATSRGGERSHRHIGQVRCECSHMSMHSTWNRCLHDGISRTISPACSSSRHIEHGSPFPASRSPPPLSPYATRRAMGAYMVTHGKNLWSQHAFQVTADLESGLYECECKTWITQAAHMLRGCSAISR

SEQ ID NO: 25473 - protein, 303 aa, Oryza sativa
  Clone ID: TF_OsC147962_1.pep
EIDPHRAAAAAAAAAAVAMSSSSSSLLSSLATLGLGYSIAIALGFLVLLASLLLASYFCFRRGGGGGHFSGVLTPSSSSSHLSITVPRVLFVAEGSESPDAYSSGVAAASSPVGLDPAAIASYPKVPFYSGAGADADAMCSICLSEYADGEMLRVMPDCRHRFHVCCLDAWLRRNASCPVCRSSPIPTPVATPLATPLSELVPLSQYAADRRRSRGLCLGYLEKFGRCKTTTRDHALGENRSLVTCLGKRRGQGELAVVIVAATEVALPLHVADEVVSPLQVATAKIRRCQWPLDCREKGAGG

SEQ ID NO: 25474 - protein, 197 aa, Oryza sativa; identical to SEQ ID NO: 18520
  Clone ID: TF_OsC401067_1.pep

SEQ ID NO: 25475 - protein, 572 aa, Oryza sativa
  unsure (1)..(572): unsure at all Xaa locations
  Clone ID: TF_OsC337609_1.pep
MAMGGIRCPVCFAAMAAGQAIFTAECSHTFHLRCVPGGAAACPVCATPWRDAPSPLTTSSIPAAYDDDDPVEPVATAARNSSGGGGGVLVLKTHCEYPALSRGAARDGFAVLVHAKAPAAAAEAAGRAPLDLVTVLDVSTSMTGDKLALVKRAMGFVIDSLGAADXRLSVVAFATPXARRVLPRLRLTRMSEDGKATAKRAVDALVANGNTNIRDGLDVDAKVLDGRRHTDAVASVILLSDGQDNQTMGYRGRFHMTDFKAAATSYDVLVPPSFTRAGGGERCAPVHAFGFGTDHDAAAMHSISEITGGTFSFIENLAVIQDTFARCIGGLLSVAAQNARISVECLDPGVRVRAVKSGRYESRIDAEGRAATVDVGELYADEERRFLLLLDVPRADGDAAVATRLASVRCTYRDTATEQSVDVAGEEDAVVLRPAVATGVAPSMEVELERERVRLEAADDIALARAAAERGAYGEAARILDARREALSRSAPAASGDAMCAALVAELRELSERVADEREYAQTGRACVLAGMSSHGQQRASSVQLGELRVRVFVRVRDTGDAEDGEALGDFA

SEQ ID NO: 25476 - protein, 252 aa, Oryza sativa
  Clone ID: TF_OsC4182_1.pep
MFHGGRPLSLRGSLKALEADIHHANTLAHAIHRAYGGACVQMRLSYSSMAPIILNLIQWMDCSCSLSYTLPSYLGLLEVLVYKVYVDEDASISTNIERRASLKEFYAVIYPFLQQLEGNLMEKDCNEKGWCKEAASGGGGRKLYADDKDDEREDECGICLETCTKMVLPNCNHAMCINCYRDWYTRSQSCPFCRGSLKRVRSRDLWVLTGDDDVIDTVTLEKENVRHFHSFIDSLPLIVPDNLLLVYYDYLV

SEQ ID NO: 25477 - protein, 102 aa, Oryza sativa
  Clone ID: TF_OsC42947_1.pep
AAAAGGPSLADRFRSRFRPARFGRRRGGGAGAADCRVCLARFEPESVVNRLPCGHLFHRACLEKWLDYDHATCPLCRHRLLPATTESPSPSPATATPHFARI

SEQ ID NO: 25478 - protein, 123 aa, Oryza sativa
  Clone ID: TF_OsC60386_1.pep
MEGSEELENYFIFNDRYRGMRMDIDGMSYEELLALGDRIGTVSTGLSEDALSKCLDRSMYMATTSGTHEDCERKCSICQEEYSDGEEVGKMVCKHYYHFSCIKNWLRQKNWCPICKSVALNTN

SEQ ID NO: 25479 - protein, 437 aa, Oryza sativa
  Clone ID: TF_OsC240623_1.pep
GCRFRTRVSLPLPTGHHRRSPSIPRAIAASSLVLPLPPHPGEHILRHRCLLRSPFIARASTASSLVLPLPPHPGEHILRHRRLLRSPSIARASEGRRRSSCCFRRIDKMPNRATHWCYACRRPIRVSGQDITCPNCNDGFIQEISEIGGSLNTYGIFDPSFDERRDRSFGMVEAMSDLMRQRMAEMGRNRVLDFHGTRGASSHQGRQPTVRPMLIFGSNAPDRVSSSSEEADILLRQGRRIGADRPNFSRFLVGPSLEALFEQLLLHNNRQGPPPAPQSAIDSMPVVKINLRHLRDDPHCPVCTDKFEVGTEAREMPCKHLYHAECIIPWLVQHNSCPVCRHPLPSSSHRSGSTRSSSTHSNEAISHGVARSDADPVPVARSDDSRNHEMHGSFSFLWPFDSPTPDSSSYTHEGGVGEPTVHDDAGQMTYSEWHYDY

SEQ ID NO: 25480 - protein, 261 aa, Oryza sativa; identical to SEQ ID NO: 18477
  Clone ID: TF_OsC47412_1.pep

SEQ ID NO: 25481 - protein, 163 aa, Oryza sativa
  unsure (1)..(163): unsure at all Xaa locations
  Clone ID: TF_OsC2423_4.pep
MECGIKKEMLQVLPVLVXRPPTRARETRVSVCLADYQPDERLQRIPPCGHTFHIDCIDHWLSTNTTCPLCRVSLLPSPKTASIDPVDLEAQTVEENSSLDVQYQEGRIDENTRQEDQTLQQGSEGPTHQAEENEETSVRVTTEPQVEAEGSPSTTCRPCKTKK

SEQ ID NO: 25482 - protein, 246 aa, Oryza sativa; identical to SEQ ID NO: 18481
  Clone ID: TF_OsC355955_4.pep

SEQ ID NO: 25483 - protein, 403 aa, Oryza sativa
  Clone ID: TF_OsC7776_1.pep
MHASRMEQTTGVSGHEHIIDIPRDSGPSTSTSHSVARENHGEPNPVDRSATRALVPALQAPSAVGAPSAGHTSGARRSDNYVRRHRSPLNSGLWISIEVLVNVSQIVAAIVVLSLSRKEHPQAPLFEWVIGYTVGCFATLPHLYWRYIHRNIVNGENEPAHTLQGSSQNNSTEPSASASERRRNAARNAVLANPRINALFDHFKMALDCFFAVWFVVGNVWIFGGRSSAADAPNLYRLCIVFLTFSCIGYAMPFILCAMICCCLPCIISVMGFREDTNNTRGATSESINSLPTYKFKTKKRRHSSGNEAEGQDGGIVAAGTDKERSLSAEDAVCCICLAKYAHNDELRELPCTHCFHKECVDKWLKINALCPLCKSEIASSSGTSDTRRSDHTDIPVQEIEMH

SEQ ID NO: 25484 - protein, 439 aa, Oryza sativa
  Clone ID: TF_OsC62963_1.pep
MGAREEVREEEGEEGEGVGGKEEEKAAAAAAAVSCSICLDAVVAAGGERSTARLQCGHEFHLDCIGSAFNAKGVMQCPNCRKIEKGNWLYANGSRPTQDVNMDEWAHDEDLYDVSYSEMPFRFHWCPFGRLAQLPSFFEEGESSPPVTFHDFMGQHMFTEHVAAVSSAPGAAHPCPYVAYLHPLPSLASSSSSHVPERTMDGPAYHDPWHPLAGPSDGRPLQSVQPADFHHNHWAHVPNSYPQPNNNNGVAEQQGVPFGTTRAARVDGDTQRRGSSISPSYFSNGSGSRSRAPNVPPMVPQFMRAHGSISEQYQQSSSSSLFAGAHRSGGMRTAPPPPLPENPAFCLFPPGSSGHNSMETDDAGGNRFYAWERDRFAPYPLMPVDCETNWWSSQQSHGTSEPAPAPRRLFGQWIGVGRSSPENRSPEGSSYRQMHTPRM

SEQ ID NO: 25485 - protein, 133 aa, Oryza sativa
  Clone ID: TF_uC-osflcyp016a05b1.pep
LMSLGHYSMRVCFSGMAFYLRDAVLLLNLRALIASFWKRIKTYAKLRKALSSLDGALPDATYDEICAYDDECAICRGPMARAKKLSCNHLFHLACLRSWLDQGLMDGYSCPTCRRPFFLSSQGHTRSTAEVGN

SEQ ID NO: 25486 - protein, 521 aa, Oryza sativa; identical to SEQ ID NO: 18528
  Clone ID: TF_OsC260574_1.pep

SEQ ID NO: 25487 - protein, 156 aa, Oryza sativa
  Clone ID: TF_OsC32442_1.pep
MGGCCCSSTRSASVGAPVYIYHQQNPASTIVAIDKNLDTSTPDTYRAPPTPLPYDVGLVLKDNPDLEKTGIKRKIHEHKESLMMDDNESLQKCVSEDKPDEEDVCPICLEEYDEENPRSMTKCEHHFHLCCILEWMERSETCPVCDQITMINAMYE

SEQ ID NO: 25488 - protein, 156 aa, Oryza sativa
  Clone ID: TF_OsC30400_3.pep
MYRPGSRTLLTQEEAHEIIRERLRSDIRRGRIELDADFLQQLVDQVRDHILQRQRRGTATAIAMDGVVEVEDAYRNGGFGAVPASSKAMAELQEAMASDARERGCAVCLEDFEAGEKLTRMPCSHCFHATCILDWLRLSHRCPLCRFPMPTQDQSY

SEQ ID NO: 25489 - protein, 342 aa, Oryza sativa
  unsure (1)..(342): unsure at all Xaa locations
  Clone ID: TF_OsC863_1.pep
HRRIALAVLVTLLLSAFRPCLAQQSNDDTSKHHRSATAGGFTPTTVVVLVALITAFVLLTVFSVLINRCAQARAPPRRAFRSTASHQPVGGAAAXSRASRGLDKEVVEAFPTAVYGDVKARMAAKSGPLECAVCLAEFADSDELRVLPACCHVFHPDCIDPWLAAAVTCPLCRANLTAPPVSLAAAESSDLTAPEEAVQEEESEELDEASLMATFTPESVIDFGATHDHEFDRAGYPHYRRTQSAMDAAPDRHTLRLPEHVMKELAADRRHRRAASLAGYPDSVERTPRTWTHSATPDAAALAKFFIWHCRNRCSGKRKAKERCSGMNQTETRPAIADSSGG

SEQ ID NO: 25490 - protein, 353 aa, Oryza sativa; identical to SEQ ID NO: 18529
  Clone ID: TF_OsC863_3.pep

SEQ ID NO: 25491 - protein, 257 aa, Oryza sativa
  Clone ID: TF_OsC47750_1.pep
MEAVAVHASFSSYSPPVVAGGRDDAGSSRSMSRLPARVAGAVARGIVTFVFATVGTILGAITGGLIGLATESGMVRGTGIGAISGAVVAMEVVDSSVAMWCSHDSGIWSVLYVLDVIWSLLTGRLVREKVDPAVQNAVDSQMNAADAPFRESAPTLAEMFDTGIPGVAAAATGMPADAIAALPVTTFAAAAGGDDRAGCSVCLQDLEDGERARRLPECGHTFHLRCIDSWLLRHASCPLCRRTVVAAAVAVDDVVVG

SEQ ID NO: 25492 - protein, 158 aa, Oryza sativa; identical to SEQ ID NO: 18537
  Clone ID: TF_OsC400246_1.pep

SEQ ID NO: 25493 - protein, 246 aa, Oryza sativa
  unsure (1)..(246): unsure at all Xaa locations
  Clone ID: TF_OsC50873_1.pep
RLGQARSVVPSDSVFPEVELAEDDAVVCSRVTPDGGGEVVAWCKIRRGGDVSAATIWNLSLDAIIVDGRVIQQEAVDIKPGSEIVPGPQKDGYLLYTFDITGLNDXDKNNIKIVLGIENAKCSICLNLWHDVVTVASCLHNFCNGCFFEWLRRSSANSRDKSQSAACPQCRTAVQSVGGNHFLHNIEEAILQVFSSLQRSDEEIALLESYAPVKTNIVRHAFIPFPWSYAGAMILRSTMGINISRG

SEQ ID NO: 25494 - protein, 255 aa, Oryza sativa; identical to SEQ ID NO: 18539
  Clone ID: TF_OsC105470_1.pep

SEQ ID NO: 25495 - protein, 568 aa, Oryza sativa
  Clone ID: TF_OsC3910_2.pep
MIRRGILFSMGLVGFLFWRSTVSLTFGVAPGLAILALGVLSLKVWRSGKSSLPFILAQAAVAAAVAWKHFQAYTTPVAGSPAAAAEMIRLQTYAAFSLMATATAVYYAFSSREQFYPAMVYLSTSKICFVLLLNTGLVAMCVAWQLVKRLFLGTLREAEVERLNEQAWREVVEILFAVTIFRQDFSVSFLAMVAALLLVKALHWLAQKRVEYIETTPSVPMLSHARIVSFMLFLLVVDCLFLSNSAQVAHTQAGRRLLQSSFSFGDMLMEGQWEKKAVYTFYLELISDLVHLSLYMLFFIAIFLNYGVPLHLIRELYETFRNFRIRIADYVRYRKITSNMNERFPDATADELNASDATCIICREEMTTAKKLLCGHLFHVHCLRSWLERQHTCPTCRAPILPPDNGRTAARPHGVHPGVQPGNGTPGSERAAGENISRRQAKLEAAASAASLYGRSFAYPPANNLNRYSTPPQSTSNGPQSGEASTSNQSPKGHATADPSAPTFYARGAVSSVTTTRELESSLQKAYENAIKSQIERLMQAACKFLDMSVVNTSLTALKLHAWYEPLG

SEQ ID NO: 25496 - protein, 514 aa, Oryza sativa
  unsure (1)..(514): unsure at all Xaa locations
  Clone ID: TF_OsC59119_1.pep
MNCTKGGGFPLLFCAVICLMAQQGACNVVLIANNTTLSFDDVEATFTPEVKDSGVNGAIYAVEPLDACSPLRKKAANGPVSPFALVIRGGCQFDDKVRNAQNAGFKAVIVYDDEDSGVLVSSNFTVAGSSSGIYIYAVFLSKASGEVLKKYSGQSDVEVWILPVYENSAWSIMAISFTSLLAMAAVLATCFFVRRHQIRRDRGRIPVTREFHGMSSQLVKAMPSLIFTKVQEDNSTSSSCAICLEDYSFGEKLRVLPCRHKFHATCVDMWLTSWKTFCPVCKRDASAGTSKPPASESTPLLSSVIHLSAESTALSSFRSTVAVSPPRPIRRHPSSQSTSRAYSISSAPRNYNLQRYYTNSPYISTSRSNVDLANMSSQWSHTPHQASMHSLRSGHLSLPINIRYTIPHVSRSDYGSASLGLSHDSCSHHGSPSYYHSSLGQQRSYLMHRTESGPSLSTMVLQSPQXVSSSTMANQEKSISCGLTRSLRQAYVQHCLDSDGSLSAVTSDQSLPRC

SEQ ID NO: 25497 - protein, 129 aa, Oryza sativa
  Clone ID: TF_OsC273200_1.pep
CAVCLTEFRDGETLRLLPRCRHAFHRGCIDTWLRAHVNCPLCRAPVQISDKSAAAAAAAAANAAPGAAAAVPGGAPAPNPRNAAAAEADRGELQGSPERGVRRAASMVTLPRRPWPEVSLRSPASNSGR

SEQ ID NO: 25498 - protein, 76 aa, Oryza sativa
  unsure (1)..(76): unsure at all Xaa locations
  Clone ID: TF_OsC359_5960.pep
GGEETAETHVCAICLGEFADGEKVRVLXRCRHGFHVRCVDAWLVSHGSCPTCRRQVIGGGGSTPPPDSDTIAVVVA

SEQ ID NO: 25499 - protein, 107 aa, Oryza sativa
  Clone ID: TF_uC-osflcyp009g02b1.pep
FSRAAAKAVVESLPTVVVDAARGDTQCAVLQDGMEAGERARRLPCAHLYHDGCILPWLAIRNTCPLCRHELPTDDPEYENWKARRAAAGGNGDGDRYGIIRQLSMID

SEQ ID NO: 25500 - protein, 166 aa, Oryza sativa; identical to SEQ ID NO: 18546
  Clone ID: TF_OsC270054_1.pep

SEQ ID NO: 25501 - protein, 338 aa, Oryza sativa; identical to SEQ ID NO: 18549
  Clone ID: TF_OsC52635_1.pep

SEQ ID NO: 25502 - protein, 233 aa, Oryza sativa; identical to SEQ ID NO: 18550
  Clone ID: TF_OsC359_6976.pep

SEQ ID NO: 25503 - protein, 357 aa, Oryza sativa
  Clone ID: TF_OsC15014_1.pep
IFEIQSNDYPCYHLEGGWRNVRGRHDHSTIHLEQSPAAACPSSSINVPPYHPNANGPFGSAPVQRDRAPLSVHPRILPPGPDGSSIAFRERPYYPAPQSTNISAPVPTLPISCDSAPFAHGGYAPRSAHRNNLRTYPPPAFASSSNPGAVSHEPAIPSYPPAAPSYPPATSAASSSVQPFHAEAAAHLRHPRHVSVGGSGSARSRRMRDSYHGFHHLMIEDNNLGRSAAERFMMLDQLVIHESREAFDPHWDMRLDIDDMSYEELLALEERIGHVNTGLADEKISGCVMEVACCSSSHLQDDQDNERCVICLEEYKHEDTLGRLKCGHGFHCNCIKKWLQVKNTCPVCKAAAADEGS

SEQ ID NO: 25504 - protein, 192 aa, Oryza sativa
  Clone ID: TF_OsC72920_1.pep
MEVAAAEDALEESGVAVYLPRLLAGVISGALTGLFALAGALTGAVTGALAGRASDSGVLRGAGLGAFAGAVLSIEVLEASRAYWCSDRLGSHGTSSMVSISDFGHDDLYDIFGDCSSKGLSRESLNKLPHYVVTDQTRNSFGEDLSCTICLQDIVTGETARRLPNCSHTFHQPCVDKWLVGHGSCPVCRQCV

SEQ ID NO: 25505 - protein, 583 aa, Oryza sativa
  Clone ID: TF_OsC56795_1.pep
GAPCSAGSGGATSPGTTRRSRSGSARRRRRRRRGSRRSGPCGTTRGGSAGSRGSSTGRCTTYSVTARKNQSVNANYLLNFHYDPISRPQPRGPRTYPTRRQRKIRPYNKDLFLQANFKFVVLDTGSYEIELMDPDKMLQWEDIVCVRYYSPCEVQCPICLESPLCPQITSCGHIYCFPCILRYLLMGKEDYKGESWKKCPLCFMMISTKELYTIYITQVQHFHVGDNVTFTLLSRSKNSLTPSIKNLTDESTIDEDPCSAFSKFILTSDVELSVREAKTDLVNWLHMADLGLVDDLEKLPYVSTALEQLEERMKYWSEYKLLEYIKIDQSTTNSSGNGTQVTARKNQSVNANYLLNFHYDPISRPQPRGPRTYPTRRQRKIRPYNKDLFLQANFKFVVLDTGSYEIGVRDPDKMLQWEDIVCVRYYSPCEVQCPICLESPLCPQITSCGHIYCFPCILRYLLMGKEDYKGESWKKCPLCFMMISTKELYTIYITQVQHFHVGDNVTFTLLSRSKNSLTPSIKNLTDESTIDEDPCSAFSKFILTSDVELSVREAKTDLVNWLHMADGLVDDLEKLPYSTALEQ

SEQ ID NO: 25506 - protein, 465 aa, Oryza sativa
  unsure (1)..(465): unsure at all Xaa locations
  Clone ID: TF_OsC24423_1.pep
MATSGGEDPSGSASSSASALDSLPFSSGNPRIEETRGVVLLHPEPPAASSSSLLPVGRKPRVCVPGVPNHLTYADFGRFCASWASHILETRIIRIDGVEDQYGVLIKFDTQSFTDSFYMSFNGNRFSSLEGNVCRVRFVEDVHYTQLIEHAHSSVTSSAEQPTCPVCLERLDQDPGGILTTICNHSFHYSCMSKWADSSCPVCRYCQQEPEKSSCXVCGTSENLWICVICGHVGCGRYKGGHAIEHWKETQHCYSLGXRAAANYVHRLIQLETDGNLVEYNFYGDHSVDGMCSTCNGDAGISEALLDSKMEAIVEEYNDLVTSQLEKQRNYYESLLLEVKEDNEKEIAAATEKAVGIKVQKLQAKLDKCMEETGFLNDIHENLVKNMEMWRERIQKVKEREQAAIRLKDEKIEKLEEELRDLIAHFERQNTVAEASESMSSDINGSTILSVPSESSASSNSSIRN

SEQ ID NO: 25507 - protein, 418 aa, Oryza sativa; identical to SEQ ID NO: 18553
  Clone ID: TF_OsC158099_1.pep

SEQ ID NO: 25508 - protein, 339 aa, Oryza sativa
  Clone ID: TF_OsC359_8020.pep
MASSPVSYWCYHCSRFVRVSPSTVVCPECDGGFLEQFPQPPPRGGGGSGRRGAMNPVIVLRGGSLSGFELYYDDGSGDGLRPLPGDVSHLLMGSGFHRLLDQFSRLEAAAPRPPASKAAVESMPSVTVAGSGAHCAVCQEAFEPGASAREMPCKHVYHQDCILPWLSLRNSCPVCRRELPAAAAPESEADAGLTIWRLPRGGFAVGRFAGGPREQLPVVYTELDGGFSNGVGPRRVTWPEGDGHVDGGEVDNRVVFLLEFVPDEIKDSAFVSPDSIRRHRRGLAVPISEVDIRRLVLTYVVASVVPCMLTVVGSDKALSALGIPSRSFLRFLGVLISTC

SEQ ID NO: 25509 - protein, 383 aa, Oryza sativa; identical to SEQ ID NO: 18557
  Clone ID: TF_OsC299188_1.pep

SEQ ID NO: 25510 - protein, 705 aa, Oryza sativa
  Clone ID: TF_OsC84313_1.pep
MPQSFSLSAMGRRTWQWHAIAALGVACAAAAAVAADRRAFSVTSAAGGGAAAAAAVVAATPEEVGILRKVANFLWQTDGNSYHHVWPEMELGWQIVLGSLIGFFGAAFGSVGGVGGGGIFVPMLTLIIGFDPKSSTAISKCMIMGAAVSTVYYNLKLKHPTLDMPVIDYDLALLIQPMLMLGISIGVIFNVLFPDWLVTVLLIILFLGTSTKAFLKGVETWKKETIIKREAAKRLEQTSEEPEYAPLPTGPGAVADAKRPSDEAASLMKNIYWKEFGLLAFVWMAFLVLQVTKNYTATCSSWYWILNLLQLMFLFIPKKWKPLKITYSKSFTLYGIKIPVSVGVTMYEALGLMSGKRVLSSKGNEQTTLKFHQLCIYCFFGITAGVVGGLLGLGGGFIMGPLFLELGIPPQVSSATATFAMMFSSSMSVVEYYLLNRFPVPYALYFVIVAFIAAIIGQHVVRRLINWLGRASLIIFILAFMIFVSAISLGLSLEITGAKGEKRTFCVFLQGAMEPSSLSLRLKAAIYDLFNSNSLQTYVPFRIRHINGGGNPRPRQEDPGLTDAEFKKAMEQLNKQAYRSLDPHKMVESNRGGRNHAKSARSKPAPNNTEEEKACTICLETFLAGEQVVATPCNHIFHQECITPWVKGHGNCPVCRFALCERNTVSDNSQSGVGEVEVDLDLLEMMRAMEEIFSRVTFSNFMPYN

SEQ ID NO: 25511 - protein, 352 aa, Oryza sativa
  unsure (1)..(352): unsure at all Xaa locations
  Clone ID: TF_OsC170841_1.pep
MAGDRRGGGGVVSADGERRRGIRRLLLPRGEGSSSSSPPQPPPLQAEEGRRKGFASAALRGLGCTSAAASQAYAPGAGAAAAAAVRSSADWHGRRRRRGKEKRKERGGGGGGGGGGHLVGGGIGADVWCAPGIPFAAEASSVDCVVARHQMVGRGRGGDAERPHRERPCLSRRVTVQEQISSSFMDSPPPPHLDARRALXGADLLPSGRLRRMRGYRHSPVGLEEEIMMFQTRVLLGGMSMYDRYQDWRLDVDNMTYEELLELGDKIGYVNTGLREDEIVRNLRKVKHPAFDSSFRYSTEMEKKCSICQEEFEANEEMGRLDCGHSYHVYCIKQWLSQKNVCPVCKTAVTKT

SEQ ID NO: 25512 - protein, 320 aa, Oryza sativa; identical to SEQ ID NO: 18526
  Clone ID: TF_OsC16293_1.pep

SEQ ID NO: 25513 - protein, 167 aa, Oryza sativa; identical to SEQ ID NO: 18563
  Clone ID: TF_OsC32442_2.pep

SEQ ID NO: 25514 - protein, 326 aa, Oryza sativa
  Clone ID: TF_OsC87299_1.pep
MADGGGGGEAGSGGSAPVCSFVRKPPKNIRKRPTAPAGSDDDDEDGSGAIAAARAKKAPSSTSKLFFSSADGSSEPRRFQYESSRTIQASTDSRATATLETETEFDRDARAIRERQLKQAEESLKKNPSAPASSSGSGSGEVYKGIHGYTDYKAGFRREHTVSSEKAGGSHGPLRASAHIRLSARFDYQPDICKDYKETGYCGYGDSCKFMHDRGDYKSGWQIEKEWEEAEKARKRRIAMGGDGSDYEAGEEDDDDDEEALPFACYICREPFVDPVVTKCKHYFCEHCALKHHSKNKKCFVCNKPTLGIFNAAQEIRKKMAQDKKQ

SEQ ID NO: 25515 - protein, 215 aa, Oryza sativa
  unsure (1)..(215): unsure at all Xaa locations
  Clone ID: TF_OsC45498_1.pep
MVLMAGMLPGVECARRRRLRQGGGEAPCGTRRPSLCLTIVDQILNLQSPSXGIAIMLQQQRSACEEQQPGWWTLDSNVREAKERLDQKLRSQRESAVVVVKRHNKAQVAGTSSDGGEQSTATTAAPQWEVYTRKEGRRRMWFRRLGRRPTPEEEEECAVCLEELRAGEAVAHLPCTHRFHWGCAVPWVQTASRCPVCRAAVYLTSPAPAASNNYN

SEQ ID NO: 25516 - protein, 325 aa, Oryza sativa; identical to SEQ ID NO: 18566
  Clone ID: TF_OsC186358_1.pep

SEQ ID NO: 25517 - protein, 361 aa, Oryza sativa; identical to SEQ ID NO: 18571
  Clone ID: TF_OsC31425_1.pep

SEQ ID NO: 25518 - protein, 224 aa, Oryza sativa
  unsure (1)..(224): unsure at all Xaa locations
  Clone ID: TF_OsC108211_1.pep
GGPFPGSPRRPSRLSISPPVRRASNLPVASTASLGFGSLPPSCRHHGXXVPGRDVFVVMATVGAVDGVEVVSALIGQYYDGLALELVVFSLAIVVLRYAAVLYANHLVDSLSELQAAVGAGIGGSSSGGGLDSAAIARLPCFVLPPRRGGSAAAAAAECAVCLGAVEEGETVRALPCCPHAFHARCVDAWLRLRPTCPLCRADVPVPARPTAPRRRHVPRGTVE

SEQ ID NO: 25519 - protein, 119 aa, Oryza sativa
  Clone ID: TF_OsC108278_1.pep
HLVDSLSELQAAVGAGIGGSSSGGGLDSAAIARLPCFVLPPRREGSAAAAAAECAVCLGAVEEGETVRALPCCPHAFHARCVDAWLRLRPTCPLCRADVPVPARPTAPRRRHVPRGTVE

SEQ ID NO: 25520 - protein, 750 aa, Oryza sativa; identical to SEQ ID NO: 18570
  Clone ID: TF_OsC384049_1.pep

SEQ ID NO: 25521 - protein, 532 aa, Oryza sativa; identical to SEQ ID NO: 18575
  Clone ID: TF_OsC5813_1.pep

SEQ ID NO: 25522 - protein, 251 aa, Oryza sativa; identical to SEQ ID NO: 18577
  Clone ID: TF_OsC158582_1.pep

SEQ ID NO: 25523 - protein, 300 aa, Oryza sativa
  Clone ID: TF_OsC11064_1.pep
MDADEAAGSSRRMDLNLYLGLPRAPRPRRSDLGSDLALSTPMPSSPSFSAASVDAPPPPPELSHPPYSPSHADLSPPLQEVYSLYNPDDPPASETHLPPYAPPPAPVVSELPDDLEFGLHPPPPLPVTGGFSSRLEADGSVRGGLGRTFRHSVLKLTQLGVMLPQSQNGPSSLLPDGIDWLRGLTLLGYEDTERFASAMSDFRRITGPSQYGASASSSNPPNLESTFDRTHVVAAPSADQASNSSTAAVIQGDAGISESAGEPSNAGSSRSLRRRGRSSALGSLDADGGGLQRNKRRRIN

SEQ ID NO: 25524 - protein, 199 aa, Oryza sativa; identical to SEQ ID NO: 18580
  Clone ID: TF_OsC137168_1.pep

SEQ ID NO: 25525 - protein, 679 aa, Oryza sativa
  unsure (1)..(679): unsure at all Xaa locations
  Clone ID: TF_OsC25552_1.pep
MLGILIDVALRLDHSAMSEVILCVKDSLGVQLARSEFLSXALNGQNSSEDVIVALENHNDYLKEVVDNLRQAVSIINRKHEKYLDEIEAFKNNQSRELHEVKCLSGELEESMAELEESRRKLAVLQLQTGGGSLMNTSAPNGVNGSVSTDKSSDKGMGWRDLKDAVEEAKTLAANRLFELHETQEDNLILSKQLEDIQDQLKDENYIVTSKPYTILSDQLHHLNAEIERYRGLVEVLQAKIEDLEHEIQKLMAEKNDLEIKAEEALQDSGKKDFKDEIHVMAASXLQNERNQLLPKEEKMLAKAESVDAVQQSITTYKAKIEDLEHEIQKLXWLKRMNLEIKGLRKPGQDSGSKRQQGEDPSCERATHXREGIVGHSIEXRSKNAATEPLVLREKADYXEISNLRRKGHNGCNLXELMKLNESKRIKNAELDGRLSEIETIGQXHXDMQTLNQHHLKQVADRDDFNIKLVSDSVKMKQAYGSLLAEKNMLQKQLQHVNSSLESSKLKITSGEEQMKTYVAQAMKSSSENRHLAISLERTMLEVSDAEKELKWLRSATGSAEKEYEINQKKIAELKMELERERNERIKLEEEYEEVKNEVSELTSETEETTIQKLQDEIKECKAILKCGVCFDRPKEVVITKCFHLFCSPCIQRNLEIRHRKCPGCGTPFGQSDVREVKI

SEQ ID NO: 25526 - protein, 459 aa, Oryza sativa; identical to SEQ ID NO: 18582
  Clone ID: TF_OsC25552_2.pep

SEQ ID NO: 25527 - protein, 345 aa, Oryza sativa; identical to SEQ ID NO: 18585
  Clone ID: TF_OsC29049_1.pep

SEQ ID NO: 25528 - protein, 78 aa, Oryza sativa
  Clone ID: TF_LIB3433-011-Q6-K1-F4.pep
PATACAICKDDLPLAAPARRLPCGHLYHSECIVQWLEMRNSCPVCRSRLPSDEPQDAAAPSDPGPAPMRITIRLSTNR

SEQ ID NO: 25529 - protein, 455 aa, Oryza sativa
  Clone ID: TF_OsC13046_1.pep
MARHHGNHSLLPEMVQPNNEQLNQPLPLGQKLFVHAGNDAALKIGPSYHGNVAIRSNDLPSSSRVAQYSGHRVKNTGTLHNSYVHYPAGSSGGHVSYNPQTEPVITYPHRSEGEFARGSSQIDNRTAAVKRKNPVIYPEYSINGDGYCAGSSSSTQFSNYPQPAPFSESLHRQMPPSVGPINWNDQSLHMYLNDYVGASGMHSGEMPYTMGSSNSSVPVPTLQGSSSSAIFASGVFAPRHVHGDTVPSYIHLPSVASSSSTAIPHEVIIPSYQPATSATTSTPMRASQPLPVRAVASSRHARNVLIGHANSGRNRRARSSYYGIQPLMIDAQQLIMMQQFALRESREAQDPHRAMRLDIDNMSYEDLLALGESIGNVCTGLVDEKISGCVREVIYCSSDEQQNDQDDGKCAICLEEYKDNSLLGILKCNHDFHTDCVKKWLKEKNSCPICKSAAA

SEQ ID NO: 25530 - protein, 415 aa, Oryza sativa; identical to SEQ ID NO: 18586
  Clone ID: TF_OsC159094_1.pep

SEQ ID NO: 25531 - protein, 301 aa, Oryza sativa; identical to SEQ ID NO: 18590
  Clone ID: TF_OsC336525_1.pep

SEQ ID NO: 25532 - protein, 133 aa, Oryza sativa
  Clone ID: TF_OsC336525_2.pep
YFISSDPDTPPHAGGPPTSSIHDSSFVSGPSSSRPALATVITVTVSDDAAAAAACAVCTDALQLASPASRLPCGHLYHAHCIAQWLSLRNTCPVCRRSVPMRTEETAPPWSPPTETDQEAVPSPPPTTTRRLI

SEQ ID NO: 25533 - protein, 280 aa, Oryza sativa
  Clone ID: TF_OsC62541_1.pep
MAAAAAAAASASSSSSSSSSAESVPLPTTTLPIDKAAAVGGGGDRAVDCGVCAICLDKIALQETALVKGCDHAYCVTCILRWASYKQTPQCPQCKHPFDFLSVHRSLDGCIHDYMFEESVCLLLRATWFEPLIVEAHEEALDEEELYHIYQYDDGVEDDLDEEAYYMSRSPSIRIGNRRWGDNGYVRGGRKEARPVSRQSLNDTDAGPSRTPKKKDVSASGSGSVSKEVAGRRAKRALKREAADKAAAEKHLKHLQRLGLRKAPEATAEATPEVEPQLNE

SEQ ID NO: 25534 - protein, 299 aa, Oryza sativa
  unsure (1)..(299): unsure at all Xaa locations
  Clone ID: TF_OsC271396_1.pep
MKFGAIYEEYLREQQDKYLTKCSHVEYKRLKKVLKKCRVGRSLQEDCPNGDQQEGNNESPDICKCNSCTLCDQMFFTELTKEASEIAGCFSSRVQRLLNLHVPSGFLRYIWRVRQCFIDDQQIMVQEGRMLLNYVTMNAXIAIRKILKKYDKIHGSVSGRDFKSKMQTDHIELLQSPWLIELGAFHLNCNSSDIDETVGFLKNEFFKNFSCDLTEARPLMTMAISETMKYEYSLTCPICLDTLFNPYALSCGHLFCKGCACGAASVYIFQGVKSAPPEAKCPVCRSDGVFAHAVHMTEL

SEQ ID NO: 25535 - protein, 455 aa, Oryza sativa
  Clone ID: TF_OsC23902_1.pep
MAAESSAAAAAGGGERRGPMDLNLYLGLPPLPPPPGRLDVAADYPSLLLNSAATVANEQRGSVVVAAPPPAAAAYSPSNALSAPEQVLVDPVAAWLVDPGEQQPVPPLETPSYMARASSTLPQIFACAALEMLVQTGGAIPPTGLIRGAEIAAASRPMTPENRLRRLIQVSDQHGVGNGRAGTGPVSRSRRANSPEADNLARAIQRSHNSLEASRRQMLDGDGSDATKKDDGCGCNGSFECNICFESAKDPVVTPCGHLFCWPCIYQWLHGHSEHSDCPVCKGEVLEVNVTPIYGRGGGEENSSRNDIQIPPRPSAQRTESLRQQLQRPDTRGGIANMVRRLMQNQDIVVGQAASSAPRPRGRGRRQAKQDAPSAPATQQQVVNADAGSGNQAPLPPPDANGAAPAAAVAPQQSSSVEQASTSSTVGVIAGGPAQGRRSRVSESTPARRTRRRHQ

SEQ ID NO: 25536 - protein, 928 aa, Oryza sativa
  Clone ID: TF_OsC138281_1.pep
MSDHQFAGQPDVQCLVCTRPFTLDAQVTDTFEALAICRDCKMTVLNDDERDEITSTYRQNTRRRQISRTASIDFLEDAFLQEFSQLIDLARRQGRETDIDSSSVAPQHASFNSTPSQSQRWHASDDESDGLNYVDSVFGEIESAISLGDYGGDSDTSIEEHSVMTRRRISIQLDNDSYMNTDTDIDPMNARLDQWDSDDQEDVEESGFDEIVNTMTQHQQQSHDIQLSGLSEDESEDGVWNWSVSVRQRANVTNLLDDMEEPEMRTTFVGNPDDYVDARQFEMLLEQFAEDNDSRRGAPPAATSFIENLPSVIISASHQTNGDVICPVCKDPIPTRARAKQLPCMHLYHSSCILPWLSSRNTCPVCRYELPTDDAEYERSKQATTNVRDIQVVEEISDEQEVQVTRQMAAGVIEETNTSEHNVRVDEQPNSARRRSGWLFIAAAPVCFCQNSTQCPVESLALFYLCNILWLRAVKIRKKLRRQGIRGPKPTFLYGNTKEIKRIRQELKFSQKQGTNNFISTLFPHFLLCRETYGPVFLYSTGALEILQVSHPDMVKDIGRWTPSELGKPNYLKKSRKALFGGGLFTENGDEWAYQRKIIAPEFFMDKIKGMIQLIEDATVTVLEAWEDMIDDVGGCREIVVDDYLRNLSADVIARACFGSSFTKGEEIFCKLRQLQKVIAQQDSFVGLSALWKYLPTKSNQEIQMLDEQVRLLILDVAKEQHHYQDSHNSLVNAIIDGAQDGRSAAEAEDFIVGNCKTIYFGGHESTAVTAIWCLMLLATHSEAMEVTMVIQETLRLYPPASVMMQEALTDVKLGNIEVPRGTIVQVPRLMLHLDKEAWGADADEFRPDRFANGVAAACRAAHMYVPFGHGPRTCIGQNLAMAELKVVLARLLTKFAFSPSPRYRHSPAFRLTIEPGFGLPLMVTKLP

SEQ ID NO: 25537 - protein, 684 aa, Oryza sativa; identical to SEQ ID NO: 18560
  Clone ID: TF_OsC11987_1.pep

SEQ ID NO: 25538 - protein, 364 aa, Oryza sativa; identical to SEQ ID NO: 18558
  Clone ID: TF_OsC192138_1.pep

SEQ ID NO: 25539 - protein, 596 aa, Oryza sativa
  unsure (1)..(596): unsure at all Xaa locations
  Clone ID: TF_OsC260254_1.pep
MPAAESCHSRSLSWLVKSCIPADPARHIAVPVLCPTPQPPPPSSPPAPPISALPDDLLLECLARVPRASLPPLPAVSRRFATLLASDAFLHLRRAHAHLRPSLLALSVSDNGCAAQALLRFDASVPVLEVAALPLPPTLLHCGGSVFAHARAVVLGRDVFLIGRGATLRVDALTGAARACAPTLFPRKKFAAAAVGDRIYVAGGSARTAAVEEYDPEVDAWRVVGEAPRRRXGCAGASAGGVFYVAGGVAVSGEGARALEAHVCAGSVDALHVASGTWARPRALPGGGCVVGACGVGDHLYVVASHAVELSFWRWSGATGRGGDGRGWGGWVALEAPPMPRGSVGLGMAVRVAMAGLGTNRVAAVLRLKFCHAIFNSYAARIAARSCHYPAASSTSLQPQSPSIPFDLPTLLLRMHASISFALAPASSPDAASFAPTAADVGGAVCLGYGIAIAVGVLVFISTVMLASYICVRAKAGAAAVLLADDDGGGAPAASAVVVLGLDGPAIDALYPKLLHVGVGDDDDACAGAQCAICLGEFVAGDALRRGHGCGHRFHAECAERWLRVSATCPVCRDSPLPSPMATPLAEAVPLAAHAR

SEQ ID NO: 25540 - protein, 321 aa, Oryza sativa; identical to SEQ ID NO: 18599
  Clone ID: TF_OsC281408_1.pep

SEQ ID NO: 25541 - protein, 164 aa, Oryza sativa
  Clone ID: TF_OsC9428_1.pep
MGFPLVCYCMAIPKPLIALAKLLAAIREALQLMLFVVGICHHPERSGRPAAVDAPLPDEVKDRLPPLEFAQLLAASEHGCHGCDDDEAVAGCIVCLERLEADDVVRRLGNCAHAFHRGCIDRWIDLGRLTCPLCRSTLLPRARPAAGPRGRLGRLATRLTGVVW

SEQ ID NO: 25542 - protein, 449 aa, Oryza sativa; identical to SEQ ID NO: 18605
  Clone ID: TF_OsC20197_1.pep

SEQ ID NO: 25543 - protein, 369 aa, Oryza sativa
  Clone ID: TF_OsC50470_1.pep
MEQGQGDRYWCHHCEEVIEPVEPDMKCPSCDSGFVEEMGSAGFEPSTNLRSDRISLWAPLLLGMMGGSSRRARRLRRQIMEDDDDDDDDEDDEDDSDHELEDLFRRQRRGSSLVRLLQTLRDDLRGLDDIGRDSDRDRERERRERERLRERERERERMRERERERRRERTESLILINSNNEAIILQGTFGPDDNQDDSSNTSSGVSLGDYFLGPGLDILLQHLAESDLNRSGTPPAKKEAVEALPTVNIQEVLGCSVCLEDFEMGTEAKEMPCQHKFHSQCILPWLELHSSCPICRFQLPTEESKNPCESAGGIVSVNDDGDDAGTSSDVDSANQPGSPIFSALSALFSNPSSSSSSSSDDNAPHSSES

SEQ ID NO: 25544 - protein, 380 aa, Oryza sativa; identical to SEQ ID NO: 18604
  Clone ID: TF_OsC29695_1.pep

SEQ ID NO: 25545 - protein, 237 aa, Oryza sativa; identical to SEQ ID NO: 18609
  Clone ID: TF_OsC229931_1.pep

SEQ ID NO: 25546 - protein, 465 aa, Oryza sativa; identical to SEQ ID NO: 18606
  Clone ID: TF_OsC188649_1.pep

SEQ ID NO: 25547 - protein, 430 aa, Oryza sativa; identical to SEQ ID NO: 17624
  Clone ID: TF_OsC30324_1.pep

SEQ ID NO: 25548 - protein, 161 aa, Oryza sativa; identical to SEQ ID NO: 18611
  Clone ID: TF_OsC66084_2.pep

SEQ ID NO: 25549 - protein, 205 aa, Oryza sativa; identical to SEQ ID NO: 18596
  Clone ID: TF_OsC344781_1.pep

SEQ ID NO: 25550 - protein, 247 aa, Oryza sativa; identical to SEQ ID NO: 18594
  Clone ID: TF_OsC306848_1.pep

SEQ ID NO: 25551 - protein, 559 aa, Oryza sativa; identical to SEQ ID NO: 18597
  Clone ID: TF_OsC47408_1.pep

SEQ ID NO: 25552 - protein, 714 aa, Oryza sativa; identical to SEQ ID NO: 18401
  Clone ID: TF_OsC21047_1.pep

SEQ ID NO: 25553 - protein, 170 aa, Oryza sativa
  Clone ID: TF_OsC77502_1.pep
RRASCASARSRRVTGCASSATARTRSTRRASTSGSTRARPPARSAAPPSSPPPTTPTPPPSPPPPGTTSPPSDPCRQEPILLSTQHPLPPQEQQGFPPPFSTNGSNPIKMEEHTTQEKRDRERNQWRKKMRGERGGVCGGGVLLVGEALIMRRTRMATCTALDLVNFSPS

SEQ ID NO: 25554 - protein, 612 aa, Oryza sativa; identical to SEQ ID NO: 18311
  Clone ID: TF_OsC1528_2298.pep

SEQ ID NO: 25555 - protein, 272 aa, Oryza sativa; identical to SEQ ID NO: 18308
  Clone ID: TF_OsC3651_2.pep

SEQ ID NO: 25556 - protein, 189 aa, Oryza sativa; identical to SEQ ID NO: 18317
  Clone ID: TF_OsC264554_1.pep

SEQ ID NO: 25557 - protein, 191 aa, Oryza sativa
  Clone ID: TF_OsC12875_1.pep
MSTVSGTRRAPRRQSQDGPGDKVVVNLDAISSPVVGSRRAVPTSTGARASPIDVEALDDEVQTLSASQVPPPRRNRRTRRQPVAVVDLEVDASREGNKRQRVAPVIHCLSPERGEGSSLKTSNEPPKAKEPVFNCPVCWNKLEEPSTTICGHIFCTTCIKQAIQIQKKCPTCRKSLRANNFHRIYLPNSDS

SEQ ID NO: 25558 - protein, 132 aa, Oryza sativa
  unsure (1)..(132): unsure at all Xaa locations
  Clone ID: TF_OsC17688_2.pep
MMMMIRMILMIMIIKMKPGDIPQDAWEDVDPXDEYSYEELVALGEVVGTESKGLSLDTLASLPSKTYRAQDKQDGNMEQCVICRVEFEEGESLVALPCKHSYHSECINQWLQLNKVCPMCSAEVPTSQDTRA

SEQ ID NO: 25559 - protein, 232 aa, Oryza sativa; identical to SEQ ID NO: 18315
  Clone ID: TF_OsC20575_1.pep

SEQ ID NO: 25560 - protein, 235 aa, Oryza sativa; identical to SEQ ID NO: 18314
  Clone ID: TF_OsC55101_1.pep

SEQ ID NO: 25561 - protein, 283 aa, Oryza sativa; identical to SEQ ID NO: 18321
  Clone ID: TF_OsC60330_1.pep

SEQ ID NO: 25562 - protein, 238 aa, Oryza sativa
  Clone ID: TF_LIB4309-008-Q1-K1-B7.pep
MESFRRFLNPLVLNLQKMELELTCPVCLKLLNAPTMLPCYHTSCSKCATTRTMDGYSCAICKSAYRSQDLRPASHLEAIVNIHRSLSSTVSSMVTQQEAQADIPVAKTSFQGTPESGNRNGAEKSDQVKSYTPVASKLAYNQSTGLAYGNVDGVKERNPALETRGAADVTAMPTILVQKGPCRSQSSDGPRDLDCDSNDLEGELITSRSSPQSVLKREPNTANDDNREIKRQSPLIRM

SEQ ID NO: 25563 - protein, 85 aa, Oryza sativa
  Clone ID: TF_OsC2184_2.pep
NDYDALLALDENTPQHAGASESQINNLPQSVIQSNIENPCAVCLDNPSIGDTIPRLPCFHMFHKECIDEWLKRKKLCPVCKFGIT

SEQ ID NO: 25564 - protein, 193 aa, Oryza sativa; identical to SEQ ID NO: 18323
  Clone ID: TF_OsC400245_1.pep

SEQ ID NO: 25565 - protein, 173 aa, Oryza sativa
  Clone ID: TF_OsC46801_1.pep
MGGCCCCSSRGSETDRAPVHIYRQQNQEEHEPLSSAYDGSSPASAIVAVDTNLDTSTPDTYRAPPAPLPYDVSLPVPENPDLEKSDLKSKTDDQQEESLEVDEFKSCEKCVAEDKPDEEDVCPICLEEYDAENPRSLTKCEHHFHLCCILEWMERSDTCPVCDQITLIDDMYE

SEQ ID NO: 25566 - protein, 234 aa, Oryza sativa; identical to SEQ ID NO: 18327
  Clone ID: TF_OsC82048_1.pep

SEQ ID NO: 25567 - protein, 208 aa, Oryza sativa; identical to SEQ ID NO: 18329
  Clone ID: TF_OsC356927_1.pep

SEQ ID NO: 25568 - protein, 192 aa, Oryza sativa
  Clone ID: TF_OsC392220_1.pep
CPATRRRRRCSTRASAHSSPSSASSSWPSSSTPVRPPVTPPPARRPTRSPRSRGSSSSAASASAPTTSPCSRRSRTTPPPPPRPADAGLIGRGDAKAAADCCAVCLDELGEGAVVRMLPSCKHYFHATCVDVWLLSRATCPVCRGSPGQEKVRHFRPRVPLTAAAAAAPVRAVAAQGGRRRRRCRYVESQRR

SEQ ID NO: 25569 - protein, 392 aa, Oryza sativa
  Clone ID: TF_OsC1868_1.pep
MRSSCCIVMAGRFLLGGREIVRTGDDGPLDDGPAVAPAAGSSAPATSAAAARVTPAVLFITVVLAVVLLASGLLHVLRRLFLKSHRANASAEAVERQLQQLFSLHEDGAGGAGPGLDQAAIDALPAFTYAELLAGAAAPNGGGGNGKRQFDCAVCLCEFDGGDRLRLLPLCGHAFHAACIDTWLRSSSTCPLCRAALSARALAALAAAAADTPAAAQHRQPDVEDQKLDHHHPPPPSDEPATSFVLSVRLGRFKNTQRSDGDADASGGGSRCIDARRCYSMGSYQYVLADDNLLISVHWRPGDGISAATAAAAAGANVATARTGIKQGGGGGGGKKVFGRGDSFSMSKIWQWRGGDRRLPVLHSDASPPADDGLPWATAAAASTRTRQESDT

SEQ ID NO: 25570 - protein, 335 aa, Oryza sativa; identical to SEQ ID NO: 18331
  Clone ID: TF_OsC383872_2.pep

SEQ ID NO: 25571 - protein, 413 aa, Oryza sativa
  unsure (1)..(413): unsure at all Xaa locations
  Clone ID: TF_OsC54609_1.pep
PAVLPTEVGAWLDAFPDGAVVVTAAALPKGFEAATMAXGTGLVIRGWAPQVAIPRHRAVGWSLMHCGTNTMLEATSAGVAMLTWPMVADHFVNKILLVEAGVAMHLAEGADAVPDSGQMAKAIAAVVGDKGKPFRERAVALARMAAAAVAEGGTSYRDLERGRKWGIREKRRRANESNDIFLHFDLTPLPHNVTEVLRVEGKTGQEHVPGSKRDTSKGVASAGNITGQAGSTGSSSRLNRSVSDHGRLPDSVQQARERLLQRLNSVDLSGRRQNTSLSSETIHGGVAPGVSTTADSIFSSLTSCFHTDVSIAPCKLQESTAETFNTADKHTFIAHCSEPAPTQEVASCRVTDDDELAGPSTECSICLERCGDADGLLELRCKHIFHSACLERWLRSRSDCPYCRASVLLTAEG

SEQ ID NO: 25572 - protein, 357 aa, Oryza sativa; identical to SEQ ID NO: 18324
  Clone ID: TF_OsC240119_1.pep

SEQ ID NO: 25573 - protein, 207 aa, Oryza sativa
  Clone ID: TF_OsC359_8274.pep
GVHTKSMSWYMGTPASPSPGSAGEAQHALSSGGGGGSDASFDTNMVIILAALLFALLFALGLNSLARLIIRWARRAATGEGAGGGVEGAGAGGGLKKRALRSIPIEVYGGGGGGSPAAAAEVCAICLGEFADGEKVRVLPRCGHGFHVRCVDTWLVSHDSCPTCRGSVLHGATTKHKPTAAAAAAGSRRPGSEVDAPAAAAVTVVIA

SEQ ID NO: 25574 - protein, 354 aa, Oryza sativa
  Clone ID: TF_OsC388105_1.pep
MVAVPVVADDGGGGHGAKGEESVSGSVAGISPSILIIAVIVVVMLLASVSIHYFIRHLCRRSSASAAASSSAPVLPVVVRPASSAAVGEQVVGKASAERAAEMERLISRLPLFTLASSLAALPKSSRDCAVCQSAFRDDDELRLLPACRHAFHSRCVDPWLRANPSCPPCRAATALPHPPLPDLLRVELGSVSSRRSNPNSAAAVASAPPEGAAVRAYPLPPRPHSEYLVEEELEVVIKQPAAAAAPRTGEPSQHPLPAAQAERGQPSSVTPTASFSSARSQERWSNRWSSRWSSRWSSGRWSSRYDAGTVTAAATAEWWWDMDGGAAPAARRREVEEQGNAFHGFMRWLTGAY

SEQ ID NO: 25575 - protein, 222 aa, Oryza sativa
  Clone ID: TF_OsC31203_2.pep
MAAAGVSRSMVLTLLGFCVSVLFIVFVCSRLACALLRRRRGRARLRRASPLAVSGVLSIYVDRHGHHQPSSAAGAASGTGGLDPAAVAAFPTRAFSPAASSSASASTQCVVCLAEYEEKDVLRVLPYCGHGFHVACIDIWLMHHSTCPVCRISLCDYPDSKHTMSPVPSAVIIPLPQCSPGAARSDQCNWLLVGTGHSPRASTICSIGNIREKVDPWFAVIG

SEQ ID NO: 25576 - protein, 289 aa, Oryza sativa; identical to SEQ ID NO: 18336
  Clone ID: TF_OsC246997_1.pep

SEQ ID NO: 25577 - protein, 489 aa, Oryza sativa
  Clone ID: TF_OsC17809_1.pep
MGGAHFPGEGEVVAGEGDAVVPLRDVGKMEHGCEHYRRRCKIVAPCCGEVFACRHCHNDATASGDRHTICRQDVEKVVCLLCDTEQPVSQVCINCGVNMGEYFCDVCKFYDDDTEKGQFHCYDCGICRVGGKENYFHCAKCGSCYAVALRDNHQCVENSMRQNCPICYEYLFDSLKGTRVLDCGHTMHMECFSEMVEHNKYTCPICSKTALDMTHHWALLDQEIEATIMPPVYRYKICLRFTQPREPAHWEGIQGVRRFAQEGIGCRDFIPFHMIFGLAMGEYCSSSSNQSKVPIILLFSASTIVQSSIVNWFSVHSSSGTILMIMTCMHPFVSAMRLKIEKCLLSFEQIVVLKYHGSFSENITRLGRTKVRSCVAHVKESWVQCWNAITSTVLKCILTQPQARNTMEDNENTKVRAVNADIKDKDIILLSCWMFASCNDCNKVSEVDFHVIGHKCSHCNSYNTRSTSRPADLSGSSSPSTSDSSENNP

SEQ ID NO: 25578 - protein, 814 aa, Oryza sativa
  Clone ID: TF_OsC43568_1.pep
LPIRLTINLLFSDGTCAPIERDTLRSLVESGATESSGCLPGCHLGSDAPPLHLSTANALGDIFFPSSDLLQANEECALAALTKLPENDRSKQLQSTSSNLLSSLNNVVQALSNLQLKHKQLAEDYQNQRDSSARKRAEHRRLKEELASAASELEETNYKLAALKAQRDNTQGARIPYPTLGNTNMPEDKELISKRLVEIKRLHEERIEILNKIATFQNILMDFKSIRSSKAFQLVNDRLQKSQAELDHYQTLLEKLQVDKDKFVWQERQFNLKVDLAEIPERVSTYCESSIADLKKDIQKLCDEKNMLILKLEEASREPGAVVTIHFTKSNFQTCLAKAALVSSIPREMGAMQSEMTKHKEASLELNSLRAEVHSLSRILSRKERDNEEASCRSARAGSDITQLQSVISDLKQTNKELKLFADMYKRESTDSREIMESRDREFLEWAHVHALKSSLDESKLEQRVKAANEAEAITQQRLATAEAEIAESGQKLGTSRKDLVSLSHMLKSKQEECEAYRVEVECISLSHMLKSKQEECEAYRVEVECIGQAYEDIQAQNQQLLQQIIERDDDNTKDVRFGYIVNLIVPETQYFIEKLFTCVKLIFMEGVKAKQTQDALHLETYSLRRNLQQESSLMDLYNQKIVSLEDQLKMWSDRVGKLQEDGWQQSVSLSNYQRKLVDVHRDAQKLMQSLDGIQANVGSSRLEVADLLIELEKERFSKKRIEDDLEVMSRKASSLRAKARESAVLEKLRHEVKEYRGILKCGICHDRQKEVVITKCYHLFCNQCIQKSLGNRQRRCPSCSLSFGANDVKPIYI

SEQ ID NO: 25579 - protein, 389 aa, Oryza sativa
  Clone ID: TF_OsC31886_1.pep
MAAMASSPPTTPNLGSQPTWVPYEPTRDCSQGLCSMYCPQWCYFIFPPPPPAFDITGSSSDDSSGPTFSPLVIAIIGVLASAFLLVSYYTIISKYCGTFSSLRNRLLGSSAHRGSGGGADGGDNSRSQEPWSVALSDGMDETLINKITVCKYRRGDGFVDSTDCSVCLGEFREGESLRLLPKCSHAFHVPCIDTWLKSHSNCPLCRCNIAFVTVGMVSPEPEARVPREDRRDNHELVLTIDNPEHVREEPQNVVTGVAVGNGGRNHEAKDGPGRSEDANGTAEIREDGALMPPTRAPSSLSDTHREGRMSIADVLQASLEDELMVARESGLLAGSSGSSRRCHGEHSKDGGGRSGRALPDGANMKRLAPAGRSCFSSRSGRGKDSVLPM

SEQ ID NO: 25580 - protein, 181 aa, Oryza sativa; identical to SEQ ID NO: 18346
  Clone ID: TF_OsC269066_1.pep

SEQ ID NO: 25581 - protein, 253 aa, Oryza sativa; identical to SEQ ID NO: 18341
  Clone ID: TF_OsC35328_1.pep

SEQ ID NO: 25582 - protein, 424 aa, Oryza sativa
  Clone ID: TF_OsC22486_1.pep
MDLERSPPPPPPEGGGGGGGGGASCSICLDPVVAGGRSVARLQCGHEFHLDCIGSAFNAKGAMQCPNCRKIEKGRWLYASGHHPSPDIDIGGWVTGETYDITSDIPFGFQWCPFSGFTQLASVFEEGEAEQTSYHTVGDHSNAASSSLVCPYLALRGFLHPVHVPSSSSSGAENSSFHRHPTSLEGHAAHDLSNTQVFHATESRNHDNDHRYMSNLPVSGIPDHSVAPFGIGLPRYDSSSQQRTRPYAHHRPLVHRPTPRNGSNMVTPLGSVPAVMAETRGHGHGARGHMYQQSMHSLQSSPFPPTSRRVRPRALTITSFIAASSSAEIGGHHGFAPPVNRSNSSDGEAVSRPVDRPYGWGQEGFTPFPWIPADGESHWWGTFNPMQNHTHGGFTRRPTGERMPQSHPDSGYHSMHPQRMPPFL

SEQ ID NO: 25583 - protein, 436 aa, Oryza sativa; identical to SEQ ID NO: 18358
  Clone ID: TF_OsC59284_1.pep

SEQ ID NO: 25584 - protein, 207 aa, Oryza sativa; identical to SEQ ID NO: 18356
  Clone ID: TF_OsC400404_1.pep

SEQ ID NO: 25585 - protein, 334 aa, Oryza sativa; identical to SEQ ID NO: 18352
  Clone ID: TF_OsC270394_1.pep

SEQ ID NO: 25586 - protein, 335 aa, Oryza sativa
  Clone ID: TF_OsC394647_1.pep
MSNVFARISAATLRGGGEEERGGGRGRRACYGIAATAAAVLRVGGRAAAGSVWKASVLAGMVLLAFGVADYLAPASWCRRRGGTNTRAAEREAQPGASSSSTFGLEKAAVDALPTFAYASGGAGAAQGGGDLEAGNGEPCSVCLEELHAGEIVREMPACKHLFHVECIDMWLHSHRTCPMCRCDLSPPREVAAKEATAAETAAPPGDDALPPDRIAQRGIFPLDDGWINPADLPGYSRPSARASGASDEVGHVTPLTMREQRRREGGSGMQARLPASGCECGGGSGKKGGSEPEGWRRRQRKEGVAASPKARDGGNGKKGRWRARRRMNHRRRLG

SEQ ID NO: 25587 - protein, 428 aa, Oryza sativa; identical to SEQ ID NO: 18355
  Clone ID: TF_OsC181138_1.pep

SEQ ID NO: 25588 - protein, 425 aa, Oryza sativa
  Clone ID: TF_OsC37456_1.pep
MGNMGSSGGHRRRNNGHGRHHHHGQPTAPPPPPQQQQQEVAPNRYVFAAASPYPPQYPNPNLPQYYPQYGNFYPPPPPSMPGPLPAPYDHHHRGGGPAQPPPPPPPPQPIHAAGEFPPAMLQQHPHYHGWGGNFSYGPPTQPPAPAPPYVEHQKAVTIRNDVNLKKETLRVEPDDECPGRFLITFTFDATVAGSMTVYFFAKEELNCNLTATKEDLLKPVTVTFKEGLGQKFRQPSGTGIDFSLFEDAELFKEGEMDVYPLAVKAETTFSIGQFSEGEEQKSQTPNSQITQAVFERKENGDYHVRVVKQILWVNGTRYELQEIYGIGNSVEGDTEGNDPGKECVICLSEPRDTTVLPCRHMCMCSECAKVLRYQTNRCPICRQPVERLLEIKVNNKGEEQQQQQIPQPPPPPSTAPPHQQQESQA

SEQ ID NO: 25589 - protein, 163 aa, Oryza sativa
  Clone ID: TF_OsC250874_1.pep
MDDDGDWITARYLLSSILGRNPLVVDYVDEESFPVEDPPPVAGGARGGRQAVVSQPPVVRATAGVAGTVCSVCTEEIAVADAVVRLPCAHWYHAGCISPWLGIRSTCPMCRAELPASDDAAEEGGGAGREKPPRAAPAGTSAGGGVRRDASYELLAGGGVLSG

SEQ ID NO: 25590 - protein, 133 aa, Oryza sativa; identical to SEQ ID NO: 18360
  Clone ID: TF_OsC126152_1.pep

SEQ ID NO: 25591 - protein, 313 aa, Oryza sativa
  Clone ID: TF_OsC66748_1.pep
MERRPELRRTMTLSEQLSAPDQAIRDFLKIPHDGLGGGDGEGGRIPAAAGASGGGGGVGGMINWKPLRDRLRLRRAASAWMSASPKPAASNSGGGGGGGATLSSSNSGSNHSNKYNYSPGEAAAAFSRTFSRTRSLRPTPTFSRATSTRLGATAFSSGSRRAAVDGGGHANEDDDEDHTDDDDDDDEEEQGKDDAPAAQMSLMALLEQSDSQWDSEDEDDQGHGGGGGGGGNGGGGGGGGARKNGDGDDDEDDGEGREEEMVHVCCVCMVRHKGAAFIPCGHTFCRLCSRELWVSRGNCPLCNGFIQEILDIF

SEQ ID NO: 25592 - protein, 243 aa, Oryza sativa; identical to SEQ ID NO: 18369
  Clone ID: TF_OsC82464_1.pep

SEQ ID NO: 25593 - protein, 176 aa, Oryza sativa
  Clone ID: TF_OsC240119_2.pep
MGSRSGSTTTSMPPPVPQENQSVGKGTAIFSYTCVGLTGVALVAVVAFYCNRHVRRRAPVVAAEGAGGAGGREDDGLRGVADVAAKIPEFAYAGSARHGGGGECSVCLGAVQGGEAVRRLPACKHLYHVECIDMWLASHATCPLCRTEVEPPPGDGGGRPAPAADESSPTEALPPV

SEQ ID NO: 25594 - protein, 313 aa, Oryza sativa; identical to SEQ ID NO: 18366
  Clone ID: TF_OsC33248_1.pep

SEQ ID NO: 25595 - protein, 171 aa, Oryza sativa
  Clone ID: TF_OsC46309_2.pep
MASGTDEKAKMEGLTSAAAFVEGGIQDACDDACSICLEAFCESDPSTLTGCKHEFHLQCILEWCQRSSQCPMCWQPISLKDPTSQELLEAVERERNVRTNQTRNTTIFHHPALGDFEVQHHLAAAAAMGRSHHLGRREGHRGRSGSHGRPQFLVFSSHPNMPSAGSVSSSM

SEQ ID NO: 25596 - protein, 499 aa, Oryza sativa; identical to SEQ ID NO: 18374
  Clone ID: TF_OsC345789_1.pep

SEQ ID NO: 25597 - protein, 348 aa, Oryza sativa; identical to SEQ ID NO: 18378
  Clone ID: TF_OsC219076_1.pep

SEQ ID NO: 25598 - protein, 185 aa, Oryza sativa; identical to SEQ ID NO: 18380
  Clone ID: TF_OsC198988_1.pep

SEQ ID NO: 25599 - protein, 223 aa, Oryza sativa
  Clone ID: TF_LIB4309-011-Q1-K1-H9.pep
NHPRDRGGTEFGGGARNAAALDYPERAGQPICEYYMKTGTCKFGTNCKYHHPKQDGAVLPVMLNNSGFPIRLGEKECSYYMKTGQCKFGTTCKFHHPEFGGVPMTPGIYPPLQSPSIASPHPYASLANWQMGRPPVVPGSYIPGSYTPMMLSSGMIPLQGWSPYPVIDLNYMFYCGKINSIPINAKLINKLDMTANLYYEMQSESTNEARQHTCVMICEAGSL

SEQ ID NO: 25600 - protein, 243 aa, Oryza sativa
  Clone ID: TF_LIB4831-020-R1-N1-A9.pep
SLTLSIPRLVASPSASLRQPRARVSISPPTGFPSLPSSSLRAKARHGGSRRRPQEIPAGHGQRRRRRREALESTIGCPFGEGCHFSHFVPGGYQAVAKTLNLGNPAVPAPARAPMDHAAGGNSHPASSGKTRMCTKYNTAEGCKFGDKCHFAHGERELGKPAYMSHESAMAPPMGGRYGGRPEPPPPAAMGPPAGNFGASATAKISVDASLAGGIIGKGGVNTKQICRVTGVKLSKRDHESDS

SEQ ID NO: 25601 - protein, 794 aa, Oryza sativa
  unsure (1)..(794): unsure at all Xaa locations
  Clone ID: TF_OsC307477_1.pep
MEMEMEDNKAPSPPSPMESDVAGEKRKREDDASSSAVLAAANNTGGAQHPMWKTSLCSFFRRRAASSADGCSHGDSCRYAHSEEELRPRPDGTWDPTSDRAKKLRKVAADEVEEEVVTIDDKALDKCLVGLPRGWANDRLKTFLQDKARTNYSSILPPALLLGISYATAKKKKGMTVGFVTFENIEQLKNAIEVLTENQSGGKEIKIADANRRSHQKLHTEKPVSDNGVTTENGTSVDVPPGETSAPEAAISNKKSVRDAVTPLAHMSYNDQLEHKKNSVAQILKRLTRNARKACPTGIPLPDWVFKSKEIGGLPCKLEGILESPVINGYRNKCEFSVGFSLEGKKTVGFMLGNFREGVTAVEEPVDCPNVSEISCKYALMFQDFLQSSSLPVWNRVDNCGFWRQFTVREGRCQAQAVAQNAENQISEVMLIVQVCSTGVDDAVMKDEFDKLTVALQQGAATCSPPLPLTTIVVQDHKGISNAAPADCPLIPLLVPKVDQSEGTVDKTRIHDHIGNLWFSISPTAFFQVNTLAAERLYTLAGDWANLNSGTLLFDVCCGTGTIGLTLAHRVGMVVGIEMNESAVSDAERNALINGVSNCRFVCGKAEDVMGSLLTEYLGSPQQDIPVSEGAVSGTVKDEEVIDSSKNSGENLDSSMQKNDNGESQQLGDAPADSSSSAIDEIKGNSNDRVGNGLEGSHDEYNEVAGEDIHGEASLINESVDLKVSDCLEDRKTSDDGSSISNNDVTAATACQFEDIVAIVDPPRVGLHPTDQAYTLNLXVIKALRTHPRIRRLV

SEQ ID NO: 25602 - protein, 73 aa, Oryza sativa
  Clone ID: TF_LIB3432-044-P1-N1-E6.pep
DCVLSPVGLPLRPGEELCKFYSRYGICKFGANCKFDHPTMAPPMGVYAYGSASTNVPMVRRLLQSPSASAYTS

SEQ ID NO: 25603 - protein, 718 aa, Oryza sativa; identical to SEQ ID NO: 18619
  Clone ID: TF_OsC206898_1.pep

SEQ ID NO: 25604 - protein, 216 aa, Oryza sativa
  unsure (1)..(216): unsure at all Xaa locations
  Clone ID: TF_jC-osleLIB3474044d01b1.pep
MAAGAGAGGGGGEGDSNGGGTSPGGVSAAAPAIGPHHLGVAAAEEAMWQMTLGGGESMESTPYPERIGEPDCSYYMRTGLCRFGMTCKFNHPPNRKLAVAAARMNGEYPYRVGQPECQYYLKTGTCKFGATCKFHHPREKAALANRVXNEKECAYYLRTGQCKFASTCKFHHPQPFNTMVAVRNFMYSPGQSATSPGQHTYSGAVTNWTLSRSASF

SEQ ID NO: 25605 - protein, 719 aa, Oryza sativa; identical to SEQ ID NO: 18620
  Clone ID: TF_OsC208927_1.pep

SEQ ID NO: 25606 - protein, 287 aa, Oryza sativa
  Clone ID: TF_OsC2916_1.pep
MLQKKGQSAPTWRRFGDIVHLDTSGGRGGYSSSSSPLLVTGQWSPLAGEEDKLVVVVGRLAIIRQRRPMLVQPPNADAQHTDIPDGRSFLGVPRYYRHSLTVLQRAVRSWNAHNHKHPMTAAVAPSLLAVQAVVAEFDRFLDAYDFNAVGWSRDHPMAAAAGRFLDKRNPNTDKNNPSGLAGVARRFVMFNGAVCEAQLRWLDGVLRGLMWNYEGVMRVVHRWTRGPTCHRLPPTVSSSLLSPEAPPVGSFPHLPPIPVSPSLVRTSASPVFAASLVFLRRPLPPLR

SEQ ID NO: 25607 - protein, 581 aa, Oryza sativa
  unsure (1)..(581): unsure at all Xaa locations
  Clone ID: TF_OsC170_5.pep
LRSTSRPTPPRILLAGDANGRLHQLFKRVTSVNQSTGPFHALLCVGQFFSPDAGDGDGGGGGEVADYLEGRAAVPIPTYFTGDYGPAAPRLLAKAASSARGFSPGGIQICPNLFWLRGSARFTLHGSKGVFYAREPYVSDSAAHVTRFIGLANVGNKEKQQSQFLLKXTPKRPAEDADLQYWRYDVKKQRHGEAGGNRLCFKFTSSGSCPRGSKCNYRHDEEAREHYNRNRTXRVESSCWFCLSSPDVESHLVISIGEGYYCALAKGPLVPNHVLVIPVEHCSSTLKMPVEAEAELGRYKDALAKYFEKQGKIAIYFEWVSQQSRHANLQAVPVPLSKASSVKKIFHLAAQRLGFEFSVVNPDGDANRARELLRSECDSKSSLFYVELPEGSVLLHLVDSNEKFPAQFGREVLAGLLSMADRADWRNCGGGGGGVGQSQACAACKYQRRKCNADCPLARYFPADEQRRFLNAHHLFGVSKIQKTLRDTPPELHADAMQALTFEANARASDPVGGAARVVVELCRQYEMLHAELAAVQHHLKLCRQQHAAAAAAAANDPLVANVDPLADPAAEMLFAGRRRP

SEQ ID NO: 25608 - protein, 87 aa, Oryza sativa
  Clone ID: TF_LIB3598-036-Q6-N1-H9.pep
EPICTFYSRYGICKFGPNCKFDHPMGTVMYGLATSPTGDVSARRMLAPVPAHSEVSPDNVSGRSRRITHSDSQQIPSGERGTEREAS

SEQ ID NO: 25609 - protein, 678 aa, Oryza sativa; identical to SEQ ID NO: 18638
  Clone ID: TF_OsC40248_1.pep

SEQ ID NO: 25610 - protein, 444 aa, Oryza sativa
  Clone ID: TF_OsC5401_1.pep
MAAAPSAGGVGEGSSSSAAAAAAAAAATIGPHVVDEEAMWQMNLGEAMEAGPYPERIGEPDCSYYMRTGLCRFGMTCKFNHPADRKMAVAAARMKGEYPQRIGQPECQYYLKTGTCKFGATCKFHHPREKAAIATRVQLNALGYPLRPNEKECAYYLRTGQCKFGSTCKFHHPQPSNTMVAVRGSVYSPGQSVTSPSQHTYPGAVTNWPLSRSASFIASPRWPGHSSYAQVIVPPGLVQVPGWNPYAAQIGSSSSDDQQRTAGGAQYYTGSRHSETPNMGDQGMFSSYQAGSVPLGLYTVQRESIFPERPDQPECQFYMKTGDCKFGAVCKFHHPKERIIPTPNCALSSLGLPLRPGEPICTFYSRYGICKFGPNCKFDHPMGTVMYGLATSPTGDVSARRMLAPVPAHSEVSPDNVSGRSRRITHSDSQQIPSGERGTEREAS

SEQ ID NO: 25611 - protein, 473 aa, Oryza sativa
  unsure (1)..(473): unsure at all Xaa locations
  Clone ID: TF_OsC6441_1.pep
MSDPFYPHGHGGAAGGEGAAAAGYSSYEVDLIAARYGGRPLANPSSAAADLDARLAGARRSMGVLYHQPIMGSHSTVEQIEALYSSNTMTKRPRLESSLPIYPQRPGEKDCAFYMMTRTCKFGGSCKFDHPQWVPEGGIPNWKEAANVEESYPEQEGEPDCPFFMKTGKCKFGSKCKFNHPKLXDDAVPLENTSDFYVQTGXSKFLALCTSNHSNHIDIPSSHDAPVSXATPVSETDTGSAADSVSAKMQTPVAAAQEFNSKGLPMRTGKVDCPFYIXDRQXKFGSTCLYNHPDRGEVNFPLPWGHTILPSQGSMFLITSADFLQGLYFHAVHMPVGPGPVTYPQRPGATVCDFYMKTGFCKFADRCKFHHPIDRSAPDPSANWEPAEESVQLTLAGLPRREDAVVCAFYMKTGVCKFGGYRQGVEFRELRRETNILTQGRIKSMPYSFLAYELNMKPHYLGRYVVFVDLCGI

SEQ ID NO: 25612 - protein, 534 aa, Oryza sativa
  Clone ID: TF_OsC23226_6.pep
MSVMDANQAYARHHFDGGHLRGDRADVLAQQAGMDIGSMADSEDGDHVATTTTEQRYDDDGHLVPSSGGQEEEGSGGRDVVVPGGHVAEDYRSGVGVPVGRDAGGATSSPPQPVHVTPSILVGSIHAPVFQGELVGMKFGVGSGSMGAGTSATRRLPATGFGALPTSSMAEDSADHADDDHLAEEEEEEEEEHYIDDGPLVPSSGGQEEEGSGGRHVFVPGGHDGEEDHPDDLVADLDLDLLVDGVVGPVPGGHLNADAPAFVPTTRGRQDLYSALSSSAPAAGYRYRHYITSSALAEAGHVSPFLGLPYATAFDSPLDRELVGPSSAPPPCSAASRAWLVRCSSPLSDSEWTRRSILAREAAHTPASTVTGRGRFEFVPIPGAPYAPPPSFAPIAAGAGPAARPLQQLAFGLEEHKTKLCAEYYSRGLGCPRGNTCKYAHGEDDLRLVVAVSSLADAGEGSSSSDSSFAALGGEDKYKTKLCKTFTSGGLCLFAANCRFAHGEVELGKKEPCWYFFSGQTCPRGDTCGFRHSY

SEQ ID NO: 25613 - protein, 387 aa, Oryza sativa; identical to SEQ ID NO: 18636
  Clone ID: TF_OsC333015_1.pep

SEQ ID NO: 25614 - protein, 367 aa, Oryza sativa; identical to SEQ ID NO: 18635
  Clone ID: TF_OsC3834_1.pep

SEQ ID NO: 25615 - protein, 300 aa, Oryza sativa; identical to SEQ ID NO: 18640
  Clone ID: TF_OsC4710_1.pep

SEQ ID NO: 25616 - protein, 477 aa, Oryza sativa
  Clone ID: TF_OsC98105_1.pep
MEPYAAAEGGGGGGGGGSTDTGLEESMWRMGLGGGGGGGGEAVAAGRLPERPGEADCVYYLRTGACGYGENCRYNHPRDRAAAAVLNGGGKTTHSAEYPERPGQPVCEYYMKNGTCKFGSNCKYDHPREGSVQAVMLNSSGYPLRSGEKDCTYYVKTGHCKFGSTCKFHHPEIGGVSETPNMYPPVQPQPISSSHPYQHLAGWQMGRPPVLPGSFLSGSYPPMMLPSTVVPMQGWNPYISPVNQVASAGGHQTVQAGPFYGLSHQGPSAAVTYGSQYAPLSSSTMPSSSSKQEPAFPARPGQPECQYYLKTGSCKFGSACKYHHPQYLNTPKSNCMLSPLGLPLRPGSQPCAYYTQHGFCKFGPTCKFDHPMGTLSYSPSASSITDLPIAPYPLNYAVAPVAPPSSSSDLRPEYLLTKEFSANQSASPGTTCGPAGAMLKASTYPLSISSLGPPLIVNKASTDFDKGMAKVVILPPE

SEQ ID NO: 25617 - protein, 466 aa, Oryza sativa
  Clone ID: TF_OsC2916_5.pep
MEQPHAAAAAAGGGEGEGGASPDTGLEGPMWRMGLGGGGGGGGGGGGGDGDAAGRLPERPGEEDCVYYLRTGACGFGDRCRYNHPRDRGGTEFGGGARNAAALDYPERAGQPICEYYMKTGTCKFGTNCKYHHPKQDGAVLPVMLNNSGFPIRLGEKECSYYMKTGQCKFGTTCKFHHPEFGGVPMTPGIYPPLQSPSIASPHPYASLANWQMGRPPVVPGSYIPGSYTPMMLSSGMIPLQGWSPYPASVNPVVSGGAQQNVQAGPVYGMGHHGSSSTIAYGGPYVPYASSTGQSSNNQQEHGFPERPGQPDCQYYMRTGDCKFGATCKYHHPRELSAPKSGYMVNSLCLPLRPGAQPCAYYAQNGYCRYGVACKYDHPMGTLGYSPSALPLSDMPIAPYPIGFSIATLAPSSPSPDLRPEYISTKDQSVNQVTSPVAASEPVDQYCRRGPATHDAANYTHLCSQS

SEQ ID NO: 25618 - protein, 534 aa, Oryza sativa
  unsure (1)..(534): unsure at all Xaa locations
  Clone ID: TF_OsC42413_1.pep
MIRCTHMAGRGGMVEWEVGRRRDSEDVIVLXPGPPARRRPPPVKAVEPESGGFAYEPPEKLFYKTRVCETFVTSGRCMFEDGCTFAHGDEELRPSLTACAGGWRKPSPSLSAAAPPVAVAPTPPPAQVVHELLARGSGSGGGGHRAITKVCFEFRDKGICYFGETCAFPHVSAAEIRQGSRLSSMSSSSWEMPARRSVAVTVPRTFVSVPPVAPPPPPPHYRVNNSSSYNAASMAAAAPAASDANLVAQQPPPEQGGRKMTRLEMLSLKKMTGIYGDWLXGGERDADLVFFSAGEEEETGGGEEGEEDGIWDWSRAGACCSMANICAAWCSGFFAHSYNNIEDIVVSKIEDRISLWSFLPKENGESIQVLKYGVNRSGSIKEEPKSSSGAHRLATILMYLSDVKQGGETVFPRSEMKDAQAKEGAPSQCSGYAVRPAKGNAILLFNLRPDGETDKDSQYEECPVLEGEKWLAIKHINLRKFDYPKSSLASEDECTDEDDRCVSWAASGECDRNPVFMIGSSDYYGSCRKSCRVC

SEQ ID NO: 25619 - protein, 211 aa, Oryza sativa
  unsure (1)..(211): unsure at all Xaa locations
  Clone ID: TF_LIB4309-005-Q1-K1-C12.pep
MEGAGAARKRSRPDTANGGAAGGKRSRETESFQTGLSSKLKPCTKFFSTIGCPFGEGCHFSHFVPGGYQAVAKTLNLGNPAVPAPARAPMDHAAGGNSHPASSGKTRMCTKYNTAEGCKFGDKCHFAHGERELGKPAYMSHESAMAPPMGGRYGGRPEPPPPAAMGPPAGNXGASATAKISVDASLAGGIIGKGGVNTKQICRVTGVKLSI

SEQ ID NO: 25620 - protein, 454 aa, Oryza sativa
  Clone ID: TF_OsC49276_1.pep
MAAGAGAGGGGGEGDSNGGGTSPGGVSAAAPAIGPHHLGVAAAEEAMWQMTLGGGESMESTPYPERIGEPDCSYYMRTGLCRFGMTCKFNHPPNRKLAVAAARMNGEYPYRVGQPECQYYLKTGTCKFGATCKFHHPREKAALANRVQLNVLGYPMRPNEKECAYYLRTGQCKFASTCKFHHPQPSNTMVAVRNSMYSPGQSATSPGQHTYPGAVTNWTLSRSASFIASPRWPGHSGYAQVIVPQGLVQVPGWNPYAAQMGSSSPDDQQRTPVTTQYYGSRQSETGGMGDHGMYQSYQGGSVPVGVYTVQGENIFPERPDQPECQFYMKTGDCKFGAVCKFHHPKERLVPAPNCALNSLGLPLRPGEPVCTFYSRYGICKFGPNCKFDHPMGTLMYGSATSPRGDVSSMHYQLSPSPGHPGILLDGGSGRSHRVPQSDSQQIPSGDGNAEREAS

SEQ ID NO: 25621 - protein, 304 aa, Oryza sativa; identical to SEQ ID NO: 18644
  Clone ID: TF_OsC1290_1.pep

SEQ ID NO: 25622 - protein, 559 aa, Oryza sativa; identical to SEQ ID NO: 18645
  Clone ID: TF_OsC2718_1.pep

SEQ ID NO: 25623 - protein, 194 aa, Oryza sativa
  unsure (1)..(194): unsure at all Xaa locations
  Clone ID: TF_LIB4371-030-R1-K1-G10.pep
MAEHLASIFGTEKDRVNCPFYFKIGACRHGDRCSRLHNKPSVSPTLLLSNMYLRPDMITPGIDAQGNPIDPEKIQADFEDFYEDIFEELSKYGEIESLHVCDNFADHMIGNXVYVQFREXEDQAARALQALTGRYYXRPSYXLSSSRXVSDFRXEATCRQYEENSCNRGGYCNFMHVKEIGRDLRXRLFGHLHR

SEQ ID NO: 25624 - protein, 290 aa, Oryza sativa
  Clone ID: TF_OsC1291_1.pep
MAEHLASIFGTEKDRVNCPFYFKIGACRHGDRCSRLHNKPSVSPTLLLSNMYLRPDMITPGIDAQGNPIDPEKIQADFEDFYEDIFEELSKYGEIESLHVCDNFADHMIGNVYVQFREEDQAARALQALTGRYYSGRPIIVEFSPVSDFREATCRQYEENSCNRGGYCNFMHVKEIGRDLRKRLFGHLHRSRRSHSHGRSRSPSPYHYRRDYDRRSSSRSRDHDDYYRGGSHDYYRGGSRRSSERHRSSYDSDGSRRRHRSRTRSPVRDGSEERRAQIEQWNREREAAQV

SEQ ID NO: 25625 - protein, 228 aa, Oryza sativa
  Clone ID: TF_LIB4309-025-R1-N1-C2.pep
LANPSSAAADLDARLAGARRSMGVLYHQPIMGSHSTVEQIEALYSSNTMTKRPRLESSLPIYPQRPGEKDCAFYMMTRTCKFGGSCKFDHPQWVPEGGIPNWKEQAANVEESYPEQEGEPDWPFFMKTGKCKFGSKCKFNHPKEKGNALSSGNTNDKHLIADRSILPVRPSEPLCSFYAKTGKCKFRAMCKFNHPKDIEIPSSQNEPQSAVTVEGETDIGSAADSVSA

SEQ ID NO: 25626 - protein, 476 aa, Oryza sativa
  Clone ID: TF_OsC53320_1.pep
MTSISHMDFPKIVEGGLKQMLELLGDDNAPFDVVHSAGRKHIKQEGYSYPLCCRILEVLYKSRQQFHLRTFCVLGSNTTTDSYGNTRPIIGGFVVETSSGAVNPASFEMNSRCPDEIVRRIRVSVSSYDPNWQGRLLETYDTHSDAFEIAPACWMPDWAEMASSLNQLSDSEVLLQCSTSPAAEPPHFVENERRIWRYLIENPYWQDTFPKYKPRVFHRTSDGSTSGCPFGSSCHFLHNFPGGYQAAAKMTSHGGTAVAAPPGRMPLGPGAPNGPPTSSVKTRMCNKYNTAEGCKWGSKCHFAHGERELGKPMLLDNSMPHPMGSMPFEAPPMPGPDIVPPSTFGASATAKISVDASLAGGIIGKGGTNTKHISRMTGAKLAIRDNESNPNLKNIELEGTFDQIKHASAMVTELIVRISGNAPPAKNPGRGSHAGGPGSNFKTKLCENFNKGSCTFGDRCHFAHGESELRKPPAAA

SEQ ID NO: 25627 - protein, 422 aa, Oryza sativa
  Clone ID: TF_OsC121777_1.pep
MDDAGRASAPAVVTLPATAAATDEPSHDPAALYGEGMWQQMTMSGSGAMQPGPYPERSGEPDCTYYLRTGLCRMKGEYPERMGQPECQYYLKTGTCKFGPTCKFHHPREKAGIAGRVQLNTLGYPLRPSEKECAYYLKTGQCKYGNTCKFHHPELFNAMASSRGSPIYPSVHSSATAGPPYTGTMASWAFPRGSFIPSPRWQNPSNYAPMIVPQGLVQVPSWNSYTGQMMPVSSSESRLQSPGAQQTYGTSQQVDASAGNQGMLSPYRSSSYPVPQYALQRENVFPERPDQPECQYYMKTGDCKFGAVCKFHHPRVRSMPTPDCVLSPVGLPLRPGEELCKFYSRYGICKFGANCKFDHPTMAPPMGVYAYGSASTNVPMIVGIGFSGSWQQGAKDPTDSSGAPPNTHVLGEDPIPYRKIAV

SEQ ID NO: 25628 - protein, 704 aa, Oryza sativa
  unsure (1)..(704): unsure at all Xaa locations
  Clone ID: TF_OsC359_6768.pep
MSHLEGDKELDENGDGSTSKGTSTPKGASISFDYNKLTIPSHNFVSVPSLRSPQFDGTYYAAWKHKMKLXVHLISLHPSIWKVVCTCVDVPNEDMEFTTEQEKAIHLNAQAANAILSALSPEEFNKVDGLEEAMEIWDTLQLAHEGSPAVRESKIELLEGRVGRFVMDDKETPQEMYDRMMLLVNKIRGLGSEDMTNHFVKRLLRVFVPRNPILVSMIRERKDYKRLSPSDILGRIVSNEMLEEEARELKQMVKNAAMIKNQEIGLKANQEEMALIVNRFKHFLRKSGYGKGRKEDDKGKRQSKRACFKCGEYGHFIADCPKTNEAKHKVVKKKPDRAHVAEAHMAEVWYSGDEGSPKAMEKGDGDGGVATVAIKSSSTKERLFNILSDDDNDSYHHSCFMDHGRKVMPIQKPSLDDDNTSDEDSDNELDXMFKNFSKPAMKQLSKLMKALDSKERFLERQEDLLILEKKXNLALEEDLAKEGERIELLQYEISLLNDSMASLTSVNETLQEELVVLDKXHINLEVEIDTLRNSASSLNETPMTPMPSISVGCARCYNYDLSSYATNLEAMEALEKKNERLGTLVKYGCMKTYHSKDALYKTIATNPNKDGHELGFSDESPVSKRVVVNGKIFLMFVREGKAPQESEVTLPFVGQRPGASGQNVQNFLAPVRIIVLLAPGLAGPWPSAGPARAREGEGNGPAAH

SEQ ID NO: 25629 - protein, 59 aa, Oryza sativa
  unsure (1)..(59): unsure at all Xaa locations
  Clone ID: TF_LIB4506-043-R1-K1-B5.pep
ESVRMRVRHQEHPDDKCRNCNKIGHWAKDCRSKAKXAEGHIAAEDDDEPTLLMARTCFG

SEQ ID NO: 25630 - protein, 1504 aa, Oryza sativa
  Clone ID: TF_OsC1517_1379.pep
MASRPRRAARAPARFGFEDGRVEPEANHESANERSHHSNRSHRTASRNAEVEQPRRSNRSHRTASRDAEIEQSHRSHRTASHNSGEERLPSPPHVENNMQHLMAVQTQILQGLAAAVAGFQHNAHGNGHPHTNNNRSKLTDFLRSRPPEFSQTVEPVEADDWLKDVDRKLNLVQCTPVEKTLYASHQLRGPAADWWENYCNAHPEPTNIAWDEFATAFRAAHVPESTIDMKKEEFNRLKQGNSSVNEYLSMFNKLARYAPEEVDTDKKKIRKFLKGIAVGMRLQLLAHDFPTFQYMINKALLLEDARKEATEEYKKRKSNHQGNSSRGAPHPRYGQPMQYHQSVTQANRQPGYAPRPQMNRPAPQPQQRAPSGNTAPNSVTSFKSPQGPTTVQCFRCDQMGHYARQCPQNPTNTNSGHANGSTARTPTPAAAQFRPSSQASGQGSRASNNFGRGRVNHIQAETAQDAPDVVMVHSPGRNIRATQICPEVNLRIEEVDFLAKPIVLDSQSLDIILGMDWFAKHKGQIDCAKKSITLQGPGGKQVRFTSNTPTASRSILTCLQVTSLESVPIVCEYPDVFPEELTSMPPDREIEFAIELAPGTAPIAKRPYRMAANELAEVKRQIEELESKGYVRPSSSPWGAPVLLVKKKDGSERMVIDYRALNEVTIKNKYPLPWIDDLFDQLKGARVFSKIDLRSGYHQLKIRSEDIPKTAFSTRYGLYEFTVMSFGLTNAPAFFMNLMNKIFMDYLDQFVVVFIDDILIYSKNEEEHAEHLRLIMEKLRDHQLFAKFSKCEFWLDRIAFLGHVISSSGVEVDPSKVEAVLAWNPPKNVSEIRSFLGLAGYYRRFIEGFSKLARPMTELLKKEKKFQWSAACEDSFQEMKKRLTTAPVLTLPDIRKDFEIFCDASRQGLGCVLMQERKVVAYASRQLRPHEVNYPTHDLELAAVIHALKIWRHYLIGNRCEVYTDHKSLKYIFTQTELNMRQRRWLELIKDYDLGIHYHPGKANVVADALSRKAYCNVAQIRPDQDHLCRELEKLRLTVVQTGVPASLTVQPTLESQIREAQKDDEGIKELIKRIQEKKDTNFSIDDQGTVWCDSRICVPAKKELRDLILKEAHESAYSIHPGSTKMYQDIKAYFWWAGMKRDVAEYVALCDICQRVKAEHQRPAGLLQPLPIPEWKWEEIGMDFITGLPRTPSGYDSIWVIVDRLTKSAHFVPVKTTYDGRKLAELYMTHVVCRFGCPKKIVSDRGTQFTSRFWKQLHEALGTDLNFSTAYHPQTDGQTKRVNQILEDMLRACALDFEGTWDRCLPYAEFSYNNSYQASIQMSPNEAMFGRKCRTPLCWNEVGEALDRQKNYADNRRHDLEFEKGDHVYLRVSPLRGMRRFGMSGKLAPRYIGPYLITARRGEVAYQLELPEGLADVHNVFHVSQLKKCLRVPEEQVPLGNIELEKNLTYKERPIKVLEEAERQTRRKTIKFYKVQWSNHSEDEATWEREDLLRAEFPELLP

SEQ ID NO: 25631 - protein, 1204 aa, Oryza sativa; identical to SEQ ID NO: 19868
  Clone ID: TF_OsC1528_1944.pep

SEQ ID NO: 25632 - protein, 917 aa, Oryza sativa
  Clone ID: TF_OsC22400_1.pep
MARTASAATGGDEPPPEPHHQAGVQRPPKNDGDGGEEAGGGNVGVPAAAADEDPTAGAVGAAGRGSRRRRKAGRRAAAPDEEDLDTILAEIDQNMASAALDSMPEMNLAQASASTAMDVAATVNDVGAEVKDDEMEAESAAPKRRKRKKEKEKERKTTSKVAEADAKKPPRHVRVMLEVLAKRKEAEELRKREEELRKRKAEEERLQREEDERMVEEMKMQQKERDKGKTMKKRQDGKTLTGKQKEEARRLDAMRRQFLGQSRILARSDLGNDGGANERKKRPIYDSKRKKVQSKADEAANGDGGHMQELHKVNKEEEECAIMEEQPHYRVEEDGEKIKLEEIKGAESVERINFEERITKEEKNEAMKSSNEEVVSLVTGWKNRIEEWDVDVDENDKDTRKLTPKRDPAKVDKAEKYTDLRSPICCILGHVDTGKTKLLDCIRCTNVQGGEAGGITQQIGATFFPIENIRERTKELKAGAALHVPGFLVIDTPGHQSFSNLRTRGSSLCDIAILVVDIMRGIQAQTIESLNILKRHKADFIIVLNKVDRLFGWKRCPNAPIKKALKQQAEGVKMEFDARLTDCTVLEVKVTEGHCTTIDVVLANGFLREGDQIVTCGMQGPIVTHIRALLTPHPMKELRIKCPYQHHKEIKASQGIKISAPGLEHSVAGTSLFVVQPGDDQEKSVNKAMAEMVVLMNRIDKNSDALIEFLKSPAVNIPIYDFNIGPVHRKDVMKASVMLEKKKEYAAIFAFDVKVMPDAREIANESGVKIFVADVIYHLFDQFTTYIEGLREIEKDEKIVEAVFPCVLKIIPDYVFNLKDPIVLGVDVLEGVAKVGTPLCLPSNGFARIGNIASIQNSSKQVDVARKGEKVAIKNIVLGVFDRSQEALQMSKRNVSGDLTLKEWELVRTLKHIFRIP

SEQ ID NO: 25633 - protein, 1294 aa, Oryza sativa
  unsure (1)..(1294): unsure at all Xaa locations
  Clone ID: TF_OsC1713_4887.pep
MQYFFVSRGKPSEPPLSPEEEAKFEAADCLFRGALISXVLADNIVDVYMHMPLGKEMWDALEAKFRVSDPSSELYIMEQFYDXEMVDDRSVVEQAHEIQMLAKELENNRCELPYKFVAGGIIAKLPPSWSDFAISLKHKRQEFTVTDLICSLGVEEKARAKDNRGKRVEGSSSVNXASHNNKKVKPDVKLKATNTFKKKGMGKPKGDCFVCGKPGHXAKDCPKRKDRKFANMVISEGGRTSGYGKFLPTIVSVCHSPDWWVDTGANIHVCANISLFSSYQARRGSSLLMGNGSLAAVLGVGTVDLKFTSGKTVQLKNMQHVLSIKKNLVSSSLLCRDGFRLVSESNKCVVSKYETFIGKGFDSGGLFRFSLDNMCNKIVNYVSNDDESNVWHSRLCHVNFGCMTHLDNMSLIPKFTLVKGAKFHTCVQSKQPRKPHREFEARNLAPLELIHSDLCEMNGVXTKGGKKYFMTLIDDCTRFCYVYLLKTKDEALHYFKIYMAEVENQLERKIKRLRSDRGGEFXSNELTSFCEEFGIIHERMPPYSPXSNGVAKRKNCTLTELVNAMLDTAGLSKESWGEAILIACHVLNRIPTKHKEVTPFEEWERRKLNLSYLLTWGCLAKVNISIGXKLGPKTVDYVFLGYAIHSVGYRFLIVNSGVPDMRVGTITESRDATFSTSSEEPILTPEHFAPIEHIDQTPEGNPEEDNNVATRKSMRQSTAKSVCDDYIVYIVDNTPRTIEEAYSSPNANYWKEAVHSEMDSIMSNGTWEVIERPFGCKPXGCKXVLKKNLRLDGTIEKYKARLVAKGYTQKEGEXFFDIYSSVACLTTIRVLFATAASHGLLVHQMDVKIAFLNGELEEEIHMDQPNGYTLEGQEGIMCKLLKSLYTLEAVEVLKQAPKQWHEKFDKTLTSAGFVVNEADKCVFYRYGGGERVILCLYVNDMSIFGTSLNLIEEVKDFLSKSFEMKDLGVADVILNIKLLRGDEGGITLVQSHYVDKVLSRFGYSDCKAAPTPYDPSVLLRKNRRIARDQLRYSKIIGSLMYLASATRPDISFAVNKLGRFVSNPGDDHWHALERVMRYLKGIMSYEIHYVGYPKVLEGYSESNWIFDADEIKATSGYVFTLGGGAVSWKSCKQTILTRSTMEAELTALDTATVKAEWLRELLMDLPVVEKPVPAILMNCDNQTVIIKVNSSKDNMKSSRHVKRRLKCLRSSVRLRTCTGRRAIKFLGSASSATALVLRGYCCYIGAFTKMSTEIGDKKMNDINGGNTASKSSAHRDGGCQAHPGTPGGFATGGG

SEQ ID NO: 25634 - protein, 1731 aa, Oryza sativa
  unsure (1)..(1731): unsure at all Xaa locations
  Clone ID: TF_OsC359_7611.pep
VPTFPESPILEGKILKNSRASKATPGLEWYIPGLEIELCSRXGCSGWLGLCNGMPRFKPEYLFGTEGFVQELRTMSFAIGFGTAPLYAQIPHDRDEEKCRVKVTLNTNHEDIPSLMFEAGGGNYIHACQEVARIAIGELRDCYSDQLADTEYRYHPRQPQGSDRGSYLEPAGIENDATTRHLVEMLWAMDEFRAEIVLAAQDREDRNRGKICKLEDKVDRLEKELAALKGEAPPQKARVRLTTRKRALFVPRYQLAPKMVLTHSNGNGPNNNNNNNNNNGENPTLAQVLVQQAQLMNMMMQQFQNQQNQGNNHAPPQNKLAEFLRVRPPTFSSTTNPVEASDWLHAIEKKLDLLQCTNQEKVSFASHQLHGPASEWWDHFRLNRTTAEPITWLEFTAALRKTHIPSGVVSPKKKEFRTLTQGSRSVTEYLHEFNRLARYAPEDVRTDEERQEKFLEGLNDELSYPLMTGDYHDFQKLVDMAIRQEDKYNRMEQKKRRIAHFKAQQGNSQRPCLAMGPQAVSQGGSSLVARPQRQFFNNNSGNNNRNQAPRPVATLAQHQPAKREPGNKPRVCFNCGEPGHYSDKCPKPRRVKVVPAQNNSTAPVSKARVNHVAAAEAQGAPDVILGTFLVNSVPATVLFDSGATHSFLSMSFARNHGMEVEDLRRPLMVSTPSNQALSSQRSPSVRIEIQGVPFLANLILLESKDLDVILGMDWLARYKGVIDCANRKVTLTSNDGQVVTVYALPSEPLRSSLNQVSLEEIPIVQDYPDVFPDDLPGMPPKRDIEFRIDLVPRKTPIHKRPYRMAANELAEVKRQVDDLLQKGYIRPSSSPWGAPVIFVEKKDHTERMCMDYRALNDVTIKNKYPLPRIDDLFVQLKGATVFSKIDLRSGQLRIKEEDIPKTDFTTQDGLFECTVMSFGLTNAPAFFMNLMNKVFMEYLDKFVVVFIDDILIYSRTKEEHEEHLRLALEKLREHQLYAKFSKCEFWLSEVKFLGHVISAGGVAVDPSNVEXVTNXKQPKTVSEIHSFLGLAGYYRRFIENFSKIAKPMTQLLXKDVKYKWSEECEQSFQELKSRLISTPILILPDPKKGFHVYYDASKLGLGCVLMQDGKVVAYASRQLHPHEKNYPSHDLELAAVVHALKIWRHYLFGTRTEVYTNHKGLKYIFTQPDLNMRQRRWLELIKDYDMGIHYHPGKANVVADALSRKGYCNATEGRRLPWELCKEFERLNLGIVSRGFVAALEAKPTLIDQVREAQINDPDIQEIKKNMRRGKAIGYLEDEQGTVWLGERICVPENKELKNAILKEAHDTLYSIHPGSTKMYQDLKEKFWWASIKREIAEYVAVCDVCXRVKAEHQKPTGLLQPLMIPEWKWEEIWMDFITGLPRTSSGHDSIWVIVDKLTKVAHFIPVRTTYSGSRLAELYMARIVCLHGVPKKIVSDRGSQFTSKFWKKLQEEMGSKLNFSTAYHPQTDGQIERVNQILEDMLRACALDFGGSWDKNLPYAEFSYNNSYQASLQMAPYEALYGRKCRTPLLWDQTRERQVFGTDILREVEEKVKITQERLRIAQSRHKSYADNRRRDLSFEEGDHVYLRVMPLWGVHRFHTKGKLAPRFVGPYKIVSRRGEVAYQLELPQCLAGVHNVFHVSXLKKCLRVHTEEANLEQIEIQEDLTYVEKPIRILETDERRTRNRVIRFCKVQWSNHSEEEATWEREEELKSAHPHLFASSSESRGRDSV

SEQ ID NO: 25635 - protein, 971 aa, Oryza sativa
  unsure (1)..(971): unsure at all Xaa locations
  Clone ID: TF_OsC1528_2115.pep
MAKELELLKFVLPDKFVVGCIIAKLPPSWRGFGTALEHKRHEYSVKGLIASLDVEEKAREKDAASKGDGGQSSANVVHKAQNKSKGKYKAQQTTNFKKQKKNNNNPNQDERTCFVCGQPGHLARKCLQRKGMKAPAGQTSKSANVTIGNTGDGSGYGNLPTVFSVNQSTNWWVDTRANVHVCADILLFSSYQVARGFTVLMGNGSHASVHGVGTVDLKFTSGKIVQLKNVQHVPSIDRNLVSGSRLTRDGFKLVFESNKVVVSKHGYFIGKGYECGGLFRFSLFDFCNKSVNHICGSVDDEANVWHSRLCHINFGLMSRLSSMCLIPKFFIVKGSKCHSCVQSKQPRKPHKAAEERNLAPLELLHSDLCEMNGVLTKGGKRYFMTLIDDATRFCYVYLLKTKDEALDYFKIYKADVENQLDRKIKRLRSDRGGEFFSNKFDLFCEEHGIIHERTPPCSPESNGIAERKNRTLTDLVNAMLDTAGLPKAWRGEALLTSNHVLNRVPNINKDKTPYEIWIGRKPSLSYLRTWGCLAKVNVPITKKRKLGPKTVDCVFLGYAHHSIAYRFLIVKSEVPDMHVGTIMESRDATFFESFFPMKDTHSSSSQPFEVIPSSITLPEQTEHTHEHVTEEDVSEAPRRSKRQRTAKSFGDDFTVYLVDDTPKSISQAYASLDVNYWKEAIRSEMDSIIANGTWEVTERPYGCKSVGCKWVFKKKLRPDGTIEKYKARLVAKGYTQKEGEDFFDTYSPIARLTTIRVLLSLAASHGLLVHQMDVKTAFLNGELDEKIYMDQPDRFVVEGQQGKVCKLLKSLYDLKXAPKQWHEKFDRTLTSARFAVNEADKCVYYHYGGGEGVILCLYVDDILIFGTNLEVISEVKSFLSQSFHMKDLGVADXINIKLIRGENGTTLLQSHYVEKILNRFGYIDSKPSQTPYDSNLLLRKNKRIAGNQLEYSQIIGSLMYYAGALLVGIHM

SEQ ID NO: 25636 - protein, 1214 aa, Oryza sativa; identical to SEQ ID NO: 20205
  Clone ID: TF_OsC1528_1610.pep

SEQ ID NO: 25637 - protein, 174 aa, Oryza sativa; identical to SEQ ID NO: 20011
  Clone ID: TF_OsC25048_1.pep

SEQ ID NO: 25638 - protein, 142 aa, Oryza sativa
  Clone ID: TF_OsC25048_4.pep
MRVPGARAHEGKSTYESQKEWRDLTRVHVVSRDVLSFLGIPTGASCARQLGNRETGLGGGESGSCGIEGCDCGCDSCYDAFHYPDLQDQYANDIHEQSAQFHHTHSTSSQTHHVDHDLRGYLSSVRAQLSIHSCLLKEEPRI

SEQ ID NO: 25639 - protein, 1114 aa, Oryza sativa
  unsure (1)..(1114): unsure at all Xaa locations
  Clone ID: TF_OsC266287_1.pep
MSPFSGASLARSLSPDTHPRHHRLRPSPNPPLLPLPPDPPASLASPTLEFFPPVGPSRQPPTLPSLGVPASDPAFVSRRYRVPGTGCPFRSAVSSPDLQNPMLDSSSAPNPRLSSRCQGSPKGELPGFKRLYSDVVTAPPQPPAAKSSDFIAVQPPSRFSGAVAKDIRILQSGRLLDLSTQNLSASAQGTGDIQVGENPWKEVKGKRRWRNHSAFTTPNNLEQMHSRKARFLQHMEGKCFRCLSTKHKIVDCREPFRCWRCLKFGHLASSCSKKFAYKSTLPPLKTHTEAFPALAPLCFPPRSFPSPPKSPIMDDLTARPLLDSVVISATGEIERNRERFSAHSLVAWQVGAQEGRVELNTFADDVPSAFNIRRADIQFTKFHPEDFFITCSNQAAKVIGRKCSIHYVEEYSRRRNYNRTFDLWIWTDEPRAIPRGGTFAITSADEEGLATDIPLPDLEPLRNPPPSEPKKGWTYNVLVHVDTLEDLLSRKARAYKWDYDVQDDGTLYKEYPLPCRAEPDPTRGPADDDEDKDRDNHSRSRHRSRSLWDRLRRRSSSRSREPDRRDGHCQDNENRGRPRNRERSEHRSRSCRSRDPSEGSEEVLTLLESHLDPMLHEATVQHSIYSPDTSSPRAVSPVFVPSFAVQGTSQEELAATQASPVQEFIAALSTPVQPPLLPAPETQARRPGRAKVTIPALSSAQRHSERLLRKRRAGAKLESFAQEILSKNFGIMDERSSFDHNIKKIYLQRYKKPLSPASLKTIAELVEKGGCKSIRLKASKKATVAPLGLNSKAKQDSVRCILQQHGATIVCLQETKLSSISDRIILNTLGQRFLRHCVSLPATGTRGGVLLACDENYFSISDVLLGTYSVSAVLTMRGEGLQWSITVVYRPQLEPDKINFLSELEALQTSMKSAWLIIGDFNLIYKASDKNNDRHNRRMMQRFRGLIDKLQVKELYLPGRRFSWAGEGINPTQTKIDRAFVTTDWDMMFDCSNLYPLSSACSDHAPLLLVGNEKMNRFPSFRFEAFWLKIPGFLDIVTDSWTNPILSTNRLAIIRLKLRRLAQDLKRWSRNHVGDIKLQLAVATEVIFQLEXLADGERALLSNLKNRILALSVL

SEQ ID NO: 25640 - protein, 572 aa, Oryza sativa
  unsure (1)..(572): unsure at all Xaa locations
  Clone ID: TF_OsC359_7110.pep
MAAAGDHRGAGAPPPVGRAGEAAFGRAPRLPCGARPSAARALGAADAWDPRRRPAQAACARSTVDREAAAWAPLPWTRLGSGCMVLIVAPRPYKDRSSGLCCKALPYFHMSSGANEGYTSCGPVVEMSWHRAGVLLLGXSILPTCPGGSGRRXGVGSVLLFMARMGWELCHVFRPYTVVMFNREKGKNVSGYTSSNSSFQLNPPLASRELTRAHPWSIPSMLLSSQLPLVRSQDQNQYVFDRAFAPQVNELPMPEEDVPFCHDCREQGHYALNCPWVYAKEAPSFGLAVQTSLNQPPHTKSSLQPSVQSREPNGENPLNPGKCFPPSLSYHVGSRTKQAKGKKSKNQKRKAPMRTEEEVRKMTITSTEWPPAGITIPRRQRGNTFRGARQLTQHLLSHGGRVSDSEGSDQVSSDDEDESPRHLDEEEMESKACTRCGEIGHIASMCLTLCPYCEEDHPPGECPTRKVTCFLCEGTNHVPKDCQLSVLLTKTAEIQRTTLRLSHQLVSSNSNIDDIIHSTNAPPAAPDSAINHSNNTFSTNHSLHRQPQQRIVVDGRSCVSPRPPVRCRPKGD

SEQ ID NO: 25641 - protein, 599 aa, Oryza sativa
  Clone ID: TF_OsC1528_2171.pep
MSITGDNNNTGDKEKEPPVNSNRGNTTSNSSKWPFSGVLPDSIVDVYMHMPLGKDMWDALEAKFGVSDAGSDLYVMELFYDYKMVDGRSVLEQDHEIQMLAKELENNNCELSDKFVAGGIIAKLPPSWTDFATSLKHKRQEFSVTDLIGSLGVEEKARAKDNRGKKIEGGSSANLVQKKNPHASHNNNKKVKPDVKPKATTNFKKKGKRKAKGVCFVCGKPGHWAKNCPYRKDKKSANMVISEGGGTLGFLIVNSGVPDMSVGTITESRDATFFENEFSMKNAPSTSSQEPILSPEHFALIEHIDQTLEENPEEDNILATRKSKRQRTAKSFGDDYIVYLVDDTPRTIEEAYSSSDADYWKEAIRSEMDSIMSNGTWEVVERPYGCKPVGCKWVFKKKLRLDGTIEKYKARLVAKGTMSYGIHYAGYPKVLEGYSDSNWISDADEIKATSGGRLHSTGILDGSDETNLFETSSTEKDFNSGNGQPPFRAAVNPEADQPDTPADPTPSRPPSPPVPRKGSSYTSDQAVTHSRLWPTDRPRRGGGEARPPTAVTGGAGSGGDGRKAAAHGRSSGVAGRPKRKTKAATTTRREEGRTSGGDT

SEQ ID NO: 25642 - protein, 1532 aa, Oryza sativa; identical to SEQ ID NO: 20027
  Clone ID: TF_OsC359_5735.pep

SEQ ID NO: 25643 - protein, 1283 aa, Oryza sativa; identical to SEQ ID NO: 20126
  Clone ID: TF_OsC359_5774.pep

SEQ ID NO: 25644 - protein, 1775 aa, Oryza sativa
  Clone ID: TF_OsC359_5862.pep
MSYQSSAALRSSPGIAGAPSHRHPEAPAVTLLAAGRLLPPFGLSIPSFLESPFSRKKSLKSSKASKAAPGLEWYIPGLEIELCSRGGCSEWLGLYNRMPRYKPEYLFGVEGFVQELRTMSFVIGFGTAPFYAQIPHDRHEEKCRVKVTLNSNSEDVPSVMFEAGGRNYIHACQEVARIAIGELRDRYSDQLADTEYRYHPRQPQGSDRGSYLETEGIENDVTTKHLVEMLWAMDESRAGTVLAAQDREDRNRGKICKLEDKVDRLEKELAALKGEAPPQKARIRLTARKRALFVPRYQLAPKMVNTRSNGNGPNNPNNNNNGENPTLAQVLAQQTQLMNMMMQQFQNQQNQGNNHAPPQNKLAEFLRVRPPVFSSTTNPVEASDWLHAIEKKLDLLQCTDQEKVSFASHQLHGPASEWWDHFRLNRTTAEPITWLEFTAAFRKTHIPSGVVSLKKKEFRSLSQGSRSVTEYLHEFNRLARYAPEDVRNDEERQEKFLGGLNDELSYPLMVGDYPDFQKLVDKAIRQEDKYNRMEQKKRRIAQFKTQQGNNQKPRLTLGPQPMPQGGSSSVVRPQRQFFNNNAGNNIRNQAPRPVAAPTQQQPAKREQGNKPVVCFNCGDPGHYADKCPKPRRVKVVPAQSNSTVSASKARVNHVAAAEAQDAPDVILGTFLVNSVPATVLFDSGATHSFLSMSFAGNHGMEVEDLRRPLMVSTPSNQALSLQRSPSVRIEIQGVPFLANLILLESKDLDVILGMDWLARHKGVIDCANRKVTLNSYDGRVVTVHALSSEFLRSRLNQITLEEIPIVREYPDVFPDDLPGMPPKRDIEFRIDLVPGTTPIHTRPYRMAANELAEVKRQVDDLLQKGYIRPSSSPWGAPVIFVEKKDHTQRMCVDYRALNDVTIKNEYPLPRIDDLFDQLKGATVFSKIDLRSGYHQLRIKEEDIPKTAFTTRYGLFECTVMSFGLTNAPAFFMNLMNKVFMEYLDKFVVVFIDDILIYSRTKEEHEEHLRLALEKLREHQLYAKFSKCEFWLSEVKFLGHVISAGGVAVDPSNVESVTNWKQPKTVSEIRSFLGLAGYYRRFIENFSKIAKPMTRLLQKDVKYKWSEECEQSFQELKSRLISAPILILPDPKKGFQVYCDASKFGLGCVLMQEGKVVAYASRQLRPHEKNYPTHDIELAAVVHALKIWRHYLFGTRTEVYTDHKSLKYIFTQPDLNMRQRRWLELIKDYDMGIHYHPGKANVVADALSRKGYCNATEGRQLPLELCKEFERLNLGIVGRGFVAALEAKPTLIDQVREAQINDPDIQEIKKKMRRGKAIGFLEDEHGTVWLGERICVPDNKDLKDAILKEAHDTLYSIHPGSTKMYQDLKERFWWASMKREIAEYVAVCDVCQRVKAEHQKPAGLLQPLKIPEWKWEEIGMDFITGLPRTSSGHDSIWVIVDRLTKVAHFIPVKTTYSGSRLAELYMARIVCLHGVPKKIVSDRGSQFTSNFWKKLQEEMGSKLNFSTAYHPQTDGQTERVNQILEDMLRACALDFGGSWDKNLPYAEFLYNNSYQASLQMAPYEALYGRKCRTPLLWDQTGERQVFGTDILREAEEKVKIIQERLRVAQSRHKSYADNRRRDLSFEEGDYVYLRVTPLRGVHRFHTKGKLAPRFVGPYKIVSRRGEVAYQLELPQSLAGVHNVFHVSQLKKCLRVPTEEANIEQIEVQEDLTYVEKPIRILETSERRTRNRVIRFCKVQWSNHSEEESTWEREDELKSAHPYLFASSSESRGRDSV

SEQ ID NO: 25645 - protein, 1713 aa, Oryza sativa
  unsure (1)..(1713): unsure at all Xaa locations
  Clone ID: TF_OsC359_6016.pep
MICTAGYGCSEWLGLYNRMPRYKPEYLFGVEGFVQELRTMSFAIGFGTAPFYAQIPHDRHEEKCRVKVTLNSNSEDVPSVMFEARGRNYXHACQEVARIAIGELRDRYSDQLADTEYRYHPRQPQGSDRGSYLETEGIENDATTRHLVEMLWAVDETRAETVLAAQDREDRNRGKICKLEDKVDRLEKELAALKGEAPPQKARIRLTARKRALFVPRYQLAPKFSPVSLLVSCPCQMVLTHSNGNGXPNNNNNNNNNGENPTLAQVLAQQTQLMNMMMQQLQNQQNQGNNHAPPQNKLAEFLRVRPPIFSSTTNPVEAGDWLHAIEKKLDLLQCTDQEKVSFASHQLHGPASEWWDHFRLNRTIAEPITWLEFTAAFRKTHIASGVVSLKKKEFRSLTQGSRSVTEYLHEFNRLARYAPEDVRNDEERXEKFLEGLNDELSYSLMTGDYLDFQKLVDKAIRQEDKYNRMEQKKRRIAQFKTQQGNNQRPGFTLGPPSMPQGGFLSVVCPQGQFFNNNAGNNIRXNQAPRPVAASTQQQPAKKEQGSKPVVCFNCGDPGHYADKCPKPRRVKVVPAQSNSTAPAPKARVNHVAAAEAQGAPDVILGTFLVNLVPATVLFDSGATHSFLSMSFAGNHGMEVEDLRRPLMVSXPSNQALSLQRSPSVRIEIKGVPFLANLILLESKDLDVILRMDWLARHKGVIDCANRKVTLTSNDGRVVTVHALSSEFLRSRLNQIXLEEIPIVREYPDVFPDDLPGMPPKRDIEFRIDLVXPGTTPIHKRPYRMAANELAEVKRQVDDLLQKGYIRPSSSPWGAPVIFVEKKDHTQRMCVDYRALNDVTIKNKYPLPRIDDLFDQLKGATVFSKIDLRSGYHQLRIKEEDIPKTAFTTRYGLFECTVMSFGLTNAPAFFMNLMNKVFMEYLDKFVVVFIDDILIYSRTKEEHEEHLRLALEKLRGHQLYAKFSKCEFWLSEVKFLGHVISAGGVAVDPSNVESVTNWKQPKTVSEIRSFLGLTGYYRRFIENFSKIAKPMTRLLQKDVKYKWSEECEQSFQELKNRLISAPILILPDPKKGFXVYCDASKLGLGCVLMQDGKVVAYASRQLRPHEKNYPTHDLELAAVVHALKIWRHYLFGTRTEVYTDHKSLKYIFTQPDLNMRQRRWLELIKDYDMGIHYHPGKANVVADALSRKGYCKATEGXQLPLELCQEVERLNLGIVRRGFVAALEAKPTLIDQVREAQINDPDIQEIKKNMRGGKAIGFLEDEQGTVWLGERICVPDNKDLKDAILKEAHDTLYSIHPGSTKMYQDLKERFWWASMKREIAEYVAVCDVCQRVKAEHQKPAGLLQPLKIPEWKWEEIGMDFITGLPRTSTGHDSIWVIVDRFIKVAHFIPVKTTYSGSQLAELYMARIVCLHGVPKKIVSDRGSQFTSNFWKKLQEEMGSKLNFSTAYHPETDGQTERVNQILEDMLRACALDFGGSWDKNLPYAEFLYNNSYQASLQMAPYEALYGRKCRTPLLWDQTGERQVFGMDILREAEEKVKIIQEGLRVAQSRHKSYADNRRRDLSFEEGDYVYLRVTPLRGVHRFHTKGXLAPRFVGPYKIVSRSGEVAYQLELPQSLAGVHNVFHVSQLKKCLRVPTEEANLEQIEVQEDLTYVEKPIRILEIDERRTRNRVIRFCKVQWSNHSEEESTWEREDELKSAHPHLFASSSESRGRDSV

SEQ ID NO: 25646 - protein, 744 aa, Oryza sativa; identical to SEQ ID NO: 20035
  Clone ID: TF_OsC359_6046.pep

SEQ ID NO: 25647 - protein, 1534 aa, Oryza sativa; identical to SEQ ID NO: 20141
  Clone ID: TF_OsC359_6050.pep

SEQ ID NO: 25648 - protein, 1827 aa, Oryza sativa
  unsure (1)..(1827): unsure at all Xaa locations
  Clone ID: TF_OsC359_6406.pep
KDPRCLLYPSQPSPSPLVVGRALAPCALASPSPPPLQPCSAVAPAVAAAREDRRRHRQVAAVLVRPFAAVGTRRSFVAVDNPKVAAASFSSPSSSVIPSFPESPFSQKKSLKSSKASKATPGLEWYIPGLEIELCSRGGCSEWLGLYNRMPRYKPEYLFGVEGFVQELRTMSFVIGFGTAPFYAQIPHDRHEEKCRVKVTLNSNSEEVPSVMFEAGGRNYIHACQEVARIAIGELRDRYSDQLADTEYRYHPRQPQGSDRGSYLETEGIENDVTTKHLVEMLWAMDESRAETVLAAQDREDRNRGKICKLEDKVDRLEKELAALKGEAPPQKARIRLTARKRALFVPRYQLAPKMVNTRSNGNGPNNPNNNNNGENPTLAQVLAQQTQLINMMMQQFQNQQNQGNNHAPPQNKLAEFLRVRPPVFSSTTNPVEASDWLHAIEKKLDLLQCTDQEKVSFASHQLHGPASEWWDHFRLNRTTAEPITWLEFTAAFRKTHIPSGVVSLKKKEFRSLTQGSRSVTEYLHEFNRLARYAPEDVRNDEERQEKFLGGLNDELSYPLMVGDYPDFQKLVDKAIRQEDKYNRMEQKKRRIAQFKTQQGNNQKPRLTLGPQSMPQGGSSSVVRPQRQFFNNNAGNNIRNQAPRPVAAPAQQQPAKREQGNKPVVCFNCGDPGHYADKCPKPRRVKVVPAQNNSAVPASKARVNHVAAAEAQDAPDVILGTFLVNSVPATVLFDSGATHSFLSMSFAGNHGMEVEDLRRPLMVSTPSNQALSLQRSPSVRIEIQGVPFLANLILLESKDLDVILGMDWLARHKGVIDCANRKVTLNSYDGRVVTVHALSSESFRSRLNQITLEEIPIVREYPDVFPDDLPGMPPKRDIEFRIDLVPGTTPIHKRPYRMAANELAEVKRQVDDLLQKGYIRPSSSPWGAPVIFVEKKDHTQRMCVDYRALNDVTIKNKYPLPRIDDLFDQLKGATVFSKIDLRSGYHQLRIKEEDIPKTAFTTRYGLFECTVMSFGLTNAPAFFMNLMNKVFMEYLDKFVVVFIDDILIYSXTKEEHEEHLRLALEKLREHQLYAKFSKCEFWLSEVKFLGHVISAGGVAVDPSNVESVTNWKQPKTVSEIRSFLGLAGYYRRFIENFSKIAKPMTRLLQKDVKYKWSEECEQSFQELKSRLISAPILILPDPKKGFQVYCDASKLGLGCVLMQDGKVVAYASRQLRPHEKNYPTHDIELAAVVHALKIWRHYLFGTRTEVYTDHKSLKYIFTQPDLNMRQRRWLELIKDYDMGIHYHPGKANVVADALSRKGYCNATEGRQLPLELCKEFERLNLGIVGKGFVAALEAKPTLIDQVREAQINYPDIQEIKKNMRRGKAIGFLEDEHGTVWLGERICVPDNKDLKDAILKEAHDTLYSIHPGSTKMYQDLKERFWWASMKREIAEYVAVCDVCQRVKAEHQKPAGLLQPLKIPEWKWEEIGMDFITGLPRTSSGHDSIWVIVDRLTKVAHFIPVKTTYSGSRLAELYMARIVCLHGVPKKIVSDRGSQFTSNFWKKLQEEMGSKLNFSTAYHPQTDGQTERVNQILEDMLRACALDFGGSWDKNLPYAEFSYNNSYQASLQMAPYEALYGRKCRTPLLWDQTGERQVFGTDILREAEEKVKIIQERLRVAQSRHKSYADNRRRDLSFEEGDYVYLRVTPLRGVHRFHTKGKLAPRFVGPYKIVSRRGEVAYQLELPQSLAGVHNVFHVSQLKKCLRVPTEEANIEQIEVQEDLTYVEKPIRILETNERRTRNRVIRFCKVQWSNHSEEESTWEREDELKSAHPHLFASSSESRGRDSV

SEQ ID NO: 25649 - protein, 1012 aa, Oryza sativa; identical to SEQ ID NO: 20111
  Clone ID: TF_OsC359_6469.pep

SEQ ID NO: 25650 - protein, 1330 aa, Oryza sativa
  Clone ID: TF_OsC359_6565.pep
MVRCGGLCYARGIVTAPFRAPGLEWYIPGLEIGLCSRDDCSEWLGLYNRMPRYKPEYLFGVEGFVQELRTMSFAIGFGTAPFYAQIPHDRHEEKCRVKVTLNSNSEDIPSVMFEAGGRNYIHACQEVARIAIGELRDRYSDQLADTEYRYHPRQPQGSDRGSYLETEGIENDATTRHLVEMLWAMDETRAETVLAGQDREDRNRGKICKLEDKVDRLEKELAALKGEAPPQKARIHLTARKRALFVPRYQLAPKVRVVEKEVTPAPADPPVVNNKLAEFLRVRPPIFSSTTNPVEAGDWLHAIEKKLDLLQCTDQEKVSFASHQLHGPASEWWDHFRLNRTTAEPITWLEFTAAFRKTHIPSGVVSLKKKEFRSLTQGSRSVTEYLHEFNRLARYAPEDVRTDEERQEKFLEGLNNELSYPLMTGDYPDFQKLVDKAIRQEDKYNRMEQKKRRIAQFKTQQGNNQRPRLTLGPQSMPQGGSSSVVRPQCQFLNNNAVNNIRNQAPRPVVASTQQQPAKREQGSKPVVCFNCGDPGHYADKCPKPRRVKVVPAQSNSTAPASKARVNHVAAAEAQDAPDVILGTFLVNLVPATVLFDSGATHSFLSMSFAGNHGMEVENFRRPMMVSTPSNQALYLQRSPSVRIEIQGIPFLANLILLESKDLDVILGMDWLARYKGVIDCANRKVTLTSDDGRVVTVHALSSESLRSRLNQITLEEIPIVREYPDVFPDDLPGMPPKRDIEFRIDLVPGTTPIHKRPYRMAANELAEVKRQVDDLLQRGYIRPSSSPWGAPVIFVEKKDHTQRMCVDYRALNDVTIKNKYPLPRIDDLFDQLKGATVFSKMDLRSGYHQLRIKEEDIPKTAFTTRYGLFECTVMSFGLTNAPAFFMNLMNKVLMEYLDKFVVVFIDDILIYSRTREEHEEHLRFALEKLREHQLYAKFSCVLMQDGKVVAYASRQLRPHEKNYPTHDLELATVVHALKIWRHYLFGTRTEVYTDHKSLKYIFTQPDLNMRQRRWLELIKDYDMGIHYHPGKANVVADALSRKGYCNATEGRQLPLELCKEFERLNLEIVSRAFVAALEAKPTLIDQVREAQINDPDIQEIKKNMRRGKAIGFLEDEQGTVWLGERICVPDNKDLKDAILKEAHDTLYSIHPGSTKMYQDLKERFWWASMKREIAEYVAVCDVCQRVKAEHQKPAGLLQPLKIPEWKWEEIGMDFITGLPRTSSGHDSIWVIVDRLTKVAHFIPVKTTYSGSRLAELYMARIVCLHGVPKKIVSDRGSQFTSNFWKKLQEEMGSKLNFSTAYHPQTDGQTERVNQILEDMLRACALDFGGS

SEQ ID NO: 25651 - protein, 2155 aa, Oryza sativa; identical to SEQ ID NO: 20094
  Clone ID: TF_OsC359_6605.pep

SEQ ID NO: 25652 - protein, 1721 aa, Oryza sativa
  unsure (1)..(1721): unsure at all Xaa locations
  Clone ID: TF_OsC359_6632.pep
VISLTLLTIIEELCSRDGCSEWLGLCNRMPRYKPEYLFGVEGFVQELRTMSFVVGFGTAPFYAQIPHDRHEEKCRVKVTLNSNSEDIPSVMFEAGGRNYIHSCQEVARIAIGELRDRYSDQLADTEYRYHPRQPQGSDRGSYLETEGIENDATTTHLVEMLWAMDESRAETVLAAQDREDWNRGKICKLEDKVDRLEKELAALKGEAPPQKVRIRLTARKRALFVPRYQLAPKFPPVSLLVPCPCQMVNTRSNGNGPNPNNPNNNNNGENPTLAQVLAQQTQLMHMMMQQLQNQQNQGNNHAPPQNKLAEFLRVRPPIFSSTTNPVEASDWLHALEKKLDLLQCTDQEKVSFASHQLHGPASEWWDHFRLNRTTAEPITWLEFTAAFRKTHIPSGVVSLKKKEFRSLTQGSRSVTEYLHEFNRLARYAPEDVRNDEERQEKFLEGLNDELSYPLMTGDYSDFQKLVDKAIRQEDKYNRMEQKKRRIAQFKIQQGNNQKPRLILGHQSMPHGGSSSVVRPQRQFFNNNAGNNNRNQAPRLIAASTQQQPAKREQGSKLVVCFNCGDPGHYADKCPKPRRVKVVPAQSNSTAPVSKARVNHVAAAEAQDALDVILGTFPVNSVPATVLFDSGATHSFLSMSFAGNHGMEVEDLRRPLMVSTPSNQALSLQRSPSVRIEIKGVPFLANLILLESKDLDVILGMDWLARHKGVIDCANRKVTLTSNDGRVVTVHALSSESLRSRLNQITLEEIPIVREYPDVFPDDLPGMPPKRDIEFRIDLVPGTTPIHKRPYRMAANELAEVKRQVDDLLQKGYIRPSSSPWGAPVIFVEKKDHTQRMCVDYRALNDVTIKNKYPLPRIDDLFDQLKGATIFSKIDLRSGYHQLRIKEEDIPKTAFTTKYGLFECTVMSFGLTNAPAFFMNLMNKVFMEYLDKFVVVFIDDILIYSRTKEEHEEHLRLALEKLREHQLYAKFSKCEFWLFEVKFLGHVISAGGVAVDSSNVESVTNWKQPKTVSEIRSFLGLAGYYRRFIENFSKIAKPMTRLLQKDVKYKWSEECEQSFQELKNRLISAPILILPDPKKGFQVYCDASKLGLGCVLMQDGKVVTYASRQLRLHEKNYPTHDLELAAVVHALKIWRHYLFGTRPEVYTDHKSLKYIFTQPDLNMRQRRWLELIKDYDMGIHYHPGKANVVADALSRKGYCNATEGRXLPLELCKEFERLNLGIVSRGFVAALEAKPTLIDQVREAQINDPDIQEIKKNMRRGKAIGFLEDEHGTVWLGERICVPDNKDLKDAILKEAHDTLYSIHPGSTKMYQDLKERFWWASMKREIAEYVAVCDVCQRVKAEHQKPAGLLQPLKIPEWKWEEIGMDFITGLPRTSSGHDSIWVIVDRLTKVAHFIPVKTTYSGSRLAELYMARIVCLHGVPKKIVSDRGSQFTSNFWKKLQEEMGSKLNFSTAYHPQTDRQTERVNQILEDMLRACALDFGGSWDKNLPYAEFSYNNSYQASLQMAPYEALYGRKCRTPLLWDQTGERQVFGTDILREAEEKVKIIQERLRVAXSRHKSYADNRRRDLSFEEGDYVYIRVTPLRGVHRFHTKGKLAPRFVGPYKIVSRRGEVAYQLELPQSLAGVHDVFHVSQLKKCLRVPTEEAXLEQIEVQXDLTYVEKPIRILETNERRTRNRVIRFCKVQWSNHSEEESTWEREDELKSAHPYLFASSSESRGRDSV

SEQ ID NO: 25653 - protein, 815 aa, Oryza sativa
  Clone ID: TF_OsC359_6662.pep
MLNLVIICLAPGLEWYIPGLEIELCSRDGCSEWLGLYNRMPRYKPEYLFGVEGFVQELRTMSFVIGFGTAPFYAQIPHDRHEEKCRVKVTLNSNSEDIPSVMFEAGGRNYIHACQEVARIAIGELRDRYSDQLADTEYRYHPRQPQGSDRGSYLETEGIENDATTRHLVEMLWAMDESRAETVLAAQDREDRNRGKICKLEDKVDRLEKELAALKGEAPPQKARIRLTARKRALFVPRYQLAPKMVNTRSNGNGPNNPNNNNNGENPTLAQVLAQQTQLMNMMMQQFQNQQNQGNNHAPPQNKLAEFLRVRPPVFSSTTNPVEASDWLHAIEKKLDLLQCTDQEKVSFASHQLHGPASEWWDHFRLNRITAEPITWLEFTAAFRKTHIPSGVVSLEKKEFSARRSFLGGLNDELSYPLMVGDYPDFQKLVDKAIRQEDKYNCMEQRKRRIAHFKAQQGSNQKPRLTLGPQPMSQGGSSSVVRPQRQFFNNNAGNNIRNQAPRPVAAPVQQQPAKREQGSKPVVCFNCGDPGHYADKCPKPRRVKVVPAQSNSAVPASKARVNHVAAAEAQDAPDVILGTFLVNSVPATVLFDSGATHSFLSMSFAGNHGMEVEDLRRPLMVSTPSNQALSLQRSPSVRIEIKGVPFLANLILLESKDLDVILGMDWLARHKDDLPGMPPKRDIEFRIDLVPGTTPIHKRPYRMAANELAEVKRQVDDLLQKGYIRPSSSPWGAPVIFVEKKDHTQRMCVDYRALNDVTIKNKYPLPRIDDLFDQLKGATVFSKIDLRSGYHQLRIKEEDIPKTAFTTRYGLFEGL

SEQ ID NO: 25654 - protein, 1634 aa, Oryza sativa; identical to SEQ ID NO: 20155
  Clone ID: TF_OsC359_6777.pep

SEQ ID NO: 25655 - protein, 1293 aa, Oryza sativa; identical to SEQ ID NO: 20051
  Clone ID: TF_OsC359_6816.pep

SEQ ID NO: 25656 - protein, 653 aa, Oryza sativa
  Clone ID: TF_OsC359_6857.pep
NLILLESKDLDVILGMDWLTRYRGVIDCASRTIKLTNAKGEVVTFQSPVPQKPGISLNQAAGEEQEVAVEKTTKKLEDIPIVREYPEVFPDDLTTMPPKRDIEFRIDLVPRTAPIHKRPYRMRANELAEVKNQVDEQLQKGYIRPSTSPWGALVIFVEKKDKTKRMCVDYRALNEVTIKNKYPLPRIDDLFDQLKGATVFSKIDLRSGYHQLRIREEDIPKTAFIARKCDFWLKEVQFLGHIVNAQGVAVDPANVESVTKWTPPRTVTQDGKVVSYASWQLRPHEGNYPTHDLELAAVVHALKIWWHYLIGNRCEVYTDHKSLKYIFTQPDLNLRQRRWLELINDYDMGIHYHPGKANVVADALSRKSYCNVAWVEQLCCEVQCDLEHLNLGIVEHGFVAALEAQPTLVEQVRIAQASDPKIAELKKNMRVGKARGFVEDEQGTIWMGERLCVPENKELKDLIMTEAHQTQYSIHPGSTKMYQDLKEKFWWVNMRREIAEFVALCDVCQRVKAEHQRPAGLLQPLQIPEWKWEEIGMDFITGLPRTSSGHDSIWVVVDRLTKVAHCIPVHTTYSGKSGDVTDSGSGSAERTARAAHTHRQTAALGRKRRAPRCRGQHGELTGDLNGGGRPTDGDGDKEEAAGTFGSTTAKLLR

SEQ ID NO: 25657 - protein, 1749 aa, Oryza sativa
  Clone ID: TF_OsC359_6997.pep
MVNTRSNWNGPNPPDNNNRGSLVDRTQQEFLRVRPPVFSSTTNPVEASDWLHAIEKKLDLLQCTDQEKVSFASHQLHGPASEWWDHFRLNRTTDEPITWLEFTAAFRKTHIPSGVVSLKKKEFRSLTQGSRSVTEYLHEFNRLARYAPEDVCNDEERQEKFLGGLNDELSYPLMVGDYPDFQKLVDKAIRQEDKYNRMEQKKRRIAQFKTQQGNNQKPRLTLGPQPMSQGGSSSVVRPQRQFFNNNAGNNIRNQAPRPVAAPAQQQPAKREQGSKPVVCFNCGDPGHYADKCPKPRRVKVVPTQNNSAVPASKARVNHVAAAEAQDAPDVILVREYPDVFPDDLPANELAEVKRQVDDLLQKGYIRPSSSPWGAPLKGATVFSKIDLRSGYHQLRIKEEDIPKTAFTTSFLGLAGYYRRFIENFSKIAKPMTRLLQKDVKYKWSEESLEAKPTLIDQVREAQINDPDIQEIKKNMRRGKAIGFLEDEHGTPCAAVVPAVAVAREDRRRHRQVAAVLVRPFAAVGTRRSFVAVDNPKVAAASFSSPSSSVPSPPPFWSPVCSPRCPLRAGALRWCRGAAVRRRVSAARAVFFAEPPPSSVMTNVPSPGASTLAPARDECLETLILTGRGEAVLPPSRIVSERQAGLPRRFMPESATDREIVSLGEGCPAPRYPGRSVFFLPFAMAGLVPPFSSFFMDVLEFYDLQMAHLTPNAVMTLAIFAHLCEMFIGVRPSLRLFRWFFTVQPVSPPSVVGGCYFQPRGPVLNRYIPCVLRKKWDDWKSDWFYTPLADEARLRLPSQPPTQASNWRAPVDLGDGYDAVLDRLAGLRSQGLTGAMVFGDYLRRRIAPLQRRARGAWEYTGSEDCMRTHQGVRWDRAPEDFKIVVQRVLNLSSVEASLIPQGVLPLCSDPDRASILTIMQAVGASEERAPRGHDGAGGSRRGEQSTPGGGRASGPRDGGPGSGRPADARGKRKQEGTPPPSPPRGGGAARASSRRPEGATPTSQPEGERKKKRLRKMGGTEPSRGNLISPPSEIPSRPSRHSKSGQSEAEDPATTEARRRESDRREAADRLREAGEAAQVAVRARQAEEAAREEARLRQAEAATTSEAARDEAAGVSLGPTPSGDAQDKPGPGDIPESGMSIGGPSRAASSPRRLFPTPSVAPLSAEPLLQALAVANTTVLDGLSAQVEALQAERAELDAAWARVEEGRRSVEAMVEVGRKAHRRHVSELEARRKVLGEIAKEVEEERGAALIATTVMNEAQDTLRLQYGSWEAELGKKLDAARGVLDAAAARERRAAETEVASRRREEALEARAMALEERACAVERDLADREAAVAIREVTLAVHEAACAEEESALRLREDALTERERALKEAEAAAQRLADSLSLREAAQEEQARRNLESARAERAALNQRAAELEAQARELDARARSGGAATGDSDLAARLAAAEHTIADLQGALDSSTGEVEALRLAGEIGPSMLRDAVSRLDRAGRQAGLWGGRTVKYAANQGGLAQRLSEMAGTLQRLPEELEGTINSSSRDLARGAVELVLASYQARDPDFSPWTALDEFPPGTEDGARVQVRDAADHIVHSFEGSAPRLAFALNSDEEGDDGGVGDSGDEAGDPGSSPQMARVGASAWGDPHVETGQAGSVVTEGYGPPLSGGPRSALDGEDMTLVAGMDRPLLPPPVTPPCLSGGSGGGRSCHSGTGGVPCPRFLLTSHSVRELKKLRGGLGLFGSDLFEHAVVPHAPLNA

SEQ ID NO: 25658 - protein, 778 aa, Oryza sativa
  Clone ID: TF_OsC359_7193.pep
MVNTRSNGNGPNNPNNNNNGENPTLAQVLAQQTQLMNMMMQQLQNQQNQGNNHVPPQNKLAEFLHVRPPVFSSTTNPVEAGDWLHAIEKKLDLLQCTDQEKVSFASHQLHGPASEWWDHFRLNRTTAEPITWLEFTAAFRKTHIPSGVVSLKKKEFRSLTQGSRSVTEYLHEFNRLARYAPEDVRNDEERQEKFLEGLNDELSYPLMTGDYSDFQKLVDKAIRQEDKYNRMEQKKCRIAHFKAQQGNNQKPRLTLGSQSMPQGGSSSVVRPQRQFFNNNAGNNIRNQAPRPVAAPAQQQPVKREQGSKPVVCFNCGDPGHYADKCPKPRRVKVVPAQSNSTAPASKARVNHVAAAEAQDAPDVILVREYSDVFPDDLPANELAEVKRQVDDLLQKGYIRPSSSPWGAPVIFVEKKDHTQRMCVDYRALNDVTIKNKYPLPRIDDLFDQLKGATVFSKIDLRSGYHQLRIKEEDIPKTAFTTRYGLFECTVMSFGLTNAPAFFMNLMNKVFMEYLDKFVVVFIDDILIYSRTKEEHEEHLRLALEKLREHQLYAKFSKCEFWLSEVKFLGHVISAGGVAVDPSNVESVTNWKQPKTVSEIRSFLGLAGYYRRFIENFSKIAKPMTRLLQKDVKYKWSEEYVAVAREGRHRGRRRVAVLVRPFAVAGDHRSSVAVDNPKVSAASFSSPSSSVVRPPPFWSPVCSPRRPLRAGALRLRPSAAVRRRACAARAVRSAEPPPLSVTSPLTSSGSSARGSLRGTRLRSGGDKPTGVAGESMPCL

SEQ ID NO: 25659 - protein, 1848 aa, Oryza sativa
  unsure (1)..(1848): unsure at all Xaa locations
  Clone ID: TF_OsC359_7218.pep
MPRYKPEYLFGVEGFVQELRTMSFVIGFGTVPFYAQIRHDRHEEKCRVKVTLNSNSEDIPSVMFEAGGRNYIHACQEVARIAIGELRDRYSDQLADTEYRYHPRQPQGSDRGXEGIENDATTRHLVEMLWAMDESRAETVLAAQDREDRNRGKICKLEDKVDRLEKELAALKGEAPPQKARIRLTARKRALFVPRYQLAPKVRVVEKEVAPADPPVIIISSDEEEESKRNCSKIEWVATQDDEDEPNEPSIDLRCSEELDNGNGPNLNNPNNNNNGENPTLAQVLAQQTQLMNMMMQQLQNQQNQGNNHAPPQNKLAEFLRVRPPVFSSTTNPVEAGDWLHAIEKKLDLLQCTDQEKVSFASHQLHGPASEWWDHFRLNRTTAEPITWLEFTAAFRKTHIPSGVVSLKKKEFRSLTQGSRSVTEYLHEFNRLARYAPEDVRNDEERQEKFLEGLNDELSYPLMTEDYSDFQKLVDKAIHQEDKYNRMEQKKRRIAHFKAQQGNNQKPRLTLGPQSMPHGGSSSVVRPQHQFFNNNAGNNIRNQAPRPVAASTQQQPAKREQGSKPVVCFNCGDPGHYADKCPKPRHVKVVPAQSNSAVPASKARVNHVAAAEAQDAPDVILGTFLVNSVPATVLFDSGATHSFLSMSFAGNHGMEVEDLRCPLMVSTPSNQALSLQRSPSVRIEIQGVPFLANLILLESKDLDVILGMDWLARHKGVIDCANRKVTLTSNDGRVVTVHALSSEFLRSRLNQITLEEIPIVRGYPDVFPDDLPGMPPKRDIEFRKDLVPGTTPIHKRPYRMAANELAEVKRQVDDLLQKGYIRPSSSPWGAPVIFVEKKDHTQRMCVDYRALNDVTIKNKYPLPRIDDLFDQLKGATVFSKIDLRSGYHQLRIKEYGLFECTVMSFGLTNAPAFFMNLMNKVFMEYLDKFVVVFIDDILIYSKTKEEHEEHLRLALEKLREHQLYAKFSKCEFWLSEVKFLGHVISAGGVAVDPSNVESVTNWKQPKTVSEIRSFLGLAGYYRKFIENFSKIAKPMTRLFQKDVKYKWSEECEQSFQELKNRLISAPILILPDPKKGFQVYCDASKLGLGCVLMQDGKVVAYASRQLRPHEKNYPTHDLELAAVVHALKIWRHYLFGTRTEEFERLNLGIVSIGFVAALEAKPTLIDQVREAQTNDPDIQEIKKNMRRGKAIGFLEDEHGTVWLGERICVPDNKDLKDAILKEAHDTLYSIHPGSTKMYQDLKERFWWASMKREIAEYVAVCDVCQRVKAEHQKPAGLLQPLKIPEWKWEEIGMDFITGLPKTSLGHDSIWVIVDRLTKVAHFIPVKTTYSGSRLAELYMARIVCLHGVPKKIVSDRGSQFTSNFWKKLQEEMGSKLNFSTAYHPQTDGQTERVNQILEDMLRACALDFGGSWDKNLPYAEFSYNNSYQASLQMAPYEALYGRKCRTPLLWDQTGERQVFGTDILREAEEKVKIIQERLRVAQSRHKSYADNRRRDLSFEEGDYVYLRVTPLRGVHRFHTKGKLVPRFVGPYKIVSRRGEVAYQLELPQSLAEVHNVFHVSQLKKCLRVPTEEANLEQIEVQEDLTYVEKPIRILETNERRTRNRVIRFCKVQWSNHSEEESTWEREDELNEGFEFVSDSSFPNLPSSSPVAVGLRLRLRAPLKGSPWSPLPAATLAFASRRRSRPSAPCAAVVPAVAIAREGRRRVRRRVAVLVRPFAVAEDRRSVIAAVDPKSFAASSSSPSPSVDLPPPFASSRRRSPASMRRPSRPSCPSRRRRGDVIADAIKFVLHSVVSGESVFTGEEFEEFQGQQGNSWFGMVYSWFGDRTVQPGWLFRMVGPIQQDAALQA

SEQ ID NO: 25660 - protein, 1593 aa, Oryza sativa
  Clone ID: TF_OsC359_7242.pep
MARRRGAAAVGGALTSGELEAMAVESSGQGAWLAAVAVLESIKISLMIGIWKNSKRAITRMPRFKPEYLFGVEGFVQELRTMSFVIGFGTAPFYAQISHDRHEEKCRVKVTLNSNSEDIPSVMFEAGGRNYIHACQEVARIAIGELRDRYSDQLADTEYRYHPRQPQGSDRGSYLETEGIENDATTRHLVEMLWAMDETRAETVLAAQDREDRNRGKIYKLEDKVDRLEKELATLKGEAPPQKARIRLTARKRALFVPCYQLAPKVRVVEKEVAPTLADPSVIIISDDEKEESKRNHSKIEWVATQDDEDEPNEPSIDLRCSEELECHNQQNQGNNHAPPQNKLAEFLRVRPPIFSSTTNPVEAGDWLHTIEKKLDLLQCTDQEKVSFASHQLHGPASEWWDHFRLNRTTAEPITWLEFTAAFRKTHIPSGVVSLKKKEFRSLTQGSRSVTEYLHEFNRLARYAPEDVRNDEERQEKFLEGLNDELSYPLMTGDYHDFQKLVDKAIRQEDKYNRMEQKKRRIAQFKTQQGNNQKPRLTLGPQTMPHGGSSSVVRPQRQFFNNNAGNNNRNQAPRPVAAPTQQQPAKREQGSKPVVCFNCGDPGHYADKCPKPRRVKVVPAQSNSTVPASKARVNHVAAAEAQDAPDVILGTFLVNLVPAAVLFDSGATHSFLSMSFAGNHGMEVEDLRRPLMVSTPSNQALSLQRSPSVRIEIKGVLFLANLILLESKDLDVILGMDWLARHKGVIDCANRKVTLTSHDGRVVIVHALSSESLRSRLNQITLEEIPIVREYPDVFPDDLPGMPPKRDIEFGIDLVPGTTPIHKRPYRMAANELAEVKRQVDDLLQKGNIRPSSSPWGAPVIFGGKERSYPEDLKGATVFSKIDLRSGYHQLRIKEEDIPKTAFTTRYGLFECTVMSFGLTNAPAFFMNLMNKVFMEYLDKFVVVFIDDILIYSRTKEEHEEHLRLALEKLREHQLYAKFSKCEFWLSEVKFLGHKQPKTVSEICSFLGLAGYYRRFIENFSKIAKPMTRLLQKDVKYKWSEECEQSFQELKNRLISAPILILPDPKKGFQDGKVVAYASRQLRPHEKNYPTHDLELAAVVHALKIWRHYLFGTRTEVYTDHKSLKYIFTQPDLNMRQRRWLELIKDYDMGICVPDNKDLKDAILKEAHDTLYSIHPGSTKMYQDLKERFWWASMKREIAEYVAVCDVCQRVKAEHQKPAGLLQPLKIPEWKWEEIGMDFITGLPRTSSGHDSIWVIVDRLTKVAHFIPVKTTYSGSRLAELYMARIVCLHGVPKKIVSDRGSQFTSNFWKKLQEEMGSKLNFSTAYHPQTDGQTERVNQILEDMLRACALDFGGSWDKNLPYAEFSYNNSYQASLQMAPYEALYGRKCRTPLLWDRTGERQVFGTDILREAEEKVKIIQERLRVAQSHYKSYADNRRRDLSFEEGDYVYLRVTPLRGVHRFHTKGKLAPRFVGPYMIVSRRGEVAYQLELPQSLAGVHNVFHVSQLKKCLRVPTEEANLEQIEVQEDLTYVEKPIRILETNERRTRNRVIRFCKVQWSNHSEEESTWEREDELKSAHPHLFASSSESRGRDSV

SEQ ID NO: 25661 - protein, 1587 aa, Oryza sativa
  unsure (1)..(1587): unsure at all Xaa locations
  Clone ID: TF_OsC359_7268.pep
EKELAALKGEAPPQKARIRLTARKRALFVPRYQLAPKIRVVEKEVAPAQADPPVIIISSDEEEEPKRNNSKFEWVAIKDEEDEPNEPSIDLLCSEELEXLFPRFLFLSCPCQMVNTRSNGNGPNLNNPNNNNNGENPTLAQVLAQQTQLMHMMMQQLQNQQNQGNNHAPPQNKLAEFLRVRPPIFSSTTNPVEAGDWLHAIEKKLDLLQCTDQEKVSFASHQLHGPASEWWDHFRLNRTTAEPITWLEFTAAFRKTHIPSGVVSLKKKEFRSLTQGSRSVTEYLHEFNRLARYAPEDVRNDEERQEKFLEGLNDELSYPLMTGDYYDFQKLVDKAIRQEDKYNRMEQKKRRIAQFKTQQGNNQKPRLTLGPQSMPQGGSSSVVRPQRQFFNNNAGNNIRNQALRPVAVSTQQQPAKKEQGSKPVVCFNCGDPGHYADKCPKPRRVKVVPAQSNSTAPASKARVNHVAAAEAQDAPDVILGTFLVNSVPATVLFDSGATHSLLSMSFAGNHGMEVEDLRRPLMVSTPSNQALSLQRSPSVRIEIQGVSFLANLILLESKDLDVILGMDWLARHKGVIDCANRKVTLTSNDGRVVTVHALSSESLRSRLNQITLEEIPIVREYPDVFPDDLPGMPPKRDIEFRIDLVPGTTLIHKRPYRMAANELAEVKRQVDDLLQKGYIRPSSSPWGAPVIFVEKKDHTQRMCVDYRALNDVTIKNKYPLPRIDDLFDQLKGATIFSKIDLRSGYHQLRIKEEDIPKTTFTTRYGLFECTVMSFGLTNAPAFFMNLMNKVFMEYLDKFVVVFIDDILIYSRTKEEHEEHLRLALEKLREHQLYAKFSKCEFWLSEVKFLGHVISAGGVAVDPSNVESVTNWKQPKTVSEIRSFLGLAGYYRRFIENFSKIAKPMTRLLQKDVKYKWSEECEQSFQELKNRLISAPILILPYPKKGFQVYCDASKLGLGCVLMQDGKVVAYASRQLRPHEKNYPTHDLELAAVVHALKIWRHYLFGTRTEVYTDHKSLKYIFTQSDLNMRQRRWLELIKDYDMGIHYHPGKANVVADALSRKGYCNATEGRQLPLELCKEFERLNLGIVSRGFIAALEAKPTLIDQVREAQINDPDIQEIKKNMRRGKAISFLEDEQGTVWLGERICVPDNKDLKDAILKEAHDTLYSIHPGSTKMYQDLKERFWWASMKREIAEYVAVCDVCQRVKAEHQKPAGLLQPLKIPEWKWEEIGMDFITGLPRTSSGHDSIWIIVDRLTKVAHFIPVKTTYSGSRLAELYMARIVCLHGVPKKIVSDRGSQFTSNFWKKLQEEMGSKLNFSTAYHPQTDGQTERVNQILEDMLRACALDFGGSWDKNLPYAEFLYNNSYQASLQMAPYEALYGRKCRTPLLWDQTGERQVFGTDILREAEEKVKIIQERLRVAQSRHKSYADNRRRDLSFEEGDYVYLRVTPLRGVHRFHTKGKLAPRFVGPYKIISRRGEVAYQLELPQSLAGVHNVFHVSQLKKCLRVPTEEANLEQIEVQEHLTYVEKPIRILEIDERRTRNRVIHFCKVQWSNHSEEESTWEREDELKSAHPHLFASSSESRGRDSV

SEQ ID NO: 25662 - protein, 813 aa, Oryza sativa; identical to SEQ ID NO: 20136
  Clone ID: TF_OsC359_7295.pep

SEQ ID NO: 25663 - protein, 598 aa, Oryza sativa
  unsure (1)..(598): unsure at all Xaa locations
  Clone ID: TF_OsC359_7353.pep
MRVRAAEPPPPVVRQGEEKPGRTSSFVAGRRSSPLPVKPSRRRRSSRRRPSSFVVWLKGEYRWVRLVVLHVYMSSKFAADHPISGEVANPGRPLMIRAEQPSPPSPPLAATAISTTNPVEAGDWLHAIEKKLDLLQCTDQEKVSFASHQLHGPASEWWDHFRLNRTTAEPITWLEFTAAFRKTHIPSGVVSLKKKEFRSLTQGSRSVTEYLHEFNRLARYAPEDKLVDKAIRQEDKYNRIEQKKRRIAQFKTQQGNSQRPRLTLGPQSMPQGGSSSVVRPQRQFFNNNAGNNIRNQALRPVAASTQQQPAKREQGRKPVVCFNCGDPGHYADKCPKPRRVKVVPAQSNSTAPAPKARVNHVAAAEAQDAPDVILXKGYIRPSSSPWGAPVIFVEKKDHTQRXLKGATVFSKIDLRSGYHQLRIKEEDIPKTAFTTRYGLFECTVMSFGLTNAPAFFMNLMNKVFMEYLDKFVVVFIDDILMIGARIRDTDFLQGDDILWINFRGIYELYQLDALDVSIMSCWILMEIQRARRRRVFDTGFIDPRRVNVTMLDQYPQETEDNLVHLLKAQHYKTFILLPYNIEFHWVLLLFDLSACTVN

SEQ ID NO: 25664 - protein, 668 aa, Oryza sativa
  Clone ID: TF_OsC359_7374.pep
MVNTRASGSGNNNNGENPTLAQVLAQQTQLMNMMMQQLQNQQNQGNNHAPPQNKLAEFLRVRPPIFSSTTNPVEAGDWLHAIEKKLDLLQCTDQEKVSFASHQLHGPASEWWDHFRLNRTTAEPITWLEFTAAFRKTHIPSGVVSLKKKEFRSLTQGSRSVTEYLHEFNRLARYAPEDVRNDEERQEKFLEGLNDELSYPLMTGDYPDFQKLVIKAIRQEDKYNSMEQKKRRIAQFKTQQGNNQKPRLTLGPQSMPQGGSSSVVRPQRQFFNNNAGNNIRNQAPRPVAASTQQQPAKREQGSKPVVCFNCGDPGHYADKCPKPRRVKVVPAQSNSTVPASKARVNHVAAAEAQDAPDDPRCRRYPSPLSPSLLVAGSALAPCRFAPPSSPPLQPCAAVAPVIVVAREGRHRGRRHVAVLVRSFAVAVDRRSTVAAVDPIFSAASISPPVPSVDLPPLLWSPVSSPRHALRPGALRSRRRAVVRRRACAARAAAGGDVTADVIVAVCREPHGSLRSTRLRSGGDKPTGVAPVIVVAQEGRHHGRRHVAVLVRSSAVAVDRRSTVAAVDPIFSAASISPPVPSVDLPPLLWSPVSSPRHALRPGALRSRRRAVVRRRACAARAAAGGDVTADVIVAVCHSDVSGESVFAGEDFEEFQGQQGKSHRSQTTL

SEQ ID NO: 25665 - protein, 815 aa, Oryza sativa
  Clone ID: TF_OsC359_7395.pep
PGLEWYIPGLEIELCSRGGCSEWLGLYNRMPCYKPEYLFGVEGFVQELRTMSFVIGFGNAPFYAQIRHDRHEEKCRVKVTLNSNSEDIPSVMFEAGGRNYIHACQEVARIAIGELRDRYSDQLADTEYRYHPRQPQGSDRGSYLETEGIENDVTTRHLVEMLWAMDESRAETVLAAQDREDRNRGKICKLEDKVDRLEKELAALKGEAPPQKARIRLTARKRALFVPRYQLAPKVRVVEKEVAPANPPVIIISSDEEEEPKRNNSKFEWVAIKDEEDEPNEPSIDLLCSEELDTTNPVEAGDWLHAIEKKLDLLQCTNQEKVSFASHQLHGPASEWWDHFRLNRITAEPITWLEFTAAFRKTHIPSGVVSLKKKEFRSLTQGSRSVTEYLHEFNRLARYAPEDVRNDEERQEKFLGGLNDELSYPLMVGDYPDFQKLVDKAIRQEDKYNRMEQKKRRIAQFKTQQGNNQKPRLTLGPQPMPQGGSSSVVRPQRQFFNNNAGNNIRNQAPRPVAAPAQQQPAKREQGSKPVVCFNCGDPGHYADKCPKPRRVKVVPVQNNSAVPASKARVNHVAAAEAQDAPDVILVREYPDVFPDDLPERIHQTEFITMGSSGYYRRFIENFSKIAKPMTRLLQKDVKYKWSEESLEAKPTLIDQVREAQINDPDIQEIKKNRRRGKAIGFLEDEHGTPCSAVAPAVAAAREDRRRHRQVAAVLVRPFAAVGTRRSIVAVVNPKVAAASFSSPSPSVPFPPPFWSPVCSPRCPLRAGALRWCRGAAVRRRVSAARAVFFAEPPPSSVTSSLTSSGSYPVSRSWTD

SEQ ID NO: 25666 - protein, 1635 aa, Oryza sativa
  unsure (1)..(1635): unsure at all Xaa locations
  Clone ID: TF_OsC359_7429.pep
MVGSPGLEWNIPGVEIELCSRGGCSEWLGLYNRMPRYKPEYLFGVEGFVQELRSMSFVIGFGTAPFYAQIPHDRHEEKCRVKVTLNSNSEDIPLVMFEAGGRNYIHACQEVARIAIGELRDRYSDQLADTEYRYHPRQPQGSDRGSYLETEGIENDATTKHLVEMLWAMDESRAETVLAAQDREDRNRGKICKLEDKVDRLEKELAALKGEAPPQKARIRLTARKRALFVPRYQLAPKMVNTRSNGNGPNNPNNNNGENPILAQVLAQQTQLMNMMMQQFQNQENQGNNHAPPQNKLAEFLRVRPPVFSSTTNPVEASDWLHAIEKKLDLLQCTDQEKVSFASHQLHGPASEWWDHFRLNRTTAEPIIWLEFTAAFRKTHIPSGVVSLKKKEFRSLTQGSRSVTEYLHEFNRLARYAPEDVRNDEERQEKFLGGLNDELSYPLMVGDYPDFQKLVDKAIRQEDKYNRMEQKKRRIAQFKTQQGNNQKPHLTLGPQPMPQGGSSSVVRPQRQFFNNNAGNNIRNQGPRPVAAPAQQQPVKREQGSKPVVCFNCGDPGHYADKCPKPRRVKVVPAQNNSAVPASKARVNHVAAAEAQDAPDVILGTFLVNSVPATVLFDSGATHSFLSMSFVGNHGMEVEDLRRPLMVSTPSNQALSLQRSPSVRIEIQGVPFLANLILLESKDLDVILGMDWLARHKGVIDCANKKVTLTSYDGRVVTVHALSSESLRSRLNQITLEEISIVREYPDVFPDDLPGMPPKRDIEFRIDLVPGTTPIHKRPYRMAANELAEVKRQVDDLLQKGYIRPSSSPWGAPVIFVEKKDHTQRMCVDYRALNDVTIKNKYPLPRIDDLFDQLKGATVFSKIDLRSGYHQLRIKEEDIPKTAFTTRYGLFECTVMSFGFTNAPAFFMNLMNKVFMEYLDKFVVVFIDDILIYSRTKEEHEEHLRLALEKLREHQLYAKFSKCEFWLSEVKFLGHVISAGGVTVDPSNVESVTNWKQPKTVSEIRSFLGLAGYYRRFIENFSKIAKPMTRLLQKDVKYKWSEECEQSFQELKSRLISAPILILPDPKKGFQVYCDASKLGLGCVLMQDGNVVAYASRQLRPHEKNYPTHDIELAAVVHALKIWRHYLFGTRTEVYTDHKSLKYIFTQPDLNMRQRRWLELIKDYDMGIHDHPGKANVVADALSRKGYCNATEGRQLPLELCKEFERLNLGIVGRGFIAALEAKPTLIDQVREAQINDPDIQEIKKNMRRGKAIGFLEDEQGTVWLGERICVPDNKDLKDAVLKEAHDTLYSIHPGSTKMYQDLKERFWWASMKREIAEYVAVCDVCQRVKAEHQKPAGLLQPLKIPEWKWEEIGMDFITGLPRTSSGHDSIWVIVDRLTKVAHFIPVKTTYSGSRLAELYMARIVCLHGVPKKIVSDRGSQFTSNFWKKLQEEMGSKLNFSTAYHPQTDGQTERVNQILEDMLRACALDFGGSWDKNLPYAEFSYNNSYQASLQMASYEALYGRKCRTPLLWDQTGERQVFGTDILREAEEKVKIIQERLRVAQSRHKSYADNRRRDLSFEEGDYVYLRVTPLRGVHRFHTKGKLAPRFVGPYKIVSRRGEVAYQLELPQSLAGVHNVFHVSQLXKKCLSVPTEEA

SEQ ID NO: 25667 - protein, 738 aa, Oryza sativa
  unsure (1)..(738): unsure at all Xaa locations
  Clone ID: TF_OsC359_7443.pep
MVNTRSNGNGPSNNNNGENPTLAQVLAQQTQLMNMMMQQLQNQQNQGNNHVPPQNKLAEFLRVRPPVFSSTTNPVEAGDWLHAIEKKLDLLQCTDQEKVSFASHQLQGPASEWWDHFRLNRITAEPITWLEFTAAFQKTHIPSGVVSLKKKEFRSLTQGSRSVTEYLHEFNRLARYAPEDVRNGEERQEKFLEGLNDELSYPLMTGDYHDFQKLVDKAIRQEDKYNRMEQKKRRIAQFKTQQGNNQKPRLTLRPQSMPHGGSSFVVRPQRQFFNNNAGNNIRNQAPRPVAAPTQQQPAKREQGSKPVVCFNCGDPGHYADKCPKPRRVKVVPTQSNSTVPASKARVNHVAAAXEVQDAPDVILGTFLVNSVPATVLFDSGATHSFLSMSFAGNHGMEVEDLRRPLMVSTPSNQALSLHRSPSVRIEIQGVPFLANLILLESKDLDVILGMDWLARHKGVIDCANRKVTLTSNDGRVVTVYALSSESLRSRLNQITLEEIPIVREYPDVFPDDLPGMPPKRDIEFRIDLVPGTTPIHKRPYRMAANELAEVKRHVDDLLQKGYIRPSSSPWGAPVIFVEKKDHTQRMCVDYRALNDVTIKNKYPLPRIDDLFDQLKGATVFSKIDLRSGYHQLRIKEEDIPKTAFTTRYGLFECTVMSFGLTNAPAFFMNLMNKVFMEYLDKFVVVFIDDILIYSRTKEEHEEHLRLALEKLREHQLYAKFSKCEFWLSEVLFSFGIFG

SEQ ID NO: 25668 - protein, 1636 aa, Oryza sativa; identical to SEQ ID NO: 20071
  Clone ID: TF_OsC359_7488.pep

SEQ ID NO: 25669 - protein, 1756 aa, Oryza sativa; identical to SEQ ID NO: 20169
  Clone ID: TF_OsC359_7516.pep

SEQ ID NO: 25670 - protein, 1008 aa, Oryza sativa; identical to SEQ ID NO: 20120
  Clone ID: TF_OsC359_7532.pep

SEQ ID NO: 25671 - protein, 1693 aa, Oryza sativa; identical to SEQ ID NO: 20060
  Clone ID: TF_OsC359_7537.pep

SEQ ID NO: 25672 - protein, 664 aa, Oryza sativa
  Clone ID: TF_OsC359_7756.pep
PGLEWYIPGLEIELCSRDGCSKWLGLYNRMPRYKPEYLFGVEGFVQELRTMSFVIGFGTAPFYAQIAHDRHEEKCRVKVTLNSNSEDIPSVMFEAGGRNYIHACQEVARIAIGELRDRYSDQLADTEYRYHPRQPQGSDRGSYLETEGIENDVTTKHLVEMLWAMDESRAETVLAAQDREDWNRGKICKLEDKVDRLEKELAALKGEAPPQKARIRLTARKRALFVPRYQLAPKVRVVEKEVAPAQADPPVIIISSDEEEESKRNNSKIEWVATQVDKDEPSIDLRCLEELETTAEPITWLEFTAAFRKTHIPSGVVSLKKKEFRSLTQGSRSVTEYLHEFNRLARYAPEDVRNDEERQEKFLGGLNDELSYPLMVGDYPDFQKLVDKAIRQEDKYNHMEQKKRRIAHFKAQQGNNQKPRLTLGPQSMPQGGSSSVVRPQRQFFNNNAGNNIRNQAPRPVAAPAQQQPAKREQGSKPVVCFNCGDPGHYADKCPKPRRVKVVPAQNNSAVPASKARVNHVAAAEAQDAPDVIFLVNSVPATVLFDSANELAEVKRQVDDLLQKGYIRPSSSPWGAPPSPSLGKTTVVLAKSSPSSFAPSPSPEITGAASPSSTRRFPPLPPCRRRRPLVFRRRLGHRWYTSDQSKTIRIAVPAVMGGSNNVFRD

SEQ ID NO: 25673 - protein, 1592 aa, Oryza sativa
  unsure (1)..(1592): unsure at all Xaa locations
  Clone ID: TF_OsC359_7844.pep
MVVQNGWAYATGVYTHMPRYKPEYLFGVEGFVQELRTMSFVVGFGTAPFYAQIPHDRHEEKCRVKVTLNSNSEDIPSVMFEAGGRNYIHSCQEVARIAIGELRDRYSDQLADTEYRYHPRQPQGSDRGSYLETEGIENDATTTHLVEMLWAMDESRAETVLAAQDREDWNRGKICKLEDKVDRLEKELAALKGEAPPQKVRIRLTARKRALFVPRYQLAPKVRVVEKEVAPADPPVVNMVNTRSNGNGPNPNNPNNNNNGENPTLAQVLAQQTQLMHMMMQQLQNQQNQGNNHAPPQNKLAEFLRVRPPIFSSTTNPVEAADWLHAIEKKLDLLQCTDQEKVSFASHQLHGPASEWWDHFRLNRTTAEPITWLEFTAAFRKTHIPSGVVSLKKKEFRSLTQGSRTVTEYLHEFNRLARYAPENVRNDEERQEKFLEGLNDELSYPLMTGDYSDFQKLVDKAIRQEDKYNRMEQKKRQIAQFKTQQGNNQRPRLTLGPQSMPHGGSSSVVRPQRQFFNNNVGNNIRNQVPRPVAAPTQQQPAKREQGSKPVVCFNCGDPGHYADKCPKPRRVKVVPVQSNSTAPASEARVNHVAAAEAQDAPDVILGTFLVNSVPATVLFDSGATHSFLSMSFAGNHGMEVEDLRRPLMVSTPSNQALSLQRSPSVRIEIKGVPFLANLILLESKDLDVILGMDWLARHKGMIDCANRKVTLSSNDGRVVTVHALSSESLRSRLTQVTLEEIPIVREYPDVFPDDLPGMPPKRDIEFRIDLVPGTTPIHNRPYRMAANELAEVKRQVDDLLQKGYIRPSSSLWGAPVIFVEKKDHTQRMCVDYRALNDVTIKNKYPLPRIDDLFDQLKDKFVVVFIDDILIYSRTKEEHEEHLRLALEKLREHQLHAKFSKYEFWLSEVKFLGHKDVKYKWSVECEQSFQELKSRLISAPILILPDPKKGFQVYCDASKLGLGCVLMQDGKVVAYASRQLRLHEKNYPTHDLELAAVVHALKIWHHYLFGTRTEVYTDHKSLKYIFTQPDLNMRQRRWLELIKDFDMGIHYHPGKANVVADALSRKSYCNATEGRQLPLELCKEFERLNLGIVRRGFVAALEAKSTLIDQVREAQINDPDIQEIKKNMRRGKAIGFLEDEQGTVWLGERICVPDNKDLKDAILKEAHDTLYSIHPGSTKMYQDRKERFWWASMKREIAEYVALCDVCQRVKAEHQKPAGLLQPLKIPEWKWEEIGMDFITGLPRTSSGHDSIWVIVDRLTKVAHFIPVKTTYSGSRLAELYMARIVCLHGVPKKIVSDRGSQFTSNFWKKLQEEMGSKLNFSTAYHPQTDGQTERVNQILEDMLRACALDFGGSWDKNLPYAEFSYNNSYQASLQMAPYEALYGQKCRTPLLWDQTGERQVFGTDILREAEEKVKIIQERLRVAQSRHKSYADNHRRDLSCIXKGDYVYLRVTPLRGVHRFHTKGKLAPRFVGPYKIVSRRGEVAYQLELPQSLAGVHNVFHVSQLKKCLRVPTEEANLEQIEVQEDLTYVEKPIRILETNERRTRNRVIRFCKVQWSNHSEEESTWEREDELKSAHPYLFASSSESRGRDSV

SEQ ID NO: 25674 - protein, 2038 aa, Oryza sativa; identical to SEQ ID NO: 20150
  Clone ID: TF_OsC359_7902.pep

SEQ ID NO: 25675 - protein, 1431 aa, Oryza sativa
  Clone ID: TF_OsC359_7935.pep
MPRYKPEYLFGVEGFVQELRTMSFAIGFGTAPFYAQIPHDRHEEKCRVKVTLNSNSEDIPSVMFEAGGRNYIHACQEVARIAIGELRDRYSDQLADTEYRYHPRQPQGSDRGSYLETEGIENDATTKHLVEMLWAMDESRAETVLAAQDREDRNRGKICKLEDKVDRLEKELAALKGEAPPQKARIRLTARKRALFVPRYQLAPKVRVVEKEVAPAQADPPEKVSFASHQLHGPASEWWDHFRLNRITAEPITWLEFTAAFRKTHIPSGVVSLKKKEFRSLTQGSRSVTEYLHEFNRLARYAPEDVRNDEERQEKFLGGLNDELSYPLMVGDYPDFQKLVDKAIRQEDKYNRMEQKKRRIAQFKTQQGNNQKPRLTLGPQSMPHGGSSSVVRPQRQFFNNNAGNNIRNQAPRPVAAPVQQQPAKREQGSKPVVCFNCGDPGHYADKCPKPRRVKVVPAQSNSAVPASKARVNHVAAAEAQDAPDVILVREYPDVFPDDLPANELAEVKRQVDDLLQKGYIRPSSSPWGAPVIFVEKKDHTQRMCVDYRALNDVTIKNKYPLPRIDDLFDQLKGATVFSKIDLRSGYHQLRIKEEDIPKTAFTTRYGLFECTVMSFGLTNAPAFFMNLMNKVFMEYLDKFVAVFIDDILIYSRTKEEHEEHLRLALEKLREHQLYAKFSKCEFWLSEVKFLGHVISAGGVAVDPSNVESVTNWKQPKTVSEIRSFLGLAGYYRRFIENFSKIAKPMTRLLQKDVKYKWSEECEQSFQELKNRLVSAPILTLPDPKKGFQVYCDASKLGLGCVLMQDGKVVAYASRQLRPHEKNYPTHDLELAAVVHALKIWRHYLFGTRTEVYTDHKSLKYIFTQPDLNMRQRRWLELIKDYDMGIHYHPGKANVVADALSRKGYCNATKGRQLPLELCKEFERLNLGIVGRGFVAALEAKPTLIDQVREAQINDPDIQEIKKNMRRGKAIGFLEDEQGTVWLGERICVPDNKDLKDAILKEAHDTLYSIHPGSTKMYQDLKERFWWASMKREIAEYVAVCDVCQRVKAEHQKPAGLLQPLKIPEWKWEEIGMDFITGLPRTSSGHDSIWVIVDRLTKVAHFIPVKTTYSGSRLAELYMARIVCLHGVPKKIVSDRGSQFTSNFWKKLQEEMGSKLNFSTAYHPQTDGQTERVNQILEDMLRACALDFSGSWDKNLPYAEFSYNNSYQASLQMAPYEALYGRKRSACRTPLLWDQTGERQVFGTDILREAEEKVKIIQERLRVAQSRHKSYADNRRRDLSFEEGDYVYLRVTPLRGVHRFHTKGKLAPRFVGPYKIVSRRGEVAYQLELPQSLAGVHNVFHVSQLKKCLRIPTEEANIEQIEVQEDLTYVEKPIHILETNERRTRNRVIRFCKVQWSNHSEEESTWEREDELKSAHPHLFASSSESRGRDSV

SEQ ID NO: 25676 - protein, 1672 aa, Oryza sativa
  Clone ID: TF_OsC359_7977.pep
MPVGLFPVVTATKTSGAATTGSVSSRRRARRAAAVARRSAATPSSAPLTREDQRGGPDARIGIERRRNGRRATHATEGASSSGVSPQHGRGDQPSVPPVGGVGCRAFVASLRNVRWPPRFRPTIAEKYDGSVNPAEFLQVYTTGIEAAGGDDRVKKRTYTQYSEGMMSHFAHTFSGLSSPQHHTMHPCTRGDLRVQGGVRHNRMLEKIASKEPQTTAELFQLADRVARKEEAWTWNPSGSGVATSAAPGSAAQTGRRDRRRKKRSAHSDDEGHVLTVEGASRATRKGRPASDKKKEAGAPSRERPTGKWCIVHNTSLHDLADCRAVKSLAERTRKWEEERRQERREGKSPAVPSGNRRSEAKQKAPVEDIDGGDDDLGFQEPGATIATVDGGACAHVSRRSLKAMKRELLAAAPTHEATRRARWSEVALTFDQTDHPPCVARGGQIAMAPGMVLWPSQPIIGVTPGHTWPLGHIDLPVTFGGSVNFRTERVNFDVADLSLPYNAVLGRPALVKFMAAVHYAYLQMKMPGPGGPISVHGDLKVALACMEQRADHLAAASKPEGGDERLGTSVPAAPRQRMITCDEVPEDALVSFLRANADVFAWRPADMPGVPREVIEHRLAVRPGARPIRQKVRRQAPERQAFIREEVARLLEAGFIREVIHPEWLANPVVVPKANGKLRMCIDYTDLNKACPKDPYPLPRIDQIVDSTAGCDLLCFLDAYSGYHQIRMAREDEEKTTFITPIGTYCYTTMPFGLKNAGPTFQRTTRISLGSQIGRNVEAYVDDLVVKTRDQETLLSDLAETFESLRSARIKLNPDKCVFGVPAGKLLGKLRDVQCVTGCMAALSRFISRLGEKALPLFKLLKRSGPFTWTEEAERALTQLKAYLSSPPVLIAPEPDEPLLLYLAATPQVVSAALVVERDEDNPHSAHPHPVLAWPGREQGGEAPEPNGGPRPPTTGAGPLPACQTVPGAPDPQDGPGATAGRPHLSPSDPEVNPVPTRPGREQGEEAPEPNGGLRPPTTGVGPLPACPTMPGAPDPQDGTEATVGRPRLSSSDPEVVGTEDECAPRGRLDEERPRDAAPGEEDRPHRKVQRPVYFVSEALRDAKTRYPQAQKMLYAILMASRKLRHYFQAHRVTVVTSYPLGQILHNREGTGRVVCMEYRCSDPQMDAYVRQVRRMERHFDGIELRHVPRRDNTIADELSRLASSRAQTPPGAFEERLAQPSARPDPLGETDAPDRPPRPVGVQASGPEGSAPSSLRLIAWIAEIQAYLTDKTLPEDREGSERVQRISKRYVLVEGTLYRRAANGILLKCIPREQGVELLADIHEGECGAHSASRTLVGKAFRQGFYWPTALNDAVDLVRRCRACQFHAKQIHQPAQALQIIPLSWPFAVWGLDILGPFRQAPGGFEYLYVAIDKFTKWPEAYPVVKIDKHSALKFIKGITARFGVPNRIITDNGTQFTSELFGDHCEDMGIKLCFASPAHPRSNGQVERANAEILRGLKTKTFNILKKHGDSWIEELPAVLWANRTTPSRATGETPFFLVYGAEAVLPSELTLRSPRATMYCEADQDQLRRDDLDYLEERRRRAALRAARYQQSLRRYHQRRIRARSLCVNDLVLRRVQTRAGLSKLSPMWEGPYRVISVPRPGSVRLAAGDGTELPNPWNIEHLRRFYP

SEQ ID NO: 25677 - protein, 1743 aa, Oryza sativa
  unsure (1)..(1743): unsure at all Xaa locations
  Clone ID: TF_OsC359_8111.pep
MVYSWFGDRTVQPMPRYKPEYLFGVEGFVXELRTMSFVIGFGTAPFYAQIPHDRHEEKXRVKVTLNSNSEDIPSVMFEAGGRNYIHACQEVARIAIGELRDRYSDQLADTEYRHHPRQPQGSDRGSYLETEGIENDATTKHLVEMLWAMDESRAETVLAAQDREDRNRGKICKLEDKVDRLEKELAALKGEAPPQKARIRLTARKRALFVPRYQLAPKVRVVEKEVAPAQADPPVIIISSDEEEESKRNNSKIEWVATQDDEDEPSIDLRCLEELDNGNGPNNPNNNNNGENPTLAQVLAQQTQLMNMMMQQFQNQQNQGNNHAPPQNKLAEFLRVRPPVFSSTTNPVEASDWLHAIEKKLDLLQCTDQEKVSFASHQLHGPASEWWDHFRLNRTTAEPITWLEFTAAFRKTHIPSGVVSLKKKEFRSLTQGSRSVTEYLHEFNRLARYAPEDVRNDEERQEKFLGGLNDELSYPLMVGDYPDFQKLVDKAIRQEDKYNRMEQKKRRIAQFKTQQGNNQKPRLTLGPQPMPQGGSSSVVRPQRHFFNNNAGNNIRNQAPRPVAAPAQQQPAKREQGSKPVVCFNCGDPGHYADKCPKPRRVKVVPAQNNSAVPASKARVNHVAAAEAQDAPDVILGTFLVNSVPATVLFDSGATHSFLSMSFAGNHGMEVEDLRRPLMVSTPSNQALSLQRSPSVRIEIQGVPFLANLILLESKDLDVILGMDWLARHKGVIDCANKKVTLTSYDGRVVTVHALSSESLRSRLNQITLEEIPIVREYPDVFPDDLPGMPPKRDIEFTIDLVPGTTPIHKRPYRMAANELAEVKRQVDDLLQKGYIRPSSSPWGAPVIFVEKKDHTQRMCVDYRALNDVTIKNKYPLPRIDDLFDQLKGATVFSMIDLRSGYHQLRIKEEDIPKTAFTTRYGLFECTVMSFGLTNAPAFFMNLMNKVFMEYLDKFVVVFIDDILIYSRTKEEHEEHLRLALEKLREHQLYAKFSKCEFWLSEVKFLGHVISAGGVAVDPSNVESVTNWKQPKTVSEIRSFLGLAGYYRRFIENFSKIAKPMTRLLQKDVKYKWSEECEQSFQELKSRLISAPILILPDPKKGFQVYCDASKLGLGCVLMQDGKVVAYASRQLRPHEKNYPTHDIELAAVVHALKIWRHYLFGTRTEVYTDHKSLKYIFTQPDLNMRQRRWLELIKDYDMGIHYHPGKANVVADALSRKGYCNATEGRQLPLELCKEFERLNLGIVGRGFVAALEAKPTLIDQVREAQINDPDIQEIKKNMRRGKAIGFLEDEQGTVWLGERICVPDNKDLKDAVLKEAHDTLYSIHPGSTKMYQDLKERFWWASMKREIAEYVAVCDVCQRVKAEHQKPAGLLQPLKIPEWKWEEIGMDFITGLPRTSSGHDSIWVIVDRLTKVAHFIPVKTTYSGSRLAELYMARIVCLHGVPKKIVSDRGSQFTSNFWKKLQEEMGSKLNFSTAYHPQTDGQTERVNQILEDMLRACALDFGGSWDKNLPYAEFSYNNSYQASLQMAPYEALYGRKCRTPLLWDQTGERQVFGTDILREAEEKVKVIQERLRVAQSRHKSYADNRRRDLSFEEGDYVYLRVTPLRGVHRFHTKGKLAPRYVGPYKIVSRRGEVAYQLELPQSLAGVHNVFHVSQLKKCLRVPTEEANLEQIEVQEDLTYVEKPIRILETNERRTRNRVIRFCKLQWSNHSEEESTWEREDELKSAHPHLFASSSESRGRDSV

SEQ ID NO: 25678 - protein, 2293 aa, Oryza sativa
  Clone ID: TF_OsC359_8129.pep
MTRLLQKDVKYKWSEECEQSFQELKSRLISAPILILPDPKKGFQVYCDASKLGLGCVLMQDGKVVAYASRQLRPHEKNYPTHDIELAAVVHALKIWRHYLFGTRTEVYTDHKSLKYIFTQPDLNMRQRRWLELIKDYDMGIHYHPGKANVVADALSRKGYCNATEGRQLPLELCKEFERLNLGIVGRGFVAALEAKPTLIDQVREAQNNDPDIQEIKKNMRRGKAIGFLEDEHGTVWLGERICVPDNKDLKDAILKEAHDTLYSIHPGSTKMYQDLKERFWWASMKREIAEYVAVCDVCQRVKAEHQKPAGLLQPLKIPEWKWEEIGMDFITGLPRTSSGHDSIWVIVDRLTKVAHFIPTDGQTERVNQILEDMLRACALDFGGSWDKNLPYAEFSYNNSYQASLQMAPYEALYGRKCRTPLLWDQTGERQVFGTDILREAEEKVKIIQERLRVAQSRHKSYADNRRRDLSFEEGDYVYLRVTPLRGVHRFHTKGKLAPRFVGPYKIVSRRGEVAYQLELPQSLAGVHNVFHVSQLKKCLRVPTEEANIEQIEVQEDLTYVEKPIRILETTPGLEWYIPGLEIELCSRGGCSEWLGLYNRMPRYKPEYLFGVEGFVQELRTMSFVIGFGTAPFYTQIPHDRHEEKCRVKVTLNSNSEDIPSVMFEAGGRNYIHACQEVARIAIGELRDRYSDQLADTEYRYHPRQPQGSDRGSYLETEGIENYVTTRHLVEMLWAMDESRAETVLAAQDREDRNHGKICKLEDKVDRLEKELAALKGEAPPQKARIRLTARKRALFVPRYQLAPKMVNTRSNGNGPNNPNNNNGENPTLAQVLAQQTQLMNMMMQQFQNQQNQGNNHAPPQNKLAEFLRVRPPVFSSTTNPVEASDWLHAIEKKLDLLQCTDQEKVSFASHQLHGPASEWWDHFRLNRTTAEPITWLEFTAAFRKTHIPSGVVSLKKKEFRSLTQGSRSVTEYLHEFNRLARYAPEDVRNDEERQEKFLGGLNDELSYPLMVGDYPDFQKLVDKAIRQEDKYNRMEQKKRRIAQFKTQQGNNQKPRLTLGPQSMPQGGSSSVVRPQRQFFNNNAGNNIRNKAPRPVAAPVQQQPAKREQGSKPVVCFNCGDPGHYADKCPKPRRVKVVPAQSNSAVPVSKARVNHVAAAEAQDAPDVILGTFLVNSVPATVLFDSGATHSFLSMSFAGNHGMEVEDLRRPLMVSTPSNQALSLQRSPSVRIEIKGVPFLANLILLESKDLDVILGMDWLARHKGVIDCANRKVTLNSYDGRVVTVHALSSESLRSRLNQITLEEIPIVREYSDVFPDDLPGMPPKRDIEFRIDLVPGTTPIHKRPYRMAANELAEVKRQVDDLLQKGYIRPSSSPWGAPVIFVEKKDHTQRMCVDYRALNDVTIKNKYPLPRIDDLFDQLKGATVFSKIDLRSGYHQLRIKEEDIPKTAFTTRYGLFECTVMSFGLTNAPAFFMNLMNKVFMEYLDKFVVVFIDDILIYSRTKEEHEEHLRLALEKLREHQLYAKFSKCEFWLSEVKFLGHVISAGGVAVDPSNVESVTNWKQPKTVSEIRSFLGLAGYYRRFIENFSKIAKPMTRLLQKDVKYKWSEECEQSFQELKSRLISAPILILPDPKKGFQVYCDASKLGLGCVLMQDGKVVAYASRQLRPHEKNYPTHDIELAAVVHALKIWRHYLFGTRTEVYTDHKSLKYIFTQPDLNMRQRRWLELIKDYDMGIHYHPGKANVVADALSRKGYCNATEGRQLPLELCKEFERLNLGIVGRGFVAALEAKPTLIDQVREAQNNDPDIQEIKKNMRRGKAIGFLEDEHGTVWLGERICVPDNKDLKDAILKEAHDTLYSIHPGSTKMYQDLKERFWWASMKREIAEYVAVCDVCQRVKAEHQKPAGLLQPLKIPEWKWEEIGMDFITGLPRTSSGHDSIWVIVDRLTKVAHFIPVKTTYSGSRLAELYMARIVCLHGVPKKIVSDRGSQFTSNFWKKLQEEMGSKLNFSTAYHPQTDGQTERVNQILEDMLRACALDFGGSWDKNLPYAEFSYNNSYQASLQMAPYEALYGRKCRTPLLWDQTGERQVFGTDILREAEEKVKIIQERLRVAQSRHKSYADNRRRDLSFEEGDYVYLRVTPLRGVHRFHTKGKLAPRFVGPYKIVSRRGEVAYQLELPQSLAGVHNVFHVSQLKKCLRVPTEEANIERIEVQEDLTYVEKPIRILETNERRTRNRVIRFCKVQWSNHSEEESTWEREDELNFGIEFDSDRFSLSPSRRFPSPLPSPWAFAVASEPL

SEQ ID NO: 25679 - protein, 568 aa, Oryza sativa
  unsure (1)..(568): unsure at all Xaa locations
  Clone ID: TF_OsC359_8165.pep
MPQGGSSSVVRPQRQFFNNNVGNNIRNQALRPVAAPTQQQPAKREQGSKPVVCFNCGDPGHYADKCPKPRRMKVVPTQSNSTVPASKARVNHVAAAEAQDAPDVILESKDLDVILGMDWLARHKGVIDCANRKVTLTSNDGRVVTVHALSSESLRSRLNQITLEEIPIVREYPDVFPDDLPGMPPKRDIEFRIDLVPGTTPIHKRPYRMAANELAEVKRHVDDLLQKGYIRPSSSPWGAPVIFVEKKDHTQRMCVDYRALNDVTIKNKYPLPRIDDLFDQLKGALVFSKIDLRSGYHQLRIKEEDIPKTAFTTRYGLFECTVMSFGLTNAPAFFMNLMNKSAVXWKYLDKFVVVFIDDILIYSRTKEEHEEHLRLALEKLREHQLYAKFSKCEFWLSEVKFLGHVISAGGVAVDPSNVESVTNWKQPKTVSEIRSFLGLAGYYRRFIENFSKIAKPMTRLLVTTGNNPTGVPYVRALILVPGGKAQHTQRQTTNSGRLGRRPQALDGRHELDTKAFILQELLFWVWEKLSKTEYNHRTQQDTPTSATRHIFLTCDHVPHTTTVYGRKT

SEQ ID NO: 25680 - protein, 999 aa, Oryza sativa; identical to SEQ ID NO: 20074
  Clone ID: TF_OsC359_8172.pep

SEQ ID NO: 25681 - protein, 1298 aa, Oryza sativa
  Clone ID: TF_OsC359_8188.pep
LAPGLEWYIPGLEIELCSRGGCSEWLGLYNRMPCYKPEYLFGVEGFVQELRTMSFVIGFGNAPFYAQIRHDRHEEKCRVKVTLNSNSEDIPSVMFEAGGRNYIHACQEVARIAIGELRDRYSDQLVDTEYRYHPRQPQGSDRGSYLETEGIENDVTTRHLVEMLWAMDESRAETVLAAQDREDRNRGKICKLEDKVDRLEKELAALKGEAPPQKARIRLTARKRALFVPRYQLAPKVRVVEKEVAPAQADPPVIIISSDEEEESKRINSKIEWVATQDDEDEPSIDLLCSEELEKLESLVVWESSVCNNETQLRSIKVKMVNTRSNGNGPNNPNNNINGENPTLAQVLAQQTQLMNMMMQQFQNQQNQGNNHAPPQNKLAEFLRVRPPVFSSTTNPVEASDWLHAIEKKLDLLQCTDQEKVSFASHQLHGPASEWWDHFRLNRTTAEPITWLEFTAAFRKTHIPSGVVSLKKKEFRSLTQGSRSVTEYLHEFNRLARYAPEDVRNDEERQEKFLGGLNDELSYPLMVGDYPDFQKLVDKAIRQEDKYNRMEQKKRRIAQFKTQQGNNQKPRLTLGPQSMPQGGSSSVVRPQRQFFNNNAGNNIRNQAPRPVAAPAQQQPAKREQGSKPVVCFNCGDPGHYADKCPKPQRVKVVPAQSNSAVPASKARVNHIAAAEAQGAPDVILGTFLVNSVPATVLFDSGATHSFLSMSFAGNHGMEVEDLRRPLMVSTPSNQALSLQRSPSVRIEIQGVPFLANLILLESKDLDVILGMDWLARHKGVIDCANRKVTLNSYDGRVVTVHALSSESLRSRLNQITLEEIPIVREYPDVFPDDLPGMPPKRDIEFRIDLVPGTTPIHKRPYRMAANELAEVKRQVDDLLQKGYIRPSSSPWGAPVIFVEKKDHTQRMCVDYRALNDVTIKNKYPLPRIDDLFDQLKDKFVVVFIDDILIYSRTKEEHEEHLRLALEKLREHQLYAKFSKCEFWLSEVKFLGHVISAGGVAVDPSNVESVTNWKQPKTVSEIRSFLGLAGYYRRFIENFSKIAKPMTRLLQKDVKYKWSEECERSFQELKSRLISAPILILPDPKKGFQVYCDASKLGLGCVLMQDGKVVAYASRQLRPHEKNYPTHDIELAAVVHALKIWRHYLFGTRTEVYTDHKSLKYIFTQPDLNMRQRRWLELIKDYDMGIHYHPGKANVVADALSRKGYCNATEGRQLPLELCKEFERLNLGIVGRGFVAALEAKPTLIDQVREAQINDPDIQEIKKNMRRGKAIGFLEDEHGTVWLGERICVCHVLINSSQN

SEQ ID NO: 25682 - protein, 1843 aa, Oryza sativa
  Clone ID: TF_OsC359_8238.pep
RIAVCPSFAVAAAAPAVLRRRSRRRRRSGRPSSWSPSRRRPRPPLRRRRRSSELRCRRQPEGFRRFLLVAVVVRCFSAAVLVTGVFAASSSTCWCPPFASSRRRSPASVRRPSRPLRRAAAAVGDVIADVIGVVRPPGLEWYIPGLEIELCSRDGCSEWLGLYNRMPRYKPEYLFGVEGFVQELRTMSFAIGFGTAPFYAQIPHDRHEEKCRVKVTLNSNSEEVPSVMFEAGGRNYVHACQEVARIAIGELRDSYSDQLADTEYRYHPRQPQGSDRGSYLETEGIENDATTRHLVEMLWAMDESRAETVLAAQDREDRNRGKICKLEDKVDRLEKELAALKGEAPPQKARIRLTARKRALFVPRYQLAPKMVNTRSNGNGPNNPNNNNNGENPTLAQVLAQQTQLMNMMMQQLQNQQNQGNNHAPPQNKLAEFLRVRPPIFSSTTNPVEAGDWLHAIEKKLDLLQCTDQEKVSFASHQLHGSASEWWDHFRLNRTTAEPITWLEFTAAFRKTHIPSRVVSLKKKEFRSLTQGSRSVTEYLHEFNRLARYAPEDVRNDEERQEKFLGGLNDELSYPLMVGDYPDFQKLVDKAIRQEDKYNCMEQRKRRIAHFKAQQGSNQKPRFTLGPQSMPQGGSSSVVRPQRQFFNNNAGNNIRNQAPRPVAAPTQQQPAKREQGSKPVVCFNCGDPGHYADKCPKPRRVKVVPAQSNSAVPASKARVNHVAAAEAQDAPDVILGTFPVNSVPATVLFDSGATHSFLSMSFAGNHGMEVEDLRHPLMVSTPSNQALSLQRSPSVRIEIKGVPFVANLILLESKDLDVILGMDWLARHRGVIDCANRKVTLTSNDGRVVTVHALSSESLRSRLNQITLEEIPIVREYPDVFPDDLPGMPPKRDIEFRIDLVPGTTPIHKRPYRMAANELAEVKRQVDDLLQKGYIRPSSSPWGAPVIFVEKKDHTQRMCVDYRALNDVTIKNKYPLPRIDDLFDQLKGATVFSKIDLRSGYHQLRIKEEDIPKTAFTTRYGLFECTVMSFGLTNAPAFFMNLMNKVFMEYLDKFVVVFIDDILIYSRTKEEHEEHLRLALEKLREHQLYAKFSKCEFWLSEVKFLGHVISAGGVAVDPSNVESVTNWKQPKTVSEIRSFLGLAGYYRRFIENFSKIAKPMTRLLQKDVKYKWSEECEQSFQELKSRLISAPILILPDPKKGFQVYCDASKLGLGCVLMQDGKVVAYASRQLRPHEKNYPTHDLELAAVVHALKIWCHYLFGTRTEVYTDHKSLKYIFTQPDLNMRQRRWLELIKDYDMGIHYHPGKANVVADALSRKGYCNATEGRQLPLELCKEFERLNLGIVSRGFVAALEAKPTLIDQVREAQINDPDIQEIKKNMRRGKAIGFLEDEQGTVWLGERICVPDNKDLKDAILKEAHDTLYSIHPGSTKVYQDLKERFWWASMKREIAEYVAVCDVCQRVKAEHQKPAGLLQPLKIPEWKWEEIGMDFITGLPRTSSGHDSIWVIVDRLTKVAHFIPVKTTYSGSRLAELYMARIVCLHGVPKKIVSDRGSQFTSNFWKKLQEEMVSKLNFSTAYHPQTDGQTERVNQILEDMLRACALDFGGSWDKNLPYAEFSYNNSYQASLQMAPYEALYGRKCRTPLLWDQTGERQVFGTDILREAEEKVKIIQERLRVAQSRHKSYADNRRRDLSFEEGDYVYLRVTPFRGVHRFHTKGKLAPRFVGPYKIVSRRGEVAYQLELPQSLAGVHNVFHVSQLKKCLRVPTEEANLEQIEVQEDLTYVEKPIRILATSERRTRNRVIRFCKVQWSNHSEEESTWEREDELKSAHPHLFASSSESRGRDSV

SEQ ID NO: 25683 - protein, 457 aa, Oryza sativa
  unsure (1)..(457): unsure at all Xaa locations
  Clone ID: TF_OsC359_8239.pep
MSWQRVGALLLGXSVSPACPGGSGRRXGIRSVLLSMARMGWKLCHVFRLYTVVMFNREKGKNVSRHASSNSSFQLHPPLASRELTRVHPWSIPSMLLGSQLPLVGSQDQNQYVFDRAFATQVNELPMPEEDVPFCQDCREQGHYALNCPWVYTKEAPSFGLAGQASLNQPPRTKSSLQPSVQSREPNEENPLNPGNCFPPSLSYHVGSRTKHAKGKKSKNQKRKAPMRTEEEVRKMTITSTEWPPAGITIPRRQRGNTFRGARQLTQHLLSHGGRVSDSEGSDQVSSDYEYESPRRLGEEEMELKACTRCGEIGHIASMCLTLCPHCEEDHPPGECPTRKVTCFLCEGTNHVPKDCQLSVLLTKTAEIQRTTLRLSHQLVSSNSNLDDIIHSTNAPPAAPDSAINHSNNTFSTNHSLHXQPQQXIVVDGRSCFSPRREVGNLYEVDSKDMNYAKFWN

SEQ ID NO: 25684 - protein, 1488 aa, Oryza sativa
  Clone ID: TF_OsC359_8266.pep
MTRATVLRRSASETEARTRSTAMRRCRGRWRRAGRKTGATAAANRRSTATAEREEHGASTIPTARASGFHIEFYLFFCTILRMNFRVDLGRDIEASDWLHAIEKKLDLLPCTDQEKVSFASHQLHGPASEWWDHFRLNRTTAEPITWLEFTAAFRKTHIPSGVVSLKKKEFRSLTQGSRSVTEYLHEFNRLARYAPEDVRNDEERQEKFLGGLNDELSYPLMVGDYPDFQKLVDKAIRQEDKYNRMEQKKRRIAQFKTQQGNNQKSRLTLGPQSMPQGGSSSVVRPQRQFFNNNAGNNIRNQAPRPVAAPAQQQPAKREQGSKPVVCFNCGDPGHYADKCPKPRRVKVVPAQSNSAVPASKARVNHVAAAEAQDAPDVILGTFLVNSVPATVLFDSGATHSFLSMSFAGNHGMEVEDLRRPLMVSTPSNQALSLQRSPSVRIEIQGVPFLANLILLESKDLDVILGMDWLARHKGVIDCANRKVTLNSYDGRVVTVHALSSESLRSRLNQITLEEIPIVREYPDVFPDDLPGMPPKRDIEFRIDLVPGTTPIHKRPYRMAANELAEVKRQVDDLLQKGYIRPSSSPWGAPVIFVEKKDHTQRMCVDYRALNDVTIKNKYPLPRIDDLFDQLKGATVFSKIDLRSGYHQLRIKEEDIPKTAFTTRYGLFECTVMSFGLTNAPAFFMNLMNKVFMEYLDKFVVVFIDDILIYSQTKEEHEEHLRLALEKLREHQLYAKFSKCEFWLSEVKFLGHVISAGGVAVDPSNVESVTNWKQPKTVSEIRSFLGLAGYYRRFIENFSKIAKPMTRLLQKDVKYKWSEECERSFQELKSRLISAPILILPDPKKGFQVYCDASKLGLGCVLMQDGKVVAYASRQLRPHEKNYPTHDIELAAVVHALKIWRHYLFGTRTEVYTDHKSLKYIFTQPDLNMRQRRWLELIKDYDMGIHYHPGKANVVADALSRKGYCNATEGRQLPLELCKEFERLNLGIVGRGFVAALEAKPTLIDQVREAQINDPDIQEIKKNMRRGKAIGFLEDEHGTVWLGERICVPDNKDLKDAILKEAHDTLYSIHPGSTKMYQDLKERFWWASMKREIAEYVAVCDVCQRVKAEHQKPAGLLQPLKIPEWKWEEIGMDFITGLPRTSSGHDSIWVIVDRLTKVAHFIPVKTTYSGSRLAELYMARIVCLHGVPKKIVSDRGSQFTSNFWEKLQEEMGSKLNFSTAYHPQTDGQTERVNQILEDMLRACALDFGGSWDKNLPYAEFSYNNSYQASLQMAPYEALYGRKCRTPLLWDQTGERQVFGTDILREAEEKVKIIQERLRVAQSRHKSYADNRRRDLSFEEGDYVYLRVTPLRGVHRFQTKGKLAPRFVGPYKIVSRRGEVAYQLELPQSLAGVHNVFHVSQLKKCLRVPTEEANIDQIEVQEDLTYVEKPIRILETNERRTRNRVIRFCKVQWSNHSEEESTWEREDELKSAHPLLFASSSESRGRDSV

SEQ ID NO: 25685 - protein, 936 aa, Oryza sativa
  unsure (1)..(936): unsure at all Xaa locations
  Clone ID: TF_OsC359_8286.pep
MPMVNTRSNGNGPNNPNNNNGENPILAQVLAQQTQLMNMMMQQFQNQENQGNNHAPPQNKLAEFLRVRPPVFSSTTNPVEASDWLHAIEKKLDLLQCTDQEKVSFASHQLHGPASEWWDHFRLNRTTAEPIIWLEFTAAFRKTHIPSGVVSLKKKEFRSLTQGSRSVTEYLHEFNRLARYXPEDVRNDEERQEXFLGGLNDELSYPLMVGDYPDFQKLVDKAIRQEDKYNRMEQKKRRIAQFKTRQGNNQKPHLTLGPQPMPQGGSSSVVRPQRQFFNNNAGNNIRNQGPRPVAAPAQQQPVKREQGSKPVVCFNCGDPGHYADKCPKPRRVKVVPAQNNSAVPASKARVNHVAAAEAQDAPDVILGTFLVNSVPATVLFDSGATHSFLSMSFVGNHGMEVEDLRRPLMVSTPSNQALSLQRSPSVRIEIQGVPFLANLILLESKDLDVILGMDWLARHKGVIDCANKKVTLTSYDGRVVTVHALSSESLRSRLNQITLEEIPIVREYPDVFPDDLPGMPPKRDIEFRIDLVPGTTPIHKRPYRMAANELAEVKRQVDDLLQKGYIRPSSSPWGAPVIFVEKKDHTQRMCVDYRALNDVTIKNKYPLPRIDDLFDQLKGATVFSKIDLRSGYHQLRIKEEDIPKTAFTTRYGLFECTVMSFGLTNAPAFFMNLMNKVFMEYLDKFVVVFIDDILIYSRTKEEHEEHLRLALEKLREHQLYAKFSKCEFWLSEVKFLGHKDVKYKWSEECEQSFQELKSRLISAPILILPDPKKGFQVYCDASKLGLGCVLMQDGKVVAYASRQLRPHEKNYPTHDIELAAVVHALKIWRHYLFGTRTEVYTDHKSLKYIFTQPDLNMRQRRWLELIKDYDMGIHYHPGKANVVADALSRKGYCNATEGRQLPLELCKEFERLNLGIVGRGFVAVGDMGPGVLRPEA

SEQ ID NO: 25686 - protein, 1186 aa, Oryza sativa
  Clone ID: TF_OsC359_8350.pep
MPRYKPEYLFGVEGFVQELRTMSFVIGFGTAPFYAQIRHDRHEERCRVKVTLNSNSEDIPSVMFEAGGRNYIHACQEVARIAIGELRDRYSDQLADTEYRYHPRQPQGSDRSSYLETEGIENDVTTRHLVEMLWAMDESRAETVLAAQDREDWNRGKICKLEDKVDRLEKELAALKGEAPPQKARIRLTARKRALFVPRYQLAPKVRVVEKEVAPADPPVVNVSDDEEEPKHTHSKIEWVATQDDEEEPNEPSIDLRCSEELDNGNGPNNPNNNNGENPTLAQVLAQQTQLMHMMMQQLQNQQNQGNNHATPQNKLAEFLRVRPPVFSSTTNPVETGDWLHAIEKKLDLLQCTDQEKVSFASHQLHGPASEWWDHFRLNRTTAEPITWLEFTTAFRKTHIPSGVVSLKKKEFRSLTQGSRSVTEYLHEFNRLARYAPEDVHNDEERQEKFLEGLNDELSYPLMTGDYSDFQKLVDKAIHQEDKYNRMEQKKRRIAQFKTQQGNNQKPRLTLGPQSMPPGGSSSVVRPQRQFFNNNAGNNIRNQVPRPVVAPTQQQPAKREQGSKPVVCFNCGDPGHYADKCPKPRRVKVVPAQSNSTAPVSKARVNHVAAAEAQDAPDVILVREYSDVFPDDLPANELAEVKRQVDDLLQKGYIRPSSSPWGAPVIFVEKKDHTQRMCVDYRALNDVTIKNKYPLPRIDDLFDQLKGATVFSKIDLRSGYHQLRIKEEDIPKTAFTTRYGLFECTVMSFGLTNAPAFYMNLMNKVFMEYLDKFVVVFIDDILIYSRTKEEHEEHLRLALEKLREHQLYAKFSKCEFWLSEVKFLGHVISAGGVAVDPSNVESVTNWKQPKTVSEIRSFLGLAGYYRRFIENFSKIAKPMTRLLQKDVKYKWSEESVAVAREGHRRDRQVVAVLVRPFAAAEDRRSVIAVVDPKSFAVSSSSPSPSVDLPSPFWSPVSSPCRPLCLGAFHLCPRAAVRRRACAARAVRPAEPPLPSVTSPLTSSRPSARGSLRGTRLRSGGDKPTGVAGESMPCYKGVIMIQEGALQWIVLYKGYCHNSFPRYRGGIEAHGDMIHGNAELADDALERALDAVIGFSSSFRPNRTTPSRTLAPPGSPRRPLQDTPRKPIQWRSDLGDRHRVLQLHSIASIIDSILSVTPLTDRAADVIPGVVPCRHGASPSLWLCRHP

SEQ ID NO: 25687 - protein, 2003 aa, Oryza sativa
  unsure (1)..(2003): unsure at all Xaa locations
  Clone ID: TF_OsC359_8355.pep
DLHIKNSVVSEESVFAGEEFEEFQGQQGNSWFGMVHSWFGDRTVQPMPRYKPEYLFGVEGFVQELRTMSFVIGFGTAPFYAQIPHDRHEEKCRVRVTLNSNSEEVPSVMFEAGGRNYIHACQEVARIAIGELRDRYSDQLADTEYRYHPRQPQGSDRGSYLETEGIENDATTRHLVEMLWAMDESRAETVLAAQDREDRNRGKICKLEDKVDRLEKELAALKGEAPPQKARIRLTARKRALFVPRYQLAPKVRVVEKEVAPAQADPPVIIISSDEEEESKRTRSKIEWVATQDDEDEPNEPTIDLRCLEELDNGNGPNNPNNNNNGENPTLAQVLAQQTQLMNMMMQQFQNQQNQGNNHAPPQNKLAEFLRVRPPVFSSTTNPVEASDWLHAIEKKLDLLQCTDQEKVSFASHQLHGPASEWWDHFRLNRTTAEPITWLEFTAAFRKTHIPSGVVSLKKKEFRSLSQGSRSVTEYLHEFNRLARYAPEDVRNDEERQEKFLGGLNDELSYPLMVGDYPDFQKLVDKAIRQEDKYNRMEQKKRRIAQFKTQQGNNQKPRLTLGPQPMPQGGSSSVVRPQRQFFNNNAGNNIRNQAPRPVAAPAQQQPAKREQGNKPVVCFNCGDPGHYADKCPKPRRVKVVPAQNNSAVPASKARVNHVAAAEAQDAPDVILGTFLVNSVPATVLFDSGATHSFLSTSFAGNHGMEVEDLRRPLMVSTPSNQALSLQRSPSVRIEIQGVPFLANLILLKSKDLDVILGMDWLARHKGVIDCANRKVTLNSYDGRVVTVHALSSESLRSRLNQITLEEIPIVREYPDVFPDDLPGMPPKRDIEFRIDLVPGTTPIHKRPYRMAANELAEVKRQVDDLLQKGYIRPSSSPWGAPVIFVEKKDHTQRMCVDYRALNDVTIKNKYPLPRIDDLFDQLKGATVFSKIDLRSGYHQLRIKEYGLFECTVMSFGLTNAPAFFMNLMNKVFMEYLDKFVVVFIDDILIYSRTKEEHEEHLRLALEKLREHQLYAKFSKCEFWLSEVKFLGHVISAGGVAVDPSNVESVTNWKQPKTVSEIRSFLGLAGYYRRFIENFSKIAKPMTRLLQKDVKYKWSEECEQSFQELKSRLISAPILILPDPKKGFQVHCDASKLGLGCVLMQDGKVVAYASRQLRPHEKNYPTHDIELAAVVHALKIWHHYLFGTRTEEFERLNLGIVDRGFVAALEANPTLIDQVREAQINDPDIQEIKKNMRRGKAIGFLEDEHGTVWLGERICVPDNKDLKDAILKEAHDTLYSIHPGSTKMYQDLKERFWWASMKREIAEYVAVCDVCQRVKAEHQKPAGLLQPLKIPEWKWEEIGMDFITGLPRTSSGHDSIWVIVDRLTKVAHFIPVKTTYSGSRLAELYMARIVCLHGVPKKIVSDRGSQFTSNFWKKLQEEMGSKLNFSTAYHPQTDGQTERVNQILEDMLRACALDFGGSWDKNLPYAEFSYNNSYQASLQMAPYEALYGRKCRTPLLWDQTGERQVFGTDILREAEEKVKIIQERLRVAQSRHKSYADNRRRDLSFEEGDYVYLRVTPLRGVHRFHTKGKLAPRFVGPYKIVSRRGEVAYQLELPQSLAGVHNVFHVSQLKKCLRVPTEEANIEQIEVQEDLTYVEKPIRILETSERRTRNRVIRFCKVQWSNHSEEESTWEREDELNFGIEFDSDRFSLSPSREFPSPLPXAVGLRRRLRAPLKGPPVSPLPVATFAFASRRRKSPSAPCAAVVSAVAVAREDRRRARQVVAVLVRPFAVAGDHRSSFAAVDPKSFAASSSSPSPSVGLPPPFRSPCRRSPASVRRSSRLLRRAAAAVGDVTADVIGVVRHSVVSGESVFAEEEFEEFQGQQGKSPEYVALCDVCQRVKAEHQKPAGLLQPLKIPEWKWEEIGMDFITGLPRTSAGHDSIWVVVDRLTKVAHFIPVKTTYTGHKLAELYMARVTDGQTERVNQILEDMLRACVLDFGGSWDKNLPYAEFSYNNSYQASLQ

SEQ ID NO: 25688 - protein, 1708 aa, Oryza sativa
  unsure (1)..(1708): unsure at all Xaa locations
  Clone ID: TF_OsC359_8381.pep
MIQEGALQWIVLCEGYCHNSFSRYRGGIEAHGDMMWGCVLWVQWYTSDQSKTIRIAVPAVMAPGLEWYIPGLKIELCSRDGCSEWLGLCNRIPHDRHEEKCRVKVTLNSNSEDIPSVMFEAGGRNYIHACQEVARIAIGELRDRYSDQLADTEYRYHSRQPQGSDRGSYLETEGIENDATTRHLVEMLWAMDETRAETVLAAQDREDRNRGKICKLEDKVDRLEKELAALKGEAPPQKARICLTARKRALFVPRYQLAPKVRVVEKEVTPALADPPVVNMVVTRSNGNGPNNNNNNNNNGENPTLAQVLAQQAQLMNMMMQQLQNQQNQGNNHAPPQNKLAEFLRVRPPTFSSTTNPVEAGDWLHAIEKKLDLLQCTDQEKVSFASHQLHGPASEWWDHFRLNRTTAEPITWLEFTAAFRKMHIPSGVVSLKKKEFRSLTQGSRSVTEYLHEFNRLARYAPEDVRTDEEHQEKFLEGLNDELSYPLMTGDYHDFQKLVDKAIRQEDKYNRMEQKKRRIAQFKTQQGNNQRPHLTLGPQSMPQGGYSSVVRPQRQFFNNNAGNNIRNQVPRPVAASTQQQPAKREQGSKPVVCFNCGDPGHYADKCPKPRCVKVVPAQSNSTVSASKARVNHVAAAEAQGAPDVILGTFLVNSVPATVLFDSGATHSFLSMSFAGNHGMEVEDLRCPLMVSTPSNQALSLQRSPSVRIEIQGVPFLANLILLESKDLDVILGMDWLARHKGVIDCANRKVTLTSNDGRVVTVHALSSESLRSILNQITLEEIPIVREYPDVFSDDLPGMPPKRDIEFRIDLVPGTTPIHKRPYRMAANELAEVKRQVDDLLQKGIDDLFDQLKGATVFSKIDLRSGYHQLRIKEEDIPKTAFTTRYGLFECTVMSFGLTNAPAFFMNLMNKVFMEYLDKFVVVFIDDILIYSRTKEEHEEHLRLALEKLREHQLYAKFSKCEFWLSEVKFLGHVISAGGVAVDPSNVESVTNWKQPKTVSEIRSFLGLAGYYRRFIENFSKIAKPMTRLLQKDVKYKWSEECEQSFQELKNRLISAPILILPDPKKGFQVYCDASKLGLGCVLMQDGKVVAYASRQLRPHEKNYPTHDLELAAVVRALKIWRHYLFGTRTEVYTDHKSLKYIFTQPDLNMRQRRWLELIKDYDMGIHYHPGKVNVVADALRRKGYCNATEGRQLPLELCKEFERLNLGIVSRGFVAALEAKPTLIDQIREAQINDPDIQEIKKNMRRGRAIGFLEDEQGTVWLGERICVPDNKDLKDAILKEAHDTLYSIHPGSTKMYQDLKERFWWASMKREIAEYVAVCDVCQRVKAEHQKPAGLLQPLKIPEWKWEEIGMDFITGLPRTSSGHDSIWVIVDRLTKVAHFIPVKTTYSGSRLAELYMARIVCLHGVPKKIVSNRGSQFTSNFWKKLQEEMGSKLNFSTAYHPQTDGQTERVNQILEDMLRACALDFGGSWDKNLPYAEFSYNNSYQASLQMAPYEALYGRKCRTPLLWDQTGERQVFGTDILREAEEKVKIIQERLRVAQSRHKSYADNRRRDLSFDERDYVYLRVTPLRGVHRFHTKGKLAPRFVGPYKIVSRRGEVAYXLELPQSLAGVHNVFHVSQLKKCLRVPTEEANLEQIEVQEDLTYVEKPIRILEIDERRTRNRVIRFCKVQWSNHSEEESTWEREDELKSAHPHLFTSSSESRGRDSV

SEQ ID NO: 25689 - protein, 1719 aa, Oryza sativa
  unsure (1)..(1719): unsure at all Xaa locations
  Clone ID: TF_OsC1528_2087.pep
MAKNPKAAKNRRPTTRRPRAAAAAATASASADIEDLAPPSGCRAAVGLTTAAAAVRAELLRWYDANRRDLPWRRAAEPAGSGSGSGRGEEKRAYAVWVSEVMLQHTRVPVVVDYYSRWMARWPTVDSLAAATQEEVNEMWAGLGYYRRARFLLEGAKQIVEKGEFPRTASALREVRGIGDYTAGAIASIAFNEVVPVVDGNVRVISRLYAIPDNPKESSTVKRFCTRRQQDAELAAAEERRRATARTGAAAARAARLAAAELAAARAEAEAEAAEDAARAAEVEVETLRSSINGSIAGDITADRELEELARGRARERAERWVAAHLHGGGGGPRDRAPADGNPNGRERAGGSPEPARGPRRQHGSLSPDRRHGHHGVQTVVRDFGPGGGWPTLTKTNYIEWAAVMRVRLQVRHVGGSPFSLSQKRTAKEAWDAIAAARIGSDRARKSTLQALRKEWENLAFKPGEDVDDFALRLNTLLQKMVQYGDDTYDEERAVEKLFRCVPEKYRQIARSIESLLDLSTMSIEEALGRLKVVDGDEPQPLSGPITIGGKLHLTREQWEASQGDRRKGESSSPTGGRKPRKARGGVQLRGAQGVATGNHKPARDDACRNCGKLGHWAKDCQQPRRGQAHVARVEEEPALLLAHASIELPPAAPAAAAFLHLDEPKVLVSLCNGSSNDKADGWYLDTGATHHMTGRREFFTEFDSSVRGSVKFGDASGVEIKGVGSVTFTAKSGEHRLLTGVYYIPALRNSIISVGQLDENGSRVMVEDGLMRIWDRRRRLLAKVTRGTNRLYILSAQVAQPVCLAARRDDEAWQWHERFGHLHFEALKQLSAKEMVRGMPCLDHVEQLCDVCVVTKQRRLPFPQQTSFRAKKRLELVHEDLCGPVTPATPGGRRYFLLLVDDLSRYMWVMVLGSKGEAADAIRHAQAAAEAECGRKLRVLRTDNGGEFTAAEFASYCADEGIQRHYTTPYSPQQNGVVERRNQTVVGMARALLKQRGMPAIFWGEVVVTAAYILNRSPTKALDGRTPYEAWHGRKPAVSHLRVFGCLAFAKELGHIGKLDDRSTPGVFIGYAEGSKAYRILDPETQRVRTARDVVFDEGRGWVWDKAVDDGSIPTYDDFTVEYVHFEGAGGVGSSSSPSVSTLAPESPPTPTPTHPRATTSTTTSSSSTPPQPVTPHAPVPTATPPSTSTLTPARVERSPVEFATPLSHDGERIDAYNDGEQLRYRTMEDLLGDQPVPGLVPRDLEAQLHLACDDGEPRSFAEAEKHAAWRAAMQSEMDAVQENRTWELADLPRGHRAITLKWVFKLKRDEAGAIIKHKARLVARGFVQQEGIDYDDAFAPVARMESVRLLLALAAQEGWGVHHMDVKSAFLNGDLKEEVYVHQPPGFVIPGKEGKVLRLHKALYGLQQAPRAWNAKLDSTLKGMGFEQSPHEAAIYRRGNGGNALLVGVYVDDLVITGTKDAEVAAFKEEMKATFQMSDQGPLSFYLGIEVHKDNSGITLRQTAYAKRVVELAGLTDCNPALTPMEERLKLSRDSTAEEVDATQYRRLVGSLRYLTHTRPDLAFSVGYVSRFMQRPTTEHQQAVKRIIRYVAGTLDHGLYYPRCPGKAHFVGYSDSDHAGDIDTSKSTSGILFFLGKCLVSWQSVKQQVVALSSCEAEYMAASAASTQALWLARLLSDLLGRDTGTVELRVDSKSALALAKNPXFHERSKHIRAAHW

SEQ ID NO: 25690 - protein, 594 aa, Oryza sativa
  unsure (1)..(594): unsure at all Xaa locations
  Clone ID: TF_OsC359_7442.pep
MEDEPLPAALVAFSPAPVVVVVVVLSSSSSSWRSSLRQAVLVRRPRFVKCCSPVVVFVLGSASSSLVPAASRLRPRIAAEAVPSPFVSVVPVCLHRARSSLSFPRLVAWWANEGYTSCGPVVEMSWHRXGVLLLGGSILPACPGGSGRRXGVGSVLLFMARMGWELCHVFRPYTVVMFNREKGKNVRGYASSNSSFQLNPPLASRELTRAHPWSIPSMLLSSQLPLVGSQDQNQYVFDRAFATQINELPMPEEHVPFCHDCREXGHYALNCPWVYAKEAPSFGLTGQTSLNQPPRTKSSLQPSVQSREPNGENPLNPGNCFPPSLSYHVGSRTKQAKGKKSKNQKRKAPMRTEEEVRKMTITSTEWPPAGITIPRRQRGNTFRGARQLTQHLLSHGGRVSDSEGSDQVSSDVEDESPRHLGEEEMESKACTRCGEIGHIASRCLTLCPHCEEDHPPGECPTRKVTCFLCEGTNHVPKDCQLSVLLTKTAEIQRTTLRLSHQLVSSNSNLDDIIHSTNAPPAAPDSAVNHSNNTFNTNHSLHRRPQQRIVVDGRSCVSPRPTPGRAKGNQSQECDTKQKTVICFKXQSEGSFSCE

SEQ ID NO: 25691 - protein, 796 aa, Oryza sativa; identical to SEQ ID NO: 20211
  Clone ID: TF_OsC1528_1824.pep

SEQ ID NO: 25692 - protein, 1377 aa, Oryza sativa
  Clone ID: TF_OsC1528_2130.pep
MLRIFDLFMLYCVVYMYRSNDAFMLVFICNVMIYLWNRLNHYTSIISTIQKPYYRHCDFTMAGFADALRPDKFTGVHFKRWQIRVTLWLTAMKCFWVSTGKPEGVLTAEQQKQFEEATTLFVGCILSILGDRLVEVYMHMTDAKELWDALNTKFGATDASNDLYIMEQFHDYKMADNRSVVEQAHEIQTMAKELELLKCVLPDKFVAGCIIAKLPPSWRSFGTALKHKRQEYSVEGLIASLDVEEKARKKDAASKGDGGQSSANVVHKAQNKSKGKYKAQQTTNFKKQKKNNNNPNQDERTCFVCGQVGHLVRKCPQRKGMKAPAGQTSKSANVTIGNTGDGSGYGNLPTVFSVNQSTNWWVDTGANVHVCADISLFSSYQVARGSTVLMGNGSHASVHGVGTVDLKFTSGKIVQLKNVQHVPSIDRNLVSGSRLTRDGFKLVFESNKVVVSKHGYFIGKGYECEGLFRFSLSDFCNKSVNHICGSVDDEANVWHSRLCHINFGLMSRLSSMCLIPKFSIVKGSKCHSCVQSKQPRKPHKAAEERNLAPLELLHSDLCEMNGVLTKGGKRYFMTLIDDATRFCYVYLLKTKDEALDYFKIYKAEVENQLDRKIKRLRSDRGGEFFSNEFDLFCEEHGIIHERTPPYSPESNGIAERKNRTLTDLVNAMLDTAGLPKAWWGEALLTSNHVLNRVPNRNKDKTPYEIWIGRKPSLSYLRTWGCLAKVNVPITKKRKLGPKTVDCVFLGYAHHSIAYRFLIVKSEVPDMHVGTIMESRDATFFESFFPMKDTHSGSNQPSEIIPSSITPPEQTEHTHELVSEEDVSEAPRRSKRQRTAKSFGDDFTVYLVDDTPKSISEAYASPDADYWKEAVRSEMDSIIANGTWEVTERPYGCKPVGCKWVFKKKLRPDGTIEKYKARLVAKGYTQKEGEDFFDTYSPVARLTTIRVLLSLAASHGLLVHQMDVKTAFLNGELDEEIYIDQPDGFVVEGQEGKVCKLLKSLYGLKQAPKQWHEKFDKTLISAGFAVNEADKCVYYRHGGGEGVILCLYVDDILIFGTNLEVINEVKSFLSQNFDMKDLGVADVILNIKLIRGENGITLLQSHYVEKILNRFGYIDSKPSPTPYDPSLLLRKNKRIARNQLEYSQIIGSLMYLASATRPDISFAGYSDSNWISDVDEIKATSGYVFTLGGGAVSWKSCKQTILTRSTMEAELTALDTATVEAEWLRDLLMDLPVVEKPVPAILMNCDNQTTCEKTIEVCQEIKKLRSYNVGLHPNSEKPGRSLHEGTITKCDRQCIEGDGFETHWRQRGRVAAATGGAKGEGGMVEGVDQGRIYRQRPRGAMARLGASGAWWQQPRGGGGLVQILRPQRRQQRMAQGSQ

SEQ ID NO: 25693 - protein, 585 aa, Oryza sativa
  unsure (1)..(585): unsure at all Xaa locations
  Clone ID: TF_OsC359_5530.pep
MDEVGGRWTFSRANEGYTSCGPVVEMSWHRVGALLLGAQSCLPVPEVPAVGGIGSVLLCMARMGWKLCHVFRLYTVVMDNTGNKGYGNDGSDDSRTQANGNERSINETSPELIQVVVNQTNMLATAFQLLQNWNNPAGATNVQVPTVQQQCKLSEFLKTGPPTFAMAVDPMEASDWLRTIEKKLGLIQCTDQERVGFATHQLVGPASEWWDSYEASRPEGHTITWNEFSSVFKRSHVPAGMITLRKREFRYLKQGDLTVTEYLHEFYRLAHYAPEDVETDEDKQEKFLQGLKDELAVQLLLEDYENFEKLVDKAMQLESEHNRMTNCKRRIVNIPVFPCGNQGQRTEPLQITGSSVAHQEFPPQEDGHNADNNISNTNDDDVTTNNHASCPNSDHSNQACNVNIIHQDVDDSINDGTQNDNPSNWDSGKDSDGDSNYGTTDANVSKEFQPPIPTPSQNDCPQTDSSAKKTLICYNCKEPGHYSRDCLQPRQSRPPHYRQFTRSRHPNRIVVTGANAVPVSLKGSKPKDLIVPRSVRNPHXKEYHLATIQSKSARGATREKSGEEKIPSATPARAPLTGGPARHPR

SEQ ID NO: 25694 - protein, 529 aa, Oryza sativa
  unsure (1)..(529): unsure at all Xaa locations
  Clone ID: TF_OsC359_5531.pep
MDNTGNKGYGNDGSDDSRTQANGNERSINETSPELIQVVVNQTNMLATAFQLLQNWNNPAGATNVQVPTVQQQCKLSEFLKTEPPTFAIAVDPMEASDWLRTIEKKLGLIQCTDQERVGFATHQLVGPASEWWDSYEASRPEGHTITWNEFSSVFRRSHVPAGMITLRKREFRYLKQGDLTVTEYLHEFYRLAHYAPEDVETDEDKQEKFLQGLKDELAVQLLLEDYEDFEKLVDKAMQLESEHNRMTNCKRRIVNIPVIPCGNQRQRTEPLQITGSSVVHQEFLLQEDGRDADNNTSNTNDDDTTNNHGSCPISDHSNKACNVSSIHQDVNDSINVGTQNDNLSNFDTEKDSNGDSNYGTTDANVSKDFQPPIPTPSQNDRPQTDSSAKKTLICYNCKEPGHYSRDCLQPRQNRPPHYRQFTRIRHPNRIVVTGANTVPVSLKGSKPKDLIVPRSVRNPRHEVGNLYEVDSKDMNYAKXSGTESPSSSAATQSKSAKGSTRDKSGEEKIPSAPRARAPLTGGPARHSR

SEQ ID NO: 25695 - protein, 548 aa, Oryza sativa
  unsure (1)..(548): unsure at all Xaa locations
  Clone ID: TF_OsC359_5621.pep
MDNTGNKGYGNDGSDDSRTQANGNERSTNETSPELIQVVVNQTNMLATAFQLLQNWNNPAGATNVQVPTVQQQCKLSEFLKTEPPTFAIAVDPMEASDWLRTIEKKLGLIQCTDQERVGFATHQLVGPASEWWDSYEASRPEGHTITWNEFSSVFRRSHVPAGMITLRKREFRYLKQGDLTVTEYLHEFYRLARYAPEDVETDEDKQEKFLQGLKDELAVQLLLEDYEDFEKLVDKAMQLESEHNRMTNCKRRIVNIPVIPCGNQRQRTEPLQITGSSVVHQEFLPQEDGRNADNNTSNTNDDDTTNNHGSCPISDHSDKACNVSSIHQDVNDSINVGTQNDNLSNFDTEKDSNGDSNCGTGDANVSKDFQPPIPTPSRNDRPQMDSSAKKTLICYNCKEPGHYSRDCLQPRQNRPPHYRQFTRIRHPNRIVVTGANAVPVSPKGSKPKDLIVPRSVRNPHXEYHLLEVDSEDMNHEKFGNGSITELPQPSLSQPKGAPWSKSGEEKIPSATGGQAKQFRVVKFCWKFVKTQRKKSDKKRRPPNLSSC

SEQ ID NO: 25696 - protein, 449 aa, Oryza sativa; identical to SEQ ID NO: 20222
  Clone ID: TF_OsC359_5989.pep

SEQ ID NO: 25697 - protein, 503 aa, Oryza sativa
  unsure (1)..(503): unsure at all Xaa locations
  Clone ID: TF_OsC359_6507.pep
MSWQRVGALLLGXSVLPACPGGSGRRXGIGSVLLSMARMGWKLCHVFRLYTVVMNNTGNKGYGNDGSDDSRTQANGNERSINETSPELIQVVVNQTNMLATAFQLLQNWNNPARATNVQVPTVQQQCKLSEFLKTGPPTFAMAVDPMEASDWLRTVEKKLGLIQCTDQERVGFATHQLVGPASEWWDSYEASRPEGHTITWNEFSSVFKRSHVPAGMITLRKREFRYLKQGDLTVTEYLHEFYRLAHYAPEDVETDEDKQEKFLQGLKDELAVQLLLEDYEDFEKLVDKAMQLKSEHNRMTNCKRRIVNIPVFPGGSQRQRTEPLQITGSSVVHQEFLPQEDERNADNNTSNTNDDDTTNNHGSCPISDHSNKACNVSSIHQDVNDSINVGTQNDNLSNFDTEKDSNGDSNYGTTDANVSKDFQPPIPTPSQNDRPQTDSSAKKTLICYNCKEPGHYSRDCLQPRQNRPPHYRQFTRSRHPNRIVVTGANAVPVKPSASQKQP

SEQ ID NO: 25698 - protein, 538 aa, Oryza sativa; identical to SEQ ID NO: 20231
  Clone ID: TF_OsC359_6591.pep

SEQ ID NO: 25699 - protein, 691 aa, Oryza sativa
  Clone ID: TF_OsC359_7474.pep
MSSGTNEGYTSCGPVVEMSWHRAGVLLLGAQSCLPVPGVPAVRGIGSMYTSDQSKSIRIAEPSDMGKPSNVPKSVFQFLKFAQQLKCGMVGLGWLGTSWDPGSGCQFGLNHRRPWVKAGLKRLCNNMDNTGNKGYGNDGSDDSRTQANGNERSTNETSPELIQVVVNQTNMLATAFQLLQNWSSPAGATNVQVPTVQQQCKLSEFLKTEPPIFAIAVDPMEASDWLRTIEKKLGLIQCTDQERVGFATHQLVGPASEWWDSYEASRPEGHTITWNEFSSVFRRSHVPAGMITLRKREFRYLKQGDLTVTEYLHEFYRLARYAPEDVETDEDKQEKFLQGLKDELAVQLLLEDYEDFEKLVDKAMQLESEHNRMTNCKRRIVNIPVIPCGNQRQRTEPLQITGSSVVHQEFLPQEDGRNADNNTSNTNDDDTTNNHGSCPISDHSNKACNVSSIHQDVNDSINVGTQNDNLSNFDTEKDSNGDSNYGTTDANVSKDFQPPIPTPSQNDRPQTDSSAKKTLICYNCKEPGHYSRDCLQPRQNRPPHYRQFTRSRHSNCIVVTGANAVPAKSEIFNSVSDATRSEKCKHRLPGNAMTWEDDPMGKNTSSGNLSEVDSEDMNHEKFWNGSITELPQPSLSQPKGAPWSKLGEEKIPSATGGQAKQFRVVKFCWKFVKTQRKKSDKKRRPPNLSSC

SEQ ID NO: 25700 - protein, 453 aa, Oryza sativa
  unsure (1)..(453): unsure at all Xaa locations
  Clone ID: TF_OsC359_8210.pep
LKTEPPTFAIAIDPMEASDWLRTVEKKLGLIQCTDQERVGFATHQLVGPASEWWNSYEASRPEGHTITWNELFSPATFMVVSIMVSRQVXITLRKREFRYLKQGDLTVTEYLHEFYRLAHYAPEDVETDEDKQEKFLQGLKDEXAVQLLLEDYEDFEKLVDKAMQLESEHNRMTNCKRRIVNIPVFPCGNQRQRTEPLQITGSSVVHQEFPRQEDGHNADNNISNTNDDDVTTNNHASCPNSDHSNQACNVNIIHQDVDDSINDGTQNDNPSNWDSEKDSDGDSNYGTTDANVSKDFQPPIPTPSQNDRPQTDSSAKKTLICYNCKEPGHYSRDCLQPRQSRPPHYRQFTRSRHPNRIVVTGANAVPVSLKGSRLKYHIVTRSIHNSRSEEYLVDKVDAKDMNYAKFWNXAPSSGAATQSKSAKGSTRDKSGEEKIPSATGDRAKQSRVEKFC

SEQ ID NO: 25701 - protein, 264 aa, Oryza sativa; identical to SEQ ID NO: 20234
  Clone ID: TF_OsC1713_4581.pep

SEQ ID NO: 25702 - protein, 1544 aa, Oryza sativa; identical to SEQ ID NO: 20260
  Clone ID: TF_OsC1713_3911.pep

SEQ ID NO: 25703 - protein, 1426 aa, Oryza sativa; identical to SEQ ID NO: 20261
  Clone ID: TF_OsC1713_4549.pep

SEQ ID NO: 25704 - protein, 366 aa, Oryza sativa; identical to SEQ ID NO: 20256
  Clone ID: TF_OsC1713_5093.pep

SEQ ID NO: 25705 - protein, 498 aa, Oryza sativa
  unsure (1)..(498): unsure at all Xaa locations
  Clone ID: TF_OsC359_6138.pep
MEMDEVGGRWTFSRTNEGYTSCGPVVEMSWHRVGALLLGXSVLPACPGGSGRRXGIGSVLLSMARMGWKLCHSFRLYTVVMFNREKGKNVSGYDSSNSSFQLNLPLASRELTRAHPWSIPSMLLSSQLPLVGSQDQNQYVFDRAFATQVNELPMPEEQVPFCHDCREQGHYALNCPWVYVKEAPSLGLAGRTSLNQPPHTKSSLQPSVQSRELNGENPLNPGKCFPPSLSYHVGSHTKQAKGKKSKNQKRKAPMRTEEEVRKMTITSTEWPPAGITIPRRQRGNTFRGARQLTQHLLSRGGRVSDSEGSDQVSSDEEDESPRHLGEEEMESKACPRCGEIGHVASMCLTLCPHCEEDHPPGECPTRKVTCFLCEGTNHVPKDCQLSVLLTKTAEIQRTTLRLSHQLVSSNSNIDDIIHSTNAPPAAPDSAINHSDNTFSTNHSLHRQPQQRIVIDGRSCVSPRPTPGRAKGNQPPEGDTKQKTVIRLNQQPEGNFSCE

SEQ ID NO: 25706 - protein, 461 aa, Oryza sativa
  unsure (1)..(461): unsure at all Xaa locations
  Clone ID: TF_OsC359_7273.pep
WHRAGVLLLGGSILPACPGGSGHVPFVSCLFGVPRLFLGRGLIHXAFGKRISETNNTSTRRVSSFKVLSLVLMFNREKGKNVSGYASSNSSFQLNPPLASRELTRAHPWSIPSMLLSSQRPLVGSRDQNQYVFDRAFATQVNELPMPEEHVPFCHDCREQGHYALNCPWVYAKEAPSFGLAGQTSLNQPPRTKSSLQPSVQRREPIRENPLNPGKCFPPSLSYHVGSRTKQAKGKKSKNQKRKAPMRTEEEVRKMTITSTEWPPAGITIPRRQRGNTFRGARQLTQHLLSHGGRVSDSEGSDQVSSDYEDESLRHLGEEEMESKACPRCGEIGHVASMCLTLCPHCEEDHPPGGCPTRKVTCFLCEGTNHVPKDCQLSVLLTKTAEIQRTTLRLSHQLVSSNINIDDIIPSTNAPPAAPDSAVNHSNNTFNTNHSLHRRPQQRIVVDGRSCVSPRRADLDA

SEQ ID NO: 25707 - protein, 305 aa, Oryza sativa; identical to SEQ ID NO: 20269
  Clone ID: TF_OsC1713_5368.pep

SEQ ID NO: 25708 - protein, 192 aa, Oryza sativa
  Clone ID: TF_OsC81339_1.pep
AFIEFETKEACERAFFKMDNCLIDDRRIHVDFSQSVSKLWGQFRQSKRNANKDGCFKCGAPDHIAKDCDQGTEQKNKGPSYVLKDENTQRGGNNRRSYDLVFDEDGENYTDQQDPGSTGRRKIQRTDDRKSGLPPRGDHDRISRRGTHSDENGREGGKEGDRDRGIRKHEDYHRYNKSGERSSSRYDDRGYS

SEQ ID NO: 25709 - protein, 1475 aa, Oryza sativa
  unsure (1)..(1475): unsure at all Xaa locations
  Clone ID: TF_OsC11275_1.pep
MAHACELNDGPIIAPSPVSLVEPRVQVSLGATDAEDKEAWYLDTGATNHMTGRGDVFAELDRSVTGTVKFGDSSIVDIKGAGNVIFTGKNGEHKVLSGVYYIPRLKSSIISIGQLDESGTRVLVEDGIMRIWDRRRRRRLLAKIKRGRSRLYVLRLEVARPICLATRHDDVAWRWHERFGHIHFGSLEKMGRQELVRGLPRLEHVEQLCDTCVITKHRRAAFPKAAKYRAQEPLDLVHGDICGPITPATPGGRRYFLLLVDDATRYMWVALLAAKSNAPDAIKRIQMAAETHCGRKLCVFRTDNGGEFTSLEFATYCTDEGIQRHFSAPYAPQQNGVVERRNQTVVSMARALLKQRGMPAEFWGEAVSTAVFLLNRAPSKSLTGKTPYEAWHGKKPMVSFLRTFGCLAYVKELNDVRKLDDRSTPGVFIGYEEGVKAYRVLDPRTRRVRLARDVIFDESRGWDWTAASGTDARPSSDFAIEYHVEKTTGHPIPSVGGGVVTPSASPTPLQETSPATPATPAPSPSVAPTEFVSPPSHDEERIDAAHSNTPVRYRTVDNLIGENAPAPGIAKRELEEASLLLAGPGEXPCSFAEPEGDDAWRAAMREEMDAVNRNGIWELVDLPHGHRPIGLKWVYKLKKNEAGKVVKHKARLVARGFVQQPGIDFDEVFAPVARMESIRLLLAVAAQKGWHVHHMDVKSAFLNGDLAEEVYVKQPPGFVVAGEEDKVLRLRKALYGLRQAPRAWNAKLDCTLKELGFDQSKHEHAMYRRNNGGSALLVGVYVDDLVITGPSTRAIEQFKEEMKAKFQMSDLGLLSFYLGIEVKQGDDGISLNQGRYAQRIVESAGLKDCNPCATPMEERLKLSRDSTAPPVDATKYRRLVGSLRYLVHTRPDLAFAVGFVSRFMERPTEEHMVAVKRILRYVAGTMEYGLHYKREKEEQRLIGYSDSDLAGDIDTRRSTSGMLFFLGSSLVSWQSIKQRVVALSSCEAEYVAATNAATQGIWLARLLGELLGKQPKAIELKVDSKSALALAKNPVFHERSKHIDLRYHFIRSCLEEGSISASFITTMDQLADILTKALGRVRFHELVARIGVILNRQVVKSDSATIKIPELDFEIPPEAQRGSLSTVEGIIMRAVDELQALQDERKKVDPQKAEAIDKFLAKLRSLGLGEAAFTFVLDDPAGNSFIENQNAPSSDPLLSVRFYERMREQQAALGFLVEPSTEEPGDQPVNHASTVEGNSEVLQEPHGSVGAVAGRRAIAQGNPDEVAAALCRYSAPEECLVFDLWLEIPYFREVIVMATTCDMCGYRNSELKPGGEIPAKGKKITLRVQNGKDLTRDVIKSDSAGVKVPELELELASGTLGGIVTTVEGLIVKICEALQRVHGFHLGDSTLEWKKKKWEDFNDRLSKLLSLQEPWTLIIDDGLAASFVAPATDSLEDDNQLTIEEYVRSWEQNEELGLNDMDTSSADAAYNTTNP

SEQ ID NO: 25710 - protein, 1450 aa, Oryza sativa; identical to SEQ ID NO: 20275
  Clone ID: TF_OsC11275_2.pep

SEQ ID NO: 25711 - protein, 638 aa, Oryza sativa
  unsure (1)..(638): unsure at all Xaa locations
  Clone ID: TF_OsC1713_4371.pep
MSTTGDNNNTRDKEEPPVNTNGGNTVSNSSGGPFSGYNVSLLPFVLRFLQLSVAILLRSLVYVDAYSILSTLKLYTSSTVTRSTHIANVMFIVLIFWIKICRIMTKFPTIQKLDSVHADSIVDVYMHMPSGKDMWDSLEAKFGVSDADSELYVMEQFYDYNMVDDRSVVEHAHEIQMLAKELENNNCELPDKFVAGGIIAKLPPSWSDFGTSLKHKRQEFSVTDLIGSLGVEEKTRAKDNRDKKIEGGSSANLVQKKNPHASHNKNKKVKPDVKPKATINFKNKDKGKAKGDCFVCGKPRHWAKDCPECMDKKSANMVISEGGGTSGYGXRGSSLLMGNGSFAVVHGXRFCYVYLLKTKDEALHYFKIYKAEVENQLERKIKRLRSGRGGEYFSNEFTSLCEEYGIIHERTPPYSPQSNGVAEKKNRTLTEMVNAMLDTARLSKEWWGEAILTACHVLNRIPTMHKELTPFEEWERKKLNLPHLRTWGCLAKVNVSIAKKRKLGPKTVDCVFLGYAIHSVGYRFLTVNSGVPDMRVGIITESRDATFFENEFPMKNAPSTSSQEPILSPEHFVPIEHIDQMLEENSEEDNIVATQKSKRQRTAKSFGDDYVVYLVDDTPRTIEEAYSSPDTDYWKEAV

SEQ ID NO: 25712 - protein, 1082 aa, Oryza sativa; identical to SEQ ID NO: 20306
  Clone ID: TF_OsC1713_4499.pep

SEQ ID NO: 25713 - protein, 924 aa, Oryza sativa
  unsure (1)..(924): unsure at all Xaa locations
  Clone ID: TF_OsC1713_4966.pep
HKRQEFSVSDLIGSLGVEEKARAKDVRGKKVEGGSSANMVQKKNPHASHDNKKVKPDVKSKATTNFKKKDKGKAKVDCFVCDKSGHWAKDCPERKDRKSANMVISEGGGTSGYGXRGSSLLMGNGSLAAVHGVGTVDLKFTSGKTVQLKNVQHVPSIKKNLVXKCHTCVQSKQPRKPHKASEVRNLAPLELVHSDLCEMNGVLTKGGKKYFMTLIDDCTRFCYVYLLKTKDEALHFFKIYKAEVENQLERKIKRLRSDRGGEYFSNEFASFCEEFGIIHEMTPPYSPQSNGVAERKNRTLTEMVNAMLDTAGLSKEWWGEAVLTACHVLNKIPMKHKEITPFEEWERKKLNLSYLRTWGCLAKHFAPIEHNDQTPEENPEKDNIVDTRKSKRQRVAKSFGDDYIVYLVDDTPRTIEEAYSSPDADYWKEAVRSEMDSIMSNDTWEVVERPYGCKPVGCKWVFKKKLKPDGTIEKYKARLVAKGYTQKEGEDFFDTYSLVARLTTIRVLLALAASHGLLVHQMDVKTAFLNGELEEEIYMDQPDGYVLEGQEGMVCKLLKSLYGLKQAPKQWHEKFDTTLTSAGFVVNEADKCVYYRYGGGEGVILCLYVDDILIFGTSLNVIEEVKDYLSKSFEMKDLGEADVILNIKLQRGDEGGITLVQSHYVDKVLSRFGYSDCKPAPTPYDPSVLLRKNRRIARDQLRYSQIIGSLMYLASATRPDISFAVSKLSRFVSNPGDDHWQALERVMRYLKGTMSYGIHYTGYPKVLEGYSDSNWISDADEIKATSGYVFTLGGGDVSWKSCKQTILTRSTMEAELTALDTATVEAEWLRELLMDLPVVEKPVPAILMNCDNQTMIIKVNSSKDNMKSSRHIKRRLKSVRKQKNSGVIALDYVQTARNLADQFTKGLPRNVIDSASREMGLIPT

SEQ ID NO: 25714 - protein, 1052 aa, Oryza sativa
  unsure (1)..(1052): unsure at all Xaa locations
  Clone ID: TF_OsC1713_3871.pep
MRKEKIPHQAPFAIQAAQLLGRAIGAGLFAITPAGERGMCCKAIKLGNARVFPVTTFEPPVSPEEKVKFEALDCLFRGALISVLADNIVDVYMHIPSRKDMWNALEAKFGVSDAGSELYVMEQFYDYKMVDDRSVVEQAHEIQMLAKELENNKCELPDKFGAGGIIAKLPPSWSDFATSLRHKRQEFRVSDLIGSLGVEEKARAKDNRGKKVEGGSSANMVQKKNTHASHNSKKVKSDVKPKARTNFKKKGKGKAKGDCFVCGKSGHWAEDCPERKDRKSANMVISEGGGTSGYGKILPTVLSVFHSPDWWIDTGANIHVGRGSSLLMGNGSLANIHVWVVHGVGTVDLKFTSGKTVQLKNVQHVPSIKKNLVSGSLLCREGFRLVFESNKCVVSKYGTFIGKGYDSGGLFHFSLDDMRNNNNVVNHISENDESNVWHSRPCHVNFGCMTRLANMSLIPKFTLVKGSKCHTCVQSKQPRKPHKASEARDLAPLELLHSNLCEMNGVLTKGGKKYFMTLIDDCTRFCYVYLLKTKDEALHYFKTYKAKVENQLERKIKRLRSDRGGEYFSNEFTSFCEEFGIIHERTPPYSPQSNGVTERKNRTLTEMVNAMLDTARLSQEWWGEAVLTACHVLNKIPMKHKEVTPFEEWERKRLNLSYLRTWGCLAKVNVPIAKKRKLGPNTVDCVFLGYAIHSVGYRFLVVNSEVPDMRVGTIIESRDATFFENEFPMKNTPSTSNHETVIPHKHFAPIEHNDQTPEGNPEEDNIVDTRKSKRQRVAKSFGDDYIVYLVDDTPRTIEKAYSSPDADYWKEAKKLRPDGTIEKYKTRLVAXGYTQKEGEDFFXDTYLPVARLITIRVLLVRAASHGLLVHQMDVKTAFLNGELEEEIYMDQQDRYVLEGQVGMVCKLLKSLYGLKQAPKQWHEKFDTTLTSTGFVVNEADKCVYYRYGGGEGVILCLYVDDILIFGISLNVIEEVKDFLSKSFEMKDLGDADVILNIKLLRGDEGGIAQSHYVDKVLSRFGYSDYKPAPTPYDPSMLLRKNRRIARDQLRYS

SEQ ID NO: 25715 - protein, 444 aa, Oryza sativa
  unsure (1)..(444): unsure at all Xaa locations
  Clone ID: TF_OsC359_6897.pep
MSWHRAGVLLLGGSILPACPGGSGRRXGVGSVLLFMARMGWELCHVFRLYTVVMFNREKGKNVSGYASSNSSFQLNPPLASRELTRAHPWSIPSMPLSSQLPLVGSQDQNQYVFDRAFATQVNELPMPEEDVPFCHDCREQGHYALNCPWVYAKEAPSFGLAGQTSLNQPPHTKTSLQPSVQSREPNGENPWNPGNCFPPSLSYHVGSRTKQAKGKKSKNQKRKAPMRTEEEVRKMAISSTEWPSAGITIPRRQRGNTFRGARQLTQHLLSHGGRVSDSEGSDQVSSDDEDESPRHLGEEEMESKACTRCGEIGHVASMCLTLCAYCEEDHPPGECPTRKVTCFVCEGTNHVPKDCQLSVLLTKTAEIQRTTLRLSRQLVSSNSNIDDIIHNTNAPPAPPNSAINHSNNIFSTNHSLHRQPQQRIVVDGRSCVSPRRHEVDNLC

SEQ ID NO: 25716 - protein, 1434 aa, Oryza sativa
  unsure (1)..(1434): unsure at all Xaa locations
  Clone ID: TF_OsC1713_4599.pep
MSGVAAATAGGGGTPPPPTGAGSGSGSGAGAPGGAVNDNNNGGNSVSPSSGGPFSGYNLLLLLLLLALSLYYVRYVVVPVLHDASSILSRYWYVPVSDIHDAHSILLVMLRSPYTAYAMIIVSISWIKICRLMTIFPTIQKPDRSFSVVGFAAALKPHAFDGSNYKRWKARALLWLTAMQCFYVSRGKRSEPPLSPEEEAKFEASDCLFHGALISVLADNIVDVYMHMPSGKDMWDALEAKFGVSDAGSELYVMEQFYDYKMVDDRSVVEQAHEIQMLAKELENNNCELPDKFVAGGIIAKLPHSWSDFATSLKHKRQEFSVPDLIGSLVVEEKARAKDVRGKKVEGGSSANMVQKKNPHASHNNKKVKPDVKPKAATNFKKKGKGKAKGDCFVCGKSGHXAKDCPERKDRKSANMIISEGGGTSGYGKILPTVLSVFHSPDWWVDTGANIHVCADISLFSSYQVGRGSSLLMGNGSLAAVHGVGTVDLKFTSGKTVQLKNVQHVPSIKKNLVSGSLLCREGFRLVFESNKCVVSKYGTFVGKGYDSXGLFRFSLNDMCNNHNAVNHISENDESNVWHSRLCHVNFGCMTRLANMSLIPKFTLVKGSKCHTCVQSKQPRKPHKASEARNLAPLELVHSDLCEMNGVLTKGGKKYFMTLIDDCTRFCYVYLLKTKDEALHYFKIYKAEVENQLERKIKRLRSDRGGEYFSIEFASFCEEFGIFHEMTPPYSPQSNGVAERKNRTLTEMVNAMLDTAGLSKEWWGEAVLTACHVLNKIPMKHKEVTPFEEWERKKLNLSYLRTWGCLAKVNVPIAKKRKLGPKTVDCVFLGYAIHSVGYRFLIVNSGVPDMHVGTILEFRDATFFENEFPIKYTPSTSSKETVMPHEHFAPIEHSDQTPEENPEEDNIVDTRKSKKQRVAKSFGDDYIVYLVDDTPRTIEEAYSSPDADYWKEAVRSEMDSIMSNGTWEVVERPYGCKPVGCKWVFKKKLRPDGTIEKYKARLVAKGYTQKEGEDFFDTYSPVARLTTIRVLLALAASHGLLVHQMDVKTAFLNGELEEEIYMDQPDGYVLEGQEGMVCKLLKSLYGLKQAPKQWHEKFDTTLTSAGFVVNEADKCVYYRYGGGEGVILCLYVDDILIFGTSLNVIEEVKDYLSKSFEMKDLGEVDVILNIKLQRGDEGGITLVQSHYVDKVLTPTPYDPSVLLRKNRRIARDQLRYSQIIGSLMYLASVTRPDISFAVSKLSRFVSNPGDDHWQALERVMRYLKGTMSYGIHYTGYPKVLEGYSDSNWISDADEIKATSGYVFTLGGGAVSWKSCKQTILTRSTMEAELTALDTATVEAEWLRELLMDLPVVEKPMPAILMNCDNQTVIIKVNSSKDNMKSSRHIKRRLKSVRXNSGVIALDYVQTARNLADQFTRRLPRNVIDSASREMGLIPT

SEQ ID NO: 25717 - protein, 470 aa, Oryza sativa
  unsure (1)..(470): unsure at all Xaa locations
  Clone ID: TF_OsC359_7479.pep
MSWQRVGALLLGXSVLPACPGGSGRRXIGSVLLFMARMGWELCHVFRPYTVVMFNREKGKNVRGYASSNSSFQLNPPLASRELTRAHPWSIPSMPLSSQLPLVGSQDQNQYVFDRAFATQVNELPMPEEDVPFCHDCREQGHYALNCPWVYAKEAPSFGLTGQTSLNQPPRTKSSLQPSVQSREPNGENPLNPGNCFPPSPSYHVGSRTKQAKGKKSKNQKRKAPMRTEEEVRKMAISSTEWPPAGITIPRRQRGNTFRGARQLTQHLLSHGGRVSDSEGSDQVSSDDEDESPRHLGEEEMESKACIRCGEIGHIASMCLTLCAYCEEDHPPGECPTRKVTCFLCEGTNHVPKDCQLSVLLTKTAEIQRTTLRLSRQLVSSNSNIDDIIHNTNAPPAPPNSAINHSNNIFSTNHSLHRQPQQRVVVDGRSCVSPRPTPGQAKGNQPQEGDTKQKTVIRFNQQSEGSFSCE

SEQ ID NO: 25718 - protein, 240 aa, Oryza sativa
  Clone ID: TF_OsC359_8167.pep
MRTEEEVRKMTITSTEWPPAGITIPRRQRGNTFRGARQLTQHLLSHDGRVSDSEGSDQVSSDYEDESLRHLGEEEMESKACPRCGEIGHIASMCLTLCTHCEEDHPPGECLTRKVTCFLCEGTNHVPKDCQLSVLLTKTVEIQRTTLRLSHQLVSSNSNIDDIIHSTNAPPAAPDSAVNHSDNTFSTNHSLHRQPQQRIVVDGRSCVSPRPGKEVGRKVIDKRNLYEVDSKDTSYKKFWN

SEQ ID NO: 25719 - protein, 1602 aa, Oryza sativa
  unsure (1)..(1602): unsure at all Xaa locations
  Clone ID: TF_OsC359_8335.pep
MPRYKPEYLFGTEGFVQELRTMSFAIGFGTAPLYAQIPHDRDEEKCCIKVTLNSNREDIPSVMFEAGGGSYIHACQEVARITIGELRESYNDQLADTEYRYHPRQPQGNDRGSYLEPAGIENDATTRHLVEMLWAMDETRVEIVLAAQDREDRNRGKICKLEDKVDRLEKELAALKGEAPPQKARVRLTARKGALFVPRYQLAPKVRVVEKEAAPAPADPPVVNCTDQEKVSFASHHLHGPASEWWDHFRFNRTTAEPITWLEFTAAFRKTHIPSGVVSLKKEFRVLTQGSRFVTKYLDEFNRLPRYTPEDVCTDEERQEKFLEGLNDELSYPLMTGDYHDFQKLVDKAIRQEDKYNRMEKKKHRIAHFKAQQGNSQRPRLAMGPQAVSQGGSSSVVRPQRQLFNNNASNNNRSQAPRPVATPTQHQPAKREQGNKPGVCFNCGEPGHYSDKCPKPRRVKIVPAQNNSSAPASKAHVNHVAAAEAQSAPDVILGTFPVNSVPATVLFDSGATHSFLSMSFAGNHGMEVEDLRRPLMVSTPSNQALSSQRSPSVRIEIQGVPFLANLILLESKDLDVILGMDWLAKYNGVIDCTNRKVTLTSNDGQVVTVHSLPYGPLRSSLNQITLEEIPIVREYPDVFLDDLPGMPPKRDIEFRIDLVPGTTPIHKRPYRMAANELAEVKRQVDDLLQKGYIRPSSSPWGAPVIFVEKKDHTQRMCVDYRALNDVTIKNKYPLPRIDDLFDQLKDATVFSKIDLRSRYHQLRIKEEDIPKTAFTTRYGLFECTVMSVGLTNAPAFFMNLMNKVFMEYLDKFVVVFIDDILIYSRTKEEHEEHLRLALEKLREHQLYAKFSKCEFWLSEVKFLGHVISAGGVAIDPSNVESVTNWKQPKTVSEIRSFLGLAGYYRRFIENFSKIPKPMTRLLQKDVKYKWSEECEQSFQELKSRLISAPILILPDPKKGFQVYCDASKLGLGCVLMQDGKVVSYASCQLRPHENYPTHDLELAAVVHALKIWRHYLFGTRTEVYTDHKSLKYIFTQPNLNMRQRRWLELIKDYDMGIHNHHGKANVVADALSRKGYCNATEGQQLPWELCKEFERLNLGIVSRGFVATLEAKPTLIDQVREAQINDPDIQEIKKNMRRGKAIGYLEDEQGTVWLGERICVPENKELKDAILKEAHDTLYSIYPGSTKMYQDLKEKFWWASMKXKCEIAEYVAVCDVCQRVKAEHQKPAGLLQPLKIPEWKWEEIGMDFITGLPRTSSGHDSIWVIVDRLTKVAHFIPVRTTYFGSRLAELYMARIVCLHGVPKKIVSDRGSQFTSKFWKKLQEEMGSKLNFSTAYHPQIDGQTERVNQILEDMLRACALDFGGSWDKNLPYAEFSYNNSYQASLQMAPYEALYGRKCRTPLLWDQTGERQVFGTDILREAEEKVKIIQERLRIAQSRHKSYADNRRSDLSFEEGDHVYLRVTPLRGVHRFHTKGKLAPRFVGPYKIVSQRGEVAYQLELPQSLAGVHNVIHVSKLKKCLRVPIEEANLEQIEVQEDLTYVERPIRILEIDERRTRNPVIRFCKVQWSNHSEEESTWEREDELKSAHPHLFASSSESRGRDSV

SEQ ID NO: 25720 - protein, 341 aa, Oryza sativa; identical to SEQ ID NO: 20384
  Clone ID: TF_OsC359_5811.pep

SEQ ID NO: 25721 - protein, 471 aa, Oryza sativa
  unsure (1)..(471): unsure at all Xaa locations
  Clone ID: TF_OsC359_7032.pep
MSWHRAGVLLLXGSVLPTCPGGSGRRXGVGSVLLSMARMGWKLCHVFRLYTVVMYNREKGKNVSGYASSNLSFQLNPPLASRELTRAHPWSIPSMLLSSQLPLVGSQDQNQYVFDRAFATQVNELPMPEEQVPFCHDCREQGHYALNCPWVYVKEAPSLGLAGQTSLNQPPHTKSSLQPSVQSRELNGENPLNPGKCFPPSLSYHVGSHTKQAKGKKSKNQKRKAPMRTEEEVRKMTITSTEWPPAGITIPRRQRGNTFRGARQLTQHLLSHGGRVSDSEGSDQVSSDDEDESPRHLGEEEMESKACTRCGEIGHVASMCLTLCTHCEEDHPPGECPTRKVTCFLCEGTNHVPKDCQLSVLLTKTAEIQRTTLRLSHQLVSSNSNIDDIIPSTNAPPAAPDSAMNHSNNTFSTNHSLHRQPQQRIVVDGRSCVSPRPTPGRAKGNQPQEGDTKQKTVIRFNQQSEGSFSCE

SEQ ID NO: 25722 - protein, 505 aa, Oryza sativa
  Clone ID: TF_OsC359_8226.pep
MEMEDVGGRWTSVPGVPAVGGIGSVLLSMARMGWKLCHVFRPYTVVLKCGMVGLGWLGTSWDPGSGCQFGLNHRRPWVKAGLPFSSFFKFQLVLDGQMFNREKGKNVSGYASSNSSFQLNPPLASRELTRAHPWSIPSMLLGSQLPLVGSQDQNQYVFDRAFATQVDELPMPEEDVPFCHDCREQGHYALNCPWVYAKEAPSFGLAGQASLNQPPRTKSSLQPSVPSREPNGENPLNPENCFPPSLSYHVGSRTKQAKGKKSKNQKRKAPMRTEEEVRKMTITSTEWPPAGITIPRHQRGNTFRGARQLTQHLLSHGGRVSDSEGSDQVSSDDEDESPRHLGEEEMESKACTRCGEIGHVASMCLTLCPHCEEDHPPGECPTRKVTCFLCEGTNHVPKDCQLSVLLTKTAEIQRTTLRLSHQLVSSNSNIDNIIHNTNAPPAPPDSAINHSNNTFSTNHSLHRQPQQRIVVDGRSCVSPRPTPGRAKGNQSQEGDTKQKTVLCFK

SEQ ID NO: 25723 - protein, 1542 aa, Oryza sativa
  Clone ID: TF_OsC1713_5087.pep
MVTRLSRWAEAVDDFYEEALLEIDDQQRRMGELETKVTDLTAQQLQLEEEHQAWGSEIDSLKAQLQPGSSLETPIQVDSETEGTDTEPEIEPDITDPSEDATPVPRITFIGGPRTLSNARKSTRPPGKKPKPDLEATTSEPWGLRIIEKKLTLVRVREADKVIFAVNQLEGPAGDWWDTYKEAREDGAGEPTWEEFTAAFRENFVPTAVMRMKKNEFRRLRQGNTTVQEYLNKFTQLARYAIGDLADEEEKIDKFIEGLNDELRGPMIGQDHESFQSLINKVVRLENDQRTVEHNRKRRLAMSRPPQTMPQRLKGATPSGWKPPVMVTNRPAALSNFNRPVALQNRTPTPTLAAPGAKKNVDCFNCGKYGHYANNCPHPRKTPVRTGANAMTVRGTTTPAVGRGLFKTPQPNRTTTGFGRGQVNHVRAEEAQEDQGVLMGMFSLNSTPIKVLFDSGALHSFISLKASQQHNLTRVKLRQPMLVHSPGGEIAVDTACIDVPIRLRDVVFPSNLMVLIPQTLDVILGMDWLAKHRGVIDCRRREVTLTTPWGSDMRATMDQDPRLTERAGGIFTMLPLKGMPVVQRFPDVFPEDLPGMPPDRDIEFIIDLIPGTAPISKRPYRMPVNELEELKKQIRELQEKGFVRPSSSPWGAPVLFVKKKDGSMRMCVDYRSLNEVTIKNKYPLPRIDDLFDQLKGAKVFSKIDLRSGYHQLKIRTEDIPKTAFSTRYGLYEFTVMSFGLTNAPAYFMNLMNKVFMDYLDKFVVVFIDDILIYSKDEEEHAEHLRLVLQKLRKHKLYAKFSKCEFWLKEVAFLGHVISAGGVAVDPAKVEAVTEWKAPKSVTEIRSFLGLAGYYRRFIEGFSKIARPMTQLLKKEKKFAWSEQCQGSFEQLKEKLTSAPILVLPDIRKDFVVYCDASRQGLGGVLMQEGKVVAYASRQLRPHEENYPTHDLELAAVVHALKIWRHYLIGNHCDIYTDHKSLKYIFTQSDLNLRQRRWLELIKDYDLEVHYHPGKANVVADALSRKSHCNHLRTEGMVPELREEMAQLNLHIVPHGQINTLDIQPLLRTQIEEAQKDNEEVREVKERLAAGRAKEFSTDEKDVLWYKKRIYVPEQGGLRGLILKEAHESAYSLHPGSTKMYQDLKEGYWWPNMKRDVAEYVALCDVCQKVKAEHQRPAGLLQPLRIPEWKWDEIGMDFIVGLPKTATGYDSIWVIVDRLTKTARFIPVKTNYSSAKLAELYMTRIVCLHGIPKKIISDRGTQFTSHFWEKVHEALGSYLAFSTAYHPQTDGQTERTNQVLEDMLRACALDFSKDWERCLPYAEFSYNNSFQASLKMSPNEALFGRRCRTPLMWSETGERAVFGPDIIQEAEEKVRLIRDRLKVAQSRQKSYADTRRRNLEFKEGDYVYLKVSPMRGTKRFKVKGKLAPRYVGPFQIIARRGEVAYQLQLPEYIADVHPVFHVSQLKKCLRVPEEQAPLEEIHISNDLTYPEHPIRILDEAEKRTRSKVWRMYKVQWSNHTEDEATWEGEEFLRTEYPHLFGNW

SEQ ID NO: 25724 - protein, 1279 aa, Oryza sativa
  unsure (1)..(1279): unsure at all Xaa locations
  Clone ID: TF_OsC1528_1929.pep
MAGFTDALRLDKFTGVHFKRWQIRVTLWLTAMKCFWVSTGKPIGVLNADQQKEIDEATTLFVGCILSVLSDRLVEVYMHMTDAKELWDALNTKFGATDASNDLYIMEQFHDYKMADNRSVVEXAHEIQTMAKELELLKCVLSNKFVAGCIIAILPPSWRGFGTALKHKRQEYSVEGLIASLDVEEKAREKDTASKGDGGQSTTNVVHKAQNKSKGKHKTQQTTNFKKKKNNNNPNQDEKTCFVCGQPSHLARKCPQRKGMKAPAGQTSKSANVTIGNTRDGSGXNLPTVFSVNQSTNWWVDTGANVHVCADISLFSSYQAARGSTVLMGNGSHASVHGVGTVDLKFTLGKIVQLKNVQHVPSIDRNLVSGSRLTRDGFKLVXFESNKVVVSKHGYFIGKGYECGGLFRFSLSDFCNKSVNYICGSVDDEANVWHSRLCHINFGLMSRLSSMCLIPKFSIVKGSKCHSCMQTKQSRKPHKAAEERNLAPLELLHSDLCEMNGVLTKGGKRYFMTLIDDATRFCYVYLLKTKDEALDYFKIYKAEVENQLDRKIKRLRSDRGGEFFSNEFDLFCEEHGIIHERMPPYSPESNGIAERKNRTLTDLVNALLNSNHVLNRVPNRNKDKTPYEIWIGRKPSLSYLRTWGCLAKVNVPITKKRKLGPKTVDCIFLGYAHHSIAYRFLIFKSEVPDMHVGTIMESRDATFFESFFPMKDTHSSSSQPSEIIPSSITPPEQTEHTHEHVIEEDVSEAPRRSKRQRTAKSFGDDFTVYLVDDTLKSISEAYASPDADYWKEAFRSEMDSIIANGTWEVIEXPYGCKPVGCKWVFKKKLRPDGTIEKYKAWLVAKGYTQKEGEYFFDTYSPVARLTTICVLLSLAASHGLFVHQMNVKTAFLNGELDEEIYMDQPDRFVVEGQEGKVCKLLKSLYGLKQAPKQWHEKFDKTLTSPGFAVNEADKCVYYRHGGGEGVILCLFVDDILIFGTNLEVINEVKSFLSQNFDIKDLGVADVILNIKLIRGENGITLLQSHYVEKILNRSGYIDSKPSPTPGXNKRIARNQLEYSEIIGSLMYLASATRPDISFAVSKLSRFTSNPGDDHWRVLERVMRYLKGTMELGLHYSGYPAVLEGYSDYNWISDVDEIKATSGYVFTLGGGAVSWRSCKQTILMRSTMEAELTALDTATVEAEWLRDLLMDLPIVEKPVPAILMNCDNQTVIVKVNSSKNNMKSSRHVKRRLKSVRKLRNSGVITLDYIQTARNLADPFTKGLSRNVIDNASKEMGLRPM

SEQ ID NO: 25725 - protein, 415 aa, Oryza sativa; identical to SEQ ID NO: 20504
  Clone ID: TF_OsC1713_4811.pep

SEQ ID NO: 25726 - protein, 979 aa, Oryza sativa; identical to SEQ ID NO: 20512
  Clone ID: TF_OsC1713_3954.pep

SEQ ID NO: 25727 - protein, 822 aa, Oryza sativa; identical to SEQ ID NO: 20523
  Clone ID: TF_OsC91_2446.pep

SEQ ID NO: 25728 - protein, 1643 aa, Oryza sativa
  Clone ID: TF_OsC1713_5219.pep
MASRRRASISNEETQTPDLTTLAGVMATQTQLLQAIANNQGNRGRSSFGEFMRTKPPTFTTADEPMEAEDWLRIIEKKLTLVRVREADKVIFAVNQLEGPAGDRWDTYKEAREEDAGEPTWEEFTAAFQENFVPAAVMRMKKNEFRRMRQGNTTVQEYLNRFTQLARYAIGDLADEEEKIDKFIEGLNDELRGPMIGQDHESFQSLINKVVRLENDQRTVEHNHKRRLAMNRPPQGVPQRLKGATSSGWKPPIVAPNRPAAPSNFNRPVVIQNRTPTPTLAAPGAKKNVDCFNCGEYGHYANNCPHPRKTPVRTGANAMTVRGTTTPAAGRGLFKTPQTNRTATGFGRGQVNHVRAEEAQEDQGVLMGMFSINSTPVKVLFDSGASHSFISRKASQKHNLTLVGLRKPMIVHSPGGEITVSHACIDVPIRLRDVVFPSNLLVLIPQTLDVILGMDWLTKNRGVIDCRRRKVTLTTPWRSDMRATMDQDPRLIERAGGIFTMLPLKGMPIVQRFPDVFPEDLPGMPPDRDIEFIIDLIPGTAPISKRPYRMPVNELEELKKQIRELQEKGFNKYPLPRIDDLFDQLKGAKVFSKIDLRSGYHQLKIRTGDVPKTAFSTRYGLYEFTVMSFGLTNTPAYFMNLMNKVFMDYLDKFVVVFIDDILIYSKDEEEHVEHLRLVLEKLRKHKLYAKFSKCEFWLKEVAFLGHVISAGGVVVDPAKVEAVTEWKAPKSVTEIRSFLGLAGYYRRFIEGFSKITRPMTQLLKKEKKFVWSEQCQESFEQLKEKLTSAPILDWGGVLMQEGKDVAYASRQLRPHEENYPTHDLELAVVVHELKIWRHYLIGNHCDIYTDYKSLKYIFTQSDLNLRQRRWLELIKDYDLEVHYHPGKANIVADALSRKSHCNHLRMEGITPELKEEIAQLNLHLVPYGQINTLDIQPLLRTQIEEAQKDNGEIQEVKERIAAGCAKEFSIDEKETLWYKKRIYVPEQGGLRGLILREAHESAYSLHPGSTKMYQDLKEGYWWPNMKRDVAEYVALCDVCQRVKAEHQRPAGLLQPLRIPECKWDEIGMDFIVGLHKTATGYDSIWVIVDRLTKTARFIPVKTNYSGAKLAELYMTRIVCLHGVPKRIISDRGTQFTSHFWEKVHEALGSYLAFSTAYHPQTDGQTERTNQVLEDMLRACALDFSKDWEKCLPYAEFSYNNSFQASLKMSPNEALFGRRCRTPLMWSETGERTVFGPDIIQEAEEKVRLIRDRLKVAQSRQKSYADTRRRDLEFKEGDYVYLKVSPMRGTKMFKVKGKLAPRYVGPFQIIARRGEVAYQLQLPENIADVHPVFHVSQLKKCLRVPEEQAPLEEIHISNDLTYPEHPVRILDEVEKRTRAKVWHMYKVQLSNHTEDKATWESEEFLKTEYPHLFEDRPNPPPTLPRAWPPRAPRCRSIASSPAPPSRRRPSPRVIAVAVAVALSRAPCRRCRAVAVGRPIAARPSRRRLAPRAPRAARPSRRRLAPRTLPRRSPVIVASPSPSRRAPRRAARPSPSPPATPRTACRVAMRPSAPPPRPYKTRPLPFSTPHPSFPFSPFSSFSMGRRRCAPRRRLHAPRRRLEATAPRQVWYRALPPWAAAAEAGDEASEDPYAYYQEGDADDGAQ

SEQ ID NO: 25729 - protein, 1817 aa, Oryza sativa
  Clone ID: TF_OsC1713_5309.pep
MTSAMTSAPAAARERKLAGERRLDDANGGHQRVEGDAANSPMADSDSPATWELSLPQSEGYVIELHRMLRRLRYPGFPSYRVRQCGSVWEARVEIHPRVPSELDYSFQTRHHRDLPETAMQDAAREAFLRLSSIHRAELASTEFAHHPFREEGNSVCTVQDTPCCYNPMVTRLSRWAEAVDDYYEEALLEIDDHQRRVGELETEVTDLTAQQLQLEEEHQAWGSEIDSLKAQLQVHGDQFQQLSDQYNDRRGMMDTLEEQLRESQEHVSQLEEQLRAAKISTTGASTSTAVGRDRYFFLTPPYPPAFHALLGEASMLATESAPYLVDPTATQPPVPELVHTPLIPTPSPQLGSNLETPIQVDSETEGTDTEPEIEPDITDPSEDEAPVPCITFLGGPRTLSTARKSTRPPGKRPKPDPEATTSEPWGLRLFMMASRRRATTSNDETQTPDLNALAGIMATQTQLLQAIASNQGNRGGSSFGEFMRTKPPTFATADEPMEAEDWLRIIEKKLTLVRVREADKVIFAVNQLEGPAGDWWDTYKGAREDGAGEPTWEEFTAAFRENFVPAAVMRMKKNEFRRLRQGNTTVQEYLNKFTQLARYAIGDLADEEEKIDKFIEGLNDELRGPMIGQDHESFQSLINKVVRLENDQRTVEHNRKRRLAMSRPPQTVPQRLKEATPSGWKPPVMVTNRPAALSNFNRPVALQNRTPTPTLAAPGAKKNVDCFNCGEYGHYANNCPHPRKTPVRTGANAMTVRSTTTPAVGRGLFKTPQSNRTTTGFGRGQVNHVRAEEAQEDQGVLMGMFSINSTPVKVLFDSGASHSFISLKASQKHNLTLVGLRKPMIVHSPGGEITVSHACIDVPIRLRDVVFPSNLMVLIPQTLDVILGMDWLAKHRGVIDCRRREVTLTTPWGSDMRATMDQDPRLTERAGGIFTMLPLKGMPVVQRFPDVFPEDLPGMPPDRDIEFIIDLIPGTAPISKRPYRMPVNELEELKKQIKELQEKGFVRPSSSPWGAPVLFVKKKDGSMRMCVDYRSLNEVTIKNKYPLPRIDDLFDQLKGAKVFSKIDLRSGYHQLKIRTEDIPKTAFSTRYGLYEFTVMSFGLTNAPAYFMNLMNKVFMDYLDKFVVVFIDDILIYSKDEEEHAEHLRLVFQKLRKHKLYAKFSKCEFWLKEVAFLGHVISAGGVAVDPAKVEAVTEWKAPKSVTEIRSFLGLAGYYRRFIEGFSKIARPMTQLLKKEKKFVWSEQCQESFEQLKEKLTSAPILVLPDIRKDFVIYCDASRQGLGGVLMQDGKVVAYASRQLRPHEENYPTHDLELAAVVHALKIWRHYLIGNHCDIYTDHKSLKYIFTQSDLNLRQRRWLELIKDYDLEVHYHPGKANVVADALSRKSHCNHLRMEGMVPKLREEIAQLNLHIVPRGQINTLDIQPLLRTQIEEVQKDNKEVREKVKAEHQRPAGLLQPLRIPEWKWDEIGMDFIVGLPKTATGYDSIWVIVDRLTKTARFIPVKTNYSSAKLAELYMTRIVCLHGIPKRIISDRGTQFTSHFWEKVHEALGSYLAFSTAYHPQTDGQTERTNQILEDMLRACALDFSKDWERCLPYAEFSYNNSFQASLKMSPNEALFGRRCRTPLMWSETGERAVFGPDIIQEAEEKVRLIRDRLKVAQSRQKNYADTRRRDLEFKEGDYVYLKVSPMRGTKRFKVKGKLAPRYVGPFQIIARRGEVAYQLQLPENIADVHPVFHVSQLKKCLRVPEEQAPLEEIHISNDLTYPEHPIRILDEAEKRTRSKVWRMYKVQWSNHTEDEATWESEEFLRTEYPHLFENR

SEQ ID NO: 25730 - protein, 1621 aa, Oryza sativa
  Clone ID: TF_OsC1713_5419.pep
MMRCLRYSRFPTYRVRQCGFGWEAQADMRPRVPSEADYSFSTRHHHDSPETAMQDAAREAFLRLSSIHRAELASTEFAHHPFREESNSVCTAQDTPCCYNPIVTRLSRWAEAVDDFYEEALLEINDQQRRVGELETEVTDLTVQQLQLEEEHQAWGTRFEFGDSDPGRLRDRGDRHRAEIEPDITDPSEDETPVPRITFLGRPHTLSTARKSTRPPGKKPKPDPEATTSEPWGLSSHQNNSLNGIKPQELVRKLGYLLNRPTQMASRRRASTNNEETQTPDLTTLAGVMATQTQLLQAIANDQGNRGGSSFGEFMRTKPPTFAMADKPMEAEDWLRIIEKKLTLVRVREADKVIFVVNQLEGPAGDWWDTYKEAREEDAGEPTWEEFTAAFHENFVPAAVMRMKKNEFRRLQQGNTTVQEYLNRFTQLARYAIGDLANEEEKIDKFIEGLNDELRGPMIGQDHESFRSLINKVVRLENDQRTVGHNRKRRLAMNCPPQGVPQRHKGATSSGWKPPIVATNRPAAPRNFNRPVAIQNRTPTPTLAAPGAKKNVDCFNCGEYGHYANNCPHPRKTPVHTGANAMTVSGTTAPAAGRGLFKTPQTNRTATRFGRGQASQKHNLTLVGLRKPMIVHSPGGEITGCGVSLQPYGFDTPDRGCHIGYGLVNKEQREDLPGMPPDRDIEFIIDLIPGTAPISKRPYRMPVNELEELKKQIRELQEKGFVRPSSSPWGAPVLFVKKKDGSMRMCVDYRSLNEVTIKNKYPLPWIDDLFDQLKGAKVFSKIDLRSGYHQLKIRTGDIPKTAFSTRYGLYEFTVMSFGLTNAPAYFMNLMNKVFMDYLDKFVVVFIDDILIYSKDEDEHAEHLRLVLEKLRKHKLYAKFSKCEFWLKEVAFLGHVISAGGVAMDPAKVEAVTEWKAPKFVTEIRSFIGLAGYYRRFIEGFSKIARPMTQLLKKEKKFVWLEQCQESFEQLKEKLTSSPILVLPDIWKDFVIYCDASRQGLGGVLMQDGKVVAYASRQLRPHEENYPTHDLELAAVVHALNIWRHYLIGNHCDIYTDHKSLKYIFTQSDLNLRQRRWLELIKDYDLEVHYHPGKANVVADALSRKSHCNHLRTEGMAPELKEEIAQLNLHMVPHGQINNLDIQPLLRTQIEEAQKDNEEIREVKERLVAGFAKEFSTDEKDVLWYKKRIYVPEQGGLRGLILKEAHKSAYSLHPGSTKMYQDLKEGYWWPNMKRDVAEYVALCDVCQKVKAEHQRPAGLLQPLRIPEWKWDEIGMDFIVGLPKTATGYDSIWVIVDRLTKTARFIPVKTNYNSAKLTELYMTRIVCLHGVPKRIISDRGTQFTSYFWEKVHEALGSYLAFSTAYHPQTDGQTERTNQVLEDMLRVCAMDFSKDWERCLPYAEFSYNNSFQASLKMSPNEALFGRRCRTPLMWTETGERAIFGLDIIKEAEEKVRLIRDHLKVAQSRQKSYADTRRRNLELKEGDYVYLKVSPMRGTKRFKVKGKLAPRYVRPFQITARRGEVAYQLQLPENIADVHPVFHVSQLKKCLRVPEEQATLEEIHISNDLTYPEHLVRILDEAKKKTRTKVWRMYKVQWSNHTEDEATWESEEFLKTEYPHLFENL

SEQ ID NO: 25731 - protein, 1716 aa, Oryza sativa
  unsure (1)..(1716): unsure at all Xaa locations
  Clone ID: TF_OsC359_6331.pep
VTSWYQSHLDLRISQMMPPHSPRNLIKVLGFVRELRLMAFEVGYEVAPEYRRISHDPDEEKCRVRVTLASDREDLPSIKFEAGGRSYSQACQEAALVAIGELRQRFEEELDSSAFQYHPHKPHGQDYGTYTCPDGEESATLMHAVHMLSAMDAVSVERDKAAHDRENWNRGKICKLESKVYRLQKELAELKGETPPPTPKLHLIARKRTCPPPRLQLASKIRVMGEAVPDRAEPVIDIISDEEEEEDPEEREPATPEEEDPSLRSDARRTTNPVEAGDWLHAVEKKLDLIQCTEQEKVSFASHQLHGPAAEWWDHFRQGRAEGEPITWQEFTAAFKKTHIPAGVVALKKREFRALNQGSRSVTEYLHDFNRLARYAPEDVRSDEERQEKFLEGLNDELSYALMSTDFRDFQQLVDKAIRQEDKYNRMEQKKRRAAQFKAQQGSNQRPRLVTGPQAPSYPQGGSSSVVRSQRQFYNNNTGNRGNDNRNMVVRPAATPVQNQPVRKEQGSKPGVCFNCGDPGHYADKCPKPRRVKNVPAPNNSNAPAPKARVNHVAAVEAQNAPDVVLGTFPVNSIPATVLFDSGATHSFLSKSFASNHGMEVISLGRPLLVNTPGNQVFSTQYCPSVIIGIEEVLFPSSLILLESKDLDVILGMDWLSRHRGVIDCANRKVTLTSSNGETVSFFVSSPKSHGVILNQVALQEIPIVQDYPDVFPEDLPGMPPKRDIEFRIDLVPGTNPIHKRPYRMAANELAEVKRQVDDLLQKGYIRPSTSPWGAPVIFVEKKDHTQRMCVDYRALNEVTIKNKYPLPRIDDLFDQLEGATVFSKIDLRSGYHQLRIHEEDIPKTAFTTRYDLFECTVMSFGLTNAPAFFMNLMNKVFMEYLDKFVVVFIDDILIYSKTKEEHEEHLRLALEKLREHQVYAKFSKCEFWLSEVKFLGHVISSGGVAVDPSNVESVLSWKQPKTVSEIRSFLGLAGYYRRFIENFSKIARPMTRLLQKEVKYKWTEGCEQSFQELKKRLVTAPVLVLPDSRKGFQVYCDASRHGLGCVLMQEGKVVAYASRQLRPHENNYPTHDLELAAVVHALKIWRHYLFGNRTEIYTDHKSLKYIFTQPDLNMRQRRWLELIKDYDMEIHYHPGKANVVADALSRKSYCNMSEGRRLPWELCQEFEKMNLGIVSKGFVATLEAQPTLFDQVREAQVNDPDIQEXKEHQKPAGLLQPLKIPEWKWEEIGMDFITGLPRTSAETTYTGNKLAELYMARVVCLHGVPKKIVSDRGSQFTSKFWQKLQSELGTRLNFSTAYHPQTDGQTERVNQILEDMLRACVLDFGGSWDKNLPYAEFSYNHSYQASLQMSPNEALYGRKCRTPLLWDQTGERQVFGTDILREAEEKVKIIQERLRVAQSRQKSYADNRRRDLVFEEGDYVYLRVTPLRGVHRFQTKGKLAPRFVGPFKIVSRRGEVAYQLELPPSMAGIHDVFHVSQLKKCLRVPTEEADPDRIELQEDLTYVEKPVRILERRRDALQVRRRRRPSSATPPRMPRHSPRNLIEVLGFVRELRLMAFEVGYEVAPEYRQISHDPDEEKCRVRVTLASDSEDLPSFKFEAGGRSYCHACQEAALVAIGELRQHFEEELDSSAFQYHPHKPHGQDYGTYTCPDGEESATLMHAVHMLSAMDAVSVERDKAAHDRENWNRGKICKLKSKVYRLQKELAELKGETPPPTS

SEQ ID NO: 25732 - protein, 1244 aa, Oryza sativa; identical to SEQ ID NO: 20566
  Clone ID: TF_OsC359_6443.pep

SEQ ID NO: 25733 - protein, 1236 aa, Oryza sativa
  unsure (1)..(1236): unsure at all Xaa locations
  Clone ID: TF_OsC359_6551.pep
VTSWYQSHLDLRISQMMPPHSPRNLIEVLGFVRELRLMAFEVGYEVAPEYRQISHDPDEEKCRVRVTLASDREDLLSIKFEAGGRSYSHACQEVALVAIGELRQRFEEELDSSAFQYHPHKPHGQDYGTYICPDGEESATLMHAVHMLSAMDAVSVERDKAAHDRENWNRGKICKLESKVYRLQNELAELKGETPPPTPKLRVTLRKRTCPPPRLQLASKIRVMGEAVPDRAEPVIDIISDEEEEEDPEEREPATPEEEDPSLRSDARRTTNPVEAGDWLHAVEKKLDLIQCTEQEKVSFASHQLHGPAAEWWDHFRQGRAEGEPITWQEFTAAFKKTHIPAGVVALKKREFRALNQRSRSVTEYLHDFNRLARYAPEDVRTDEERQEKFLEGLNDELSYALMSTDFRDFQQLVDKAIRQEDKYNRMEQKKRRAAQFKAQQGSNQRPRLVTGPQAPSYPQVGSSSVVRPQRQFYNNNTGNRGNDNRNMVARPAATSAQNQPVRKEQGSKPVICFNCGDPGHYADKCPKPRRVKNAPAPNNSNVPVPKARVNHVAAVEAQNAPDVVLGTFPVNSIPATVLFDSGATHSFLSKSFASNHGMEVISLGRPLLVNTPGNQVFSTQYCPSVTIEIEEVPFPSSLILLESKDLDVILGMDWLSRHRGVIDCANRKVTLTSSNGETVSFFASSPKSHGVTLNQVVLQEIPIVQDYPDVFPEDLPGMPPKRDIEFRIDLVPGTNPIHKRPYRMAANELADVKRQVDDLLQKGYIRPSTSPWGAPVIFVEKKDHTXRMCVDYRALNEVTIKNKDPLPRIDDLFDQLKGATVFSKIDLRSGYHQLRIREEDIPKTAFTTRYGLFECTVMSFGLTNAPAFFMNLMNKVFMEYLDKFVVVFIDDILIYSKTKEEHEEHLRLALEKLREHQLYAKFSKCEFWLSEVKFLCHVISSGGVAVDPSNVESVLSWKQPKTVSEFRSFLGLAGYYRSFIENFSKIARPMTRLLQKEVKYKWTDDCEQSFXELKKRLVTAPVLILPDSRKGFQVYCDASRLGLGCVLMQEGKVVAYASRQLRPHENNYPTHDLELAAVVHALKIWRHYLFGNRTEMYTDHKSLKYIFTQPDLNMRQRRWLELIKDYDMEIHYHPGKANVVADALSRKSYCNMSEGRRLPWELCQEFENLNLGIVNKGFVAALQAKPTLFDQVRXTPGNSLVISELKESNREEIELGFFRDKTKRVRFGSKPPRFV

SEQ ID NO: 25734 - protein, 1633 aa, Oryza sativa
  unsure (1)..(1633): unsure at all Xaa locations
  Clone ID: TF_OsC359_7191.pep
MTSWYQSHLDLRISQMMPPHSLRNLIKVLGFVRELRLMAFEVGYEVAPEYRQISHDPDEEKCRVRVTLASDSEDLPSFKFEAGGRSYCHACQEAALVAIGELREHFEEELDSSAFQYHPHKPHGQDYGIYTCPDGEESATLMHAVHMLSAMDAVSVERDKAAHDRENWNRGKICKLESKVYRLQKELAELKGETPPPTPKLRLTPRKRICPPPRLQLASKIHVMGEAVPDRAEPVIDIISDEEEEEDPEEREPATPEEEDSSLRSDARRTTNPVEAGDWLHAVEKNLDLIQCTEQEKVSFASHQLHRPAAEWWDHFRQGRAEGEPITWQEFMAAFKKTHIPTGVVALKKREFRALNQGSRSVTEYLHDFNRLARYAPEDVRTDEERQEKFLEGLNDELSYALMSTDFRDFQQLVDKAIRQEDKYNRMEQKKHRAAQFKAQQGSNQRPRLVTGPQAPPYPQGGSSSVVCPQRQFYNNNTGNRGNDNRNTVARPAATPAQNQPVRKEQGSKPVICFNCGDPGHYADKCPKPRRVKNAPTPNNSNVPAPKARVNHVAAAEAQNAPDVVLGTFPVNSIPATVLFDSGATHSFLSKSFASNHGMEVISLGRPLLVNTPGNQVFSTQYCPSATIEIEEVPFPSSLILLESKDLDVILGMDWLSRHRGVIDCANRKVTLTSSNGETVSFFVSSPKYHGVILNQVALQEIPIVQDYPDVFPEDLPGMPPKRDIEFRIDLVPGTNPIHKRPYRMAANELAEVKRQVDDLLQKGYIRPSTSPWGAPVIFVEKKDHTQRMCVDYRALNEVTIKNKYPLPRIDDLFDQLEGATVFSKIDLRSGYHQLRIREEDIPKTAFTTRYGLFECTVMSFGLTNAPAFFMNLMNKVFMEYLDKFVVVFIDDILIYSKTKEEHEEHLRLALEKLREHXLYAKFSKCEFWLSEVKFLGHVISCGGVAVDPSNVESVLSWKQPKTVSEIRSFLGLAGYYCRFIENFSKIARPMTRLLQKEVKYKWTEDCERSFQELKKRLVTAPVLILPDSRKGFQVYCDASRLGLGCVLMQEGKVVAYASRQLRPHENNYPTHDLELAAVVHALKIWRHYLFGNRTEMYTDHKSLKYIFTQPDLNMRQRRWLELIKDYDMEIHYHPGKANVVADALSRKSYCNMSEGRHLPWELCQEFERLNLGIVSKGFVAALEAQPTLFDQVREAQVNDPDIQEIKKNMRRGKAIGFVEDEQGTVWLGERICVPENKELKDTIMKEAHETLYSIHPRSTKMYQDLKQQFWWASMRREIAEYVALCDVCQRVKAEHQKPAGLLQPLKIPEWKWEEIGMDFITGLPRTSAGHDSIWVVVDRLTKVAHFIPVKTTYTGNKLAELYMARVVCLHGVPKKIVSDRGSQFTSKFWQKLQLELGTRLNFSTAYHPQTDGQTERVNQILEDMLRACVLDFGGSWDKNLPYAEFSYNNSYQASLQMAPYEALYGRKCRTPLLWDQTGERQVFGTDILRQAEEKVKIIQXRLHVAQSRQKSYADNRRRDLAFEEGDYVYLRVTPLRGVHRFQTKGKLAPRFVGPFKIVSRRGEVAYQLELSPSMAGIHDVFHVSQLKKCLCVPTEEADPDRIELQEDLTYVEKPVRILEFPTFRRRAFPLRK

SEQ ID NO: 25735 - protein, 763 aa, Oryza sativa
  unsure (1)..(763): unsure at all Xaa locations
  Clone ID: TF_OsC359_7547.pep
KVGCEHMVLMVVLMTIKDRFASYCCETFIVPTTSQRGQRLYLLYSVIHYSAPDXEVARSPWGSLGSPCLVLKGVIMIQERSTVMGYVVRGVLSRLLSEMPPHSPRNLIEVLGFVRELRLMAFEVGYEVAPEYRQISHDPDEEKCRVRVTLASDREDLPSIKFEAGGRSYCHACQEAALVAIGELRQRFEEELDSSAFQYHPHKPHGQDYGTYICPDGEESATLMHVVHMLSAMDAVSVERDKAAHDRENWNRGKICKLESKVYRLQKELAELKGETPPPTPKLRLVARKRTCPPPRLQLASKIRVMGEAVPDRAEPVIDIISDEEEEEDPEEREPATPEEEDPSLRSDARRRAEGELITWQEFTTAFKKTHIPSGVVALKKREFRALNQGSRSVTEYLHDVNRLARYAPEDVRTDEERQEKFLEGLNDELSYALMSTDFRDFQQLVDKAIRQEDKYNRMEQKKRRAAQFKAQQGSNQRPRLVTGPQAPSYPQGGSSSVVRPQRQFYNNNTGNRGNDNRNMVARPAATPAQNQPVRKEQGSKPVICFNCGDPGHYADKCPKPRHVKNAPAPNNSNVLAPKARVNHVAAAEAQNAPDVVLGTFPVNSIPXTVLFDSGATHSFLSKSFASKHGMEVVSLGRPLLVNTPGNQVFSTXYCPSVTIEIEEVLFPSSLILLESKDLDVILGMDWLSRHRGVIDCANRKVTLTSSNWETVSFFVSSPKYHGVNLNQVALQEIPIVQDYPDVFPEDLPGMPPKRDIEFRIDL

SEQ ID NO: 25736 - protein, 1711 aa, Oryza sativa
  Clone ID: TF_OsC359_7557.pep
MMPPHSPRNLIKVLGFVRELRLMAFEVGYEVAPEYRQISHDPDEEKCRVRVTLASDSDDLPSFKFEAGGRSYSHACQEAALVAIGELRQRFEEELDSSAFQYHPHKPHGQDYGTYTCPDGEESATLMHAVHMLSAMDAVSVERDKAAHDRENWNRGKICKLESKVYRLQKELAELKGETPPPTPKHRLTQRKRTCPPPRLQLASKIRVMGEAVPDRAEPVIDIISDEEEEEDPEEREPATPEEEDPSLRSDTRRMVNTRTGSGSGSGSGATNNGGDPTLAQILAQQTQLINLLVQQAQNQQANNQNQNPPPPPQNKLADFLRVRPPTFSSTTNPVEAGDWLHAVEKKLDLIQCTEQEKVSFASHQLHGPAAEWWDHFRQGRAEGEPITWQEFTAAFRKTHIPSGVVALKKREFRALNQGSRSVTEYLHDFNRLARYAPEDVRTDEERQEKFLEGLNDELSYALMSTDFRDFQQLVDKAIRQEDKYNRMEQKKRRAAQFKAQQGSNQRPRLVTGPQVPSYPQGGSSSVVRPQRQFYNNNTSNRGNDNRNVVARPAATSAQNQPVRKEQGSKPVICFNCGDPGHYADKCPKPRRVKNAPAPNNSNVPAPKARVNHVAAAEAQNAPDVVLGTFPVNSIPATVLFDSGATHSFLSKSFTSNHGMEVISLERPLLVNTPGNQVFSTQYCPSATIEIEEVPFPSSLILLESKDLDVILGMDWLSCHRGVIDCANRKVTLTSSNGETVSFFMSSPKSHGVILNQVALQEIPIVQDYPDVFPEDLPGMPPKREIEFRIDLVPGTNPIHKRPYRMAANELVEVKRQVEDLLQKGYIRPSTSPWGAPVIFVEKKDHTQRMCVDYRALNEVTIKNKYPLPRIDDLFDQLEGATVFSKIDLRSGYHQLRIREEDIPKTAFTTRYGLFECTVMSFGLTNAPAFFMNLMNKVFMEYLDKLVVVFIDDILIYSKTKEEHEEHLRLALEKLREHQLYAKFSKCEFWLSEVKFLGHVISSGGVAVDPSNVESVLSWKQPKTVSEIRSFLGLAGYYRRFIENFSKIARPMTRLLQKEVKYKWTEDCEQSFQELKKRLATALVLILPDSRKGFQVYCDASRLGLGCVLMQEGKVVAYASRQLRPHENNYPTHDLELAAVVHALKIWRHYLFGNRTEVYTDHKSLKYIFTQPDLNMRQRRWLELIKDYDMEIYYHPGKANVVADALSRKSYCNMSEGRRLPWELCQEFEKLNLGIVSNGFVAALEAKPTLFDQVREAQVNDPDIQEIKKNMRRGKAIGYVEDEQGTVWLGERICVPENKELKDTIMKEAHETLYSIHPGSTKMYQDLKQQFWWASMRREIAEYVALCDVCQRVKAEHQKPAGLLQPLKIPEWKWEEIGMDFITGLPRTSAGHDSIWVVVDRLTKVAHFIPVKTTYTGNKLAELYMARVKLQVEMGTRLNFSTAYHPQTDGQTERVNQILEDMLRACVLDFGGSWDKNLPYAEFSYNNSYQASMQMAPYEALYGRKCRTPLLWDQTGERQVFGTDILREAEEKVKIIQERLRVAQSRQKSYADNRRRDLAFEEGDYVYLRVTPLRGVHRFQTKEKLAPRFVGPFKIVSRRGEVAYQLELPPSMAGIHDVFHVSQLKKCLRVPTEEADPDRIELQEDLTYVEKPVRILEVSERNTRNRVIRFCKVQWSNHSEEEATWEREDELKSAHPHLFASSSESRGRDSV

SEQ ID NO: 25737 - protein, 1314 aa, Oryza sativa
  unsure (1)..(1314): unsure at all Xaa locations
  Clone ID: TF_OsC6326_15.pep
RVNLQAQGLWEAVDTGDVPFHEDRQALSAILRAVPAEMLRPLAEKDNAKDAWDALKSMRVGTDRVRESCAQKLRQAFESMQFKPDESVEDFSLHLQWVVSDLRLLGDDITEEKIMCKFLRVVPRRYRQMALSIETLIDLTTLSIEDLTGRLLTVDDHPDSDSEDAGQALFGKKEEQARANKGLGQSSSRGSGTGTGSSERRQRGRGGCGRDGAGGKHKPGANQGGGRDVSKDKCRYCGELGHWAKDCRKAKRDRDKLAHAHLLGDDEPTLLMAQVCELVPTTEPELINGEVNLNKERALVSLREEGEPVDPDWILDMAASNHMTGLDTTMRGTVKFGDXLRIEGRGTMLFACKNGDYCGLIGVYFIPKLRSNMVSLGQLNKVGCKTVIEDGALTLRDPRWRLLCRVRRGRERLYVLQVELAQLVSLAARSSEDAWLXHARFGHLNFDSLRTLYAHGLAHGLPKLERVRQVCDGCLISKQRRVPFPTAATFRATSRLDLVHGNICVPISPPTHGGKKYFLLLIDDMSRYMWLFLLTSKSEAPATIKRFKAGVEVETACKLRVLRTNRGGEFTSIEFGLYCANEGVARQLTAPYSPQQNGVIKRRNQTVVSMARCMMKAKHMPRKFWGEAVRTAVFILNRSPTKAVPNKTPYKAWHGRTPAVXHYFKTFGCVVHIKEVKPHLKKLEDRSKMMVFLGYEPGTKGYRVYDPDANRVVITRDAVFDEVTSWPWGEPVEHGEASTDDSFTVYYEVASSIVAASRPPSVEAMSPTPSAQLATPPDTPSVEFVSPPSSTPDVDDDQGAPRRYRSMANILDTTAPVELDSDELYLAAAEEPANLSEAEQDEHWRQAMLDEIKSIEENSPWILTELPAGQRPIGLKRVFKLNNNETGPVIRHEARLVAKGYVQRHGIDFDEVFAPVARMESVRLLLAVAAYLGWTVHHMDIKSAFLNRELEEEVYVSQPPGFIDDKHPSQVLHLNRALYGLRQARRTWNAXLDTRLHELGFKRSATEHAVYTRGEGSKRLIIGVDLGLLSYYLRIEVRQGSDDITINXSAYAQKLLKIGGLVDCNSTCVPMEPRLKLMKNSDRPAIDATLYRSLVGSLRYLVHTWPDFAFAVGSVSRFMESPRDDHLLVVKHILRYVAGTQNFGCCLARSGETGICLLGFSDSDLGGDIDDRKSTSGALFFLGSSPIAWQSQKQKVVALSSCEAEYIAATGAACLGIWLARLLAEVLGTEPEMAILKVDNKSVISLCKNPVFHDRSKHIDTRYHXIRQCIEEKKDDVEFIPTDEQVADILTKPLVCIKFQEFRNKAGVVQIVTW

SEQ ID NO: 25738 - protein, 1633 aa, Oryza sativa; identical to SEQ ID NO: 20597
  Clone ID: TF_OsC359_5740.pep

SEQ ID NO: 25739 - protein, 663 aa, Oryza sativa
  unsure (1)..(663): unsure at all Xaa locations
  Clone ID: TF_OsC359_5990.pep
PGLEWCIPGLEIELCSRDGCSERLGLCNRMPRYKPEYLFGTEGFVQELRTMSFLIGFGIAPLYAQIPHDRDEEKCGVKVTLNSNREDIPSVMFEAGGGSYIHACQEVARIAIGELRESYNDRLADTEYRYHPRQPQGSDCGSYFEPAGIENDATTRHLVEMLWAMDETRAEIVIAAQDREDRNRGKICKLEDKVDHLEKELAALKGEAPPQKARVRXTARKRALFVPRYQLAPKVRLVEKEATPADPPVVNXTNPVEAGDWLHAIEKKLDLLQCTDQEKVSFASHQLHGPASEWWDHFRLNRTTPEPISWLEFNAAFRKTHIPSGVVSLKKKEFRSLTQGSRTVTEYLHEFNRLARYAPEEVRTDEERQERFLKGLNDELSYPLMTGDYHDFQKLVDKAIRQEDKYNRMEQKKRRIAHFKAQQGNSQRPRLTLGPQSMPQGAPRPVASPTQQQPAKREQGSKPGVCFNCGDPGHYADKCPKPRRVKVVPAQNNPSAPAAKARVNHVAAAEAQGAPDVILGTFPVNSVPATVLFDSGAMHSFLSMSFAGNQGMEVKELRRPLMVSTPSNQALSSQRSPSVRIEIQGVPFLANLILLESKDLDVILGMDWLARYKGVIDCANRKVTLTSNDGRVVTVHALSSESIRSRLNQLTLEEIPIVREYPD

SEQ ID NO: 25740 - protein, 1519 aa, Oryza sativa
  unsure (1)..(1519): unsure at all Xaa locations
  Clone ID: TF_OsC359_6290.pep
MTPPHPPESLINAVGFVRELRMMAFEVGYDVAPEYRQIPYDPNEEKCRVRVTLTSDREDLLSIKFEAGGRKYSHACQEVALVAIGELRHRFDEELESSAFQYHPHKPHGQDYGVYHCPEDEDSTTLKHAVYMLSAMDAVGVEREKTADDRENWNRGRICKLESKVYRLQKELAELKGEAPPPAPKLRLTARKRTRPPPRIQLASKTRVVGDVVPDHAEPIIHVLSNDEEEEDPEEREPATPEEEDPSLRSDARRTTNPVEAAAGEPITWREFTATFKKTHIPSGVVALKKRDFRALNQGSCSVTEYLHDFNRLAHYVPDDVRTDEERQEKFLEGLNDELSYALMAIEYRNFQQLVDKAIRQEDKYNRMEQKKRRAAYFKAQXGNSQRPRIALGPQAAPYPXGGSSSVARPQRQFYNNNTGNHSNDNRNVVTRPVAAPTQNQPVRKEQGIKPGVCFNCGDPGHYADKCPKPRRVKNAPVQNNSNAPAPKARVNHVAAAEAXNAPDVVLGTFPVNSIPATVLFDFGATHSFLSKSFASNHGMEVISLGRPLLVNTPGNQVSSTQYCPSITTEIQEIPFPSTLILLESKDLDVILGVDWLTHHRGVIDCANRKVTLTSSNGXTVSFFVSSPRSHGLTLNQVALQEIPIVQDYPDVFPEDLPGMPPKRDIEFRINLVPGTNPIHKRPYRMAAIELAEVKRQVDDLLQKGYIRPSTSPWGAPVIFVEKKDHTQRMCVDYRALNEVTIKNKYPLPRIDDLFDQLEGATVFSKKDLCSGYHQLXIREEDIPKIAFTTRYGLFESTVMSFGLTNAPAYFMNLMNNVFMEYLDKFVVVFIDDILIYSKTKEEHEEHLRLALEKLREHQLYAKFSKCEXWLPEVKFLSHVISAGGVVVDPSNVEXVLNWKQPKMVSEIRSFLGLXGYYRRFIENFSKIARPMSRLLQKDVKQLRPHENNYPTHDVELAAVVHELKIWRHYLFDNRTEMYTDHKCLKYIFTQPNLNMRQRRWLELIKDYDMEIHYHPGKANVVADALSRKSYCNMSEGRHLPWELCQELEKLNLGIVNKGFVAALEAQPTLFDQVREAQVNDLDIXEIEKNMRRGKTIGYIEDEQGTVWLGERICVPDNKELKDTIMKEAHETLYSIHPGSTKMYQDLKQQFWWASMRXEIAEYVALCDVCQRVKAEHQKPACQLQPLKILEWKWEEIGMDYITGLPRTSAGQDSIWVVVDRLTKVAHFIPVKTTYSGNKLAELYMARVVCLHGVPKKIVSDRGSQFTSMFWRKLQEEMRTRLNFSTTYHPQTDGQTKRVNQILEDMLRACVLDFGGSWDKNMPYAEFGYINSYQASLQMAPYEALYGRKCRTPLXWDQTGERQVFGTDILREAEEKVKIIQERLRIAQSRXKSYADNRRRDLTFEEGDYVYLRVTLLRGVHRFQTKGKLAPRFVGPFKIVSRRGEVAYQLELPPSMAGIHDVFHVSQLKKCLRVPTEEADPEHIELQKDLTYVEKPVRILVFPTFRRRAFTLRKAIDQY

SEQ ID NO: 25741 - protein, 1751 aa, Oryza sativa
  unsure (1)..(1751): unsure at all Xaa locations
  Clone ID: TF_OsC359_6530.pep
TPQPPPEVTFPLTSWGPSAIPTFPESPFSQEKNLNSSKASKATPGLEWYIPGLEIDLYSRXGCSGWLGLSSMMPRYKPEYLFGVEGFVQELRTMSFAIGFGTAPFYAQIPHDRHEEKCRVKVTLNSNSEDISSVMFEAGGGNYIHACQEVARIAIGELRDRYSDQLADTEYRYHPRQPQGSDRGSYLETEGIENDATTRHLVEMLWAMDKTRAETVLAAQDREDRNRGKICKLEDKVDRLEKELAALKGEAPPQKARIRLTARKRALFVPRYQLALKMVLTRSNGNGPNNNNNNNNNGENPTLAQVLAQQAQLMNMMMQQLQNQQNQGNNHAPPQNKLAEFLRVRPPTFSSTTNHVEAGDWLHAIEKKLDLLQCTDXEKVSFASHQLHGPASEWWDHFRLNRTTAEPITWLEFTAAFRKTHIPSGVVSLKKKEFRSLTQGSRSVTEYLHEFNRLARYAPEDVRTDEERXERFLEGLNDELSYPLMTGDYHDFQKLVDKAIRQEDKYNRMEQKKRRIAHFKAQQGNSQRPRLTLGPQSMPQGVSSSVVRLQRQFFNNNAGNNIRNQAPRPVAASTQQQPAKKEQGSKPGVCFNCGDPGHYADKCPKPRRVKVVPAQSNSTAPASKARVNHVAAAEAQGAPDVILGTFLVNLVPATLLFDSGAIHSFLSMSFAGNHGMEVEDLRRPLMVSTPSNQALSLQHSPSVRIEIQGVPFLANLILLESKDLDVILGMDWLARYKGVIDCANRKVILTNNDGRVVTVHALSSESLRSSLNQITLKEIPIVREYPDVFPDDLPGMPSKRDIEFRIDLVPGTTPIHKRPYRMAANELVEVKRQVDDLLQKGYIRPSSSPWRAPVIFVEKKDHTQRMCVDYRALNDVTIKNKYPLPRIDDLFDQLKGATVFSKIDLRSGYHQLRIKEEDIPKTAFTTRYGLFECTVMSFGLTNAPAFFMNLMNKVFMEYLDKFMVVFIDDILIYSRTKEEHEEHLRLALEKLREHQLYAKFSKCEFWLSEVNFLGHVISAGGVAVDPSNVESVTNWKQPKTVSEIHSFLGLAGYYRRFIENFSKIAKPMTRLLQKDVKYKWSEECEQSFQELKNRLISAPILILPDPKKGFQVYCDASKLGLGCVLMQDGKVVAYASRQLRPHEKNYPTHDLELAAVVHALKIWRHYLFGTRTEVYTDHKSLKYIFTQPDLNMRQRRWLELIKDYDMGIYYHPGKANVVADALSRKGYCNATEGRQLPLELCKEFERLNLGMVSRGFVAALEAKPTLIDEVREAQINDPDIQEIKKNMRRGKAIGFLEDEQGTVWLGERICVPDNKDLKDAILKEAHDTLYSIHPGSTKMYQDLKERFWWASMKREIAEYVAVCDVCQRVKAEHQKPAGLLQPLKIPEWKWEEIGMDFITGLPRTSSGHDSIWVIVDRLTKVAHFIPVKTTYSGSRLAELYMARIVCLHGVPKKIVSDRGSQFTSKFWKKLQEEMGSKLNFSTAYHPQTDGQTERVNQILEDMLRACALDFGGSWDKNLPYAEFSYNNSYQASLQMAPYEALYGRKCRTPLLWDQTGERQVFGTDILREAEEKVKIIQERLRVAQSRHKSYADNRRRELSFDEGDYVYLRVTPLRGVHRFHTKGKLAPHFVGPYKIVSRRGEVAYQLELPXSLAGVHNVFHVSQLKKCLRVPTEETNLEQIEVQEDLTYLEKPIRILEIDERRTRNRVIRFCKVQWSNHSEEESTWEREDELKSAHPHLFASFSESRGRDSV

SEQ ID NO: 25742 - protein, 1093 aa, Oryza sativa
  unsure (1)..(1093): unsure at all Xaa locations
  Clone ID: TF_OsC359_6754.pep
MSFLIGFGTAPLYAQIPHDCDEEKCRVKVTLNSNREDIPSVMFEAGGGSYIHACQEVARIAIGELHESYNDRLADTEYRYHPRQPQGSDRGSYLEPAEIENDATTRHLVEMLWAMDETRAEIVIAAQDCEDRNRGKICKLEDKVDRLEKELAALKGEAPPQKARVRLTARKRALFVPRYQLAPKVRVVEKEATPAPVDPPVVNVSDDDEEESKRTHSKVEWGATQDDGDMVLTRSNGNGPNPNKNNNNAENPTLAQVLAQQAQLKNLMMQQLQNQQNQGNNHAPPPNKLVEFLRVRPPTLSSTTNPIEAGDWLHAIEKKLDLLQCTDQEKVSFASHRLHGPASEWWDHFRLNRTTAEPITWLEFTAAFRKTHIPSGVVSLKKKEFRALTQGSRSVTKYLHEFNRLARYAPEDVRIDEERQEKFLEGLNDELSNPLMTGDYHDFQKLVDKAIRQEDKYNRMEQKKRRIAHFKAQQGNTPTQHQPAKREQGSKPGVCFNCGDPGHYADKCPKPHRAKVVPAQNNPSAPATKARVNHVAAAEAQGAPDVILGTFPVNSVPATVLFDSGATHSFLSLSFAGNHEMEVEDLRRPLMVSTPSNQALSSQRSPSVRIEIQGVPFLANLILLESKDLDVILGMDWLAKYKGVIDCANRKVTLTSNDGQVVTVHALPSEPLRSSLNQITLEEIPIVQEYPDVFPDDLPGMPPKRDIEFRIDLVPGTTPIHKRPYRMAANELAEVKRKVDDLLQKGYIRPSSSPWGAPVIXCGKERSYPEDLKGATVFSKIDLRSGYHQLRIKEEDIPKIAFTTTYGLFECTVMSFGLTNAPAFFMNLMNKVFMEYLDKFVVVFIDDILIYSRTKEEHEEHLRLALEKLREHQLYAKFSKCEFWLSEVKFLDHVISAGGVAVDPSYYWRFIENFSKIAKPMTRLLQKDVKYKWSEECEQCFQELKSRLISAPILILPDPKKGFQVYCDASKLGLGCVLMQDGKVVAYASRQLRPHEKNYPTHDLELAAVVHALKIWRHYLFGTRTEVYTDHKSLKYIFTQPDLNMRQRRWLELIKDYDMGIHYCNILKMCHFLILHHADSYVLNNLLNLGKYT

SEQ ID NO: 25743 - protein, 507 aa, Oryza sativa
  Clone ID: TF_OsC359_7433.pep
MAFEVGYEVAPEYCQIPYDPNEEKCRVRVTLTSDREDLPSIKFEAGGRKYSHACQEAALVAIGELRHRFDEELESSAFQYHPHKPHGQDYGTYNCPEGEGSATVMHAVYMLSAMDAVGVEREKAAHDRENWNRGRICKLESKVYRLQKELAELKGEAPPPAPKLRLTARKRTRPPPRLQLASKTGVVGDAVPDHAKPVIHVLSDEEEEEDLEEREPATPEEEDPSLHSDARRDMLLTSMVGCNYMSLVLLLVRDSLCPRRCRTDEEHQEKFLEGLNDELSYALMAMDYWDFQQLMDKAIRQEDKYNRMEQKKRRAAHFKAQQGSSQRPHIALGPQAAPYPQGGSSSVARPQRQFYNNNTGNRSNDNRNMVTRPVAAPTQNHPVRKEQGSKPGVCFNCGDPGHYADKCPKPRRVKNAPVQNNSNAPAPKARVNHVAAAEAQNTPDVVLEEECFNEVAKQPGPHVSDSAAREAEAAGEQRRPTAFVAAYWLHHMWASFCWDLGDVSGAM

SEQ ID NO: 25744 - protein, 1473 aa, Oryza sativa; identical to SEQ ID NO: 20593
  Clone ID: TF_OsC359_7456.pep

SEQ ID NO: 25745 - protein, 1578 aa, Oryza sativa
  Clone ID: TF_OsC359_7538.pep
ACAPEPPPEVTSPLTSSWPSAIPTFPESPFSQGKILKSSKASKATPGLEWYIPGLEIDLYSRMPRYKPEYLFGVEGFVQELRTMSFAIGFGTAPFYAQIPHDRHEEKCRVKVTLNSNSEDIPSVMFEAGGRNYIHTCQEVARIAIGELRDRYSDQLADTEYRYHPRQPLGSDRGSYLETKGIKNDATTRHLVKMLWAMDETRAETVLAAQDREDRNRGKICKLEDKVDRLEKELAALKGEAPPQKARIRLTARKRALFVPRYQLAPKVRVVEKEVTPALADPPVVNMVLTRNNGNDPNNNNNNSNGENPTLAQVLAQQAQLMNMMMQQLQNQQNQGNNHAPPQNKLAEFLRVRPPTFSSTTNPVEAGDWLHAIEKKLDLLQCADQEKVSFASHQLHGPASEWWDHFRLNRTTAEPITWLEFTAAFRKTHIPSGVVSLKKKEFRSLTQGSRSVTEYLHEFNRLARYAPEDVRTDEERQEKFLEGLNDELSYPLMTGDYPDFQKLVDKAIRQEDKYNHMEQKKRRIAHFKAQQGNSQRPSLTLGPQSMPQGGSSFVVRPQHQFFNNNAGNNIRNQAPRPVAASTQQQPAKKEQGSKSGVCFNCGDPGHYADKCPKPRRVKVVPAQSNSTVPASKARVNHVAAAEAQDAPDVILGTFLVNLVPTTVLFDSGATHSFLSMSFAGNHGMEVEDLRHPLMVSTPSNQALSLQRSPSVRIEIQGVPFLANLILLESKDIDVILGIDWLARYKGVIDCANRKVTLTSNDGRVVTVHALSSESLRSRLNQITLEEIPVVREYPDVFPDDLPGMPPKRDIEFRIDLVPGTTPIHKRPYRMAANELAEVKRQVDDLLQKGYIRPSSSPWGAPVIFVEKKDHTQRMCVDYRALNDVTIKNKYPLPRIDDLFDQLKGATVFSKIDLRSGYHQLRIKEEDIPKTAFTTRYGLFECTVMSFGLTNAPAFFMNLMNKVFMEYLDKFVVVFIDDILIYSRTKEEHEEHLRLALEKLREHQLYAKFSKCEFWLSEVKFLGHVISAGGVAVDPSNVESVTNWKQPKTVSEIRSFLGLAGYYRRFIENFSKIAKPMTRLLQKDVKYKWSEECEQSFQELKNRLISAPILILPDPKKGFQVYCDASKLGLGCVLMQDGKVVAYASRQLRPHEKNYPTHDLELAAVVHALKIWRHYLFGTRTEVYTDHKSLKYIFTQPDLNMRQRRWLELIKDYDMGIHYHPGKANVVADALSRKGYCNATEGRQLPLELCKEFERLNLGMVRRGFVAALEAKPTLIDQVREAQINDPDIQEIKKNMRRGKAIGFLEDEQGTVWLGERICVPDNKDLKDAILKEAHDTLYSIHPGSTKMYQDLKERFWWASMKREIAEHVAVCDVCQRVKAEHQKPAGLLQPLKIPEWKWEEIGMDFITGLPRTSSGHDSIWVIVDRLTKVAHFIPVKTTYSGSRLAELYMARITDGQTKRVNQILEDMLRACALDFGGSWDKNLPYAEFSYNNSYQASLQMAPYEVLYGRKCRTPLLWDQTGERQVFGMDILREAEEKVKIIQERLRVAQSRHKSYADNRRRDLSFDEGDYVYLRVTPL

SEQ ID NO: 25746 - protein, 1264 aa, Oryza sativa
  Clone ID: TF_OsC359_7558.pep
MAAVRMTLRWDGSYQPPLRRKQMPRYKPEYLFGVEGFVQELRTMSFAIGFGTAPFYAQIPHDRHEEKCRVKVTLNSNSEDIPSVMFEAGGRNYIHACQEVARIAIGELRDRYCDQLADTEYRYHPRQPQGSDRGSYLETEGIENDATTKHLVEMLWAMDETRAETVLAAQDREDRNRGKICKLEDKVDRLEKELAALKGEAPPQKARIRLTARKRALFVPRYQLAPKVRVVEKEVTPALADPPVVNNKLAEFLRVRPPTFSSTTNPVEAGDWLHAIEKKLDLLQCTDQEKVSFASHQLHGPASEWWDHFRLNRTTAEPITWLEFTAAFRKTHIPSGVVSLKKKEFRSLTQGSRSVTEYLHEFNRLARYAPEDVRTDEERQEKFLEGLNDELSYPLMTGDYPDFQKLVDKAIRQEDKYNRMEQKKRRIAYFKAQQGNSQRPRLTLGPQSMPQGGSSSVVRPQRQFFNNNAGNNIRNQAPRPVAAPTQQQPAKKEQGSKPGVCFNCGDPGHYADKCPKPRRVKVVPAQSNSTIPASKARVNHVAAAEAQDAPDMILGTFLVNLVPATVLFDSGATHSFLSMSFAGNHRMEVEDLRRPLMVSTPSNQALSLQRSPSIRIEIQGVPFLANLILLESKDLDVILGMDWLARYKGVIDCANRKVTLTSNDGRVVTVHALSSESLRSSLNQITLEEIPVVREYPDVFPDDLPGMPPKRDIEFRIDLVPGTTPIHKRPYRMAANELAEVKRQVDDLLQKGYIRPSSSPWGAPVIFVEKKDHTQRMCVDYRALNDVTIKNKYPLPRIDDLFDQLKGATVFSKIDLRSGYHQLRIKEEDIPKTAFTTRYGLFECTVMSFGLTNAPAFFMNLMNKVFMEYLDKFVVVFIDDILIYSRTKEEHEEHLRLALEKLREHQLYAKFSKCEFWLSEVKFLGHVISAGGVAVDPSNVESVTNWKQPKTVSEICSFLGLAGYYRRFIENFSKIAKPMTRLLQEEMGSKLNFSTAYHPQTDGQTERVNQILEDMLRACALDFGGSWDKNLPYAEFSYNNSYQASLQMAPYEALYGRKCRTPLLWDQTGERQVFGTDILREAEEKVKIIQEILRVAQSRHKSYADNRRRDLSFDEGDYVYLRVTPLRGVHRFHTKGKLAPRFVGPYKIVSRRGEVAYQLELPQSLAGVHNVFHVSQLKKCLRVPTEETNLEQIEVQEDLTYVEKPIRILEIDERRTRNRVIRFCKVQWSNHSEEESTWEREDELKSTHPHLFASSSESRGRDSV

SEQ ID NO: 25747 - protein, 1226 aa, Oryza sativa
  Clone ID: TF_OsC359_7854.pep
MVLTRSNGNGPNNNNNNNNGENPTLAQVLAQQAQLMNMMMQQLQNQQNQGNNHAPPQNKLAEFLRVRPPTFSSTTNPVEAGDWLHAIEKKLDLLQCTDQEKVSFASHQLHGPASEWWDHFRLNRTTAEPITWLEFTAAFRKTHIPSGVVSLKKKEFRSLTQGSRSVTEYLHEFNRLARYAPEDVRTDEERQEKFLEGLNDELSYPLMTGEQKKCRIAHFKAQQGNTSTPQQPAKREQGSKPGVCFNCGDPGHYADKCPKPRRVKVVPDQSNSTVPASKARVNHVVAAEAQDAPDVILEKKDHTQRMCVDYRALNDVTIKNKYPLPRIDDLFDQLKAEGRGRADRVHGSGAHAAASRSTVDRPLGAPEGGQAGAAGGRRRACAPMVAAGYHQRDGAAPERGEGKGETKRRSTAHHGSTATMETATGAEEGGGAARVDGVDGVPAVGERNGGVDEVGEDAAKPKEAASRWEVVRGDNGGGPELGSDGGERERRRELDSGGERGRRVAETVVGSSGRVYIGLGVREGGRRRGKWARETRPPLMAPASKCEFWLSEVKFLGHVISAGGVAVDPSNVESVTNWKQPKTVSEIRRFLGLAGYYRRFIENFSKIAKPMTRLLQKDVKYKCLATPSSPLLQPCSAIAPVIAVARGGRHRGRRCVAVLVRPFAVAVDRRNTAAVVKPKVAAASSLTPSPSVDLPPPFWSPVSSPRHPLRAGALRSRRRAVVRRRVCKPEPPPVVTSPLTSSSSSLVVRPWTGEDFEEFQGQQGNLLLCASADFWTRIYTHMPRFKPEYLFGTEGFVQELRTLSFAIGFGTAPLYAQIPHDHDEEKCHVKVTLNSNREDIPSVMFEAGGGSYIHACQEVARITIGELRESYNDQLADTEYRYHPRQPQGSDRGSYLEPAGIENDATTRHLVEMLWAMDETCAEIMLAAQDREGRNRGKICKLEDKVDRLEKELAALKGEAPPQKARVRLTARKRALFVPRYQLAPKVRVVEKEAASAPADPPIVNMVFTRSNGNGPNNNNTTNNNNGENPTLAQVLAQQAQVMNMMMQQLQNQQNQGNNHAPPQNKLAEFLRVRPPTFSSTTNPVEAGDWLHAIEKKLDLLQCTDQEKVSFASHQLHGPTSEWWDHFRLNRTTVEPITWLEFTAAFRKTHIPSGVVSLKKKEFRALTQGSRSVTEYLHEFNRLARYASEDVCTDEERQEKFLEGLNDELSYPLMTGDYHDFPEVGG

SEQ ID NO: 25748 - protein, 1304 aa, Oryza sativa
  Clone ID: TF_OsC359_8131.pep
MIQERCTVMPPHSPRNLIKVLGFVRELRLMAFEYHPHKPHGQDYGTYTYPDGEESATLMQAVHMLSSMYAVSVERDKAAHDRENWNRGKICKLESKVYRLQKELAELKGETPPPTPKLHLTARKRTCPPPRLQLASKLRVMGDAVPDRAEPVIHVLSDEEEEEYPEERMVNTRTGSGSGAANNGGDSTLAQILAQQTQLINLLVQQAQNQQANNQNQNQPPPPQNKLADFLRLHGPAAEWWDHFRQARAEGEPITWQEFTAAFKNTHIMTGVVALKKREFRALNQGSRSVTEYLHDFNRLARYAPKYVRTDEERQEKFLEGLNDELSYALMSTDFRDFQQLVDKAIRQEDKYNRIEQKKRRAAQFKAQQGSNQRSRLVTGPQATSYPQGGSSSVARPQRQFYNNNTGNRGNDNRNVVARPAATPAKNQPVRKEQGSKPGVCFNCGDPGHYADKCPKPRRVKNAPAPNNSNTPAPKARVNHVVAAEAQNAPDVVLGMPPKRDIEFRIDLVPGTNPIHKRPYRMAANELAEIKRQVDDLLQKGYIRPSTSPWGAPVIFVEKKDHTQRVFMEYLDKFVVVFIDDILIYSKTKEEHEEHLRLALEKLREHQLYAKFSKCEFWLSEVKFLGHVISSGGVAVDPSNVESVLNWKQPKTVSEIRSFLGLAGYYRRFIENFSKIARPMTRLLQKDVKYKWTEDCEQSFQELKKRLVTAPVLILPDSRKGFHVYCDASRLGLGCVLMQEGMVVAYASKQLRPHENNYPTHDLELAAVVHALKIWRHYLFGNRTEMYTDHKSLKWLELIKDYDMEIHYHPGKANVVADALSRKSYCNMSEGRHLPWELCQEFEKLNLGIVSKGFVAALEAQPTLFDQVREAQGNDPDIQEIKKNMRRGKAIGYVEDEQGTVWLGERIWVPDNKELKDTIVKEAHETLYSIHPRSTKMYQDLKQQFWWASMRREIAEYVALCDVCQRVKAEHQKPAGLLQPLKIPEWKWEEIELYMARVVCLHGVPKKIVSDRGSQFTSKFWQKLQVEMGTRLNFSTAYHPQTDGQTERVNQILEDMLRPCVLDFGRSWDKNLPYAEFSYNNSYQASLQMAPYEALYGRKCRTPLLWDQTGERQVFGTDILREAEEKVKIIQERLRVAQSRQKSYADNRRRDLTFEGDYVYLRVTPLRGVHRFQTKGKLAPRFVGPFKIVSRRGEVAYQLELPPSMAGIHDVFHVSQLKKCLRVPTEEADPEHIELQEDLTYVEKPVRILEVSERNTRNRVIRFCKVQWSNHSEEEATWEREDELKSAHPHLFAGSSESRGRDSV

SEQ ID NO: 25749 - protein, 985 aa, Oryza sativa
  unsure (1)..(985): unsure at all Xaa locations
  Clone ID: TF_OsC359_8471.pep
EELDSSAFQYHPHKPHGQDYGTYTCPDGEESATLMHAVHMLSAMDAVSVERAKAAHDRENWNRGKICKLESKVYRLQKELAELKGETPPPTPKLRLTARKRTCPPPRLQLASKIRVMGEAVPDRAEPVIDIISDEEEEEDPEEREPATPEEEDPSLRSDARRTTNPVEAGDWLHAVEKKLDLIQCTEQEKVSFASHQLHGPAAEWWDHFRQGRAEGEPITWQEFTAAFKKTHIPTGVVALKKREFRALNQGSRSVTEYLHDFNRLARYAPEDVRTDEERQEKFLEGLNDELSYALMSTDFRDFQQLVDKAIRQEDKYNRMEQKKRRAAQFKAQQGSNQRPRLVTGPQAPSYPQGGSSSVVRPQRQFYNNNTGNRGNDNRNMVARPAATPAQNQPVRKEQGSKPGVCFNCGDPGHYADKCPKPRRVKNAPAPNNSNAPAPKARVNHVAAAEAQNAPDVVLGTFPVNSIPASVLFDSGATHSFLSKSFASNHGMEVISLGRPLLVNTPGNQVFSTQYCPSATIEIEEVPFPSSLILLESKDLDVILGMDWLSRHRGVIDCANRKVTLTNSNGETVSFFVSSPKSHGVILNQVALQEIPIVQDYPDVFPEDLPGMPPKRDIEFRIDLVPGTNPIHKRPYRMAANELAEVKRQVDDLLQKGYIRPSTSPWGAPVIFVEKKDHTXRMCVDYRALNEVTIKNKYPLPRIDDLFDQLEGATVFSKIDLRSGYYXLRIREEDIPKTAFTTRYGLFECTVMSFGLTNAPAFFMNLMNKVFMEYLDKFVVVFIDDILIYSKTKEEHEEHLRLALEKLREHQLYAKFSKCEFWLSEVKFLGHVISSGGVAVDPSNVESVLSWKQPKTVSEIRSFLGLAGYYRRFIENFSKIARPMTRLLQKEVKYKWTEDCEQSFQELKKRLVTAPVLILPDSRKGFQVYCDASRLGLGCVLMQEGKVVAYASRQLRPHENNYPTHDLELAAVVHALKIWRNHTFA

SEQ ID NO: 25750 - protein, 1399 aa, Oryza sativa
  Clone ID: TF_OsC1528_2065.pep
MSIISTIQKPYYRHCDFTMAGFADALRPDKFTGVHFKRWQIRVTLWLTAMKCFWVSTGKPEGVLTAEQQKQFEEATTLFVGCILSVLGDRLVEVYMHMTDAKELWDALNTKFGATDASNDLYIMEQFHDYKMADNRSVVEQAHEIQTMAKELELLKCVLPDKFVAGCIIAKLPPSWRSFGTALKHKRQEYSVEGLIASLDVEEKAREKDAASKGDGGQSSANVVHKAQNKSKGKYKAQQTTNFKKQKKNNINPNQDERTCFVCGQVGHLARKCLQCKGMKAPAGQTSKSANVTIGNTGDGSGYGNLPTVFSVNQSTNWWVDTGANVHVCADISLFSSYQVARGSTVLMGNGSHASVHGVGTVDLKFTSGKIVQLKNVQHVPSIDRNLVSGSRLTRDGFKLVFESNKVVVSKHGYFIGKGYECGGLFRFSLSDFCNKSVNHICGSVDDEANVWHSRLCHINFGLMSRLSSMCLIPKFSIVKGSKCHSCVQSKQPRKPHKAAEERNLAPLELLHSDLCEMNGVLTKGGKRYFMTLIDDATRFCYVYLLKTKDEALDYFKIYKAEVENQLDRKIKRLRSDRGGEFFSNEFDLFCEEHGIIHERTPPYSPESNGIAERKNRTLTDLVNAMLDTAGLPKTWWGEALLTSNHVLNRVPNRNKDKTPYEIWIGRKPSLSYLRTWGCLAKVNVPITKKRKLGPKTVDCVFLGYAHHSIAYRFLIVKSEVPDMHVGTIMESRDATFFESFFPMKDTHSGSNQPSEIIPNSITPPEQTEHTHELVSEEDVSEAPRRSKRQRTAKSFGGDFTVYLVDDTPKSISEAYASPDADYWKEAVRSEMDSIIANGTWEVTERPYGCKPVGCKWVFKKKLRPDGTIEKYKARLVAKGYTQKEGEDFFDTYSPVARLTTIRVLLSLAASHGLLVHQMDVKTAFLNGELDEEIYMYQPDGFVVEGQEGKVCKLLKSLYGLKQAIKQWHEKFDKTLTSAGFAVNEADKCVYYRYGGGEGVILCLYVDDILIFGTNLEVINEVKSFLSQNFDMKDLGVADVILNIKLIRGENGITLLQSHYVEKILNRFGYIDSKPSPTPYDPSLLLRKNKRIARNQLEYSQIIGSLMYLASATRPDISFAVSKLSRFTSNPGDDHWRALERVMRYLKGTVELGLHYTGYPAVLEGYSDSNWISDVDEIKATSGYVFTLGGGAVSWRSCKQTILTRSTMEAELTVLDTATVEAEWLRDLLMDLPVVEKPVPAILMNCDNQTTCEKTIEVCQEIKKLRSYNVGLHPNSEKPGRSLHEGTITKCDRQCIEGDGFETHIKSLYVYNLNTLSSSSSFSGTGGPPRIDDIVAAATMTTPRDHKLKVVTKPGGGAQRVAAMETLPRETFSPRFRCGGGAAAAVASAIVGRSYLGGK

SEQ ID NO: 25751 - protein, 1588 aa, Oryza sativa
  Clone ID: TF_OsC359_7669.pep
MRLVDGRPQGVRVGRFINAAGTTGFPTGKRAMPRYKPEYLFGVEGFVQELRTMSFVKGFGTAPFYAQIPHDRHEEKCRVKVTLNSNSEDIPSVMFEAGGRSYIHTCQEVARIAIGELHDRYSDQLADTEYRYHPRQPQGSDRGSYLETEGIEIDATTRHLVEMLWAMDETRAETVLAAQDREDRNRGKICKLEDKVDRLEKELAALKGEAPPQKARIRLTARKRALFVPRYQLAPKVRVVEKEVTPAPADPPVVNMVLTHSNGNGPNNNNNNNNNGENPTLAQVLAQQAQLMNMMMQQLQNQQNQGNNHAPPQNKLAEFLRVRPPTFSSTTNPVEAGDWLHAIEKKLDLLQCTDQEKVSFASHQLHGPASEWWDHFRLNRTTAEPITWLEFTAAFRKTHIPSGVVSLKKKEFRSLTQRSRSVTEYLHEFNRLARYAPEDVRTDEERQEKFLEGLNDELSYSLMTGDYHDFQKLVDKAIRQEDKYNRMEQKKRRIAQFKAQQGNSQRPRLTLGPQSMPQGGSSSVVRPQRQFFNNNAGNNIRNQAPRHVAASTQQQPAKKEQGSKPMVCFNCGDPGHYADKCPKPRRVKVVPTQSNSTVPASKAHVNHVAAAEAQGAPDVILGTFLVNSVPATVLFDSGATHSFLSMSFAGNHGMEVEDLRRPLMVSTPSNQVLSLRRSPSVRIEIQGVPFLANLILLESKDLDVILGMDWLARYKGVINCANRKVTLTSNDGRVVTVHASSSESLRSRLNQITLEEIPVVREYRDVFPDDLPGMPPKRDIEFRIDLVPGITPIHKRPYRMAANELAEVKRQVDDLLQKGYIRPSSSPWGAPVIFVEKKDHIQRMCVDYRALNDVTIKNKYPLPRIDDLFDQLKSATVFSKIDLRSGYHQLRIKEEDIPKTAFTTRYGLFECTVMSFGLTNAPAFFMNLMNKVFMEYLDKFVVVFIDDILIYSRTKEEHEEHLRLALEKLREHQLYTKFSKCEFWLSEVKFLGHVISAGGVAVDPSNVESVTNWKQPKTVSEIRSFLGLTGYYRRFIENFSKIAKPMTRLLQKDVKYKWSEECEQSFQELKSRLISAPILILPDPKKGFQVYCDASKLGLGCVLMQDGKVVAYASHQLRPHEKNYPTHDLELAAVVHALKIWRHYLFGTRTEVYTDHKSLKYIFTQPDLNMRQRRWLELIKDYDMGIHYHPGKANVVADALSRKGYCNATEGRQLPLELCKEFERLNLGIVSRGFVAALEAKPTLIDQVREAQINDPDIQEIKKNIRRGKAIGFLEDEQGTVWLGERICVPDNKDLKDAILKEAHDTLYSIHPGSTKMYQDLKERFWWASMKREIAEYVAVCDVCQRVKAEHQKPVGLLQPLKIPEWKWEEIGMDFITGLPRTSSGHDSIWVIVDRLTKVAHFIPVKTTYSGSRLAELYMARIVCLHGVPKKIVSDRGSQFTSNFWKKLQEEMGSKLNFSTAYHLQTDGQTERVNQILEDMLRACALDFGGSWDKNLPYAEFSYNNSYQASLQMASYEALYGRKCRTPLLWDQTGERQVFGTDILREAEEKIPTFSESPFSQEKNLKSSKASKASHTDPKQPFKHVDPI

SEQ ID NO: 25752 - protein, 1691 aa, Oryza sativa
  Clone ID: TF_OsC359_7848.pep
AHDTTASERCEVQVVRRIRRRRSGRTSSWSPSRRRPRPPLRHRRRPPEHRRRRQAEELRRFLFVAGAVRCFSAVVLVVAPGLEWYIPGLEIELCSRDGCSEWLGLCNRIRHDRHEEKCRVKVTLNSNSEDIPSVMFEAGGRNYIHACQEVARIAIGELRDRYSDQLADTEYRYHPRQPQGSDRGSYLETEGIENDATTRHLVEMLWAMDESRAETVLAAQDREDRNRGKICELEDKVDRLEKELAALKGEAPPQKARIRLTARKRALFVPRYQLAPKVRVVEKEVAPADPPIIIISSDEEEESKRNHSKIEWVATQDDEDEPNEPSIDLRCSEEQDFPPVSLLVPYPCQMVNTRSNRNGPNLNNPNNNNNGENPTLAQVLAQQTQLMNMMMQQLQNQQNQGNNHAPPQNKLAEFLRVRPPVFSSTTNPVEAGDWLHAIEKKLDLLQCTDQEKVSFASHQLHGPASEWWDHFRLNRTTAEPITWLEFTAAFRKTHIPSGVVSLKKKEFRSLTQGSRSVTEYLHEFNRLARYAPEDVRNDEERQEKFLEGLNDELSYPLMTGDYHDFQKLVDKAIRQEDKYNRMEQKKRRIAHFKAQQGSSQKPRLTLGPQSMPQGASTQQQPAKREQGSKPMVCFNCGDPGHYADKCPKPRRVKVVPAQSNSAVPASKARVNHVAAAEAQDAPDVILGTFLVNSVPATVLFDSGATHSFLSMSFAGNHGMEVEDLRRPLMVSTPSNQALSLQRSPYVRIEIQGVPFLANLILLESKDLDVILGMDWLARHKGVIDCANRKVTLTSNDGRVVTVHALSSEFLRSRLNQITLEEIPIVREYPDVFPDDLPGMPPKRDIEFRIDLVPGTTPIHKRPYRMVANELAEVKRQVDDLLQKGYIRPSSSPWGAPVIFCGKERSYPEDLKGATVFSKIDLRSGYHQLRIKEEDIPKTAFTTRYRLFECTVMSFGLTNAPAFFMNLMNKVFMEYLDKFVVVFIDDILIYSKTKEEHEEHLRLALENKCEFWLSEVKFLGHVISAGGVAVDPSNVESVTNWKQPKTVSEIRSFLGLAGYYRRFIENFSKIAKPMTRLLQKDVKYKWSEECEQSFQELKSRLISAPILILPDPKKGFQVYCDASKLGLGCVLMQDGKVVAYASRQLRPHEKNYPTHDLELAAVVHALKIWRHYLFGTRTEVYIDHKSLKYIFTQSDLNMRQRRWLELIKDYDMGIHYHPGKANVVADALSRKGYCNATEGRQLPLELCKEFERLNLGIVSIGFVAALEAKPTLIDQVREAQTNDPDIQEIKKNMRRGKAIGFLEDEHGTRVKAEHQKPAGLLQPSKIPEWKWEEIGMDFITGLPRTSLGQDSIWVIVDRLTKVAHFIPVKTTYSGSRLAELYMARIVCLHGVPKKIVSDRGSQFTSNFWKKLQEEMGSKLNFSTAYHPQTDGQTERVNQILEDMLRACALDFGGSWDKNLPYAEFSYNNSYQASLQMAPYEALYGRKCRTPLLWDQTGERQVFGTDIVREAEEKVKIIQERLRVAQSRHKSYADNRRRDLSFEEGDYVYLRVTPLRGVHRFHTKGKLALRFVGPYKIVSRRGEVAYQLELPQSLAGVHNVFHVSQLKKCLRVPTEEANLEQIEVQEDLTYVEKPIRILETNERKTRNRVIRFCKVQWSNHSEEESTWEREDELKSAHPYLFASSSESRGRDSV

SEQ ID NO: 25753 - protein, 1247 aa, Oryza sativa
  unsure (1)..(1247): unsure at all Xaa locations
  Clone ID: TF_OsC1528_2390.pep
SGDRLVEVYMHMTDAKELWDVLNTKFGATDASNDLYIMEQFHDYKMTDNRSVVEQAHEIXTMAKELELLKCVLPDKFVAGYIIAKLPPSWRSFGTALKHKRQEYSVKGLIASLDVEEKAREKDVVSKGDGGQSNANVVHKAQNKSKGKYKAQQTTNFKKQKKKNNNPNQDERTCFVYGQPGHLARKCPQRKGMKAPSGQTSKSANVTIGNTGDGSGYGNLPTVFFVNQSTNWWVDTGANVHVCAGISLFSSYQVARGSTILMGNGVGTVDLKFTSGKIVQLKNVQHVPSIDRNLVSGSRLTRDGFKLVFESNKIVVSKHGYFIGKGYECGDLFRFSVSDFCNKSVNHICASVDDEANVXHSRLCHINFGLMSWLSSMCLIPKFSIVKGSKCHSCVQSKQPRKPHKVAEEINLAPVELLHSDLCEMNGVLTKGGKRYFMTLIDDATRFCYVYLLKMKDETLDYFKIYKAEVENQLDRKIKRLRSNRGGEFFSNEFDLFCEEHGIIHERTPPYSPESNGIVERKNRTLTDLVNAMLDTAGLPKAWWGEGLLISNHMLNRVPNRNRDQTPYEIWIGRKPSLSYLRTWGCLAKVNVPITKKRKLGPKTVDCVFLKYAHHNIAYRFLIVKSEVPDMHVGTIMESRDATFFESFFPMKDTHSGSSQPSEIIPSSITPPEQIEHTHEHVSEEDVSEAPRRSKRQRTAKSFGDDFTVYLVDNTPKSISEAYASPDADYWNEAVRSETGLGRLTTIRVLLSLAASYCLLVHQMDVKTAFLNGELDEEIYMDQPDGFVVEGQEGKVCKLLKSLYGLKQAPKQWHEKFDKPLTSTGFAVNEADKCVYYRHGGGEGIILCLYVDDIQIFGTNLEVINEVKSFLSQNFDMKDLGVVDLILNIKLIRGENGITLLQSHYVEKILNRFGYIDSKPSPTPYDPSLLLRKNKRIARNQLEYSQIIGSLMYLASATRPDISFAVSKLSRYPVVLEGYSDSNWIFDVDEIKATSGYVFTLGGGAVSWRSCKQTILTRSTMKAELTALDTATAEAEWLRDLLMDLPIVEKPVPAILMNYDNQTGLLAALYCAVARRLLHPACRRAPAIGRAGLQNLCLRRPAPGEGGSKVFGKRFARLLPVRPRRLAYLSARVLRAFVDAHNHDALYWWDDWKLRILVLGSNTIQLFLFIYGGVRWHRISLWFRLCIWLAYIGGDSLAIYALATLFNRHKHEAPAASELEVLWAPILLIHLSGQDMIASYSIQDNYL

SEQ ID NO: 25754 - protein, 1981 aa, Oryza sativa; identical to SEQ ID NO: 18648
  Clone ID: TF_OsC251248_2.pep

SEQ ID NO: 25755 - protein, 462 aa, Oryza sativa; identical to SEQ ID NO: 18649
  Clone ID: TF_OsC1528_1699.pep

SEQ ID NO: 25756 - protein, 421 aa, Oryza sativa
  Clone ID: TF_OsC1528_2064.pep
MAPQPTCQTCVRNYLGSKEDPALSENPNQLAEQVTNQVAKTDNTVPGPNKEPKVNPDKSKNEAAEIQGTQSVEGTDTHKEKNKEFLNVMITGMKTPLRANNCPNLQNSINKSVSRENSMIKEGSCHKRKTLPSEVDMQDVPQCQTMQSCQNLPKSPTLKSKKIRHVPGFICFICHKIGHYMRHCPQKPYMDAPLQANMSTSRMPFYPQGSPNSPNVNAVRSTFPDDKRAKASCDMCQDIQEKKEMQEYKRRKVMSLEIQAKEDLCRKTNSPAQYYQKASQHSTSSGSTSRSTMSEPGQQATMINSNSHEGSNSVPCPTPSKRRGYKAGVECFICHEMGHYSWCCPQKVKSKRVQPTTSLPNVSGPKSSKSPNSGSASLTSPPVGQGRLNHVQVETNGKVVNLEQVEGAGEEQVPQARAEPQ

SEQ ID NO: 25757 - protein, 919 aa, Oryza sativa; identical to SEQ ID NO: 18671
  Clone ID: TF_OsC1528_1627.pep

SEQ ID NO: 25758 - protein, 899 aa, Oryza sativa; identical to SEQ ID NO: 18679
  Clone ID: TF_OsC1528_1670.pep

SEQ ID NO: 25759 - protein, 1251 aa, Oryza sativa
  unsure (1)..(1251): unsure at all Xaa locations
  Clone ID: TF_OsC1528_2109.pep
MKCFWVSTGKPEGILTADQQKQFEEATTLFVGCILSVLGERLVEVYMHMTDAKELWDALNTKFVATNASNDLYIMEQFHDYRIADNRSIVEQAHEIQTIAKELELLKCVLPDKFVAGCIIAKLPPSSRSFGTALKHKRQEYSVEGLVASLNGEEKARKKTPRLRAMNKSKGKYKAQQNTNFKKQKKNNNNPNQDERTCFVCGQPGHLARKYPQRKGMKAPAGQTSKSANVTIGNTGDGSGYSNLPTVFSVNQSTNWWVDTAANVARSSTVLMGNGSHASVHGVGTVDLKFTLGKIVQLKNVQHVPSIDRNLVSGSRLTRDGFKLVFESNKVVVSKHGYFIGKGYECGGLFRFSLSDFCNKSVNHICGSVDDEANVWHSRLCHINFGLMSRLSSMCLIPKFSIVKGSKCHSCVQSKQPRKPHKAAEERNLAPLELLHSDLCEMNGVLTKGGKRYFMTLIDDATRFCYVYLLKTKDEALDYFKIYKAEVENQLDRKIKRLRSDRGGEFFSNEFDLFCEEHGIIHERTPPYSPESNGIAERKNRTLTDLVNAMLDTAGLPKAWWGEALLTSNHVLNRVPNRNKDKTPYEIWIGRKPSLSYLRTWGCLAKVNVPITKKRKLGPKTVDCVFLGYAHHSIAYRFLIVKSEVPDMHVGTIMESRDATFFESFFPMKDTHSGSNQPSEIIPSSITPPEQTEHTHELVSEEDVSEAPRRSKRQRTAKSFGDDFTVYLVDDTPKSISEAYASPDADYWKEAVRSEMDSIIANGTWEVTERPYGCKPVGCKWVFKKKLRPDGTIEKYKARLVAKGYTQKEGEDFFDTYSPVARLTTIRVLLSLAASHGLLVHQMDVKTTFLNGELDEEIYMDQPDGFVVEGQEGKVCKLLKSLYGLKQAPKQWHEKFNKTLTSAGFAVNEADKCVYYRHGGGEGVILCLYVDDILIFGTNLEXVINEVKSFLSQIFDMKDLGVADVILNIKLIRGENGITLLQSHYVEKILNRFGYIDSKPSPTPYDPSLLLRKNKRIARNQLEYSQIXGSLMYLASATRPDISFAVSKLSRFTSNPGDDHWRALERVMRYLKGTVELGLHYTGYPAVLEGYSDSNWISDVDEIKATSGYVFTLGGGAVSWRSCKQTILTRSTMEAELTALDTATVEAEWLRDLLMDLPVVEKPTCEKTIEVCQEIKKLRSYNVGLHPNSEKPGRSLHEGTITKCDRQCIEGDGFETHSILEGTHLCELDCWSQSMKILGESSRKLTKDLGV

SEQ ID NO: 25760 - protein, 1145 aa, Oryza sativa
  Clone ID: TF_OsC1528_2282.pep
MAGFADALRLDKFTGVHFKRWQIRVTLWLTAMKCFWVSNGKPEGILTADQQKQFEEATTLFVGCILSVLGDRLVEVYMHMTDAKELWDALNTKFGATDASNDLYIMEQFHDYKMADNRSVVEQAHEIQTMANELELLKCVLPDKFVAGCIIAKLPPSWRSFGTALKHKRPEYSVEGLIASLDVEEKAREKDAASQGDGGQSSANVVHKAQNKSKGKYKAQQTTNFKKQKKNNINPNQDERTCFVCGQPGHLARKYPQRKGMKAPAGQTSKSANVTIGNTGDGSGYGYECGGLFRFSLSDFCNKSVNHICGSVDDEANVWHSRLCHINFGLMSRLSSMCLIPKFSIFKGSKCHSCVQSKQPRMPHKAAEERNLAPLELLHSDLCEMNGVLTKGGKRYFMTLIDDATRFCYVYLLKTKDEALDYFKIYKAEVENQLDRKIKWLKSDRGGEFFSNEFDLFYEEHGIIHERTPPYSPESNGIAERKNRTLTDLVNAMLDTAGLPKAWWGEALLTSNHVLNRVPNRNKDKTPYEIWIGRKPSLSYLRTWGCLAKVNVPITKKRKLGPKTVDCVFLGYAHHSIAYRFLIVKSEVPDMHVGTIMESHDATFFESFFPMKDTHSGRGPNQAAPPPSSPGVADRWGPPVGSFPHLQPTPHPQPPHPQPPPRPRLRLLRATSTTFPVAPSRFFPISPTSPELPITPAPCNHPPPPFLLLRPPLAAARVAAAPRRLRRRVRKAKLHPGRPFPVEFRRRNSHPLALRAPRIPSASGRRPPVTCRRRSPSSSSAPATLAPPPFGAAFAPPSPPSVAVIGNARARAVAVAVAAWPALSRAGSPPPVRSTPRAIWAVGSVDRRWTTRVVPVHDSGSSDAPVYFEIVAEVPPAAEQGKSCLSLEHVDPIFRRIQARVGVMERGGPCDGLCRFRIHLGMRGDCPLPAGDGDYSIPLTGVHRRSGEQVSETSTFDVLHREKAAIRFLGSASRDCSLFVRDGSPSSPLACFAFSSTLATASSSCRATDLSTTLLPPPFPPELGRRRDCRRGENGGVARGAEGEAEGAVRSEGAVDGEGRQEDDDDGVVGGGVRVGKEKRRVYSWKIRSLIMVLYLTFGDFLLFLKNRAATVLATASVTKGRVQVPPSNVIYVPGATPQQSIGVY

SEQ ID NO: 25761 - protein, 977 aa, Oryza sativa
  Clone ID: TF_OsC359_7024.pep
MWELKVDKIFHIHNYSEEKKLAMASLEFEDYALIWSRDIQCFKCGGRGHVVRECPNNRAIIVIEHGEFDSASEDAENGQRNNLFQTRAKVGGKVCKVIVDGGSCHNLASKDMCDKLGLKLLRHPHPYHVQWLNDSGDIKIGHRVKVSFKIGEYEDEVLCDVVPMTVCHLLLGRPWQFDRSSRHCGRTNQFSIKWKGRNFVLKPMTPQQIMAEHMQKSSEVRIESEKEREQNKFSDIHKSVSKSHKPNMSDKKKREGENFVMLATKSEMRDEYEDVFPMETPAGLPPLRGIEHQIDLIPGAALPNRAPYRTNPQETNEIQRQVQELLDKGYVRESLSPCVVPVILVPKKDGSWRMCVDCRALNNITVRYRHPIPRIDDMLDELSGSMIFSKIDLRSGYHQIRMKIGDEWKAVFKTKFGLYEWLVMPFGLTSEPSTFMRLMNHVLRTFIGKFVVVYFDDILIYSKSLSEHASHIKQVLDVLRKEKLFANIEKCTFCTEKVVFLGFVISGQGVEVDESKVEAIKDWPTPVNVSQVRTFHGLAGFYRRFVKDFSTIAAPLNELTKKGIEFHWGESQKDAFQKLKRCLTEAPLLVWPDFTKTFEIECDANGIGIGAVLMQDKKHVAYFSEKLGGAQLNYSVSDKELYVLVRVLETWQHYLWPKEFVIHSDHEALKYLKGQAKLNRRQAKWVEFIETFPYVVKYKKDGQTEVVNRTLSTLLRMMIKKNLKEWEDCLPLVEFAYNRAERTNMDASKRAAYVKKIHEKTKEEIEKKARSNTAKVNKHRKKVVYETGDLVWVHLQFRTTPFQEGEDDVPQPLSHDDEHIPATPDVNKGDVNNGDGSHHKSHEENEDDVNHVDGLCLNKNDQAYHGPITRSRARKIQQEVNSLFAQLNPNFCENFILPKCSTFLLLRFTPEEIITTPRRMGYIEDDKGYVEDDKGYDEEEPAHPKPVAVYANKKMVYSAKDSTSKACVTQPVNFLHA

SEQ ID NO: 25762 - protein, 562 aa, Oryza sativa; identical to SEQ ID NO: 18680
  Clone ID: TF_OsC91_2124.pep

SEQ ID NO: 25763 - protein, 2112 aa, Oryza sativa
  Clone ID: TF_OsC91_2130.pep
MKMHLKSINPYIWRIVEKGYVLQNPEDPTKEDDENEHKNAQAANAILSALSGSEFNRVDGIESAKVIWDTLRNLHEGTDSVRESKGQFERFVMLDGESPSDMYDRLSKIVNEIKGLGSKDMTDEVVVKKMRPDYKTLTPHDLLGRILAYDMLVQESKDVIQYINQSSTASIKKEDLALKAKEEEEENRKSKSKAEIDDEEMALFVKKFGKFKRRSGFFKGGSSKHYSNKSSGRHSARVCYVCKEPGHFIADCPHLKDGSHIKEDKKKSEKKDEKKEKHKHSKREHYGQAHLGMIFGFNSESSSSDEEGVATFAVKPSSPPRLFDYSSDEDAPVCLMAKEPKVPSPHKSFNVDLVSDEEDEVEDEVMDDELFKSITKESLPHLSELLGRIEDQYATLKRQETLLIREKERSHKLKSELAKEREKNEALVRLYKQTKESHANLEVANAQLQERVDGLDKAYLTLEEKFETLKNSVSLPSEPSCSKIVPSNEPCVRCKDIDIEACATNSISLSTLQKQNEKLMGLLHNGLLKCHMGSKALKDYLGYQRDNFNHEGLGYIPPPKGKVDKSVMIKRPQGLSNFVKAKSILPNDYASHCSFDASYILRKNTSGRVVAKYVGPRGKNISIKRVLWVPKALVTNMRGPKQEYVSGGRSWVIDSGCTNHMTGEESMFSTLDPNGTSQDNIVFGDDGKGKVMGLGKIAISNDLSIANVLLVKSLNYNLLSVSQLCSMGYNCLFTDVGVTVYRRNDSSVVFEGVLKGKLYLVDFSSSTAKHETCIVAKSNTGWLWHRRLAHVGMRNLHKILKHDHILGLTNVQFEKDRVCSACQAGKQIGAHHPVKNVMTTTRPLELLHMDIFRPIAYLSIGGNKYGLVIVDDFSRFTWVFFLHDKSEIQAIFKKFARRAQNEFDLKIMNIRSDNGKEFKNTCIESFLDEEGIKHEFSAPYSPQQNGVAERKNRTLIKMARTMLDEYKTSDRFWAEAVNTACHAINRLYLHRLLKKIPYELFTGNKPNVSYFHVFGSKCYILNRKARSSKFAPKVDEGFLLGYGSNECAYRVFNKSSGIVEIARDVTFDETNGSQVEQVDSHVLGEEEDPSEAIKRLALGDVRPREPQQGASSSTQVEPPTSTQTDDPSISSLDQGEEGEQVPPSPIKLARPRIHQSIQRDHPTDNILETSTRVEQALNDPDWVMAMQEELNNFTRNEVWTLVERPRQNVIGTKWIFRNKQDEAGVIIRNKVRLVAQGFTQIEGLDFGETFAPVARLESIRILLAFATNLNFKLYQMDVKSAFLNGPINELVYVEEPPGFEDPKYPNHVYKLHEALYGLKQAPRAWYECLRNFLVKNGFEIGKADSTLFTKRHDNDIFVCQIYVDDIIFGSTNKSFSEEFSRMMTKRFEMFMMGELKFFLGLQIKQLKEGTFICQTKYLKDMLKKFGMENAKPIHTPMPSNSHLNLNAQGKDVDQKVYRSIIGSLLYLCASRPDIMLSVCMCARFQAAPKECHLVAVKRILRYLVHTPNLGLWYPKGARFDLIGYADADYAGCKVDRKSTSGFFGLSEKFSDISEKHQNRAQPFWILSDISENFRKYQKISESLYITPWTPFSLLSTLFPHGLTPSSLPTGDPPATTSSPATSRGSPPLQPRGSTFGALLGTYIVDLHRVLLVFFTFLRMPPRKQTSHMSRSPRDRSPTPSSHDDSDSDWTGGEDAIPQGARVARGGNLPPRRSSHGGGGDGEGSSRQPQTPPHQPNVLIGPLRLHTPERDPAVIRQVYDWRRKSEAHNDPVIDSVIANCDLMGIRSFMTLQQNWCNEIIAQFYATVYFDRYRAMHWMTQGSWFSVSYQQLAEIWGFRLRSLLNLDNLHNLQIPANTELLPLYTPNDPNVVLGKVDGLKLYFAYLNWMFRRSFVLKDGDASSINHISRTVLLRFDPPPHRFHVYHFVWEEIRMASIQYKKGLVYAPHIMRMIETVTQLQFRHDVTHSQLHLRLIKAPRSSAARDIPSSSTQPPPAPERPASVARREPSPLFRILRSLFGLCSTEAKKNRRLRNSVKKTARDVKFLKARYYEDHHIDIPPSPPGFEAEPDEPEDEEIEDPFAGLPPDFDFFGYGPGYGYPPPPPPEDPPQAPFA

SEQ ID NO: 25764 - protein, 268 aa, Oryza sativa
  unsure (1)..(268): unsure at all Xaa locations
  Clone ID: TF_OsC1713_5433.pep
GETRRRRCCQLLQVKAERQPITWEEFTEGFKKXHVPVGVVALKKREFRALKQKDRTVAEYLHEFNRLARYAPEDVRTDEERQEKFLEGPKDELSVMLISHDYEDFQELVDKAIRLEDKKNKMDNRKRKMTVSQEAQGSSQRQRIKPLQIGESFSAGQEQSQQQSQQLGISGEINSETNASNEDNDEQATQSVSFQQDQSQEDNSNGREHRVCFNCYEPGHFVKECPKPKRQQPQGQVNNIVLTGANAVPVASQGIQLSHQFQSSSSFL

SEQ ID NO: 25765 - protein, 1698 aa, Oryza sativa
  unsure (1)..(1698): unsure at all Xaa locations
  Clone ID: TF_OsC1713_5186.pep
MSNEVNHVGKAPMFNGTNYSTWKIKMSTHLKAMSFHIWSIVDVGFAITGTPLTEIDHRNLQLNAQAMNALFNSLSQEEFDRVSNLETAYEIWNKLAEIHEGTSEYKDAKLHFLKIQYETFSMLPHESVNDMYGRLNVIVNDLKGLGANYTDLEVAQKMLRALPEKYETLVTMLINSDMSRMTPASLLGKINTNDMYKLKKKEMEEASPSKKCIALQAEVEDKGKGKVNEVNENLEEEIALLARRFNDFLGRRKERGKGSNSNRRRNRRPNKTLSNLRCFECGEKGYFASKCPSKDDDGDKSSKKKSGGYKLMKKLKKEGKKIEAFIGEWDSNEESSASSGSEEEDSDNASSKKKKMAVVAIKEAPSLFAPLCLMAKGSSKVTSLSDSESDDDCDDVSYDELVSMFEELHAYSEKEIVKFKALKKDHAFLEVLYEELKTSHERLTISHEKLKEAHDNLLSTTQHGALIDVGISCDLLDDSTTCHIAHVASSSISTSCDDLVDMSSSSSSSCVSICDASLVVENNELKEQVAKLNKSLERCFKGKNTLDKILSEQRCILNKEGLGFIPKKGKKPSHRATRFVKSNGKYCSKCREVGHLVNDCPGGKPPKTCMFDSHYMLRKAHDGSIVARYVGSPILGGKKNTIWVPKALVSNLQGPKQVWIILTILGXFFLHDKSIVAELFKKFAKRAQNEFSCTLVKIRSDNGSEFKNSNIEDYCDDLGIKHELSATYSPQQNGVVERKNRTLIEMARTMLDEYGVSDSFWAEAINIACHATNRLYLYRLLKKTSYELIVGRKPNVAYFRVFGCKCYIYRKGVRLTKFESRCDEGFLLGYASNSKAYRVYNKNKGDEGLMRAMKNMSIGDVKPIEVEDKPSTSTQDEPSTSASPSQAQVEVEEEKAQDPPIPPRIHTALSKDHPIDQVLGDISKGVQTRSRVASICEHYSFVSCLEPKHVDEALCDPDWMNAMHEELNNFARNKVWTLVERPRDHNVIGTKWIFRNKQDENGLVVRNKARLVAQGFTQVEGLDFGETFAPVARLEAIRILLAFASYFDIKLFQMDVKSAFLNGEIAELVFVEQPPGFEDPENPNHVYKLSKALYGLKQAPRAWYERLRDFLLSKDFKIGKVDTTLFTKIIGDDFFVCQIYVDDIIFGSTNEVFCKEFGDMMSREFEMSMIGELSFFLGLQIKQLKDGTFVSQTKYIKDLLKRFGLEDAKPIKTPMATNGHLDLDEGGKPVDLKLYRSMIGSLLYLTASRPDIMFSVCMCARFQAAPKECHLVAYPKGAKFKLVGYSDSDYAGCKVDRKSTSGSCQMLAMPPHTRHGRREPTPDPVSKNEESSGDEYVQSDEDNMENVEGNELDVSDDGDDNGSGNSEDDEASDDGSPLDSTIQFVLNLRNAQQYTILHHHDQFRRPNDCNDPRFHTRFQKSVYEQVYANKAFAEHKWISWRHIGETPEFENLQEMFRTVGIDRIVTMKQPFDEDLIRQFYATVWVSGDCDAMKWMSGTLRCSINRREFKELLHIRFNNGDDLHDEHTHNPFPIDHFSQFYEEGGGYTYGKVAGLRALPSVINRRVRATILPRCGNNDDIRGVAWHVIDAIMDGRRFDVINLMMKEIAISKGTIGQGIYYAPYIMRLPPPRRLVEKLPGDLSEKIVEEARCQFVSGLEFTTFGVKEELPXVIKAWVVLSVGRLPPCPPLDEGGVRRLRG

SEQ ID NO: 25766 - protein, 767 aa, Oryza sativa; identical to SEQ ID NO: 18688
  Clone ID: TF_OsC783_9.pep

SEQ ID NO: 25767 - protein, 858 aa, Oryza sativa
  Clone ID: TF_OsC1528_1875.pep
MRPDYSIPLASVHRRSGEQVSGTSAFDVLHREKAAIRHCDFTMAGFADALRLDKFTGVHFKRWQIRVTLWLIAMKCFWVSTGKPEGVLTAEQQKQFEEATTLFVRCILSVLGDRLVEVYMHMTDTKELWNALNTKFGATDASNDLYIMEQFHDYKMADNRSVVEQTHEIQTMAKELELLKCVLPDKFVAGCIIAKLPTSWRSFGTALKHKRQEYSVEGLIVSLDVEEKAREKDAASKGDGGQSSANVVHKAQNKSKGKYKAQQTTNFKNQKKNNNNLNQDERTCFVCGQVSHLARKCPQRKGMKASAGQTSKSANVTIGNTRDGSGYGNLPTVARGSTVLMGNGSHASVHGVGTVDLKFTSRKIVQLKNVQHVPSIDRNLVSGSRLTRDGFKLVFESNKVVVSKHGYFIGKGYECGGLFRFSLSDFCNKSVNHICGSVDDEANVWHSHYWKEAVRSEMDSIIANGTWEVTERPYGCKPVGCKWVFKKKLRPDASHGLLVHQMDVKTAFFNGELDEEIYMDQPDGFVVEGQEGKVCKLLKFLYGLKQAPKQWHEKFDKTLTSAGFAVNEADKCVYYHHGGGEGVSLCLYVDDILIFGTNLEVINEVKSFLSQNFDMKDLGVADVILNIKLIRGENGITLLQSHYVEMILNRFGYIDSKPSPTPYDPSLLLRKNKRIARNQLEYSQIIGSLMYLASATRPDISFAGYSDSNWISDVDEIKATSGYVFTLGGGAASWSSYKQTILTRSTMKTELTALDTATVKTEWLRDLLMDLPIVEKPEPAIHMNCDNQMVVKVNSSKDNMKSSRHVKRRLKSVRKLRNSKVITLHYIQTARNLVDPFTKGLSRNVIDSASKEIGLRPM

SEQ ID NO: 25768 - protein, 991 aa, Oryza sativa
  unsure (1)..(991): unsure at all Xaa locations
  Clone ID: TF_OsC1713_5366.pep
MGQLLIPMCGPATTAGTKYCEVPATATAEVWACETSTLLEGDPPSSAPSAGKCMSLVHELTRVGLLEPLYKISFGYESKNDKSHIYIENMEIMKSRQSRNRSDRADGGLTEPWTLVWHLIILGKHPRLVTLGGCRLLDGLCRCCPVTSPRRLWWKPGAVWKDMWDALEAKFGVPDAGNELYVMEQYYDYKMVNDRSVVEQAHEIQMLAKELENNNCELPDKFVAGGIIAKLPPSWSDFGTSLKHKRQEFSVSDLIGSLGVEEKARAKDIGGIKVERGSSANMVQKKNPHASHNNKKVKPDVKAKATANFKKKGKEKANGDCFVCGKFGHWAKDCLEHKDRKFANMVISEGGGTSGYDKLLPTVLSVFHSPDWWVDTGANIHVGRGSSLLMGNESLAVVHGVGLSKEWWGEAVLTACHVLNKIPMKHKEVTPFEEWERKKLNLSYLRTWGCLAKVNVPIAKKRKLGPNTVDCVFLGYAAIHSVGYRFLIVNSRVLDMRVSTIIESRDATFFENEFPMKNTPSTSSQETVIPHKHFALIEHNDQTPEGNPEEDNIVDTHKSKKLRVVKSFVDDYIVYLVDDTPRTIEEAYSPPDTDYWKEAVRSEMDSIMSNGTWEVVERPYGCKPVGCKWVFKKKLRPDGTIEKYKASLVAKGYTQKEGEDFFDTYSPVARLTTIRVLLALAASHGLLVHQMDVKTAFLNGELEEEIYMDQPDGLNVIEEVKDFLSKSFEMKDLGEADVILNIKLLRGDEGGITLVQSHYVDKVLSRFGYSDCKPAPTPYDPSVLLRKNRRIARDQLRYSQIIGSLMYLVSATRPDISFAVSKLSRFVSNPGDDHWQALERIMRYLKGTMSYGIHYTGYPKVLERYSDSNWISDADEIKAISGYMFTLGGGAGSWKSCKQTILTRSTMEAELTALDIATVEAEWLRELLMDLPVVEKPVPAILMNCDNQTVIIKVNSSKDNMKSSRHIKRRLKSVRKQKXLRSDSIGLCPNG

SEQ ID NO: 25769 - protein, 1199 aa, Oryza sativa
  unsure (1)..(1199): unsure at all Xaa locations
  Clone ID: TF_OsC1528_2017.pep
MAGFADALRPDKFTGVHFKRWQIRVTLWLTAMKCFWVSTGKPEGVLTAEQQKQFEEATTLFVGCILSVLGDRLVEFHDYKMADNRSVVEQAHEIQTMAKELELLKCVLPDKFVAGCIIAKLPPSWRSFGTALKHKRQEYSVEGLIASLDVEEKAREKDAASKGDGGQSSANVVHKAQNKSKGKYKAQQTTNFKKQKKNNNNPNQDERTCFVCGQVGHLDRKCPQRKGMKAPAGQTSKSANVTIGNTGDGSGYGNLPTVFSVNQSTNWWVDTGANVARGSTVLMGNGSHASVHGVSTVDLKFTSGKIVQLKNVQHVPSIDRNLVSGSRLTRDGFKLVFESNKVVVSKHGYFIGKGSKCHSCVQSKQPRKPHKAVEERNLAPLELLHSDLCEMNGVLTKGGKRYFMTFIDDATRFCYVYLLKTKDEALDYFKIYKAEVENQLDRKIKRLRSDRGGEFFSNEFDLFCEEHGIIHERTPPYSPESNGIAERKNRTLTDLVNAMLDTAGLPKAWWGEALLTSNHVLNRVPNRNKDKTPYEIWIGRKPSLSYLRTWGCLAKVNVPITKKRKLGPKTVDCVFLGYAYHSIAYRFLIVKSEVPDMNVGTIMESRDAIFFESFFPMKDTHSGSNQPSEIIPSSITPPEQTEHTHELVSEEDVSEAPRRSKRQRTAKSFGDDFTVYLVDDTPKSISEAYASPDADYWKEAVRSEMDSIIANGTWEVTERPYGCKPVGCKWVFKKKLRPDGTIEKYKARLVAKGYTQKEGEDFFDTYSPVARLTIIRVLLSLAASHGLLVHQMDVKTAFLNGELDEEIYMDQPDGFVVEGQEGKVCKLLKSLYGLKQAPKQWHEKFDKTLTSAGFAVNEADKCVYYRHGGGEGVILCLYVDDILIFGTNLEVINEVKSFLSQNFDMKDLGVADVILNIKLIRGENGITLLQSHYVEKILNRFGYIDSKPSPTPYDPSLLLRKNKRIARNQLEYSQIIGSLMYLASATRPDISFAVSKLSRFTSNPGDDHWRALERVMRYLKGTVELGLHYTGYPAVLEGYSDSNWISDVDEIKATSAYVFTLGGGAVSWRSCKQTILTRSTMEAELTALDTATVXAEWLRDLLMDLPIVEKPTCEKTIEVCQEFEKLRSYNVGLHPNSXKPGISLHEGTITKCDRQCIEGDGFETHSILERTHLCELDCWSQSVEILGESSRKLTKDLGV

SEQ ID NO: 25770 - protein, 1820 aa, Oryza sativa
  unsure (1)..(1820): unsure at all Xaa locations
  Clone ID: TF_OsC359_7939.pep
MADHPPNHRGEGMDDFVAELARMTLVVGYPNAPEYSTVPPLSGELPHRVRLEVHGFVGTCLANMVVEASGGTVDHTCQEAAYLMMARLRDRHSXIFCNTAYRFHPRRASGDDVSTFRPTASENDTTFSHMCAVMRGMDTMHSDLHKASKASNDGKLVRIIALKDEIARQKKENAQLKGLPAPGGVRIRTTPRKSTTAPVRIQLAPRNPPPPAAPPAPPTVPAAPAVPAPVPASVPVSAPASALSFALASAARGPAIGNGGWLPATHSGSHDHSSSSSSGSEPGNGETYLPDSRSRSEGPGLFLQMVNTRNGSHAAGEGSNGEERTDGGYPNSASGNSPPPLPKNPTLAQVMAHQTXMMAAMMQLMQHQPXQMHQRMQQQAEQQQQQFGPPPPQSKLPEFLRVRPPTFSSTTNPMEANDWFHAIEKKLNLLQCNDQEKVAFATHQLQGPTSAWWDNHMATRPPGTEVTCAEFCRSFQKAQVLDGVVAQKKREFQALHQGNRIVTEYLHEFNCLARYAPEDVHIDTLKQEKFLAGLDDELTNQLISGDYTDFEKLVDKAIRQEDQRNKMDRKRRFRQFRSNQGSHQRPRFTPGQQGGPTTMIVRQHRPYNPSNFHPGSSGSHHGQGQHNRSAAPRPPMAPVQQTAPVPPKKDTGGKPGACFNCGESGHFADKCPKPRRAGPKFVQARVNHASAEEAQVAPEVVLGTFPVNSIPATVLFDSGATHSFISKKFVGVHGLIREELSTPMRVQTPGNSSTSIQFSPCVTIEIQRSPFLANLILLESKDLDVILGMDWLTKFKGVIDCVNRTVTLTNEKGETVVYKSPVVLKQGISLNQIEVENPMVTEEKSSRKLEDIPIVGEYPEVFPEDLTTMPPKREIEFQIDLAPGTAPIYKRPYRMAANELAEVKKQVDEQLQKGYIRPSTSPWGAPVIFVEKKDKTKRMCVDYRTLNEVTIKNKYPLPRIDDLFDQLKGAKVFSKTDLRSGYHQLRIQEEDIPKMAFTTRYGLYECTVMYFGLTNAPAFFMNLMNKVFMEFLDKFVVVFIDDILIYSKSEEEHEQHLRLVLEKLQEHQLYAKFSKCDFWLSEVKFLGHVITAQGVAVYPSNVESVTKWTPPKTVSQIRSFLGLAGYYRRFIENFSRIARPMTQLLKKDEKFRWTAECDKSFEELKKKLVPAPVLILPDQTKDFQVYCDTSRHGLGCVLKQESRVVAYASRQLRPHEGNYPTHXAVVHALKIWRHYLIGNRCEVYTDHKSLKYIFTQPDLNLRQRRWLELIKDYDMSIHYHPGKANVVANALSRKSYCNALCTEGMCKELQQELEHLNLGIVEHGFVAALKARPTLVDQVRAAQVNDPEIAELKKNMRVGKARDLLEDEHGTIWLGERLCIPDDKELKDLILTKAHQTQYSIHPGSTKMYQDLKEKFWXASMRREIAEFVALCDVCQRVKAEHQRPIGLLQPLQIPEWKWEEIGMDFITGLPTTSSGHDSIWVVVDRLTKVAHFIPVHTTYTGKRLAELYLSRIMCLHGVPKKIVSDRGSQFTSKFWQKLQEELGTRSNFSTAYHPQTDGQTERVNQILEDKLRACALDFGGAWDKSLPYAEFSYNNSYQASLQMAPFEALYGRKCRIPLFWDQIGERQLFGTEVLTEAEEKVRTVRERLRIAQSRQKSYADNRRRELTFEAGDYMYLRVTPLRGVHRFQTKGKLAPRFVGPYKILERRGEVAYQLELPSNMIGIHDVFHVSQLKKCLSLPEEQANSEHIDIQEDLTYVEKPVRILDTSERRTRNKVTRFCRVQWSHHSEEEATWEREDELKAAHPHLFTSSSESRGQDSV

SEQ ID NO: 25771 - protein, 1460 aa, Oryza sativa
  Clone ID: TF_OsC359_8456.pep
MYPNSGNGPPPLPENPTLAQVMAHQTQMMAAMIQQMQQQHQQMHQRMMQHVEQQHQQFGPPPPQSKLPEFLRVRPPTFSSTTNPMEANDWLHAIEKKLNLLQCNDQEKVAFATHQLQGPASAWWDNHMATRPPGTEVTWAEFCRSLRKAQVPDGVVAQKKREFRALHQGNRTVTQYLHEFNRLARYAPEDVRTDAEKQEKFMAGLDDELTNQLISGDYADFERLVDKAIRQEDQRNKMDRKRKAAQFRAPQGSHQRPRFAPGQQGGPTTMIVRQHRPFNPSNFPQGASGSQNHHGGQSNRGAASRPPMAPAQSGQPAQAKKETGAKPGSCFNCGKLGHFADKCPKPRRAGPRFIQARVNHASAEEAQAAPEVVLGTFPVNSIPATVLFDSGATHSFISKKFVGMHGLIREELSTPMRVHTPGNSSTSVQFSPSITIEIQRSPFLANLILLESKDLDVILGMDWLTKFKGVIDCANRTVTLTNEKGETVVYKSLVSPKKGVSLNQIEAEIPVDTVEKNSRKLEDIPIVCEYPEVFPEDLTTMPPKREIEFRIDLAPGTAPIYKRPYRMAANELAEVKKQVDKQLQKGYIRPSTSPWGAPVIFVEKKDKTKRMCVDYRALNELRIREEDIPKTAFTTRYGLYECTVMSFGLTNAPAFFMNLMNKVFMEFLDKFVVVFIDDILIYSKSEEEHEQHLRLVLEKLREHQLYAKFSKCDFWLTEVKFLGHVITAQGVAVDPSNVESVTKWTPPKTVSQIRSFLGLAGYYRRFIENFSRIARPMTQLLKKDEKFKWTAECDKSFEELKKKLVSAPVLILPDPMKDFQVYCDASRHGLGCVLMQEDRVVAYASRQLRPHEGNYPTHDLELAAVVHALKIWRHYLIGNRCEVYTDHKSLKYIFTQPDLNLRQRRWLELIKDYDMSIHYHPGKANVVADALSRKSYCTALCIEGMCEELRQEFEHLNVGIVELGFVAALEARPTLVDQVRAAQANDSEIAELKKNMRVGKARDFHEDEHGTIWLGERLCVPDDKELKDLILTEAHQTQYSIHPGSTKMYQDLKEKFWWVSMRREIAEFVALCDVCQRVKAEHQRPAGLLQPLQIPEWKWEEIGMDFITGLPRTSSGHDLIWVVVDRLTKVAHFIPVHTTYTGKRLAELYLSRIMCLHGVPKKIVSDRGSQFTSKFWQKLQEELGTRLNFSTAYHPQTDGQTERVNQILEDMLRACALDFGGAWDKSLPYAEFSYNNSYQASLQMAPFEALYGRKCRTPLFWDQTGERQLFGTEVLAEAEEKVRIIRERLRIAQSRQKSYADNRRRELTFEAGDYVYLRVTPLRGVHRFQTKGKLAPRFVGPYKILERRGEVAYQLELPSNMIGIHDVFHVSQLKKCLRVPEEQADSKHIDIQEDLTYVEKPVRILDTSERRTRNKVTRFCRVQWSHHSEEEATWEREDELKAAHPHLFTSSSESRGRDSV

SEQ ID NO: 25772 - protein, 449 aa, Oryza sativa; identical to SEQ ID NO: 18694
  Clone ID: TF_OsC1211_18.pep

SEQ ID NO: 25773 - protein, 1742 aa, Oryza sativa
  unsure (1)..(1742): unsure at all Xaa locations
  Clone ID: TF_OsC359_7638.pep
VTSWYQSHLDLRTSQMVNPHPPKNLIEVLGFVRELRMMAFEVGYEVAPEYRQIPHDPNEEKCRVRVTLTSDREDLPSIKFEAEGKKYSHVCQETALVAIGELRHRFDEELESSAFQYHPHKPHGQDYRTYNCPEGEGSATVMHAVYMLSAMDAVGVEREKAAHDRENWNRGRICKLESKVYRLQKELAELKGEAPPPAPKLRLTARKRTSLPPRLQLASKTRVVGDAVPDHAEPVIHVLSDEEEEEDPKEREPATPEEEDPSLRSDARRTTNPVEAGDWLHAVGKKLDLFQYTEQEKVSFASHQLHGPAAERCDHFLLNRAEGQPITWREFTAAFKKTHIPSSVVALKKREFRALNXGSRSVREYLHDFNRLARYAPEDVRTDEERQEMFLEGLNDELSFALMAMDYRDFQXLVDKAIRQEDKYNRMEQKKRSSQRPRIALGPQAAPYPQGGSSSVARPQRQFYNNNTSNHSNDNRNMVTRHVAAPTQNHPVRKEQGSKPGVCFNCGDPGHYADKCPMPRRVKNAPVQNNSNAPAPKARVNHVAAAEAQNAPDVVLGTFPINSIPATVFFDSGATHSFLSKSFAGNHGMEVISLGRPLLVNTLGNQVSSTQYCPSVTIEIEEIPFPSSLIFLESNDLDVILGMDWLTHHIGVIDCANRNVTLTSSNGQTVSFFVSSPKSHGLTLNQVALQEIPIVRDYPDVFPEDLPGMPPKRDIEFWIDLVPGTNPIHKRPYRMAANELAEVKRQVDDLLQEGYIRPSTSPWGAPVIFVEKKDHTQRMCVDYRALNEVTIKNKYPLPRIDDLFDQLEGATVFSKIDLRSGYHQLRIREEXIPKTAFTTRFGLLECTVMSFGLTNAPAFFMNLMNQVFMEYLDKFVVVFIDDILIYSKNKEEHEEHLRLALEKLHEHQLYAKFSKCEFWLPEVKFLGHVISTGGVAVDPSNVESVLNWKQPKTVSEIRSFLGLAGYYRRFIENFSKIARPMTRLLQKDVKYKWTEECEQSFQELKKRLAAAPVLVLPDPRKGFQVYCDASRHGLXGCVLMQDGKVIAYASRQLRPHENNYPTHDLELASVVHALKIWRHYLFGNRTEMYTDHKSLKYIFTQPDLNMRQRRWLELIKDYHPGKANVVADALSKKSYCKMLEGRHLPWELCEEFEKLNLGIVNKGFVAALEAQPTLFDQVREAQMNDPDIQEIKKNMRRGKAIGYIEDEQGTVWLGERNCVPDNKELKDTIMKEAHETLYSIHPGSTKMYQDLKQQFXWASMRREIAEYVALCDVCQRVKAEHQKPAGLLQPLKIPEWKWEEIGMDFITGLPRTSVGHDSIWVVVDRRTKVAHFIPVKTTYMGNKLAELYMARVVCLHGVPKKIVLDRGSQFTSKFWQNLQEGMGTRLNFSAAYHPQTDGQTKRVNXILEDMLRACVLDVGGSWDKNLSYAEFSYNNSYQASLQMAPYKALYGRKCRTPLLWDQTGERQVFGTDVLREAEEKVKIIQERLRVAQSRQKSYADNRRRDLTFEEGDYVYLRVTPLRGVHRFQTKEKLAPRFVGPFKIVSRRGEVAYQVELPLSMEGIHDXVSHVSQLKKCLSVPTEEADPERLEIQEDLTYVEKPVRILEFPTFRRRAFTLRKVQNRPCRAAQVRAGRAVSSFGVAASTSTPACPLIRPETTAVSPPTPPPASPESSGRPFLLAGISPVDRVAVFSGIAAARSSSASLPLHPNPSAVHRRRLRSFSSSTSRRSPGSSSRSAASVVG

SEQ ID NO: 25774 - protein, 1929 aa, Oryza sativa
  unsure (1)..(1929): unsure at all Xaa locations
  Clone ID: TF_OsC359_5825.pep
MPGVPREVIEHKLMVRPDAKPIKQKLRRFAPYRKQAIREELDKLLKADQLVDSTAGCELLSFLDAYSGYHQISMAKEDEDKTAFITPFGVFCYVKMPFGLITTGNTFQRTVQGALSDQLGNNVEAYVDDIVVKTKTSDSLIDDLRETFDNLRRYRLMLNPEKCTFGVPSGKTPRALLYPSPPSPSPLVVGEALAPCALAQPSPPSLQPCAAAVPAVTVAREGHRRDRQVAAVLVRCFAAVGDRWSTIAVVEPKSSAASSSSPPPSVGFPPSFWSPMPRYKPEYLFGVEGFVQELRTMSFVIGFGTAPFYAQIPHDRHEEKCRVKVTLNSNSEDIPSVMFEAGGRNYIHASQEVARIAIGELRDRYSDQLADTEYRYHPRQPQGSDRGSYLETEGIENDATTRHLVEMLWAMDESRAETVLAAQDREDRNRGKICKLEDKVDRLEKELAALKGEAPPQKARIRLTARKRALFVPRYQLAPKVRVVEKEVAPTLADPPVNIISDDEEEESKRNHSKIEWVATQDDEDEPKEPSIDLRCSEELDKMVNTRSNGNGPNNPNNNNNEGNPTLAQVLAQQVQLMNMMMQQLQNQQNQGNNHAPPQNRLTDFLRVRPPTFSSTTNPVEAGDWLHAIEKKLDLLQCTDQEKVSFASHQLHGPASEWWDHFRLNRTTAEPITWLEFTAAFRKTHIPSGVVSLKKKEFRSLTQGSRSVTEYLHEFNRLARYAPEDVRNDEERQEKFLEGLNDELSYSLMIGDYPDFQKLVDKAIRQENKYNCMEQKKRRIAQFKTQQGNNQKPRLTLGPQSIPHGSSSSVVRPQRQFFNNNAGNNIRNQVPRPVAAPTQQQPIKREQGSKPAVCFNCGDPGHYADKCPKPRRVKVVPAQNNSTVPVSKARVNHVAAAEAQDAPDVILVREYPDVFPDDLPEXYIRPSSSPWGAPXKFVVVFIDDILIYSRTEEEHEEHLRLALEKLREHRLYAKFSKCEFWLSEVKFLGHVISAGGVAVDPSNVESVTNWKQPKTVSEIRSFLGLAGYYRRFIENFSKIAKPMTRLLQKDVKYKWSEESLEAKPTLIDQVREAQINDPDIQEIKKNMRRGKAIGFLEDEQGTPSPPSLQPCAAAVPAVTVAREGHRRDRQVAAVLVRCFAAVGDRWSTIAVVEPKSSAASSSSPPPSVGFPPSFWSPSTRLRSGGDKPTGVAGESITSGFEGEIMIQERCTVVDCVVRERNRSKSREDHGNREHEVAYKTQGSTEANRMHGSTKQEAEEAFIAFKRYLSNPHVLVAPQPNEELFLYIAATPYSVSTIIVVEREKVQLPVYYVSEALHDVMTRYPQIQKLLYAVIMTSRKLCQYFQAHRVTVVSSFPLGEVMRNKDVVSRIAKWVVELSQFDIHFVPRTAIKSQVLADFVADWTMPDNRSDNQIDNETWTMAFDGALNSKGAGAGFILTSPSGDQFKHAIHLNFRATNNTAEYEGLLAGIRVAAALVVRKLEKRFDGIEVRHVYRKDNIEPDDLARRASRREPLEPGTFLDVLTRPSVKEASGEDSPVAPDISSGAIEAERTVADIETTDDWRTPLIKFIGSEELPEDDAEVEKISRKAKVYCMIGNDLYKKAPNGVLLKCILSDDGRHLLLDIHEEICGSHAAGRTLVGKAFQQGFFWPNALKDACDMVQQCEACQFHSKHTKLPAQALQTIPFTWPLSCWGLDILRPFPRGQGGYRFLFVAIDKFTKWIEATPTGEIKADNAIKFIKGIFCKFGLPHQQLTSREGNGIILQGIKTRVYDRLMSHDKNWVEELPSVLWAVRTTPTTSNKETPFFLVYGSEAMLPTELRHQSTRVQKYSDEDQEEQRYDDVNLLEEHRERVAVRAASYQQALRRYHEKRIRARMLSIGDYVLRRVQSQAGRNKLSPKWEGPYTITQVLRPGQRSKSLIFREEFSDDKAGG

SEQ ID NO: 25775 - protein, 897 aa, Oryza sativa
  unsure (1)..(897): unsure at all Xaa locations
  Clone ID: TF_OsC1528_1606.pep
MSDARSRRSVASSTRRQQDAELAAAEERRXATAHTAAAAARAARLAAAELAAARAEAEAAEDAARAAEVEVETLRSSINGSIAGDITADRELEELARGRARERAERWAAAHLHGGDGGPRDRAPADGNPDGRGLAGGRGLAGGSPEPARGPRRQHGSLSPDRRHGHHGVQMVVRDFGPGGGWPTLTKTNYIEWAAVMRVRLQVRHMWDAVRYGDVDYDEDRRALDALIAAVPPEMQFSLSQKRTAKEAXDAIAAARIGSDRARKSTLQALRKEWENLAFKPGEDVDDLQKMVQYGDDTYDEERAVEKLFRCVPEKYRQIARSIESLLDLSTMSIEEALGRLKVVDGDEPQPLSGPITIGGKLHLTQEQWEASQGDGRKGESSSPTGGHKPRKARGGVQLWWARRRAEGGARRGAQGVATGNHKPARDDACRNCDKLGHWAKDCRQPRRGQAHVARVEEEPALLLAHASIELPPAAPAAAAFLHLDEPKVLVSLCNGSSNDKADGWYLDTGATHHMTGRREFFTEFDSSVRGSIKFGDASGVEIKGVGFVTFTAKSGEHRLLTRVYYIPALRNSIISVGQLDENGSRVLVEDGLMRIWDRRRRLLAKVTRGTNRLYILSAQVAQPVCLAARRDDEAWQWHERFGHLHFEALKQLSAKEMVXGMLCLDHVEQLCDVCVVTKQRRLPFPQQTSFRANERLELVHGDLCGPVTPATPGGRRYFLLLVDDLSRYMWVMVLGSKGEATDAIRHEQAAAEAECGRKLCVLRTDNGGEFTAAEFASYCADEGIQRHYTTPYSPQXNGVVERRNQTVMGMARALLKQRGMPVIFWGEAVVTAAYILNRSPTKALDGRTPYEAWHGRKPAVSHLRVFGCLAFAKELGHIGNGQYRYRHSFCFAYAMK

SEQ ID NO: 25776 - protein, 496 aa, Oryza sativa
  unsure (1)..(496): unsure at all Xaa locations
  Clone ID: TF_OsC359_8244.pep
MDEVGGRWTFSRTNEGYTSCGPVVEMSWHRVGALLXGGSVLPACPGGSGRRXGIGSVLLSMARMGWKLCHVFRLYTVVMFNREKGKNVSGHASSNSSFQLNPPLASRELTRAHPWSIPSMLLSSQLPLVGSQDQNQYVFDRAFATQVNELPMPEEHVPFCHDCREQGHYALNCPWVYVKEAPSFGLAGQTSLNQPPRTKSSLQPSVQSEEPNEDNPLNPRKCFPPSLSHHVGSRTKQAKGKKSKNQKRKAPMRTEEEVRKMTITSTEWPPAGITIPRRQRGNTFRGARQLTQHLLSHGGRVSDSEGSDQVSSDVEDESPRHLGEEEMESKACTRCGEIGHVASRCLTLCPHCEEDHPPGECPTRKVTCFLCEGTNHVPKDCQLSVLLTKTAEIQRTTLRLSHQLVSSNSNLDDIIHSTNAPPAAPDSAINHSNNTFSTNHSLHRQPQQRIVIDRRSCVSPRPTPGRAKGNQPQEGDTKQKTVIRFNQQSEGSFPCE

SEQ ID NO: 25777 - protein, 480 aa, Oryza sativa; identical to SEQ ID NO: 18703
  Clone ID: TF_OsC359_7480.pep

SEQ ID NO: 25778 - protein, 1634 aa, Oryza sativa
  unsure (1)..(1634): unsure at all Xaa locations
  Clone ID: TF_OsC359_7526.pep
MHARAAAGGDVTANVIVVVPRGPVPTFLESLSLQEKILKSSKASKASHTDPKQPLSMLIPFKAIVSIQLLHLFSNMPRYKPEYLFGVEGFVQELRTMSFAIGFGTAPLYAQIPHDRHEEKCRDKVTLNSNSEDIPSVMFEAGGGNYIHACQEVARIAIGELRDRYSDQLADTEYRYHPRQPQGSDCGSYLETEGIENDATTRHLVEMLWAMDETRAEVVLAAQDREDRNRGKICRLEDKVDRLEKELAVLKGEAPPQKARVRLTARKRALFIPRYQLVPKVRVVEKEVTPALADPPVVNMVLTHSNGNGPNINNNNNNNGENPTLAQVLAQQAQLMNMMMQQLQNQQNQGNNHAPPQNKLAEFLRVRPPTFSSTTNPVEARDWLHAIEKKLDLLQCTDQEKVSFASHQLHGPASEWWDHFRLNRTTAEPITWLEFTAAFRKTHIPSGVVSLKKKEFRSLTQGSRTVTEYLHEFNRLARYAPEDVRTDEESQERFLEGLNDELSYQLMTGDYHDFQKLVDKAIRHEDKYNRMEQKKRRIAQFKAQQGNSQRPRLTLGPQSMPQGGSSSIVRLQRQFFNNNAGNNIRNQAPRPVAAPTQQQPAKREQGSKPGVCFNCGDPGHYSDKCPKPRRVKVVSAQSNSTAPASKAHVNHVAAAEDQGAPDVILGTFLVNSVPATVLFDSGATHSFLSMSFAGNHGMEVEDLRRPLMVSTPSNQALSLQRSPSVRIEIQEVPFLANLILLESKDLDVILGMDWLARYKSVIVCANRKVKSEPIASEEIPIVQEYPDVFPDDLPGMPPKRDIEFRIDLKDHTQRMCVDYRALNDVTIKNKYPLPRIGDLFDQLKGATVFSKIDLRSGYHQLRIKEEDIPKTTFTTRYGLFECTVMSFGLTNAPAFFMNLMNKFSKCEFWLSEVKFLGHVISAGGVAIDPSNVESVTNWKQPKTVSEIRSFLGLAGYYRRFIENFSKIAKPMTRLLQKDVKYKWSEECEQSFQELKNRLISAPILILPDPKKGFQVYCDASKLGLGCVLMQDGKVVAYASRQLRPHEKNYPTHDLELAAVVHALKIWRHYLFGTRTEVYTDHKSLKYIFTQPDLNMRQQRWLELIKDYDMGIHYHPGKANVVADALSRKGYCNATEGRQLPLELCKEFERLNLGIISRGFVAALEAKPTLIDQVREAQINDPDIQEIKKNMRRGKAIGFVEDGQGTVWLGERICVPDNKDLKDAILKEAHDTLYSIHPGSTKMYQDLKERFWWASMKREIAEYVAVCDVCQRVKAEHQKPAGLLQPLKIPEWKWEEIGMDFITGLPRTSSGHDSIWVIVDRLTKVAHFILVKTTYSGSRLAELYMARIVCLHGVPKKIVSDRGSQFTSKFWKKLQEEMGSKLNFSTAYHPQTDGQAERVNQILEDMLRACALDFGGSWDKNLPYAEFSYNSSYQASLQMAPYEALYNRKCRTPLLWDQTGERQVFRMDILREAEEKVKIIQERLRVAQSRHKSYADNRRRDLSFDEGDYVYLRVTPLRGVHRFHTRGKLAPRFVGPYKIVSRRGEVAYQLELPQSLAGVHNVFHVSQLKKCLRVPTEEANLEQIEVQEDLTYVEKPIRILEIDERRTRNRVIRFCKVXWSNHSEEESTWEREDEL

SEQ ID NO: 25779 - protein, 1439 aa, Oryza sativa
  unsure (1)..(1439): unsure at all Xaa locations
  Clone ID: TF_OsC359_8132.pep
MFEAGGGNYIHACQEVARIAIGELRDRYSDQLADTEYRYHPRQPQGSDRGSYLETERIENDATTRHLVEMLWAMDETRAETVLAAQDREDRNRGKICKLEDKVDRLEKELAALKGEAPPQKARIRLTARKRALFVPRYQMAPKVRVAEKEVTLALADPPVVNMVLTRSNGNSPNINNNNNNNGENPTLAQVLAQQAQLMNMMMQQLQNQQNQGNNHAPPQNKLAEFLRVRPPTFSSTTSPVEPGDWLHAIEKKLDLLQCTDQEKVSFASHQLHGPASEWWDHFRLNRTTVEPITWLEFTAAFRKMHIPSGVLSLKKKEFRSLTQGSRSVTEYLHEFNRLARYAPEDVRTDKQRQERFLEGLNDELSYPLMTGDYHDFQKLVDKAIRQEDNQRPHLTLGPQSLPQGGSSSVVRPQRQFFNNNAGNNIRNQAPRPVAAPTQQQPAKREQGSKPGVCFNCGDPGHYSDKCPKPRRVKVVPAQSNSTAPALKARVNHVAAAEAQGAPDVILESKDLDVILGMDWLARYKGVIDCANRKVTLTSNDGQVVIVHALSSESLRSSLNQMTLEEIPIVREYPDVFPDDLPGMPPKRDIEFRIDLVLGTIPIHKRPYRMAANELAEVKRQVDDLLQKGYIRPSSSPWGAPVIFVEKKDHTQRMCVDYRALNDVTIKNKYPLPRIDDLFDQLKGATVFSKIDLRSGYHQLRIKEEDIPKTAFTTRYGLFECTVISFGLTNAPAFFMNLMNKVFMEYLDKCVVVFIDDILIYSRTKEEHEEHLRLALKKLREHQLYAKFSKCEFWLSEVKFLGHVISAGGVAVDPSNVESVTNWKQPKTVSEIRSFLGLAGYYRRFIENFSKIAKPMTRLLQKDVKYKWSEEYEQSFQELKNRLILAPILILPDPKKSFQVYCDASKIGLGCVLMQDGKVVAYASRQLRPHEKNYPTHDLELTAVVHALKIWRHYLFGTRTEVYTDHKSLKYIFTQPDLNMRQRRWLELIKDYDMGIHYHPGKANVVADALSRKGYCNATEGRLPLELCKEFERLNLGIVSRGFVAALEAKPTLIDQVREAQINDPDIQEIKKNMRRGKAIGFLEDEQGTVWLGERICVPDNKDLKDAILREAHDTLYSIHPGSTKMYQDLKERFWWASMKREIAEYVAVCDVCQRVKAEHQKPAGLLQPLKIPEWKWEEIDGQTERVNKILEDMLRACALDFGGSWDKNLPYAEFSYNNSYQASLQMAPYEALYGRKCRTPLLWDQTGERQVFGMDILREAEEKVKIIQERLRVAQSRHKSYADNRRRDLSFEEGDHVYLRVTPLRGVHRFHTKGKLAPRFVGPYKIVSRRGEVAYQLELPQSLAGVHNVFHVSQLKKCLRVPTEEANLEXIEVQEDLTYVENPIRILEIDERRPRNRVIHFCKVQWSNLSEEESTWEREGELNRGFEFDSDRSLSSEP

SEQ ID NO: 25780 - protein, 588 aa, Oryza sativa; identical to SEQ ID NO: 18711
  Clone ID: TF_OsC359_8240.pep

SEQ ID NO: 25781 - protein, 440 aa, Oryza sativa; identical to SEQ ID NO: 18714
  Clone ID: TF_OsC359_6056.pep

SEQ ID NO: 25782 - protein, 2517 aa, Oryza sativa
  unsure (1)..(2517): unsure at all Xaa locations
  Clone ID: TF_OsC1517_1374.pep
MADTRSSAEDETKRPTEEETGRDGEMGSEPNLEERLKRLNMHGEEETDLDFSEELEGLIKDVRWLALFRVYTTKPFSHSALLNAMRNAWSSAQDISFKVMDSNLFMVQFQCLGDWNRMEGGPWIFRGAPVVLKEYDGFTNVFDYKLDKIPVWTRIHGVPDGLMKKRELAERVAKKVGEQPFTVIVDEGRINPVKYLRARVFLDLSPLVRFVPITIKERILYPRARANWLHGDRNTSFFQQFARRRRKIKGLIDENGCFQTDEDRMSIVYGYFQLFSAEVTQIDGSSLLDVQRKVTGDMNFGLLAPYTAEEVKNALFSIGDLKAPGPDGLHAVFYKRFWDMLESDLVKEVLDAINTMKIPDGWNDTTVVMIPKVDKPDRVTQFRPISLCNVVYKIISKMLANRLKCLLPEIISDQQSAFVPGRLITDNVLVAYECLHTMKKKKGRKVQYRVNFNGVLTEVIKPSRGLRQGDPLSPYLFLLVAEGLSSMLQGAENRGDLVGIRMVYTRNGSRATGEGSNGEERADGVHPSSDSGNGPPPLPENPTLAQVMAHQTQMMAAMMQQMQQQHQQMHQRMMQHVEQQHQQFGPPPPQSKLPEFLRVRPPTFSSTTNPMEANDWLHAIEKKLNRLQCNDQEKVAFATHQLQGPASAWWDNHMATRPPGTEVTWAEFCRSFWKAQVPDGVVAQKKREFRALHQGNRTVTEYLHEFNRLARYAPEDVRTDAEKQEKFMAGLDDELTNQLISGDYADFERLVDKAIRQEDQRNKMDRKRKAAQFRAPQGSHQRPRFAPGQQGGPTTMIVRQHRPFNPSNFPQGASGSQNHHGGQSNRGAASRPPMAPAQSGPPAQAKKETGAKPGSCFNCGELGHFADKCPKPRRAGPRFIQARVNHASAEEAQAAPEVVLGTFPVNSIPATVLFDSDLDVILGMDWLTKFKGVIDCANRTVTLINEKGEXVVYKSLVSPKKGVSLNQIEAEIPVDTVEKNSRKLEDIPIVCEYPEVFPEDLTTMPPKREIEFRIDLAPGTAPIYKRPYRMAANELAEVKKQVDEQLQKGYIRPSTSPLGAPVIFVEKKDKTKRMCVDYHALNEVTIKNKYPLPRIDDLFDQLKGAKVFSKIDLRSGYHQLRIREEDIPKTAFTTRYGLYECTVMSFGLTNAPAFFMNLMNKVFMEFLDKFVVVFIDDILIYSKSEEKHEQHFRLVLEKLREHQLYAKFSKCDFWLTEVKFLGHVITAQGYYRRFIENFSRIARPMTQLLKKDEKFKWTAECDKSFEELKKKLVSAPVLILPDPMKDFQVYCDASRHGLGCVLMQEGRVVAYASRQLRPHEGNYPTHDLELAAVVHALKIWRHYLIGNRCEVYTDHKSLKYIFTQPDLNLRQRRWLELIKDYDMSIHYHPGKANVVADALSRKSYCTALCIEGIRSGGTAYAQANDSEIAELKKNMSVGKARDFHEDEHGTIWLGERLCVPDDKELKDLILTEAHQTQYSIHPGSTKMYQDLKEKFWWVSMRREIAEFVALCDVCQRVKAEHQRPAGLLQPLQIPEWKWEEIGMDFITGLPRTSSGHESIWVVVDRLTKVNLERHGLVPVGTSSGRDSRPRIHKYRVVPSTLHQCLKFLDGSGTQQRIVGNLSPYTTQESHHADAKYYFPVDDSDQTLGRTTPAADLLIAPGRTPTPEIRRLITAGPLAGATGSSTRNRRNNARHHSFMSAQYENKPYTGAGMSGVVVPVEDTALTSPTFTPLLLKAGTSSRTPTTQTSVARVPVDLQAPSSKEILLTRNVAMVQGRKLLDISNDAPTVITIRARNNSRRSGYHYEGRCQINSFIGKGWDQRSTKQANAAATGYIYASMITEQEGELEDPFMLDELKEEKQPTIDDLVEINLGTMDDPRPTFVSAALSAEEQESYRSFLMEYRDCFAWTYKEMPGLDPRVATHKLAIDPQFRPVKQPPRRLRPEFQDQVIAEVDRLITAGFIKESIVAELFKKFAKRAQNEFSCTLVKIRSDNGSEYKNTNIKDYCDDLGIKHELSATYSPQQNGVVERKNHTLVEMASYASNSKAYRVYNKNKGIVEETVDVQFDETNGSQEGHENLDDVGDEGLMRAMKNMSIGDVKPIEVEDKPSTSTQGEPSTSAAPSQAQVEVEEEKAQDPPMPPRIHTALSKNHPIDQVLGDISKGVQTRSHVVSICEHYSFVFCFEPKHIDEALYDPDWINAMHEELSNFVRNKVWTLVERPRDHNAIGTKWVFRSKQDENGLVVRNKISLVAQGFTQVEAIRIILAFASCFDIELFQIDVKSAFLNGEIAELVFVEQPPGFEDPKNPNHDFKTGKVDTTLFTNIIGDDFFVCQIYVDDIIFGSTNEVFCKEFGGDMMSREFEMSMIGKLSFFLELHIKQLKDGTFMSQTKYIKNQLKRFGLEDAKPIKTPMATNEHRDLDEGGKPIDLKLYRSMIGSLLYLTASRSDIMFNVCKCARFQAAPKECHLVAVKRILRYLKYSSIIGLRYPKELLAWAKEKRPSIRNAWMIEEVDWGPNKDIL

SEQ ID NO: 25783 - protein, 1292 aa, Oryza sativa
  unsure (1)..(1292): unsure at all Xaa locations
  Clone ID: TF_OsC1713_5398.pep
MVAFPSLEKFIDEAERQPITWEEFTEGFKKTHIPVGVVALKKREFRAQEKFLEGLKDELSVTLISHDYVDFQQLVDKAIRLEDKKNRMDNRKRKMIVFQEAQGSSQRQRITFNPSNFPQGASGSQNHHGGQSNRGAAPRPPMAPAQSGPPAQAKKETGAKPGSCFNCGELGHFADKCPKPRRAGPRFIQARVNHASAEEAQAAPEVVLGTFSINSIPATVLFDSGATHSFISKKFVGMHGLIREELSTPMRVHTPGNSSTSVQFSPSITIEIQRSPFLANLILLESKDLDVILGMDWLTKFKGVIDCANRTVTLTNEKGETVVYKSLVSPKQGVSLNQMKLEDIPIVCEYPEVFLEDLTTMPPKREIXFRIDLAPGTAPIYKRPYRMAANELAEVKKQVDEQLQKGYIRPSTSPWGAPVIFVEKKDKTKRMCVDYRALNEVTIKNKYPLPRIDDLFDQLKGAKVFSKIDLRSGYHQLRIREEDIPKTAFTTRYGLYECTVMSFGLTNAPAFFMNLMNKVLMEFLDKFVVVFIDDILIYSTSEEEHEQHLRLVLEKLKEHQLYAKFSKCDFWLTEVKFLGHVITAQGVAVDPSNVESVTKWTPPKTVSQIRSFLGLAGYFKWTTECDKSFEELKKKLVSAPVLILPDQMKDFQVYCDASRHGLGCVLMQEGIVVAYASRQLRPHEGNYPTHDLELAAVVHALKIWRHYLIGNRCEVYTDHKSLKYIFTQPDLNLRQRRWLELIKDYDMSIHYHPGKANVVADALSRKSYCTALCIEGMCEELWQEFEHLNVGIVEHGFVAALEARPTLVDQVRAAQVNDSEIAELKKNMRVGKARDFHEDEHGTIWLGERLCVPDDKELKDLILTEAHQTQYSIHPGSTKMYQDLKEKFWWVSMRREIAEFVALCDVCQRVKAEHQRPAGLLQPLQILEWKWEEIGMDFITGLPRTSSGHDSIWVVVDRLTKVAHFIPVHTTYTGKRLAELYLSRIMCLHGVPKKIVSDRGSQFTSKFWQKLQEELGTRLNFSTAYHPQTDGQTERVNQILEDMLRACALDFGGAWDKSLPYAEFSYNNSYQASLQMAPFEALYGRKCRTPLFWDQTGERQLFGTEVLAEAEEKVRIIRERLRIAQSRQKSYADNRRRELTFEAGDYVYLRVTPLRGVHRFQTKGKLAPRFVGPYKILERRGEVAYQLELPSNMIGIHDVFHVSQLKKCLRVPEEQADSKHIDIQEDLTYVEKPIRILDTSERRTRNKVNRFCRVQWSHHSEEEATWEREDELKAAHPHLFTSSSESRGRDSV

SEQ ID NO: 25784 - protein, 1941 aa, Oryza sativa
  Clone ID: TF_OsC1713_5434.pep
MAAELVGEGDGGRRRRSGVEAAGSNGWRCGGGGCRWIGQAAVGWRRRRRLVVGGEAPDLRPPNVLRLAVVRQERRRRLAIGTRRRKWPTVRGEAAVAGSVPCKNERQQLQAGAAAAAAAGGISIEYPFCVEPGCYHPGFNLTCNHSYSPPRLFLGDGTVQVLEIAIPQATVRINSGRMVFNSTGNHAVNRSLLDQVGRPYFVAASNRIALLSCNARVDVRAAGRNNNKTSTKLLSSCTAICPTDDGGGATTILDIGPEGPCSGIGCCETSMLLAGSSTAAYSIQVQNLQEQAVVLNRTDDLVYLVDERFNYTLDMSFGYSSPEELPARLDWYINSSSACPLPASAPECRSAHSYCDSTYDNKAYICRCSEGYEGNPYVPDGCHDTDECSSGYCSYGECRNTPGSFICNCPRGYEGNPSPKDGCKARDLGLRIGLGVGGGTILLLLALSAPFISSKMKLRKMKRMKETFFRQNHGLLLGRLVSQNADIGQRMIMTLQELEKATDNFDKSREIGGGGHGVVYKGILDLQVVAIKKSRIVVKREIDDFINEVAILSQVNHRNVVKLLGCCLETEVPLLVYEFISNGSLDHHLHVDGPISLPWDDRIRIALEVARALTYLHSATTIPIFHRDIKACNILLDENLISKNCSLEKGPCIGLITVKVLCYILPRFIDKMSYKATRNRMPKPEGEIKATNLRAFNSSSVEIPSGVDFELGNTTTGTVSSSLPWDDRLRIAFEVVRALSYLHSAASMPIFHRDIKYSNILLDDSLTAKLLTRKKPIGGTFDNGDGLVSHFVSLVSKGNLYDIIDSQVREEEDGEVQEVATLAATCTKFKGEERPTMREVEMENDLQENRSAMKKCPDLKIERRFLGSARRDYSLFVNIYFTFTNMSTTGDNNNTGDKEKEPLVNTNGGNTASNSSGGPFSGYNLLTLLPFVLRFLQLFIAMSTLRSLIYVDAYSILSMLMLYTSSTITGSTQITNVMFIILLFWIKICRIMTKFPTIQKPDRSFSVVGFAATLKPHAFDGSNYKRWKARALLWLTAMQCFYVSRGKRSEPPLSPEEEAKFEASDCLFRGALISVLADNIVDVYIHMPLGKDMWDALEAKFRVSDAGSELYVMEQFYDYKMVDDRSVVEQAHEIQMLAKELENNNCELPDKFVAGGIIAKLPPSWSDFTISLKHKRQEFNVTDLIGSLGVEEKARAKDNWGKNIEGNSSANLATTNFKKKDKGKGKGDCFVCDKPGHWAKNCPDRKDKKSANMVISEGGGTSGYGNFLPTVLSVFHSPDWWVDTGANIHVGRGSSLLMGNESLAAVHGVGTVDLKFTSGKTVQLKNVQHVPSIKKNLVSGSLLCRDGFRLVFESNKCVVSKYGTFIGKGYDSEGSKCHTCVQSKQPRKPHKASEARNLAPLELVHSDLCEMNGVLTKGGKKYFMTLIDDCTRYCYVYLLKTKDEALHYFKIYKAEEWWGEAIFTACHVLNKIPVKHKEVTLFKEWERKKLNLSYLRTWGCLAKNEFPMKNTPSTSSQEPVLPHEHLAPIKHNDQTPEENPEEVNIVATRKSKRQRTAKSFGDDYIVYLVDDTPRTIEEAYSSPDADYWKEAVRSEMDSIMSNGTWEVVERPYGCKPVGCKWVFKKKLRPDGTIENLNVIEEVKDFLSKSFEIKDLEVADVILNIKLLRGDEGGITLVQSHYVDKVLSRFGYSDCKPAPTPYDSNVLLRKNGRIARDQLRYSQIIGSLMYLASATRPDISFAVSKLSRFVSNPGDDHCQALERVMRYLKGTISYGIHYTGYPKILEGYSDSNWISDADEIKATSGYVFTLGGGAVSWKSCKQTILTRSTMEAELTALDTATVKAEWLRELLMDLPVVEKPVPAILMNCDNQTVIIKVNSSKDNMKSSRHVKRRLKSVRKQKNSGVIALDYVQTAKNLADQFTKGLPRNVIDSASREMGLRPT

SEQ ID NO: 25785 - protein, 999 aa, Oryza sativa; identical to SEQ ID NO: 18829
  Clone ID: TF_OsC359_5540.pep

SEQ ID NO: 25786 - protein, 1366 aa, Oryza sativa
  Clone ID: TF_OsC359_5554.pep
MVYTRTGTRTTGEGSNGEERADGVHPSSDSGNGPPPLPENPTLAQVMAHQTQMMAAMMQQMQQQHQQMHQRMMQHAEQQHQQFGPPPPQSKLPEFLRVRPPTFSSTTNPMEANDWLHAIEKKLNLLQCNDQEKVAFATHQLQGPASAWWDNHMATRPPGTEVTWAEFCRSFRKAQVPDGVVAQKKREFRALHQGNRTVTEYLHEFNRLARYAPEDVRTDAEKQEKFMAGLDDELTNQLISGDYADFERLVDKAIRQEDQRNKMDRKRKAAQFRAPQGSHQRPRFTPGQQGGPTTMIVRQHRPFNPSNFPQGASGSQNHHGGQSNRGAAPRPPMAPAQSSPPAQAKKETGAKPGSCFNCGELGHFADKCPKPRRAGPRFIQARVNHASAEEAQAAPEVVLGTFPVNSIPATVLFDSGATHSFISKKFVGMYGLRKEELSTPMRVHTPGNSSTSVSFSPSVLIEIQRSPFLANLILLESKDLDVILGMDWLTKFKGVIDCANRTVTLTNEKGETVVYKSPDSPKQGVSLNQIEAEIPVDTVEKNLKKLEDIPIASEYPEVFPEDLTTMPPKREIEFRIDLAPGTAPIYKRPYRMAVNELAEVKKQVDEQLQKGYIRPSTSPWGAPVIFVEKRDKTKRMCVDYRALNEVTIKNKYPLPRIDDLFDQLKGAKVFSKIDMRSGYHQLRIREEDIPKTAFTTRYGLYECTVMSFGLTNAPAFFMNLMNKVFMEFLDKFVVVFIDDILIYSKSEEEHEQHLRLVLEKLKEHQLYAKFSKCDFWLTEVKFLGHVITAQGVAVDPSNVESVTKWTPPKTVSQIRSFLGLAGYYRRFIENFSRIARPMTQLLKKDEKFKWTAECDKSFEELKKKLVSAPVLILPDQMKDFQVYCDASRHGLGCVLMQEGRVVASGSYFEDLEARPTLVDQVRAAQVNDSEIAELKKNMRVGKARDFHEDEHGTIWLGERLCVPDDKELKDLILTEAHQTQYSIHPGSTKMYQDLKEKFLWVSMRREIAEFVALCDVCQRVKAEHQRPAAWDKSLPYAEFSYNNSYQASLQMAPFEALYGRKCRTPLFWDQTGERQLFGTEVLAEAEEKVRIIRERLRIAQSRQKSYADNRRRELTFEAGDYVYLRVTPLRGVHRFQTKGKLVPRFVGPYKILERRGEVAYQLELPSNMIGIHDVFHVSQLKKCLRVPEEQADSEHIDIQEDLTYVEKPAEAQPGRPAASSLGVADRWGPPVGSFPHLPPISLAPSRPQPPPRPRLRLLRATSTTPARRAVAAVGFAWPRSTPSTPPPSRAPRSSSARRRRPPVACRRRSPSSSSAPATLGEASLPSFPLPLLLVPRRRFESRAVAFGRRRLPCRRSPPSSAACRRC

SEQ ID NO: 25787 - protein, 1802 aa, Oryza sativa; identical to SEQ ID NO: 18810
  Clone ID: TF_OsC359_5601.pep

SEQ ID NO: 25788 - protein, 947 aa, Oryza sativa; identical to SEQ ID NO: 18827
  Clone ID: TF_OsC359_5641.pep

SEQ ID NO: 25789 - protein, 1486 aa, Oryza sativa; identical to SEQ ID NO: 18804
  Clone ID: TF_OsC359_5694.pep

SEQ ID NO: 25790 - protein, 1473 aa, Oryza sativa; identical to SEQ ID NO: 18725
  Clone ID: TF_OsC359_5786.pep

SEQ ID NO: 25791 - protein, 1571 aa, Oryza sativa; identical to SEQ ID NO: 18724
  Clone ID: TF_OsC359_5805.pep

SEQ ID NO: 25792 - protein, 1636 aa, Oryza sativa
  unsure (1)..(1636): unsure at all Xaa locations
  Clone ID: TF_OsC359_5936.pep
MGCKMAGHPPNHCGEGMIDFVAELARMTLVVGYPNAPEYTTVPPLSGELPHRVRLEVHGYVGTCLANMVVEASGGTADHACQEAAYLMMARLRERHNYIFHDTAYRFHPRRASGDDVSTFRPTAGENDTTFGHMCAVMRGLDRMHSDLHKATKALNDGKLMRIVALKDEIARLKRENAQLKGLPAPGGVRIRTTPRKTTTKPVRIQLAPRNPPPPAAPAVPAAPAPAPVHVLAPASALSFAPASAARGPASGNGGCLFGMVYTRNGSRATGEGSNGEERTEGVHPNSNSGNGPPPLPENPTLAQVMAHQTQMIAAMMQQMQQQHQQMHQRMLQHAEQQHQQFGPPPPQSKLPEFLRVRPPTFSSTTNPMEANDWLHAIEKKLNLLQCNDQEKVAFATHQLQGPASAWWDNHMATRPPGTEVTWEEFCRSFRKAQVPDGVVAQKKREFRALHQGNRTVTEYLHEFNGLARYAPEDVRTDAEKQEKFMAGLDDELTNQLISGDYADFERLMDRKRKAALFRAPQGSHQRPRFTPGQQGGPTTMIVRQYRPFNPSNFPQGASGSQNHHGGQPSRGAAPRPPVAPAQSGPPAQAKKETGAKPGSCFNCGELGHFADKCPKPRRAGPRFIQARVNHASAEEAQATPEVVLGTFPVNSIPATILFDSGATHSFISKKFVGMHGLRKEELSTPMRVHTPGNSSTSVSFSPSVLIEIQRSPFLANLILLESKDLDVILGMDWLTKFKGVIDCANRTVTLTNEKGETVVYKSPDSPKRGVSLNQIETKIPEDTVEKNLRKLEDIPIVCEYPEVFPEDLTTMPPKREIEFRIDLAPGTAPIYKRPYRMAANELAEVKKQVDEQLQKGYIRPSTSPWGAPIIFVEKKDKTKRMCVDYRALNEVTIKNKYPLPRIDDLFEFDQLKGAKVFSKIDLRSGYHQLRIREEDIPKTAFTTRYGLYECTVMSFGLTNAPAFFMNLMNKVFMEFLDKFVVVFIDDILIYSKSEEEHEQHLRLVLKKLKEHQLTPCSATQGVVVDLSNVESVTKWTPPKTVSQIRSFLGLAGYYRRFIENFSRIARPMTQLLKKDEKFKWTAECDKSFEELKKKLVSAPVLILPDQMKDFQVYCDASRHGLGCVLMQEGRVVAYASRQLRPHEGNYPTHDLELAAVVHVLKIWRHYLIGNRCEVYTDHKSLKYIFTQPDLNLRQRRWLELIKDYDMSIHYHPGKANVVADALSRKSYCTALCIEGMCEELRQEFEHLNVGIVEHGQSRVNDSEIAELKKNMRVGKARDFHEDEHGTIWLGERLCVPDDKELKDLILTEAHQTQYSIHPGSTKMYQDLKEKFWWVSMRREIAEFVALCDVCQRVKAEHQRPAGLLQPLQIPEWKWEEIGMDFITGLPRTSSGHDSIWVVVDRLTKVAHFIPVHTTYTGKSTAYHPQTDGQTERVNQILEDMLRACALDFGGAWDKSLPYAEFSYNNSYQASLQMAPFEALYGRKCRTPLFWDQTGERQLFGTEVLAEAEEKVRIIRERLRIAQSRQKSYADNRRRELTFEAGDYVYLRVTPLRGVHRFQNKGKLAPRFVGPYKILERRGEVAYQLELPSNMIGIHDVFHVSQLKKCLRVPEEQADSEHIDIQEXDLTYVEKPVRIL

SEQ ID NO: 25793 - protein, 1780 aa, Oryza sativa
  unsure (1)..(1780): unsure at all Xaa locations
  Clone ID: TF_OsC359_6008.pep
MAGHPPNHRGEGMIDFVAELARMTLVVGYPNAPEYTTIPPLSGELPHRVRLEVHGYVGTCLANMAVEASGGTADHACQEAAYLMMARLRERHDYIFHDTAYRYHPRRAHGDGVSSFRPTAGENDTTFGHMCAVMRGLDRMHSDLHKATKALNDGKLMRIVALKDEIARLKKENAQLKGLPAPGGVRIRTTPRKRTTAPVRIQLAPRNPPPAAAAPAVPPAPAPAPAPAPAPAPAFTLSFAPASAARGPASGTGGCPLQMVYTRTGSRATGEGSNGEERADGVHPNSESGNGPPPLPENPTLAQVMAHQTQMMAAMMQQMQQQHQQMHQRMMQHAEQQHQQFGPPPPQSKLPEFLRVRLPTFSSTTNPMEANDWLHAIEKKLNLLQCNDQEKVAFATHQLQGPASAWWDNHMATRPPGTEVTWAEFCRSFRKAQVPDGVVAQKKREFRALHQGNRTVTEYLHEFNRLARYAPEDVRTDAEKQEKFMAGLDDELTNQLISGDYVDFERLVDKAIRQEDQRNKMDRKRKAAQFRAPQGSHQRPRFTPGQQGGPTTMIVRQHRPFNPSNFHQGTSGSQNHHGSQPNRGTAPRPPMAPAQSGQPAQAKKETGAKPGSCFNCGELGHFADKCPKPRRAGPRFIQARVNHASAEEAQAAPEVVLGTFPVNSIPATVLFDSGATHSFISKKFVGMHGLIREELSTPMRVHTPGNSSTSVQFSPSITIEIQRSPFLANLILLESKDLDVILGMDWLTKFKGVIDCASRTVTLTNEKGETVVYKSLVSPKKGVSLNQIETEIPVDTVEKNLRKLEDIPIVCEYPEVFPEDLTTMPPKREIEFRIDLAPGTAPIYKRPYRMAANELAEVKKQVDEQLQKGYIRPSTSPWGAPVIFVEKKDKTKRMCVDYRALNEVTIKNKYPLPRIDDLFDQLKGAKVFSKIDLRSGYHQLRIREEDIPKTAFTTRYGLYECTVMSFGLTNAPAFFMNLMNKVFMEFLDKFVVVFIDDILIYSKSGEEHEQHLRLVLEKLKEHQLYAKFSKCDFWLTEVKFLGHVITTQGVAVDPSNVESVTKWTPPKTVSQIRSFLGLAGYYRRFIENFSRIARPMTQLLKKDEKFKWTAECDKSFEELKKKLVSAPVLILPDPTKDFQVYCDASRHGLGCVLMQEGRVVAYASRQLRPHEGNYPTHDLELAAVVHALKIWRHYLIGNRCEVYTDHKSLKYIFTQPDLNLRQRRWLELIKDYDMSIHYHPGKANVVADALSRKSYCTALCIEGMCEELRQEFEHLNVGIVEHGFVAALEARPTLVDQVRAAQVNDPEIAELKKNMRVGKARDFHEDEHGTIWMGERLCVPDDKELKDLILTEAHHTQYSIHPGSTKMYQDLKEKFWWVSMRREIAEFVALCDVCQRVKAEHQRPAGLLQPLQIPEWKWEEIGMDFITGLPRTSSGHDSIWVVVDRLTKVAHFIPVHTTYTGKRLAELYLARIMCLHGVPRKIVSDRGSQFTSKFWQKLQEELGTRLNFSTAYHPQTDGQTERVNQILEDMLRACALDFGGAWDKSLPYAEFSYNNSYQASLQMAPFEALYGRKCRXTPLFWDQTGERQLFGTEVLAEAEEKVRIIRERLRIAQSRQKSYADNRRRELIFEAGDYVYLRVTPLRGVHRFQTKGXLAPRFVGPYKILERRGEVAYQLELPSNMIGIHDVFHVSQLKKCLRVPEEQADSEHIDIQEDLTYVEKPVRILDTSERRTRNKVTRFCRVQWSHHSEEEATWEREDELKAAHPHLFTSSSESRGRDSV

SEQ ID NO: 25794 - protein, 1806 aa, Oryza sativa
  Clone ID: TF_OsC359_6289.pep
MDINMVCMLPMEFCAMDEAEVAQFSLDPKDAVFEKPDESNRHMKPLYLKGHVDGKPVSRMLVDGGAAVNLMPYSLFKKLGREDDELKKTNMILNGFNGEPTEAKGIFSAELTVGNKTVTMGWKLCHVFRPYTVVMAGHPPNHRGEGMIDFVAELARMTLVVGYPNAPEYTTIPPLSGELPHRVRLEVHGYVGTCLANMAVEASGGTADHACQEAAYLMMARLRERHNYIFHDTAYRFHPRRAHGDDVSSFRPTAGENDTTFGHMCTVMRGLDRMHSDLHKATKALNDGKLMRIVALKDEIARLKKENAQLKGLPAPGGVRIRTTPRKRTTAPVRIQLAPRNPVPTAAPAAPPVPPAAPAVPAAPAPAPAFDLSFALASAARGPASGTGGCLFGMVYTRTGNRTTGEGSNGEERVDGVHPNSDSGNGPPPLPENPTLAQVMAHQTQMMAAMMQQMQQQHQQMHQRMMQHAEQQHQQFGPPPPQSKLPEFLREKVAFATHQLQGPASAWWDNHMATRPPGTEVTWAEFCRSFRKAQVPDGVVAQKKREFRALHQGNRTVTEYLHEFNRLARYAPEDVRTDAEKQEKFMAGLDDELTNQLISGDYADFERLVDKAIRQEDQRNKMDRKRKAAQFRAPQGSHQRPRFTPGQQGGPTTMIVRQHRPFNSSNFHQGSSGSQNHHGGQPNRGAAPRPPMAPAQSGPPAQAKKETGAKPGSCFNCGELGHFADKCPKPRRAGPRFIQARVNHASAEEAQTAPEVVLVLFDSGATHSFISKKFVGRYGLRKEELSTPMRVHTPRNSSTSVSFSPSVLIEIQRSPFLANLILLESKDLDVILGMDWLTKFKGVIDCANRTVTLTNEKGETVVYKSPDSPKQGVSLNQIEAEIPVDTVEKNLRKLEDIPIVCEYPEVFPEDLTTMPPKREIEFRIDLAPGTAPIYKRPYRMAANELAEVKKQVDEQLQKGYIRPSTSPWGAPVIFVEKKDKTKRMCVDYRALNEVTIKNKYPLPRIDDLFDQLKGARVFSKIDLRSGYHQLRIREEDIPKTAFTTRYGLYECTVMSFGLTNAPAFFMNLMNKVFMEFLDKFIVVFIDDILIYSKSEEEHEQHLRLVLEKLKEHQLYAKFSKCDFWLTEVKFLGHVITAQGVAVDPSNVESVTKWTPPKTVSQIRSFLGLAGYYRRFIENFSRIARPMTQLLKKDEKFKWTAECDKSFEELKKKLVSAPVLILPDPTKDFQVYCDASRHGLGCVLMQEGRVVAYASRQLRPHEGNYPTHDLELAAVVHALKIWRHYLIGNRCEVYTDHKNYDMSIHYHPGKANVVADALSRKSYCTALCTEGMCEELRQEFEHLNVGIVEHGFVAALEARPTLVDQVRAAQVNDSEIVELKKNMRVGKARDFHEDEHGTIRMGERLCVPDDKELKDLILTEAHQTQYSIHPGSTKMYQDLKEKFWWVSMRREIAEFVALCDVCQRVKAEHQRPAGLLQPLQIPEWKWEEIGMDFITGLPRTSSGHDSIWVVVDRLTKVAHFIPVHTTYTGKRLAELYLARIMCLHGVPKKIVSNRGSQFTSKFWQILQEELGTRLNFSTAYHPQTDGQTERVNQILEDMLRACALDFGGAWDKSLPYAEFSYNNSYQASLQMAPFEALYGRKCRTPLFWDQTGERQLFGIEVLAEAEQKVRIIRERLRIAQSRQKSYADNRRRELTFEAGDYVYLRVTPLRGVHRFQTKGKLAPRFVGPYKILERRGEVAYQLELPSNMIGIHDVFHVSQLKKCLRVPEEQADSEHIDIQEDLTYVEKPVRILDTSERRTRNKVTRFC

SEQ ID NO: 25795 - protein, 1816 aa, Oryza sativa
  unsure (1)..(1816): unsure at all Xaa locations
  Clone ID: TF_OsC359_6355.pep
MAGHPPNHRGEGMIDFVAELARMTLVVGYPDAPEYTTIPPLSGELPHRVRLEVHGYVGTCLANMAVEASGGTADHACQEAAYLMMARLRERHNYIFHDTAYRYHPSRANGDGVSSFRPTAGENDTTFGHMCAVMRGLDRMHSDLHKATKALNDGKLMRIVALKDEIARLKKENAQLKGLPAPGGVRIRTTPRKTTTAPVRIQLAPRNPPPAAAPAAPPVLPAVPAAPAPAPAPAPASALSFAPASAARGPASGTGGWLSATPSGSSDLSSSSSSGSQSGSGETYLPGSRSRSEGPXVYTRTGNRTTGEGSNGEERVDGVHPNSDSGNGPPPLPENPTLAQVMAHQTQMMAAMMQQMQQQHQQMHQRMMQHVEQQHQHFGPPPPQSKLPEFLGVRPPTFSSTTNPMEANDWLHAIEKKLNLLQCNDQEKVAFATHQLQGPASAWWDNHMATRPPGTEVTWAEFCRSFRKAQVPDGVVAQKKREFRALHQGNRTVTEYLHEFNRLXRYAPXDVRTDPDKQEKFMAGLDDELTNQLISGYYADFERLVDKAIRQEDQRNKMDRKRKAAQFRAHQGSHQRPRFTPGQQGGPTTMIVRQHRPFNPSNFYQGTSDSQNHHGGQPNRGAAPRPPVASAQSGQPAQAKKETEAKPGSCFNCGELGHFADKCPKPRRAGPRFIQARVNHASAEEAQAAPEVVLGTFPVNSIPATVLFDSGATHSFISKKFVGMHGLIREELSTPMRVHTPGNSSTSVQFSPSITIEIQRSPVLANLILLESKDLDVILGMDWLTKFKGVIDCANRTVTLTNEKGETVVYKSLVSPKKGVSLNQIETEIPVDTVEKNLRKLDDIPIVCEYPEVFPEDLTTMPPKREIEFRIDLAPGTAPIYKRPYRMAANELTEVKKQVDEQLQKGYIRPSTSPWGAPVIFVEKKDKTKRMCVDYRALNEVTIKNKYPLPRIDDLFDQLKGAKVFSKIDLRSGYHQLRIREEDIPKTAFTTRYGLYECTVMSFGLTNAPAFFMNLMNKVFIEFLDKFVVVFIDDILIYSKSEEEHEQHLRLVLEKLKEHQLYAKFSKCDFWLTEVKFLGHVITAQGVAVDPSNVESVTKWTPPKTVSQIRSFLGLAGYYRRFIGNFSRIARPMTQLLKKDEKFKWTAECDKSFEELKKKLVSAPVLILPDQMKDFQVYCDASRHGLGCVLMQEGRVVAYASRQLRPHEGNYPTHDLELAAVVHALKIWRHYLIGNRCEVYTDHKSLKYIFTQPDLNFRQRRWLELIKDYDMSIHYHPGKANVVADALSRKSYCTALCIESMCEELRQEFEHLNIGIVEHGFVAALEARPTLVDQVRAAQVNDPEIAELKKNMRVGKARDFLKDEHGTIWMGERLCVPDDKELKDLILTEAHQTQYSIHPGSTKMYQDLKEKFWWVSMRREIAEFVALCDVCQRVKAEHQRPTGLLQPLQIPEWKWEEIGMDFITGLPRTSSGHDSIXVVVDRLTKVAHFIPVHTTYTGKRLAELYLSRIMCLHGVLKKIVSDRGSQFTSKFWQKLQEELGTRLNFSTAYHPQTDGQTERVNQILEDMLRACALDFGGAWDKSLPYAEFSYNNSYQASLQMAPFEALYGRKCRTPLFWDQTGERQLFGTEVLAEAEEKVRIIRERLRIAQSRQKSYADNRRRELTFEAGDHVYLRVTPLRGVHRFQTKGKLAPRFVGPYKILERRGEVAYQLELPSNMIGIHDVFHVSQLKKCLRVPEEQADSEHIDIQEDLTYVEKPVRILDTSERRTRNKVTRFCRVQWSHHSEEEATWEREDELKAAHPHLFTSSSESRGRDSV

SEQ ID NO: 25796 - protein, 1360 aa, Oryza sativa; identical to SEQ ID NO: 18763
  Clone ID: TF_OsC359_6498.pep

SEQ ID NO: 25797 - protein, 186 aa, Oryza sativa
  Clone ID: TF_OsC359_6508.pep
STKETFVWTKGFRYVFFGSKACTRCGEIGHVASMCLTLCPHCEEDHPPGECPIRKVTCFLCEGTNHVPKDCQLSVLLTKTAEIQRTTLRLSRQLVSSNNNIDDIIHSTNAPLAPPNSAINHGNNTFSTNHSLHRQPQQRIVVDGRSCVSPRPTPGQAKGNQPPEGDTKQKTVIRFNQQSEGSFSCE

SEQ ID NO: 25798 - protein, 1129 aa, Oryza sativa
  unsure (1)..(1129): unsure at all Xaa locations
  Clone ID: TF_OsC359_6569.pep
MIVRQHRPFNPSNFHQGTSGSQNHHGGQPNRGAAPRPPMAPAQSGQPAQAKKETGAKPGSCFNCGELGHFADKCPKPRRAGPRFIQARVNHASAEEAQAAPEVVLGTFPVNSIPATVLFDSGATHSFISKKFVGMHGLIREELSTPMRVHTPGNSSTSVQFSPSITIEIQRSPFLANLILLESKDLDVILGMDWLTKFKGVIDCANRTVTLTNEKGETXGTAPIYKRPYRMAAXNELAEVKKQVDEQLQKGYIRPSTSPWGAPVIFVDKKDKTKRMCVDYRALNEVTIKNKYPLPRIDDLFDQLKGAKVFYKIDLRSGYHHLRIREEDIPKTAFTTRYGLYECTVMSFGLTNAPAFFMNLMNKVFMEFLDKFVVVFIDDILIYSKSEEEHEQHLRLPQGVAVDPSNVESVTKWTPPKTVSQIRSFLGLAGYYRRFIENFSRIARPMTQLLKKDEKFKWTAECDKNFEELKRKLVSAPVLILPDQTKDFQVYCDASRHGLGCVLMQEGRVVAYASRQLRPHEGNYPTHDLELAAVVHALKIWRHYLIGNRCEVYTDHKSLKYIFTQPDLNLRQRRWLELIKDYDMSIHYHPGKANVVADALSRKSYCTALCIEDMCEELRQELEHLNMGIVEHGFVAALEARPTLVDQVRAAQVNDPEIAELKKNMRVGKARDFLEDEHGTIWMGERLCVPDDKELKDLILTEAHQTQYSIHPGSTKMYQDLKEKFWWVSMRREIAEFVALCDVCQRVKAEHQRPAGLLQPLQIPEWKWEEIGMDFITGLPRTSSGHDSIWVVVDRLTKVAHFIPVHTTYTGKRLAELYLARIMCLHGVPKKIVSDRGSQFTSKFWQKLQEELGTRLNFSTAYHPQTDGQTERVNQILEDMLRACALDFGGAWDKSLPYAEFSYNNSYQASLQMAPFEALYGRKCRTPLFWDQTGERQLFGTEVLAEAEEKVRIIRERLRIAQSRQKSYADNRRRELTFEAGDYVYLRVTPLRGVHRFQTKGKLAPRFVGPYKILERRGEVAYQLELPSNMIGIHDVFHVSQLKKCLRVPEEQADSEHIDIQEDLTYVEKPVRILDTSERRTRNKVTRFCRVQWSHHSEEEATWEREDELKAAHPHLFTSSSESRGRDSV

SEQ ID NO: 25799 - protein, 1799 aa, Oryza sativa
  unsure (1)..(1799): unsure at all Xaa locations
  Clone ID: TF_OsC359_6570.pep
MAGHPPNHHGEGMIDFVAELARMTLVVGYPNAPEYTTVPPLSGELPHRVRLEVHGYVGTCLANMVVEASGGTADHACQEAAYLMMARLRECHNYIFHDTAYRFHPRRASGDDVSTFRPIAGENDTTFDHMCAVMRGMDRMHLDLHKTSKALNDGKLMRIVVLKDEIARLKRENAQLKGLPAPGGVRIHTTPRKSTTAPVRIQLAPRNPPPPAVPAAPPVPPAAPAVPAAPAPAPAHVPVSAPASALSFAPATAVRGPASGNGGXLICQAPGVAQRDVMVYTRTGTRTTGEGSNGEERADGVHPNSDSGNGPPPLPKNPTLAQVMAHQTQMMAAMMQQMQQQHQQMHQRMLHHAEQQHQQFGPPPPQSKLPEFLRIRPPTFSSTTNPMEANDWLHAIEKKPNLLQCNDQEKVAFATHQLQGPASAWWDNHMATRPPGTEVTWAEFCRSFRKAQVPDGVVAQKKREFRALHQGNRTVTEYLHXFNRLAXYAPEDVRTDAEKQEKFLAGLDDELTNQLISGDYADFERLVDKAIRQEDQRNKMERKRKAAQFRSNQGSHQRPRFTPGQQGRPTTLIVRQHRPFNASNFHQGASGCQNHHGGQPNRSAAPCPPMALAQSATSAQAKKETGTKPGSCFNCGELGHFADKCPKPRRAGPRFVXACVNHASAEEAQAAPEVVLGTFPVNSIPAIVLFDSGATRSFISKKFVGMHGLRKEELNTPMRVHTPGNSSTSVSFSPSVLIEIQRSPFLANLILLESKDLDVILGMDWLTKFKGVIDCVNRTVTLTNEKGETVVYKSLVSPKQGVSLNQIEAEIPVVTEEKNSRKLEEIPIVCEYPEVFPEDLTTMPPKREIEFRIDLAPGTAPIYKRPYRMAANELVEVKKQVDEQLQKGYIXPSTSHWGAPVIFVEKKDKTKRMCVDYRALNEVTIKNKYPLPRIDDLFDQLKGAKVFSKIDLRSGYHQLRIREEDIPKMAFTTRYGLYECTVMSFGLTNAPAFFMNLMNKVFMEFLDKFVVVFINDILIYSKSEKEHEQHLRLVLXKLKELQLYAKFSKCDFWLTEVKFLGHVITAQGVAIDPSNVESVTKWTPPKTVSQIXSFLGLAGYYRRFIENFSRIARPMTXLLKKDEKFKWTAECDKSFEEFKKKLVSAPVLILPDQMKDFQVYCDASRHGLGCVLMQEGRVVAYASRQLRLHEGNYPTHDLELAAVVHALKIWRYYLIGNRCEVYTDHKSLKYIFTQPDLNLQQRRWLELIKDYDMSIHYHPGKANVVADALSRKSYCTALCIEGMCEELQXEFEHLNVGIVEHGFVAALEARPTLVDQVRAAQVNDPEIAELKKNMXVGKARDFLEDEHGTNWMGXERLCVPDDKELKDMILTEAHQTQCSIHPGSTKMYQDLKEKFWWASMRREIAEFVALCDVCQRVKVEHQRPAGLLQPLQIPEWKWEEIGMDCITGLPRTSSGHDSIWVVVDRLTKVAHFIPVHTTYTGKKLAELYLARIMCLHGVPKKIVSDRESQFTSKFWQKLQEELGTRLNFSTAYHPQTDGQTEXVNQILEDMLRACALDFGGAWDKSLPYAEFSYNNSYQASLQMVPFEALYCRKCRTPLFWDQTGERQLFGTEVLAEAEEKVRTIRERLRIALSRQKSYTDNRRRELTFEAGDYVYLRVTPLRGVHRFQTKGKLAPRFVGLYKILERRGEVAYQLELPSNMIGIHDVFHVSQLKKCLRVPEEQADSEHIDIQEDLTYVEKPVRILDTSERRTRNKVTRFCRVQWSHHSEEEATWEREDELKAAHPHLFASSSESQGRDSV

SEQ ID NO: 25800 - protein, 889 aa, Oryza sativa; identical to SEQ ID NO: 18820
  Clone ID: TF_OsC359_6576.pep

SEQ ID NO: 25801 - protein, 1158 aa, Oryza sativa; identical to SEQ ID NO: 18746
  Clone ID: TF_OsC359_6650.pep

SEQ ID NO: 25802 - protein, 1819 aa, Oryza sativa; identical to SEQ ID NO: 18776
  Clone ID: TF_OsC359_6654.pep

SEQ ID NO: 25803 - protein, 1855 aa, Oryza sativa
  unsure (1)..(1855): unsure at all Xaa locations
  Clone ID: TF_OsC359_6693.pep
MAGHPPNHRGEGMIDFVAELARMTLVVGYPNAPEYTTVPPLSGELPHRVRLEVHGYVGTCLANMVVEASGGTADHACQEAAYLMMARLRERHNYIFHDTAYRFHPRRASGDDVSTFRPTAGENDTTFGHMCAVMRGLDRMHSDLHKASKALNDGKLMRIVALKDEIARLKRDNAQLKGLPAPGGVRIRTTPHKTTTAPVRIQLAPKNPPPSAAPAAPPVPLAAPVVPAAPVPALAPVHVSAPASALSFAPASAARGPASGNGGWLSATPSGSCDLSSSRSSGSELGSGETYLPGSRSRSEGPGLFLQMVYTRNGSRATGEGSNGEERTEGVHPNSNSGNGPPPLPENPTLAQVMAHQTXMMAAMMQQMQQQHQQMHQRMLQHAEQQHQXFGPPPPQSKLLEFLRVRPPTFSSTTNPMEANDWLHAIEKKLNLLQCNDQEKVAFATHQLQGPASAWWDNHMATRPPGTEVTWEEFCRSFRKAQVADGVVAQKKREFRALHXGNRTVTEYLHEFNHLARYAPEDVRTDAEKQEKFLAGLDDELTNQLISGDYADFERLVDKAIRQDDQRNKMDRKRKAAQFRAPQGSHQRPRFAPGQQGGPTTMIVRQYRPFNPSNFPQGASGSQNHHGGQPNRGAAPRPPTAPAQSGPSAQAKRETGAKPGSCFNCGELGHFADKCPKPRRAGPRFIQARVNHASAEEAQAAPEVVLGTFPVNSIPATILFDSGATHSFISKKFVGMHGLRKEELSTPMRVHTSGNSSTSVSFSPSVLIEIQRSPFLANLILLESKDLDVILGMDWLTKFKGVIDCANRTVTLTNEKGETAVYKSPDSPKQGVSLNQIEAEIPVDTVKKNLRKLEDIPIVCEYPEVFPEDLTTMPPKREIEFRIDLAPGTAPIYKRPYRMAANELAEVKKQVDEQLQKGYIRPSTSPWGAPVIFVEKKDKTKRMCVDYRALNEVTIKNKYPLPRIDDLFDQLKGAKVFSKIDLRSGYHQLRIREEDIPKTAFTTRYGLYECTVMSFGLTNAPAFFMNLMNKVFMEFLDKFVVVFIDDILIYSKSEEEHEQHLRLVLEKLKEHQLYAKFSKCDFWLTEVKFLGHVITAQGVAVDPSNVESVTKWIPPKTVSQIRSFLGLAGYYRRFIENFSRIARPMTQLLKKDEKFKWTAECDKSFEELKKKLVSAPVLILPDQMKDFQVYCDASRHGLGCVLMQEGRVVAYASRQLRPHEGNYPTHDLELAAVVHALKIWRHYLIGNRCEVYTDHKSLKYIFTQPDLNLRQRRWLELIKDYDMSIHYHPGKANVVADALSRKSYCTALCIEGMCEELRQEFEHLNVGIVEHGFVAALEARPTLVDQVRAVQVNDSEIAELKKNMRVGKTRDFHEDEHGTIWLGERLCVPDDKELKDLILTEAHQTQYSIHPGSTKMYQDLKEKFWWVSMRREXAEFVALCDVCQRVKAEHQRPAGLLQPLQIPEWKWEEIGMDFIIALPRTSSGHDSIWVVVDRLTKVAHFIPVHTTYTGKRLAELYLSRIMCLHGVPKKIVSDRGSQFTSKFWQKLQEELGTRLNFSTAYHPQTDGQTERVNQILEDMLRACALDFGGAWDKNLPYAEFSYNNSYQASLQMAPFEALYGRKCRTPLFWDQTGKRQLFGTEVLAEAEEKVRIIRERLRIAQSXQKSYADNRRRELTFEAGDYVYLRVTPLRGVHRFQTKGKLAPRFVGPYKILERRGEVAYQLELPSNMIGIHDVFHVSQLKKCLRVPEEQADSEHIDIQEDLTYVEKPVRILDTSERRTRNKVTRPRPSQAAPTPSSPGVADRWGPPVGSSPNLPPPAPVTTPPYPPSPHPSSPIYPSPRHAPRAHAIVAPSLP

SEQ ID NO: 25804 - protein, 1202 aa, Oryza sativa
  Clone ID: TF_OsC359_6695.pep
MGCKMAGHPPNHRGEGMIDFVAELARMTLVVGYPNAPEYTTIPPLSGELPHRVRLEVHGYVGTCLANMVVEAAGGTADHACQEAAYLMMARLRERHNYIFHDTAYRFHPRRASNDDVSSFRPTAGENDTTFGHMCAVMRGLDRMHSDLHKATKALNDGKLMRIVALKDEITRLKRENAQLKGLPAPGGVWIRTTPRKTTTAPVRIQLAPRNPPPSAAPAAPPVPPTVPAAPAPAPASALSFAPASAARGPASGTGGCLFGMVYTRNGSRATGEGSNGEERTDGAHPHSDSGNGPPPLPENPTLAQVMAHQTQMMAAMMQQMQQQHQQMHQRMMQHVEQQHQHFGPPPPQSKLPEFLRVRPPTFSSTTNPMEANDWLHAIEKKLNLLQCNDQEKVAFATHQLQGPASAWWDNHMATRPPGTEVTWAEFCRSFRKAQVPDGVVAQKKREFRALHQGNRTVTEYLHEFNRLTRYAPEDVRTDAEKQEKFMAGLDDELTNQLISGDYADFERLVDKAIRQEDQRNKMDRKRKATQFRAPQGSHQRPRFTPGQQGGPTTMIVRQYRPFNPSNFPQGSSGSQNHHGGQSNRGAAPRPPMAPAQSGPSAQAKKETGAKPGSCFNCGELGHFADKCPKPRRAGPRFIQARVNHASAEEAQAAPEVVLGTFPVNSIPAIVLFDSGATHSFISKKFVGMHGLIREKLSTPMRVHTPGNSSTSVQFSPSITIEIQRSPFLANLILLESKDLDVILGMDWLTKFKGVIDCANRTVTLTNEKGKTVVYKSPDSPKQGVSLNQIEAEIPVDTVEKNLRKLEDIPIVSEYPEVFPEDLTTMPPKREIEFRIDLAPGTAPIYKRPYRMAANELAEVKKQVDEQLQKGYIRPSTSPWGAPVIFVEKKDKTKRMCVDYRALNEVTIKNKYPLPRIDDLFDQLKGAKVFSKIDLRSGYHQLRIREEDIPKTAFTTRYGLYECTVMSFGLTNAPAFFMNLMNKVFMEFLDKFVVVFIDDILIYSKSEEEHEQHLRLVLEKLKEHQLYAKFSKCDFWMTEVKFLGHVITAQGVAVDPSNVESVTKWTPPKTVSQIRSFLGLAGYYRRFIENFSRIARPMTQLLKKDEKFKWTAECDKSFEELKKKLVSALVLILPDQMKDFQVYCDASRHGLGCVLMQEGRVVAYASRQLRPHEGNYPTHDLELAAVVHALKIWRHYVEFSEL

SEQ ID NO: 25805 - protein, 1606 aa, Oryza sativa
  unsure (1)..(1606): unsure at all Xaa locations
  Clone ID: TF_OsC359_6707.pep
MAGHPPNHRGEGMIDFVAELARMTLVVGYPNAPEYTTIPPLSGELPHRVRLEVHGYVGTCLANMAVEASGGTADHACQEAAYLMMARLRERHDYIFHDTAYRYHPRRAHGDGVSSFRPTAGENDTTFGHMCAVMRGLDRMHSDLHKATKALNDGKLMRIVALKDEIARLKKENAQLKGLPAPGGVRIRTTPRKTTTAPVRIQLAPRNPPPPAAPAAPSVPPAVPAAPVPAPAFTLSFAPASAARGSASGTGGCLFGMVYTRTGNRTTGEGSNGEERVDGVHPNSDSGNGPPPLPENPTLAQVMAHQTQMMAAMMQQMQQQHQQMHQRMMQHAEQQHQQFGPPPPQSKLPEFLRVRPPTFSSTTNPMEANDWLHAIEKKLNLLQCNDQEKVAFATHQLQGPASAWWDNHMATRPPGTEVTWAEFCRSFRKAQVPDGVVAQKKREFRALHQGNRTVTEYLHEFNRLARYAPEDVRTDAEKQEKFMAGLDDELTNQLISGDYADFERLVDKAIRQEDQRNKMDRKRKAAQFRAPQGSHQRPRFTPGQQGGPTTMIVRQHRPFNPSNFHQGTSGSQNHHGSQPNRGTAPRPPMAPAQSGQPAQAKKETGAKPGSCFNCGELGHFADKCPKPRRAGPRFIQARVNHASAEEAQTAPEVVLGTFPVNLIPATVLFDSGATHSFISKKFVGRYGLRKEELSTPMRVHTPGNSSTSVSFSPSVLIEIQRSPFLANLILLESKDLDVILGMDWLTKFKGVIDCANRTVTLTNEKGETVVYKSLVSPKQGVSLNQVEMEVPVDTVEKNLRKLEDIPIVCEYPEVFPEDLTTMPPKREIEFRIDLAPGTAPIYKRPYRMAANELAEVKKQVDEQLQKGYIRPSTSPWGAPVIFVEKKDKTKRMCVDYRALNEVTIKNKYPLPRIDDLFDQLKGAKVFSKIDLRSGYHQLRIREEDIPKTAFTTRYGLYECTVMSFGLTNAPAFFMNLMNKVFMEFLDKFVVVFIDDILIYSKSEEEHEQHLRLVLEKLKEHQLYAKFSKCDFWLTEVKFLGHVITAQGVAVDPSNVESVTKWTPPKTVSQIRSFLGLAGYYRRFIENFSRIARPMTQLLKKDEKFKWTAECDKSFEELKKKLVSAPVLILPDQMKDFQVYCDASRHGLGCVLMQEGRVVAYASRQLRPHEGNYPTHDLELAAVVHALKIWRHYLIGNRCEVYTDHKSLKYIFTQPDLNLRQRRWLELIKDYDMSIHYHPGKANVVADALSRKSYCTALCIEGMCEELRQEFEHLNMGIVEHGFVAALEARPTLVDQVRAAQVNDSEIAELKKNMRVGKARDFHEDEHGTIWMGERLCVPDDKELKDLILTEAHQTQYSIHPGSTKMYQDLKEKFWWVSMRREIAEFVALCDVCQRVKAEHQRPAGLLQPLQIPEWKWEEIGMDFITGLPRTSSGHDSIWVVVDRLTKVAHFIPVHTTYTGKRLAELYLAKIMCLHGVPRKIVSDRGSQFTSKFWQKLQEELGTRLNFSTAYHPQTDGQTERVNQILEDMLRACALDFGGAWDKSLPYAEFSYNNSYQASLQMAPFEALYGRKCRTPLFWDQTGERQLFGTEVLAEAEEKVXIIRERL

SEQ ID NO: 25806 - protein, 1777 aa, Oryza sativa
  Clone ID: TF_OsC359_6721.pep
MAGHPPNHRGEGMIDFVAELARMTLVVGYPNAPEYTTIPPLSGELPHRVHLEVHGYVGTCLANMAVEASGGTADHACQEAAYLMMARIRERHDYIFHDTAYRYHPRRAHGDGVSSFRPTAGENDTTFGHMCAVMSGLDRMHSDLHKATKALNDGKLMRIVALKDEIARLKKENAQLKGLPAPGGVRIRTTPRKTTTAPVRIQLAPRNPPPAAAPAAPSVPPAVPAAPVPAPAFTLSFAPASAARGPASGTGGCLFGMVYTRTGNRTTGEGSNGEERVDGVHPNSDSGNGPPPLPENPTLAQVMAHQTQMMAAMMQQMQQQHQQMHQRMMQHAEQQHQQFGPPPPQSKLPEFLRVRPPTFSSTTNPMEANDWLHAIEKKLNLLQCNDQEKVAFATHQLQGPASAWWDNHMATRPPGTEVTWAEFCRSFRKAQVPDGVVAQKKREFRALHQGNRTVTEYLHEFNRLARYAPEDVRTDAEKQEKFMAGLDDELTNQLISGDYADFERLVDKAIRQEDQRNKIDRKRKAAQFRAPQGSHQRPRFTPGQQGGPTTMIVRQHRPFNPSNFHQGTSGSQNHHGGQPNRGAAPRPSVAPAQSGQPAQAKKETGAKPGSCFNCGELGHFADKCPKPRRAGPRFIQARVNHASAEEAQTAPEVVLGTFPVNSIPATVLFDSGATHSFISKKFVGRYGLRKEELSTPMRVHTPGNSSTSVSFSPSVLIEIQRSPFLANLILLESKDLDVILGMDWLTKFKGVIDCANRTVTLTNEKGETVVYKSLVSPKKGVSLNQIETEIPVDTVEKNLRKLEDIPIVCEYPEVFPEDLTTMPPKREIEFRIDLAPGTAPIYKRPYRMAANELAEVKKQVDEQLQKGYIRPSTSPWGAPVIFVEKKDKTKRMCVDYRALNEVTIKNKYPLPRIDDLFDQLKGAKVFSKIDLRSGYHQLRIREEDIPKTAFTTRYGLYECTVMSFGLTNAPAFFMNLMNKVFMEFLDKFVVVFIDDILIYSKSEEEHEQHLRLVLEKLKEHQLYAKFSKCDFWLTEVKFLGHVITAQGVAVDPSNVESVTKWTPPKTVSQIRSFLGLAGYYRRFIENFSRIARPMTQLLKKDEKFKWTAECDKSFEELKKKLVSTPVLILPDQMKDFQVYCDASRHGLGCVLMQEGRVVAYASRQLRPHEGNYPTHDLELAAVVHALKIWRHYLIGNRCEVYTDHKSLKYIFTQPDLNLRQRRWLELIKDYDMSIHYHPGKANVVADALSRKSYCTALCIEGMCEELRQEFEHLNMGIVEHGFVAALEARPTLVDQVRAAQVNDSEIAELKKNMRVGKAREFHEDEHGTIWMGERLCVPDDKELKDLILTEAHQTQYSIHPGSTKMYQDLKEKFWWVSMRREIAEFVALCDVCQRVKAEHQRPAGLLQPLQIPEWKWEEIGMDFITGLPRTSSGHDSIWVVVDRLTKVAHFIPVHTTYTGKRLAELYLSRIMCLHGVPKKIVSDRGSQFTSKFWQKLQEELGTRLNFSTAYHPQTDGQTERVNQILEDMLRACALDFGGAWDKSLPYAEFSYNNSYQASLQMAPFEALYGRKCRTPLFWDQTGERQLFGTEVLAEAEEKVRIIRERLRIAQSRQKSYVDNRRRELTFEAGDYVYLRVTPLRGVHRFQTKGKLAPRFVGPYKILERRGEVAYQLELPSNMIGIHDVFHVSQLKKCLRVPEEQADSEHIDIQEDLTYVEKPVRILDTSERRTRNKVTRFCRVQWSHHSEEEATWEREDELKAAHPHLFTSSSESRGRDSV

SEQ ID NO: 25807 - protein, 1777 aa, Oryza sativa; identical to SEQ ID NO: 18812
  Clone ID: TF_OsC359_6727.pep

SEQ ID NO: 25808 - protein, 1785 aa, Oryza sativa; identical to SEQ ID NO: 18780
  Clone ID: TF_OsC359_6746.pep

SEQ ID NO: 25809 - protein, 1039 aa, Oryza sativa
  Clone ID: TF_OsC359_6774.pep
GNRTMTEYLHEFNRLARYAPEDVRTDAEKQEKFMAGLDDELTNQLISGDYADFERLVDKAIRQEDQRNKMDRKRKAAQFRAPQGSHQRPRFASGQQGGPTTMIVRQYRPFNPSNFPQGARGSQNHHGGQPSSGAAPRPPTASAQSGPSAQAKKETGTKPGSCFNCGELGHFADKCPKPRRAGPRFIQARVNHASAEEAQAAPEVVLAEIPVDTVEKNLRELEDIPIVCEYPEVFPEDLTTMPPKREIEFRIDLAPGTAPIYKRPYRMAANELAEVKKQVDEQLQKGYIRPSTSPWGAPVIFVEKKDKTKRMCVDYRALNEVTIKNKYPLPRIDDLFDQLKGAKVFSKIDLRSGYHQLRIREEDIPKTAFTTRYGLYECTVMSFGLTNAPAFFMNLMNKVFMEFLDKFVVVFIDDILIYSKSKEEHEQHLRLVLEKLKEHQLYAKFSKCDFWLTEVKFLGHVITAQGVAVDPSNVESVTKWTPPKTVSQIRSFLGLAGYYRRFIENFSRIARPMTQLLKKDEKFKWTVECDKSFEELKKKLVSAPVLILPDQMKDFQVYCDASRHGLGCVLMQEGRVVAYASRLLRPHEGNYPTHDLELAAVVHALKIWRHYLIGNRCKVYTDHKSLKYIFTQPDLNLRQRRWLELIKDYDMSIHYHPGKANVVADALSRKSYCTALCIEGMCEELRQEFEHLNVGIVEHGFVAALEAWPTLVDQVRAAQVNDSEIAELKKNMRVGKARDFHEDEHGTIWLGERLCVPDDKELKDLILTEAHQTQYSIHPGSTKMYQDLKEKFWWVSMRREIAEFVALCDVCQRVKAEHQRPAGLLQPLQIPEWKWEEIGMDFITGLPRTSSGHDSIWVVVDRLTKVAHFIPVHTTYTGKRLAELYLSRIMCLHGVPKKIVSDRGSQFTSKFWQKLQEELGTRLNFSTAYHPQTDGQTERVNQILEDMLRACALDFGGAWDKNLPYAEFSYNNSYQASLQMAPFEALYGRKCRTPLFWDQTGERQLFGTEVLAEAEEKVRIIREGLRIAQSRQKSYADNC

SEQ ID NO: 25810 - protein, 1785 aa, Oryza sativa
  unsure (1)..(1785): unsure at all Xaa locations
  Clone ID: TF_OsC359_6786.pep
MEKPKSPLNPFSLHMFFAIGFVPGKWGSVLVVQGKNLGRSFKMAGHPPNHRGEGMIDFVAELARMTLVVGYPDAPEYTTIPPLSGELPYRVRLEVHGYVGTCLANMAVEASGGTADHACQEAAYLMMARLRERHDYIFHDTAYRYHPRRAHGDGVSSFRPTAGENDTTFGHMCAVMRGLDRMHSDLHKATKALNDGKLMRIVALKDEVARLKKENAQLKGLPAPGGVRIRTTPRKRTTAPVRIQLAPRNPPPPAAPAAAPVPPAVPAAPAPAPAFTLSFAPASAARGSASGTGGCLFGMVYTRTGSRATGEGSNGEERADGVHPNGDSGNXMHQRMMQHAEQQHQQXGPPPPQSKLPEFLRVRPPTFSSTTNPMEANDWLHAIEKKLNLLQCNDQEKVAFATHQLQGPASAWWDNHMATRPPGTEVTWAEFCRSFRKAQVPDGVVAQKKREFRALHQGNRTVTEYLHEFNRLARYAPEDVRTDAEKQEKFMAGLDDELTNQLISGDYADFERLVDKAIRQEDQRNKMDRKRKAAQFRSNQGSQHRPRFTPGQQGGPTTMIVRQHRPFNSSNFHQGTSGSQNHQGGQPNRGAAPRPPMAPAQSAQPAQAKKETGAKPGSCFNCGELGHFADKCPKPRRAGPRFIQARVNHASAEEAQAAPEVVLGTFPVNSIPATVLFDSGATHSFISKKFVGMYGLRKEELSTPMRVRTPGNSSTSVSFSPSVLIEIQRSPFLANLILLESKDLDVILGMDWLTKFKGVIDCANRTVTLTNEKGETVVYKSLVSPKKGASLNQIETEIPVDTVGKNLRKLEDIPIVCEYPEVFPENLTTMPPKREIEFRIDLAPGTAPIYKRPYRMAANELAEVKKQVDEQLQKGYIRPSTSPWGAPVIFVEKKDKTKRMCVDYRALNEVTIKNKYPLPRIDDLFDQLKGAKVFSKIDLRSGYHQLRIREEDIPKTAFTTRYGLYECTVMSFGLTNAPAFFMNLMNKVFMKFLDKFVVVFIDDILIYSKSEEEHEQHLRLVLEKLKEHQLYAKFSKCDFWLTEVKFLGHVITAQGVAVDPSNVESVTKWTPPKTVSQIRSFLGLAGYYRRFIENFSRIARPMTQLLKKDEKFKWTAECDKSFEELKKKLVSAPVLILPDPTKDFQVYCNASRHGLGCVLMQEGRVVAYASRQLRPHEGNYPTHDLELAAVVHALKIWRHYLIGNRCEVYTDHKSLKYIFTQPDLNLRQRRWLELIKDYDMSIHYHPGKANVVADALSRKSYCTALCIEGMCEELRQEFEHLNMGIVEHGFVAALEARPTLVDQVRAAQVNDPEIAELKKNMRVGKARDFLEDEHGTIWMGERLCVPDDKELKDLILTEAHQTQYSIHPGSTKMYQDLKEKFWWVSMRREIAEFVALCDVCQRVKAEHQRPAGLLQPLQIPEWKWEEIGMDFITGLPRTSSGHDSIWVVVDRLTKVAHFIPVHTTYTGKRLAELYLARIMCLHGVPKKIVSDRGSQFTSKFWQKLQEEMGTRLNFSTAYHPQTDGQTERVNQILEDMLRACALDFGGAWDKSLPYAEFSYNNSYQASLQMAPFEALYGRKCRTPLFWDQTGERQLFGTEVLAEAEEKVRIIRERLRIAQSRQKSYADNRRRELTFEAGDYVYLRVTPLRGVHRFQTKGKLAPRFVGPYKILERRGEVAYQLELPSTMIGIHDVFHVSQLKKCLRVPEEQANSEHIDIQEDLTYVEKPVRILDTSERRTRNKVTRFCRVQWSHHSEEEATWEREDELKAAHPYLFTSSTESRGRDSV

SEQ ID NO: 25811 - protein, 1597 aa, Oryza sativa
  Clone ID: TF_OsC359_6814.pep
SRLGDGDAITTEDDGGGGGSEAVHGGGGCSDAVRGGGGGSDTAHGGGGCSDAVHGGGGGGSVAAHGGGGCSDAVRGGGGGSDAAHDGGGCSDAARGGGGCSDAAQGGGGGSNAARGGGGCSDAAHGCAVAVSGGDDCAVVAYVSIGGVSLVLLLHVSHSPPRRRWRSPSPRRGRHGGRGQVVVERVVREATTSSVVYPTLTRTNYQDWALVMRVNMQAQCLWGAVEPEGDDLVDYRQDQQALAAILRAVPAEMLATLAVKETAQEAWEAIKTRRIGVQRVREANAQQLRREFGDILFKDDETVDDFSMRIGGLANNLRTLGDNITEAEVVQKLLQVVPEHLQQIAISIETLLDVNELSLEEVTGRLRSVEQRKQCKTAAASSRVDANGRLLFTEEEWLAKFRKAASLQDAAHSSSGNGDRRGRGRGKKDDGAPKEAQPKPANPGGRNPGNCKNCGKRGHWAKDCRSKPKAQQAYVAQEEDEEPALLLAKVQLDPPRPRVAAPTNVVSPPSAPRAPSPIGELAVVEAKVFAQLDDGGEHDPAMWILDTGATNHMTGSRSAFAELDTAVTGTVRFGDGSVVRIEGRVTVLFSCRFGEHRGIAGVYYIPRLTANIVSLGQLDRSGSKVLIHHGILHVWDPRGHLLVRVRRSDDCLYTIKLDIDRPVCLAARSAEPAWRWHARYGHLNFPALRKLAQQEMVRGLPLLQQVTQVCDGCLLGKQRRAAFPTQSKYRADEHLELVHGDLCGPIEPATPAGNRYFLLLVDDMSRYMWLTMIRSKDEAANAIKHFQARAEVESGRKLRALRMDRGSEFTSIEFGEYCANLGVGRQLTAPYSPQQNGVVERRNQTIVATARSMMKAKGVPGRFWGEAMSTAVFLLNRSPTKSLDNQTPYEAWYGQWPAVHFLRTFGCVGHVKITKPGLKKLDDRSAPMVLLGYEQGSKAYRLYDPVSERVHVSRDVVFDEDIAWDWGPVTPDGAPQLEPFTVEQVVTTTIGTAPASSPTPPSPPSPAPSAPTTPAPPSPPSPEAVEFVTPPTQDSILDADADDDVVPRYRLVDNLLGNASPPGHAPRVLEQLELHVVSADEPASLAEAEADPSWRGAMQDELNAIVDNDTWSLTDLPHGHRAIGLKWVYKLKRDEQGAIVRYKARLVAKGYVQRQGVDFDEVFALVARLESVRLLLAVAAHQGWQVHHMDVKSAFLNGELLEEVYVSQPPGFVDDNHKNKVYRLHKALYGLRQAPRAWNAKLDSSLLSLGFHRSSSEHGVYTRTRGGRRLMVGVYVDDLIITGDHDDEIRSFKGEMMKLFKMSDLGALRYYLGIEVTQDSDGITLGQAAYAGKILEKAGLKDCNPCQTPMEVRLKLRKGSDFPLVDATLYRSLVGSLRYLVNTRPDLAFSVGYVSRFMESPREDHLAAVRRILRYVAGTRCWGIRFGPGARCALPMLVGYSDSDLAGDPDERKSTSGQIFFINGGPVTWQSSKQKVVALSSCEAEYIAAAAATCQGVWLARLLAEVLGDEITAPLLKVDNQSTISLIKNPVHHDRSKHIDVKYHYIRECAEKKLIEMMFVGTAEQLGDIFTKSLGRTRFQELRSKIGVCSLDKSSQT

SEQ ID NO: 25812 - protein, 1827 aa, Oryza sativa; identical to SEQ ID NO: 18739
  Clone ID: TF_OsC359_6925.pep

SEQ ID NO: 25813 - protein, 1565 aa, Oryza sativa; identical to SEQ ID NO: 18794
  Clone ID: TF_OsC359_6933.pep

SEQ ID NO: 25814 - protein, 1220 aa, Oryza sativa; identical to SEQ ID NO: 18792
  Clone ID: TF_OsC359_6996.pep

SEQ ID NO: 25815 - protein, 1570 aa, Oryza sativa; identical to SEQ ID NO: 18822
  Clone ID: TF_OsC359_7059.pep

SEQ ID NO: 25816 - protein, 1154 aa, Oryza sativa
  Clone ID: TF_OsC359_7142.pep
MEANDWLHDIEKKLNLLQCNDQEKVAFATHQLQGPASAWWDNHMATRPPGTEVTWAEFCRSFRKAQVPDGVVAQKKREFRALHQGNRTVTEYLHEFNRLARYAPEDVRTDAEKQKKFMAGLDDELTNQLISGDYADFERLVDKAIRQEDQRNKMDRKRKAAQFRSNQGNHQRPRFAPGQQGGPTTMIVRQYRPFNPSNFHQGASGSQNHHGGQPNRGAAPRLPVAPAQSGPSAQAKKETGTKPGSCFNCGELGHFADKCPKPRCAGPRFVQARVSHASAEEAQAAPEVVLGTFPVNSIPATVLFDSGATHSFISKKFVGMHGLRKEELNTPMRVHTPGNSSTSVSFSPSVLIEIQRSPFLANLILLESKDLDVILGMDWLTKFKGVINCANRIVTLTNEKGETAVYKSLVSPKQGVALNQMEAEIPVVTEEKNPRKLEEIPIVCEYPEVFPEDLTTMPPKREIEFRIDLAPGTAPIYKRPYRMAANELAEVKKQVDEQLQKGYIRPSTSPWGAPVIFVEKKDKTKRMCVDYRALNEVTIKNKYPLPRIDDLFDQLKGAKVFSKIDMRSGYHQLRIREEDISKTAFTTRYGLYECTVMSFGLTNAPAFFMNLMNKVFMEFLDKFVVVFIDDILIYPKSEEEHEQHLHLVLEKLKEHQLYAKFSKCDFWLTEVKFLGHVITAQVQQTEPQTKPYPLDMWKYGSALQQRPELNPYSTRAQGVAVDPSNVESVTKWTPPKTVSQIRSFLGLVGYYRRFIENFSRIARPMTQLLKKDEKFKWTAECDKSFEELKKKLVSAPVLILPDQMKDFQVYCDASRHGLGCVLMQEGRVVAYASRQLRPHEGNYPTHDLELAAVVHALKIRRHYLIGNRCEVYMDHKSLKYIFTQPDLNLRQRRWLELIKDYDMSIHYHPEKANVVADALSRKSYCTALGIEGMCEELRQELERLNVGIVEHGFVAALEARPTLADQVRAAQVNDPEIAELKKNMRVRKARDFHEDEHGTIWLGERLCVPDDKELKDLILTEAHQTQYSIHPGSTKMYQDLKEKFWWVSMRREIAEFVALCDVCQRVKAEHQRPVGLLQPLQIPEWKWEEIGMDFITGLPRTSSGHDSISVVNVTLLPFAPFVEVRRSTFGIGTSTSVSSNIMCTKGSPLLVIAI

SEQ ID NO: 25817 - protein, 1351 aa, Oryza sativa; identical to SEQ ID NO: 18819
  Clone ID: TF_OsC359_7158.pep

SEQ ID NO: 25818 - protein, 1784 aa, Oryza sativa; identical to SEQ ID NO: 18816
  unsure (1)..(1784): unsure at all Xaa locations
  Clone ID: TF_OsC359_7225.pep

SEQ ID NO: 25819 - protein, 1718 aa, Oryza sativa
  Clone ID: TF_OsC359_7450.pep
MAGHPPNHRGEGMIDFVAELARMTLVVGYPNAPEYTTIPPLSGELPHRVRLEVHGYVGTCLANMVVEASGGTADHACQEAAYLMMARLRERHNYIFHDTAYRFHPRRANGDDVSSFRPTASENDTTFGHMCAVMRGLDRMHSDLHKATKALNDGKLMRIVALKDEIARLKRENAQLKGLPAPGGVRIRTTPRKTTTAPVRIQLAPRNPPPSAAPAAPPVPPAAPAVPAAPAPASALSFAPASAARGPASGNGGCLFGMVYTRNGSRATGEGSNGEERADGVHPSSDSGNGPPPLPENPTLAQVMAHQTQMMAAMMQQMQQQHQQMHQRMMQHVEQQHQQFGPPPPQSKLPEFLRVRPPTFSSTTNPMEANDWLHAIEKKLNRLQCNDQEKVAFATHQLQGPASAWWDNHMATRPPGTEVTWAEFCRSFWKAQVPDGVVAQKKREFRALHQGNRTVTEYLHEFNRLARYAPEDVRTDAEKQEKFMAGLDDELTNQLISGDYADFERLVDKAIRQEDQRNKMDRKRKAAQFRAPQGSHQRPRFAPGQQGGPTTMIVRQHRPFNPSNFPQGASGSQNHHGGQSNRGAASRPPMAPAQSGPPAQAKKETGAKPGSCFNCGELGHFADKCPKPRRAGPRFIQARVNHASAEEAQAAPEVVLGTFPVNSIPATVLFDSGATHSFISKKFVGMHLLIREELSTPMRVHTPGNSSTSVQFSPSITIEIQRSPFLANLILLESKDLDVILGMDWLTKFKGVIDCANRTVTLINEKGETVVYKSLVSPKKGVSLNQIEAEIPVDTVEKNSRKLEDIPIVCEYPEVFPEDLTTMPPKREIEFRIDLAPGTAPIYKRPYRMAANELAEVKKQVDEQLQKGYIRPSTSPLGAPVIFVEKKDKTKRMCVDYHALNEVTIKNKYPLPRIDDLFDQLKGAKVFSKIDLRSGYHQLRIREEDIPKTAFTTRYGLYECTVMSFGLTNAPAFFMNLMNKVFMEFLDKFVVVFIDDILIYSKSEEKHEQHFRLVLEKLREHQLYAKFSKCDFWLTEVKFLGHVITAQGYYRRFIENFSRIARPMTQLLKKDEKFKWTAECDKSFEELKKKLVSAPVLILPDPMKDFQVYCDASRHGLGCVLMQEGRVVAYASRQLRPHEGNYPTHDLELAAVVHALKIWRHYLIGNRCEVYTDHKSLKYIFTQPDLNLRQRRWLELIKDYDMSIHYHPGKANVVADALSRKSYCTALCIEGIRSGGTAYAQANDSEIAELKKNMSVGKARDFHEDEHGTIWLGERLCVPDDKELKDLILTEAHQTQYSIHPGSTKMYQDLKEKFWWVSMRREIAEFVALCDVCQRVKAEHQRPAGLLQPLQIPEWKWEEIGMDFITGLPRTSSGHESIWVVVDRLTKVAHFIPVHTTYTGKRLAELYLSRIMCLHGVPKKIVSDRGSQFTSKFWQKLQEELGTRLNFSTAYHPQTDGQTERVNQILEDMLRACALDFGGAWDKSLPYAEFSYNNSYQASLQMAPFEALYGRKCRTPLFWDQTGERQLFGTEVLAEAEEKVRIIRERLRIAQSRQKSYADNRRRELTFEAGDYVYLRVTPLRGVHWFQTKGKLAPRFVGLYKILERRGEVAYQLELPSNMIGTHDVFHVSQLKKCLRVPEEQADSEHIDIQEDLTYVEKPVRILDTSERRTRNKVTRFCRVQWSHHSEEEATWEREDELKAAHPHLFSSSSESRGRDSV

SEQ ID NO: 25820 - protein, 1825 aa, Oryza sativa; identical to SEQ ID NO: 18815
  Clone ID: TF_OsC359_7454.pep

SEQ ID NO: 25821 - protein, 1664 aa, Oryza sativa; identical to SEQ ID NO: 18769
  Clone ID: TF_OsC359_7650.pep

SEQ ID NO: 25822 - protein, 1628 aa, Oryza sativa
  unsure (1)..(1628): unsure at all Xaa locations
  Clone ID: TF_OsC359_7660.pep
MGCKMAGHPPNHRGEGMIDFVAELARMTLVVGYPNAPEYTTIPPLSGELPHRVRLEVHGYVGTCLANMAVEASGGTADHACQEAAYLMMARLRERDNYIFHDTAYRYHPRRANGDGVSSFCPTAGENDTTFGHMCAVMRGLDRMHSDLHKATKALNDGKLMRIVALKDEIARLKKENAQLKGLPAPGGVRIRTTPRKTTTAPHQPPEVQPVAPEVACLXMVYTRTGSRATGEGSNGEERANGVHPSSDSGNGPPPLPENPTLAQVMAHQTQMMAAMMQQMQQQHQQMHQRMMQHAEQQHQQFGPPPPQSKLPEFLRVRPPTFSSTTNPMEANDWLHAIEKKLNLLQCNDQEKVAFATHQLQGPASAWWDNHMATRPPGTEVTWVEFCRSFRKAQVPDGVMAQKKREFRALHQGNRTVTEYLHEFNRLARYAPEDVRTDAEKQEKFMAGLDDELTNQLISGDYADFEWLVDKAIRQEDQRNKMDRKRKAAQFRAPQGSHQRPRFTPGQQGGPTTMIVRQHRPFNSSNFHQGSSGSQNHHGGQPNRGAAPRPPMAPAQSGPPAQAKKETGAKPGSCFNCGELGHFADKCPKPRRAGPRFIQARVNHASAEEAQTAPEVVLGTFPVNSIPATVLFDSGATHSFISKKFVGMYGLRKEELSTPMRVHTPGNSSTSVSFSPSVLIEIQRLPFLANLILLESKYLDVILGMDWLTKFKGVIDCANRTVTLTNEKGETVVYKSLAPPKQGVSLNQIEMEVPVVTEEKNLKKLEDIPIVSEYPEVFPEDLTTIPPKREIEFRIDLAPGTAPIYKRPYRMAANELAEVKKQVDEQLQKGYIRPSTSPWGAPVIFVEKKDKTKRMCVDYRALNELRIREEDIPKTAFTTRYGLYECTVMSFGLTNAPAFFMNLMNKVFMEFLDKFVVVFIDDILIYSKSEEEHEQHLRLVLEKLKEHQLYAKFNKCDFWLTEVKFLGHVITAQGVAVDPSNVESVTKWTPPKTVSQIRSFLGLAGYYRRFIENFSRIARPMTQLLKKDEKFKWTAECDKSFEELKKKLVSAPVLILPDPTKDFQVYCDASRHGLGCVLMQEGRVVAYASRQLRPHEGNYPTHDLELAAVVHALKIWRHYLIGNRCEIYTDHKSLKYIFTQPDLNLRQRRWLELIKDYDMSIHYHPGKANVVADALSRKSYCTALCIEGMCEELRQEFGHLNVGIVEHRFVAALEARPTLVDQVRAAQVNDPEIAELKKNMRVGKARDFLEDEHGTIWMVERLCVPDDKELKDLILTEAHQTQYSIHPGSTKMYQDLKEKFCAYHLYGKRLAELYLARIMCLHGVPKKIVSDRGSQFTSKFWQKLQEELGTRLNFSTAYHPQTDGQTERVNLILEDMLRACALDFGGAWDKSLPYAEFSYNNSYQASLQMAPFEALYGRKLYTAICALFWDQTGERQLFGTEVLAEVEEKVRIIRERLRIAQSRQKSYADNRRRELTFEEGDYVYLRVTPLRGVHHFQTKGKLAPRFVGPYKILERRGEVAYQLELPSNMIGIHDVFHVSQLKKCLRVPEEQVDSEHIDIQEDLTYVEKPVRILDTSERRTRNKVTRFCRVQWNHHSEEEATWEREDELKAAHPHLFTSSSESRGRDSV

SEQ ID NO: 25823 - protein, 1672 aa, Oryza sativa
  unsure (1)..(1672): unsure at all Xaa locations
  Clone ID: TF_OsC359_7908.pep
MVVEASGGTADHACQEAAYLMMARLRERHNYIFHDMAYRFHPRRASGDDVSTFRPTTGQNDTTFGHMCAVMSGLDRMHSDLHKATKALNDGKLMRIVALMDEIARLKRENAQLKGLPAPGGVRIRTTPRKTTTAPVRIQLAPRNPPPSAAPAAPPVPPAVPAAPAPAPASALSFAPASAARGPASGNGGCLLGMVYTRNGSRATGEGSNGEERTDGAHPHSDSGNGPPPLPENPTLVQVMAHQTQMMAAMMQHQHQQMHQRMLQHAEQQHQQFGPPPPQSKLPEFLRVRPPTFSSTTNPMEANDWLHAIEKKLNLLQCNDQEKVAFATHQLQGPASAWWDNHMATRPPGTEVTWVEFCRSFRKAQVPDGVVAQKKREFRALHQGNRTVTEYLHEFNRLARYAPEDVRTDAEKQEKFMAGLDDELTNQLISGDYADVERLVDKAIRQEDQRNKMDRKRKAAQFRAPQGSHQRPRFAPRQQGGPTTMIVRQHRPFNPSNFPQGASGSQNHHGGQSNRGAAPRPPMAPAQSGPPAQAKKETGAKPGSCFNCGELGHFADKCPKPRRAGPRFIQARVNHASAEEAQAAPEVVLGTFSINSIPATVLFDSGATHSFISKKFVGMHGLIREELSTPMRVHTPGNSSTSVQFSPSITIEIQRSPFLANLILLESKDLDVILGMDWLTKFKGVIDCANRTVTLTNEKGETVVYKSLVSPKQGVSLNQIEAEIPVDTVEKNLRKLEDIPIVCEYPEVFLEDLTTMPPKREIXFRIDLAPGTAPIYKRPXKDKTKRMCVDYRALNEVTIKNKYPLPRIDDLFDQLKGAKVFSKIDLRSGYHQLRIREEDIPKTAFTTRYGLYECTVMSFGLTNAPAFFMNLMNKVLMEFLDKFVVVFIDDILIYSTSEEEHEQHLRLVLEKLKEHQLYAKFSKCDFWLTEVKFLGHVITAQGVAVDPSNVESVTKWTPPKTVSQIRSFLGLAGYYRRFIENFSRIARPMTQLLKKDEKFKWTTECDKSFEELKKKLVSAPVLILPDQMKDFQVYCDASRHGLGCVLMQEGIVVAYASRQLRPHEGNYPTHDLELAAVVHALKIWRHYLIGNRCEVYTDHKSLKYIFTQPDLNLRQRRWLELIKDYDMSIHYHPGKANVVADALSRKSYCTALCIEGMCEELWQEFEHLNVGIVEHGFVAALEARPTLVDQVRAAQVNDSEIAELKKNMRVGKARDFHEDEHGTIWLGERLCVPDDKELKDLILTEAHQTQYSIHPGSTKMYQDLKEKFWWVSMRREIAEFVALCDVCQRVKAEHQRPAGLLQPLQILEWKWEEIGMDFITGLPRTSSGHDSIWVVVDRLTKVAHFIPVHTTYTGKRLAELYLSRIMCLHGVPKKIVSDRGSQFTSKFWQKLQEELGTRLNFSTAYHPQTDGQTERVNQILEDMLRACALDFGGAWDKSLPYAEFSYNNSYQASLQMAPFEALYGRKCRTPLFWDQTGERQLFGTEVLAEAEEKVRIIRERLRIAQSRQKSYADNRRRELTFEAGDYVYLRVTPLRGVHRFQTKGKLAPRFVGPYKILERRGEVAYQLELPSNMIGIHDVFHVSQLKKCLRVPEEQADSKHIDIQEDLTYVEKPIRILDTSERRTRNKVNRFCRVQWSHHSEEEATWEREDELKAAHPHLFTSSSESRGRDSV

SEQ ID NO: 25824 - protein, 1777 aa, Oryza sativa; identical to SEQ ID NO: 18736
  Clone ID: TF_OsC359_7970.pep

SEQ ID NO: 25825 - protein, 1726 aa, Oryza sativa
  Clone ID: TF_OsC359_8137.pep
MAGHPPNHRGEGMIDFVAELARMTLVVGYPNAPEYTTVPPLSGELPHRVRLEVHGYVGTCLANMVVEASGGTVDHACQEAAYLMMARLRERHNYIFHDTAYRFHPCRASGDDVSTFRPTADENYTTFGHMCTVMRGLDRMHSDLHKASKALNDGKLMRIVALKDEIARLKRENAQLKGLPAPGGVRIRTTPRKTTTAPVRIQLAPRNPPPPAAPAAPPVPPAVPAAPAPAPAPVHMSAPASALSFAPASAARGPASGNGGCLFGMVYTRNGSRATGEGSNGEERTEGVHPNSNSGNVPPPLPENPTLAQVMAHQTQMMAAMMQQMQQQHQQMYQRMLQHAEQQHQQFGPPPPQSKLPEFLRVRPPTFSSTTNPMEANDWLHAIEKKLNLLQCNDQEKVAFTTHQLQGPASAWWDNHMATRPPGTEVTWAEFCRSFRKAQVPDGVVAQKKREFRALHQGNRTVTEYLHEFNRLARYAPEDVRTDAEKQERFMAGLDDELTNQLISGDYADFERLVDKAIRQEDQRNKMDRKRKAAQFRAPQGSHQRPRFAPGQQGGPTTMIVRQYRPFHPSNFPQGASGSQNHHGGQPNRGAAPRPPMAPAQSGPSAQARKETGAKPGSCFNCGELGHFADKCPKPRRAGPRFIQARVNHASAEEAQAAPEVVLGTFPVNSIPTTVLFDSGATHSFISKKFVGMHGLIREELSTPMRLTKFKGVIDCVNRTVTLTNEKGETVVYKSPNSPKQGVSLNQIEAEIPVVTMEKNLRKLEDIPIVYEYPEVFPEDLTTMPPKREIEFRINLAPGTAPIYKRPYRMAANELAEVKKQVDEQLQKGYIRPSTSPWGAPVIFVEKKDKTKRMCVDYRALNEVTIKNKYPLPRIDDLFDQLKGAKVFSKIDLRSAYHQLIIREEDIPKTAFTTRYGLYECTVMSFGLTNAPAFFMNLMNKVFMEFLDKLVVVFIDDILIYSKSEEEHEQHLRLFSKCDFWLTEVKFLGHVITAQGVAVDPSNVESVTKWTPPKTVSQIQSFLGLAGYYRRFIENFSRIARPMTQLLKKDEKFKWTAECDKSFEELKKKLVSAPVLILPDQMKDFQVYCDASRHGLGCVLMQEGRVVAYASRQLRPHEGNYPTHDLELAAVVHALKIWRHYLIGNRCEVYTDHKNLKYIFTQPDLNLRQRRWLELIKDYNMSIHYHPGKANVVADALSRKSHCTALCIEGMCEELRQDFEHLNMGIVEYGFVAALEARPTLVDKVRVAQVNDSEIAELKKNMRVGKARDFHEDEHGTIWLGERLCVPDDKELKDLILTEAHQTQYSIHPGSTKMYQDLKEKFWWVSMRREIAEFVALCDVCQRVKAEHQRPAGLLQPLQIPEWKWEEIGMDFIIGLPWTSSGHDSIWIVMDRLTKVAHFIPVHTTYTGKRLAELYLSRIMCLHRVPKKIVSNRGSQFTSKFWQKLQEELGTRLNFSTAYHPQTDGQTERVNQILEDILRACALDFGGAWDKSLPYAEFSYNNSYQASLQMAPFEALYGRKCRTPLFWDQTGERQLFGTEVLAEAEEKVRIIKERLRIAQSRQKSYADNRRRELTFEAGDYVYLRVTPLRGVHRFQTKGKLVPRFVGPYKILERRGEVAYQLELPSNMIGIHDVFHVSQLKKCLRVPEEQADSEHIDFQEDLTYVEKPVHILDTSERRTRNKVTRFCRVQWSHHSEEEATWEREDELKAAHPHLFASSSESRGQDSV

SEQ ID NO: 25826 - protein, 1806 aa, Oryza sativa
  unsure (1)..(1806): unsure at all Xaa locations
  Clone ID: TF_OsC359_8398.pep
MEMDEVGGRWTXSRTNEGYTSCGPMAGSVTRRGLHMTGFVLELRGLCVVLGYPHGVDYQARPLPEQEGEDAEPHAGWEVTAVILSGSPERTSLAVTAGGDSFPAACQNAALLAIGTLHQRYPDELQHSPYRYHPRRGAXHHATFRDASSEDDATVVHLARMVEAYDVARIDFHQMVRRGMVENNMKILELRQENLQLKKDLDALEAQLHQLKVAQGEICRPKRRRVCRSQKITARKSTSRPELVRQSLAWTCFVETPRAEPAPVVPQEGEASGVGSSEGALLLTFRPGPSQRSPSLFAGSVWSLQMVSTRRNVNTGEGNQPEGSNPNPQGNPPPPPPPDTNAILTQILAQQANMMNAFLHHLQNPPQQNAPPPPPQHSKLAEFLRIRPPTFSSSNNPVDALDWLHAVGKKLDTVQCSDEEKVIFAAHQLQGPASLWWDHFQATQPEGQPITWARFTAAFRRTHVPAGVVALKKKEFRELKQGNRSVMEYLHEFNNLARYAPEDVREDEEKQEKFLAGMDPELSVRLVSGDYPDFQRLVDKSIRLEAKHKELESHKRRLANFRNQQGANQRVRYTNPYPGGSSSQQQQQQQQQSRSAPRPQFVVRVPQPQQQQNQQGTRAPRPPTPAGQPVQGRRDASGPQRLCFNCFEPGHFADKCPKPRRQQGQAPPRSNNSGKDVLRGRVNHVTAEDVLTTPDVIVGTFLVHSIPATILFDSGASHSFISVPFVGKNQLGVERLRNPLLITTPGGVMTAKYYSPAVPIEIQGIPFPSDLILLDTKNLDVILGMNWLAQFQGVVDCTRRTVTLYRGPEQPVVFFAPPTSVRSSELHQIGPSEIPIVREFEDVFPEELPGMPPKREIEFRIDLVPGTTPLHKRPYRMAANELAEVKKQLEELKEKGYIRPSTSPWGAPVIFVEKKDKTKRMCVDYRALNEVTIKNKYPLPRIDDLFDQLKGATVFSKIDLRSGYHQLRIREEDIPKTAFTTRYGLYEFTVMSFGLTNAPAFFMNLMNKVFMEYLDKFVVVFIDDILIYSQSEEDHQHHLRLVLGKLREHQLYAKLSKCEFWLSEVKFLGHVISAKGVAVDPETVTAVTDWKQPKTVTQIRSFLGLAGYYRRFIENFSKIARPMTQLLKKEEKFVWSPQCEKAFQTLKEKLVSSPVLILPDTRKDFMVYCDASRQGLGCVLMQDGHVVAYASRQLRPHEGNYPTHDLELAAVVHALKIWRHYLIGNRCEIYTDHKSLKYIFTQSDLNLRQRRWLELIKDYDVGIHYHPGKANVVADALSRKSHCNTLNVRGIPPELNQQMEALNLSIVGRGFLAALEAKPTLLDQIREAQKNDPDMHGLLKNMKQGKAAGFTEDEHGTLWNGKRVCVPDNREPKQLILQEAHESPYSIHPGSTKMYLDLKEKYWWVSMKREIAEFVALCDVCQRVKAEHQRPAGLLQPLQVPEWKWDEIGMDFITGLPKTQGGYDSIWVIVDRLTKVARFIPVKTTYGGNKLAELYFARIVSLHGVPKKIVSDRGSQFISHFWKKLQEELGTRLNFSTAYHPQTDGQTERLNQILEDMLRACVLDFGKTWDKSLPYAEFSYNNSYQASIQMAPYEALYGRKCRTPLLWDQVGESQVFGTDILREAEAKVRIIRDNLKVAQSRQKSYADNRRRDLEFAVDDFVYLRVTPLRGVHRFQTKGKLAPRYVGPFRIIARRGEVAYQLELPASLGNVHDVFHVSQLKKCLRVPSEQADSEQIEVREDLTYVERPVKILDTMERRTRNRVIRFCKVQWSNHAEEEATWEREDELKAAHPDLFASSSESRGRDSV

SEQ ID NO: 25827 - protein, 1384 aa, Oryza sativa
  unsure (1)..(1384): unsure at all Xaa locations
  Clone ID: TF_OsC1713_4687.pep
TIAQKADFENNCKARNIILNAISRSDFDRVSHLATANEIWKAFNDFHTGSSNIKELQKDVFKKEYIKFEMNSGESLDDYLGRFNKILSDLGSVDASYNVNYSQSKVACYFMNGLDMKIWDVKVTSIQESVGMNTLTLDILYTKLKTYEMNILSKRTDSKSTALVSSSSSSIDSTPMSIFSAFNALSEDQLEGVSEEDLVLIANRASKALSNTRSRRRGGPQRCFECGQLGHIRSQCPKLRRGTKAVDQDEVKNAKNTKDDKQSKKQFKNMKMKKFYQKAIDEAYAAIQESSDVDFDSDGDDDKGKNIVGVCLMARSIDEDSGDDNEVIPPSSVEYYQDIIARLGFKISKFEKRXSPYEATIESLKAENSSIKSLVPDNDECQSCEVLCAEIKSNRDVCIKKLDVESRKTKKFESCVALSFAMNTRLVDELFLTKRALNKCQVALFASSIFNLISSKRIKQSSTKLFSTTCVANEMKLKYALGRVKHMEEIVKQDEVMSCSTCRKXKSVLDACKNCATLSQEVFYLKSSLQRFSKGKKNLNMILDQSKVNTNNRDLVVRMENVWIVDSGCMQHMTSDXSFLKKASRRDSIIFGDASTSSITTTGSVKVSDKFTLNDVTLVENLKYNLLSVSQIVDEDFDVLFKKTRSKVFNSSGDVVLNVSRYGRVFKADFENSVSSEVTCLVAKFSKDVMFXHRRLGHVGFDHLTRISGSDLVRGLPKLKKNLDLVCSPYRYAKMVASSHAPIISVMTDAPGHLLHMDTVGPTRVQFVGGKWYVLVVVDDFSRYSWVFFMATKDEPFEHFKSLYLRLSLEFAGSLRTIRSDNGISHLRVFGCKCFVLKSRNLDKFESHSTNGLMLGYSTHSRGYRVLVLETNKIVETCEVTFDEASPGTRPDVSGTLSXVQGEDIFVDESNDEEEDEMAAVQTGAXPVRPLAEDRSDRPGGSSSGASGDDGRGPPETSTSIGQGAEHEISSYATTPLHIQXRHPPQQMIGNIGEHTTRSKVTTRDHHVNSAFVANFEPKDVTHALTDESWINAMHEELENFERNKVWSLVEPPVGHNIIGTKWIXNEDGLIVRNKARLVAQGFTQMXGLDYDETFAPVARIEAIRLLLTFTASKGFKLYLMDVKSAFLNGYIQEEVYVKQPPGFENSEFPNHVFRLSKALYGLKQSPRAWHDRLENFLLAKGFIMGKVDKTLFVLKHGDDQLFVQIYVDDIIFGCSSHPLVVEFAETMRMEFEKSMMGELTYFLGLQIKQTKQGTFVHQTKYTKDLLRRFKMEDCKPMSTPIGSTPVLDPDEDGEVVDQKEYRSMIGSLLYLTASRPDIQFVVCLCACFQASPRASHRQAVKRIMRYLQXTLEFGIWYSTYSSICLSGYLDNKHRGTQTDNLIY

SEQ ID NO: 25828 - protein, 1631 aa, Oryza sativa
  Clone ID: TF_OsC359_7895.pep
MSDLGGKNGENGNEDGTSSKETPSPKGATIPFDYSKLTIPPHNFVSVPSRRAPQFDGTHYAAWKHKMKLHLIFLHPSIWKVVCIASNPILSALSPEEFNKVDGLEEAKEIWDTLQLAHEGSPAVREAKIELLEERLGRFVMDDKETPQEMYDRMMILVNKIKGLGSEDMTNHFVVKRLLHAFGPRNPTLVSMIWERKDFKRLTPSDILGRIVSHEMQEEEAREVRQMVKNATMIKNQEVALKAKQEEESSCEESEDEEMTFIVKRFKHFLRKSGYGKGRKDDDKGKRQSKRACFNCGEYGHFIADCLKSNEAKAKGGKKKPERAHVAEAHMAEVWYSGDEEDLEVKPKPKPKDKVEGEGGVATVAFKSSSSSKERLFNNLSDDDDDSYHYSCFMAQGHKVMTQKPSHTSLDVDSSDEESDNELDDVLKSFSKPAMQHLAKLMRALDSKEQSLERQEELLILEKERNLALVESLAKECAKNEQLANELNLANGSLASLRDVNETLQEKFASLDKSHKDLEVQFDTLWNSTSQPNVVSNSSNPSTSNGCARYYNIDLNSHATNVDAMQALKKENERLGTLVKYGCMKTYHSKDALYKTITAHPNKDGHGLRKFRASDRPKGLAGSSGYNARKFWPEGLYYDSYAYSSDGSSWVVDSGCTNHMTGERSMFTSLDEEGGSRENIVFGDDGKGKRVRSNNGGEFKNTQVEEFLDEEGIKHEFSAPYDPPQNGIVERKNRTLIEVARAMLDEYKTSDVFWAEAVSTACLAINRLYLHKILKKTSYELLSGKKPNVSYFHVFGSKCFILSKRSRSSKFSPKVDEGFLLGYESNAHAYRVFYKTSGIVEVTRDVTFDESNGSQGEQVVVHVVGDVDPNQAIGTNAIGDIRPVETQDDQEDRDQPPSSTSNSPTSAVSAEPEVPGPIDRNLRTSPDPEVPGSTVRNLRISGSEDVPTAQVDGIDAEGTLEHSDQAQVPPVHHPRIHHTVQRDHPVDNILGFEDPKLPNHVYKLHKALYGLKQAPRAWFEMSMMGELTFFLGLQVKQALEGTFISQTKYVKDILKKFGMEDAKPIKTPMPTNGYLDLDDNGRKFRCSWPGTSVVIMPREKRQKLSQDVPADSSPPVRGPRGRLGKEKVGVFYSGSQIPIHSRRAGSIVIRDAPRSPSPAASESDDGGNEDEPGSKSNPLRLYKTRAVDPDPKRTRVNYLKNLLQCGKDRMVSPDTLPADSQDDRFRTLVQVDWYNSMIMGRSHLVVEMKWLDWQYMSSKNNIVFNEVRKVCERKHVVDLLALQYSWNEEVIGQFYFTAFFGITKKGLDFVKWTIQGQQYRVSMAQFAAALGLDDDDLSRPHIFVEDALSPTSTTFMYEKDAPKDCLGTIRGLRPYYRVLYSIFRWSLLPKVGDATALPGRHALLLSRMRYNKPDFSIMKLIWSEIYKTMCEPKRGCIYAPYIMKMIEAKTGICYFKDNQHKLFRPHAPTTSATPTTRVTRASTSAAPSSSAAPQRSESSSPIKKALRAIFCMCAKTAKKVKKIERRQKEDWIAAGKDVSDISDDEEFVDPFAAYETARDIASGEGPSGTSRFFNEESSHSEESSDDEESNAPTENVLTDPDEAVDAAGQDIDSPHSGDTEIIPSDGDDDEA

SEQ ID NO: 25829 - protein, 244 aa, Oryza sativa
  unsure (1)..(244): unsure at all Xaa locations
  Clone ID: TF_LIB4506-006-R1-K1-A9.pep
SGFPGRPTRPETLLDISTLSLEEVTGRLKAAEDSGQSSSSSLPGGSGKLYLTEEEWLERHKKKEQEAKKGNGGGNTRGKRRGGQGCNGSGGGDNASPVRKKDKCRNCGKLGHWAKYCRSKPKQEQAHVAQEEDXPTLMLMTGGCIDVVEETGAPCATPSPPALRPRPDVIEFVEQKVIAALDDATDHDNKRXILDTDASNHMTGSXTNVTGNVRLGDGSLVHIGGRGTILFACKNVILTVETDR

SEQ ID NO: 25830 - protein, 1608 aa, Oryza sativa
  Clone ID: TF_OsC359_8211.pep
MDQYRPLVEDLKLLWKKEGVLPVWDEDKQGMLVAASVSLVDIEQPLSFDGVGTTRIEGLVEAAGSAREVDGGERGVGGGSGLGGECRRSVETPVGQVASGVGEEEATTTRKDVTGLAAPGSVEAAASGSARKAAAPGSVEGVAGDPRCLLYPPPPSLSPLVVGNALAPCALAPPSPPSLQPSFAAVPVVAVAREDRRRGRQVVAVLVRPFAVAVDRRSTVAVVKPKSAAASSSLPSPSVPLPPLFWSPRCRSPASVRRPSRRAAAAGGDVTADVIVALSRGDYDPGKVRCSGLCYARGIVTTPFRGTVVMPRYKPEYLFGVEGFVQELSTMSFVIGFGTAPFYAQIPHDRHEEKCRVKVTLNSNSEDIPSVMFEAGGRNYIHACQEVARIAIGELRDRYSDQLADTEYRYHPRQPQGSDRGSYLETEGIENDATTRHLVEMLWAMDESRAETVLAAQDREDRNRGKICKLEDKVDRLERELAALKGEAPPQKARIRLTARKRALFVPRYQLAPKVRVVEKEVAPTLADPPVIIISDDEEEESKRNHSKIEWEATQDDEDEPNEPSIDLRCSEELDNGNGPNNNNNNNNEGNPTLAQVLAQQTQLMNMMMQQLQNQQNQGNNHAPPQNKLAEFLRVRPPIFSSTSNPVEAGDWLHAIEKKLDLLQCTDQEKVSFASHQLHGPASEWWDHFRLNRTTAEPITWLEFTAAFRKTHIPSGVVSLKKKEFRSLTQGSRSVTEYLHEFNRLARYAPEDVRNDEERQEKFLEGLNDELSYPLMTGDYSDFQKLVDKAIRQEDKNNRMEQKKRRIAQFKTQQGNNQKPRLTLGPQTMPHGGSSSVVRPQRQFFNNNAGNNICNQAPRPVAAPTQQQPSKREQGSKPVVCFNCGDLGHYADKCPKPRRVKVVPTQSNSTVPASKARVNHVAAAEAQDAPDVILVREYPDVFPDDLPANELAEVKRQVDDLLQKGYIRPSLSPWGAPVIFVEKKDHTQRMCVDYRALNDVTIKNKYPLPRIDDLFDQLKGATVFSKIDLRSGYHQLRIKEEDIPKTAFTTRYGLFECTVMSFGLTNAPAFFMNLMNKVFMEYLDKFVVVFIDDILIYSRTKEEHEEHLRLALEKLREHQLYAKFSKCEFWLSEVKFLGHVISAGGVAVDPSNVESVTNWKQPKTVSEIRSFLGLAGYYRRFIENFSKIAKPMTRLLQKDVKYKWSEECEQSFQELKNRLISAPILILPDPKKGFQVYCDASKLGLSCVLMQDGKPSFAAVPVVAVAREDRRRGRQVVAVLVRPFAVTVDRRSTVAVVKPKSAAASSSLPSPSVPLPPLFWSPRCRSPASVHRPSRRAAAAGGDVTADVIVALSREPAGPPAALADGWVPPVISLLAPRRRPPVPPAIPSPVSPVFPSLSPSDSSGFIPQSSPASSMAAEISAPVSFLSGRALPLSALYICSPCFALPFPPLAARSPRRIRARAVFLSLRRRRRAPVRRRRRSALPPDSAPPPSASPRRRRPRPPLRFARRPPEHRRPRRPEPRRRVPPLRSSSPPSSCLGVSRGPSLSLPSPLRSLGRRSAAPVVAGGDHRGAVVPPPVGRAGEAAFGRALAAAKWARPSAARARGCG

SEQ ID NO: 25831 - protein, 1676 aa, Oryza sativa
  Clone ID: TF_OsC1713_5373.pep
MRLLPTASPLSEALVPSALLARAHDLRARSPSQIQRPLLPSRGDSVHNQNNSLNGIKPKGLVRKIGYIPHRPTQMASRRRASTSNEETQVPDLTTLARVMATQTQLLQAIANNQDNCGGSSFGEFMRTKPPTFATADEPMEAEDWLRIIEKKLTLVRVRETDKVIFAVNQLEGPASDWWDTYKEARENDAGEPTWEEFTAAFRENFVPAAVMRMKKNEFRWLRQGNTTVQEYLNKFTQLARYAIGDLADEEEKIDKFIEGLNDELRGPMIGQDHESFQSLINKVVRLENDQRTVEHNRKRRLAMSRLPQIVPQRLKGATSSGWKPPIVATNRPAAPSNFNRPVAIQNRTPTPTLAAPGAKMNVNCFNCGGYGHYANNCPHPRKTPVRTGTNAMTVRGTTTPVTGRGLFKTPQSNRTATGLGRGQVNHVRAEEAQEDQGILMGMFSINSTPVKVLFDSGASHSFISLKASQKHNLTLVGLRKPMIVHSPGGEITVSHACIDVPIRLRDVVFPSNLMILIPQTLDVILGMDWLTKNRGVIDCGRREVTLTTPWGSDMRATMDQDPRLTERAGGIFTMLPLKGMPVVQRFPDVFPEDLPGMPPDRDIKFIIDLIPGTAPISKRPYRMPVNELEELKKQIRELQEKGFVRPSSSPWGAPVLFVKKKDGSMRMCVDYRSLNEVTIKNKYLLPRFDDLFDQLKGAKVFSKIDIRSGYHQLKIRTKDIPKTAFSTHYGLYEFTVMSFGLTNAPAYFMNLMNKINTLDIQPLLRTQIEEAQKDNEEIRELKERLAAGRAKEFSIDEKDVLWYKKRIYVPEQGGLRGLILKEAHESAYSLHPGSTKMYQDLKEGYWWPNMKRDVAEYVALCDVCQKVKAEHQRPAGLLQPLRIPEWKWDEIGMDFIVGLPKTATGYDSIWVIVDRLTKTARFIPVKTNYSSAKLAELYMTRIVCLHGIPKRIISDRGTQFTSHFWEKVHEALGSYLAFSTAYHPQTDGQTERTNQVLEDMLRACALDFSKDWERCLPYAEFSYNNSFQASLKMSPNEALFGRRCRTPLMWSETGERAVFGPDIINEAEEKVRLIRDRLKVAQSRQKSYADTRRRNLEFKEGDYVYLKVSPMRGTKRFRVKGKLAPRYVGPFQITARRGEVAYQLQLPENIADVHPVFHVSQLKKCLRVPEEQAPLEEIHISNDLTYPEHPIRILDEAEKRTRSKVWRMNKEAVRSEIDSIMSNGTWEVVERLYGSKPVGCKWVFKKKLRPEVTIEKYKARLVAKGYTQKEGEDFFDTYSSVAHLTTIRVLLALAASHALLVHQMDVKTAFLNGELEEEIYMDQPNGYALEGREGMVCKLLKSLYGLKQAPKQWHEKFDTTLTSAGFVVNETDKCVYYRYGGGEGVILCLYVDDILIFRTSLNVIEEVKDFLSKSFEMKDLGEADVILNIKLLRGDEGGITLVQSHYVDKVLSRFGHNDCKPAPTPYDPSVLLRKNRRIARDQLRYSQIIGSLMYLASATRPDISFAVSKLSRFVSNLVDDHWQALERVMRYLKGTMSYGIHYTGYLKVLEGYSDSNWISDADEIKATSGYVFTLGGGTVSWKSCKQTILTRSTMEAELTGLDTATVEAEWLRELLMDLPVVEKPVPAILTNCDNQTVIIKVNSSKDNVKSSRHIKIRLKSVRKQKNSGVIALDYV

SEQ ID NO: 25832 - protein, 893 aa, Oryza sativa
  Clone ID: TF_OsC1713_4627.pep
MRVNLQAQGLWTAIDPCYAEYREDRAALSAILQAVPREMLRGLAKHDTAKAAWDAIKTMRVGVDRVSEAREQGFRRQFEAMRFKDGETPEEFAMRLTAIVADMRNMGGVMEDEHINKKLLRVVPKKYKPVAISLEQLLDVKTMALEELIEWLSTVDSYSDDEEASDGGKLSSGRPVSSSGSRRDLAAATRAGRALATRTVEARPAIHRRERRWPPAAMAVVKCFNCDEYGHYSKQCRMPRRQCRGEANANLVQAEEEPTLLMAHVMGVSLAGEAAVGRTPCVQEVHLTEKKVVLDHEDGRKEEKTGEWFLDTGATNHLTGARSAFAELDTGVVGTGRGTVVFQSKNGDHRSLEAVYYIPKLRKNIVSVGRLDARGYDAHIWHGVFTLRDPEGMQLAKVNRDSSYLYVLKLNLATLICMAASGSELAWRWHARFGHLNFLALRRLAKGGVVRRIPQIDHIDQLCDGYLAGKQHRTPFPEEAQYRAQTALELVHGDLCGPITPATTGGKKYFLLLVDDMSHHMWIRLLSAKHEASAAIKPAWRRIAIGSSWRCALIAGQNSVVERRNQTVVAAARSMLKAANMLAYFWGEAVVAAVYVLSKSPMKSLDGVTPYEAWYGRRPTVEHLRVFECVGYVKTAKPNLRKLDDRSTRMVFIGYEQGSKAYKINTDEEGDQDAYVEFTVENFTIPVQGSETHAQDAAATPTMLATSPTSSTGTATTLPSGVEFCSPPTDASEGTDEGPRSYRTVVNTLATLTPILDFNYSDQCLMAAEEPASFLEAEQESCWRKAMLEEMESIEGNNTWTLYDLPSSHRATGLKWVYKIKRDAKDVIVKYKARLVAKGYVHQQGVDFDEVFAPVTRMETVRLLIATAAHQGWEVHQMDVKLAFLNRELEEDA

SEQ ID NO: 25833 - protein, 302 aa, Oryza sativa
  unsure (1)..(302): unsure at all Xaa locations
  Clone ID: TF_OsC333009_5.pep
CHCSGSGSGSALGGHELVVQQVKEVGLTLCYPMLEENNYGVWAVKMKIFMRAQGVWAAVEGNTADEKMDQMALTAIVQAMPEAVVMTIFEKETAKAAXDALKLMNMGEESIKKAXVQTLKSELDGMKMGNSEKINDFALKVTTIMNEIHSLGVKVEETTVVEKLLHSVPEKSXSLISTIEQWGDVSEMMVTKTIGHLRAFEDSSQGLRRDKEGEQQLFAAYAEPRLMRAEWEAKVAKERRSGGGSGSSSGGDKRKYHGKFDKAKVHCYNCQEYGHFADECPKPKKDMAFLATVDADDEPTLV

SEQ ID NO: 25834 - protein, 1424 aa, Oryza sativa; identical to SEQ ID NO: 18868
  Clone ID: TF_OsC359_5853.pep

SEQ ID NO: 25835 - protein, 1603 aa, Oryza sativa
  unsure (1)..(1603): unsure at all Xaa locations
  Clone ID: TF_OsC359_5908.pep
CQRPYRARATDDMLRTVSLIIRLQPTAPPPPKPPPTPPVSPFPAAHSARNPKPTSPPTFPAPPASSGARKRRGGFEISPTLSLLLHMVKTRNDPRDSNDASGSEEQTDGAHVSGASGSRSSPPPENPTVTQMMTMMMQQMQQHYHQMLQQAQQNQQFGPPPSHVSKLLDFLRIQPPTFSSTTNPMEANDWLRAIEKKLNLLQCNDQEKVAFATHQLQGPASAWWDNYVATRLDATEVTWAEFCQSFRKAQIPEGIMAQXKREFRALQQGTMSVTEYLHEFNRLARYAPEDVRTDAEKQEKFLFGLDDELTNQLISGVYEDFEKLVDKAIRQEEQRNKMDRKRKAAQISFPQGNNQKPRFMTGQLGGPSTLIVCQHRPYHPSNFDNDYNGGSHNNSKQHNHNSTPPPLMAPAQSDPPAVSAQSEQPKKRAVGKPGPCFNCGKHGHFASKCPKLNRTGPRFIQAHANHVSAVEAQAAPEVVLGTFPVNSYPATVLFDSGASHSFISKRFAGTHGLSVVELKIPMQVHTPGNDMRTAHYCPSVTIEIRRSPFLSNLILLESKDLDVILGMDWLTRNKGVIDCASRTITLTNDKGEKITFRSPASQKSVASLNQAAIEGQTETVEKSPRKLEDIPIVQEYPEVFPEDLTTMPPKREIEFRIDLAPGTTPIYKRPYRMAANELAEVKKQVDEQLQKGYIRPSTSPWGAPVIFVEKKDKTKRMCVDYRALNEVTIKNKYPLPRIDDLFDQLKGAKVFSKIDLRSGYHQLRIREEDIPKTAFTTRYGLFECTVMSFGLTNAPAFFMNLMNKVFMEFLDKFVVVFIDDILIYSKSEEEHEQHLRLVLEKLKEHQLYAKFSKCDFWLSEVKFLGHVISAQGVAVDPSNVESVTKWTPPKTVSQIRSFLGLAGYYRRFIENFSKIARPMTQLLKKDKKFKWSAECNQSFEELKKKLVSAPVLILPDQTKDFQVYCDASRQGLGCVLMQEGRVVAYASRQLRPHETNYPTHDLELAAVVHALKIWRHYLIGNRCEVYTDHKSLKYIFTQPDLNLRQRRWLELIKDYDMGIHYHPGKANVVADALSRKSYCNAVCTEGMCDKLQQDLEHLNLGIVEHGYVAALEARPTLVDQVRAAQVNDPEIAELKKNMRVGKARDFHEDENGTIWLGERLCVPDDKELKDLILTEAHQTQYSIHPGSTKMYQDLKEKFWWVSMRREIAEFVALCDVCQRVKAEHQRPAGLLQPLQIPEWKWEEIGMDFITGLPRTSSGHDSIWVVVDRLTKVAHFIPVHTTYTGKRLAELYLSRIMCLHGVPKKIVSDRGSQFTSKFWQKLQEELGTRLNFSTAYHPQTDGQTERVNQILXDMLRACALDFGGAWDKSLPYAEFSYNNSYQSSLQMVPFEALYGRKCRTPLFWDQTGERQLFGTEVLTEAEEKVRTVRERLRIAQSRQKSYADNRRRELTFEAGDYVYXLRVTPLRGVHRFQTKGKLAPRFVRPYRILERRGEVAYQLELPPNMVGIHDVFHVSQLKKCLRVPEEQASSEHIDIQEDLTYVEKPVRILETSERRTRSKVIRFCKVQWSHHSEEEATWEREDELKAAHPHLFASSSESRGRDSV

SEQ ID NO: 25836 - protein, 1309 aa, Oryza sativa; identical to SEQ ID NO: 18867
  Clone ID: TF_OsC359_6656.pep

SEQ ID NO: 25837 - protein, 1408 aa, Oryza sativa; identical to SEQ ID NO: 18862
  Clone ID: TF_OsC359_7205.pep

SEQ ID NO: 25838 - protein, 309 aa, Oryza sativa; identical to SEQ ID NO: 18871
  Clone ID: TF_OsC55897_1.pep

SEQ ID NO: 25839 - protein, 1828 aa, Oryza sativa
  unsure (1)..(1828): unsure at all Xaa locations
  Clone ID: TF_OsC359_6573.pep
RGDHPTNYRGEGIDDFVAELARMTLVVGYPNASEYSTVPPLSGKLPHRVRLEVHGXVGTCLANMVVVASGGTADHACQEAAYLMMARLRERDNYIFCNTAYRFHPRRASGDGVSTFRPTAGENDTTFGHMCAMMRGMDRMHSDLHKASKALNDGKLVRIIALKDEIARLKKENAHLKGLPIPGGVRIRTMPRKSTTAPVRIXLAPRNPPPPAALAAPPVPPAVPAAPAAPPPVPAPVPVSAPASALSFAPASAARGPASGNGGWLPATPSGSRDHSSSSSSGSELGSGETYLLDSRSRSEGPGLFLQMANTRNGSRAAGEGSNGEERTDGGYPNSASGNGPPPLPENPTLAPVMAHQTQMMAAMMQQMQQRHQQMHQRMQQQAEQQXQQFGPPPPQSKLLEFLRVRPPTFSSTTNPMEANDWLHTIEKKLNLLQCNDQEKVAFATHQLQGPVSAWWDNHMATRPAGTEVTWVEFCRSFRKAXVPDGVVAQKKREFRALHQGNRTVTEYLHEFNRLAXYAPEDVRTDAEKQEKFLAGLDDELTNQLISGDYADFEKLVDKAIRQEDQRNKVDRKRKPAQFRSNQGSHQRPRFTPGQQGGPTTMIVRQHRPFNSSSFHPGASGSXNHQGGQLNCSAALRPPMAPAQSVPSAQAKKETRAKPRSCFNCGEHGHFANKCPKPRRAGPRFAQARVNHASAEEAQAAPEVVLGTFLVNSVPATVLFDSGATHSFISKKFVGMHGLRKEELSTPMRVHTPGNSSTSVSYSPLVLIEIHLSQFLANLILLESKDLDVILGLDGLTKFKGVIDCANRTVTLTNEKGETMVYKSPVSPKQRISLNQIEVENPVTTEEKSSRKLEDIPIVCEYPEVFPEDLTTMPPKREIEFRIDLAPGNAPIYKRPYRMVANELAEVKKQVDEQLQKGYIRLSTSPWGAPVIFVDKKDKTKRMCVDYRALNEVTIKNKYPLPRIDDLFDQLNGAKVFSKIDLRSGYHQLRIREXDIPKTAFTTRYGLYECTVMSFGLTNAPAFFMNLMNKMFMEFLDKFVVVFIDDILIYSKLEEEHERHLRLVLEKLEEHQLYAKFSKCDFWLSEVKFLGHVITAQGVAVDPSNVESVTKWTPPKTVSQIRSFLGLAGYYRRFIENFSRIARPMTQLLKKDEKFKWTAECDKSFEEFNKKLVSTPVLILPDQTKDFQVYCNASRHGLGCVLMQEGRVVAYASRQLRPHEGNYPTHDLELAAVVYALKIWTRYLIGNRCEVYTDHKSLKYIFTQPDVNLRQRRWLELIKDYDMSIHYHPGKANVVADALSRKSYCNTLCTEGMCKELQQELEHLNLGLVEYGYVAALEARPTLVDQVRAAQVNDPEIADMKKNMRVGKARDFHEDEHGTIWLGERLCVPDDKELKDLILTEAHQTQYSIHPGNTKMXQDLKEKFWXVSMRREIAEFVALCDVCQRVKAEHQRPAGFLQPLQIPKWKWEEIGMDFITGLPRTSSGHDSIWVVVNRLTKVAHFIPVHTTYTGKKLAELYLARIMCLHGVPKKIVSDRGSQFTSKFWQKLQKELGTRLNFSTTYHPQTDGQTERVNQILEDMLRACVLDFGGAWDKSLPYAEFSYNNSYQASLQMAPFEALYGRKCRTPLYWDQTGERQLFATEVLTKAEEKVRTVRERLRIAQSRQKSYADNRRRELTFEAGDYMYLRVTPLRGVHRFQTKGKLAPRFVGPYKILEQRGEVAYQLELPSNMIGIHVMFHVSQLKKCLRVPEEQADSEHIDIQEDLTYVEKPVRILETSERRTRNKVTRFCRVQWSHHLEEXATWERENGLKAAHPHLFTSSSESRGRDSV

SEQ ID NO: 25840 - protein, 1028 aa, Oryza sativa
  Clone ID: TF_OsC1528_1598.pep
MTDEVVVKKMVRAITPRNSTLVTIIRLNTYRGDGKTGCVKTANPAGSHDRRLPGGGGNGSGGGCCALPSARSGKRGFGGLPRPAADRRRQQRRRWPHPLHLAGLTGWHRRSDRHVKAGFAITGTPLTEIDHRNLQLNAHAMNALFNSLCQEEFDRVSSLETAYEIWNKLVEIHEGTSEYKDAKLHFLKIQYETFSMLPHESVNDMYGRLNVIVNDLKGLGANYTDLEVAQKMLRALPEKYETLVTMLINSDMSRMTPASLLGKINTNDMYKLKKKEMEEASPSKKCIAFQAEVEDKGKVKVNEANKDLEEEIALLARRFNDLLGRRKERGRGSNSNRRRNRRPNKTLSNLRCFECGEKGHFASKCPSKDDDGDKSSKKKSGGYKLMKKLKKEGKKIEAFIGEWDSNEESSVSSGSEEEGGDDASSKKKKMAVVAIKEAPSLFAPLCLMAKGSSKVTSLSDSESDDDCDDISYDELVSMFEELHAYSEKDIVKFKALKKDHASLEVLYEELKTSYERLTISHEKLKEAHDNLLSTTQHGAHIDVGISCDLLDYSATCHIAHVASSSISTSCDDLVDMPSSSSCVSICDASLVVENNELKEQVAKLNNSLEKCFKGKNTLDKILSEQWCILNKEGLGFIPKKGKKPSHRATHFVKSNGRLMMVALLLDLWVPLYLVVNYRTGGSHWVLDSGCTQHMTGFLLSYASNSKAYWVYNKNKGIVEETADVQFDETNGSQEGHENLDDVGDEGLMIAMKNMSVRDVKPIEVEHKPSTSTQGEPSTSASPSQAQVEMEEEKAQDPPMPPRIHTALSKDHPINQVLGDISKDEALCDPDWMNAMHEELNNFTRNKVWTLVERPRDHNVIGTKWVFRNKQDENELVQLKDGTFVSQTKYIKDLLKRFGLEDAKPIKTPMATNRYLDLDEGVGWGRRSDRPYRLGLTGLELAPEMTSDKQYTCLLLRSSALPVDARFILHSMASDFLATLALKPGMDLTGTDIPTPGVSTPASARDESQEALIILTGWGEACDRPPVAT

SEQ ID NO: 25841 - protein, 788 aa, Oryza sativa
  Clone ID: TF_OsC1528_2224.pep
MSDARSRRSVASSTRRQQDAELAAAEERRRATAQTAAAAARAARLAAAELAAARAEAEAEAAEDAARAAEVEVETLRSSINGSIAGDITADRELEELARGRARERAERWAAAHLHGGGGGPRDRASADGNPDGRRRAGGSPELARGPRRQHGSLSPDRRHGHHGVQTVVRDFGPGGGWPTLTKTNYIEWAAVMRVRLQVWHMWEAVRYSDVDYDEDRRALDALIAAVPPEMQFSLSQKRTAKEAWDAIAAARIGSDRARKSTLQALRKEWENLAFKPGEDVDDFALRLNTLLQKMVQYGDDTYDEERAVEKLFRCVPEKYRQIARSIESLLDLSTMSIEEALGRLKVVDGDEPQPLSGPITIGGKLHLTREQWEASQGDGRKGESSSPTGGRKPRKARGGVQLRWARRRAEGGARRGAQGIATGNHKPARDDACRNYGKLGHWAKDCRQPRRGQAHVARVEEEEPALLLAHASIELPPAAPAAAAFLHLDEPKVLVSLCNGSSNDKADGWYLDTGATHHMTGRREFFTEFDSSVRGSVKFGDASGVEIKGVGSVTFTAKSGEHRLLTGVYYIPALRNSIISVGQLDENGSRVLVEDGLMRIWDRRRHLLAKVTRGTNRLYILSAQVAQPVCLAARRDDEAWQWHERFGHLHFEALKQLSAKEMVRGMPCLDVTPRNSRIEFQAECALKSPSRTSRGTQTTMLTFRSTSERGRDRTIRITPSNQAHHTSGFTPTPRKAAGSPLSCLGESGSRIGRRRAHPNSIMPTLAWMRRLEESYTTSPAVARAGLW

SEQ ID NO: 25842 - protein, 1789 aa, Oryza sativa
  unsure (1)..(1789): unsure at all Xaa locations
  Clone ID: TF_OsC1713_3706.pep
MSNEVNHVGKAPMFNGTNYSTWKIKMSTHLKAMSFHIWSIVDVGFAITGKPLTEIDHRNLQLNAQAMNALFNSLSQEEFDRVSNLETAYEIWNKLAEIHEGTSEYKDAKLHFLKIQYETFSMLPHESVNDMYGRLNVIVNDLKGLGTNYTDLEVAQKMLRALPEKYETLVTMLINSDMSMMTPASLLGKINTNDMYKLKKKEMEEASPSKKCIALQAEVEDKGKGKVNEANEDLEEEIALLARRFNDLLGRRKERGRGSNSNRRRNRRPNKTLSNLRCFECGEKGHFASKCPSKDDDGDKSCKKKSGGYKLMKKLKKEGKKIEAFIGEWDSNEESSASSGSEEEGGDDASSKKKKMAVVAIKEALSLFAPLCLMAKGSSKVTSLSDNESDDDCDDVSYDELVSMFEELHAYSEKEIVKFKALKKDHASLEVLYEELKTSHERLTISHEKLKEAHDNLLSTTQHGALIDVGISCDLLDDSATCHIAHVASSSISISCDDLVDMSSSSSCISICDASLVVENNELKEQVAKLNKSLERCFKGKNTLDKILSEQRCILNKEGLGFIPKKGKKPSNRATRFVKSNGXAHDGSIVARYVGSPILGGELPHRWEPXVLDSGCTQHMTGDRAMFTTFEVGGNEQEKVTFGDNSKGKSIVAELFKKFAKRAQNEFSCTLVKIRSDNGSEFKNTNIEDYCDDLGIKHELSATYSPQQNGVVERKNRTLIEMARTMLDEYGVSDSFGAEAINTACHATNRLYLHILLKKTFYELIVGRKPNVAYFQVFGCKCYIYRKGVRLTKFESRCDEGFLLGYASNSKAYRVYNKNKGIVEETADVQFDETNGSQEGHENLDDVGDEGLMRTMKNMSIGDVKPIEVEDKPSTSTQDEPSTSAMPSQAQVEVEEEKVQDPPMPPRIHTALSKDHPIDQVLGDISKGVQTRSRVASICEHYSFVSCLEPKHVDEALCDPDWMNAMHEELNNFARNKVWTLVERPRDHNVIGTKWVFRNKQDENGLVVRNKARLVAQGFTKVEGLDFGETFAPVARLEAIRILLAFASCFDIKLFQMDVKSAFLNGEIAELVFVEQPPGFEDSKYPNHVYKLSKALYGLKQAPRAWYERLRYFLLSKDFKIGKVDTTLFTKIIDDDFFVCQIYVDDIIFGSTNEVFCKKFGDMMSREFEMSMIGELSFFLGLQIKQLKDGTFVSQTKYIKDLLKRFGLEDAKPIKTPMATNGHLDLDEGGKPVDLKLYRSMIGSLLYLTASRPDIMFSVCTCARFQAAPKECHLVAVKRILRYLKYSSTIGLWYPKGAKFKLAGYSDSDYAGCKVDRKSTSGSCQMLGRSLVSWSSKKQNSVALSTAEAEYVSAAMPPRTRHGRREPMPNPVNENEESSGDEYVQSDDDNMENVEGDEMEVSDDGDDNGSGNGEDDEASDDGSPLDSTIQFVFNLRNAQQYTILRHHDQFRRPNDCNDPRFHTQFQKSVYEQVYANKAFAEHKWISWRHIGETPEFEDLQEMFWTVGIDRIVTMKQSFDEDLIRQFYATVWVSGDCDAMKWMSGTLQCSINRREFKELLHIRFNNGDDLHDEHTHNPFPIDHFSQIYEDGGRHTYGKVAVRATILPRCGNNDDIRGVAWHVIDAILDGRRFDVINLMMKEIAISKGTIGQGIYYAPYIMRLIQSKLGQIGHNLKEHKEYKPRLQLSSPKAPRVRQPTFDQGASSSAAPPPPHGSDPSAFFHPQYAYFGMQPNEFFNPVLGAINTLSESIQRLSTGHEALHEDVRGLRTDVGNLNTSVGRLHTRVGVLDS

SEQ ID NO: 25843 - protein, 1540 aa, Oryza sativa
  unsure (1)..(1540): unsure at all Xaa locations
  Clone ID: TF_OsC1713_3872.pep
MSNEVNHVGKAPMFNGTNYSTWKIKMSTHLKAMSFHIWSIVDVGFAITGTPLTEIDHRNLQLNAQAMNALFNSLSQEEFDRVSNLETAYEIWNKLAKIHEGTSEYKDAKLHFLKIQYETFSMLPHESVNDMYGRLNVIVNDLKGLGANYTDLEVAKKMLRALPEKYETLVTMLINSDMSRMTPASLLGKINTNDMYKLKKKEMEEASPSKKCIALQAEVEDKGKVNDVNKNLEEEIALLARRFNDFLGRRKERGKGSNSNRRRNKRPNKTLSNLRCFECGEKGHFASKCPSKDDDGDKSSKKKSGGYKLMKKLKKEGKKIEAFIGEWDSNEESSASSGSKEEDGDDASSKKKKMAVVAIKEAPSLFAPLCLMAKGSSKVTSLSDSESDDDCDDISYDELVSMFEELHAYSEKEIVKFKALKKDHASLEVLYEELKTSHERLTISHEKLKEAHDNLLSTTQHGALIDVGISCDLLDDXSSSSSCVSICDASLVVENNELKXQVAKLNKSLERCFKGXNYHTGGSHWVLDSGCTQHMTGDRAMFTTFEVGGNEQEKVTFVDNSKRKVIGLGKIAISNDLSIDNVSFVKSLNFNLLSVAQICDLGLSCAFFPQEVIVSSLLDKSCVFKGFRYGNLYFVDFNSSEANLKTCLVAKTSLGWLWHRRLAHVGMNQLSKLSKRDLVVGLKDVKFEKDKLCSACQAGKQVACSHPTKSIMSTSRPLELLHMDLFGPTTYKSIGGNSHCLVIVDDYSRYTWVFFLHDKSIVAELFKKIAKRAQNEFSCTLVKIRSDNGSEFKNTNIEDYCDDLGIKHELSATYSPQQNGVVERKNRTLIEMARTMLDEYGVSDSFWAEAINTACHATNRFYLHRLLKNTSYELIVGRKPNVAYFRVFGCKCYIYRKGVRLTKFESRCDEGFLLGYASNSKAYRVYNKNKGTVEETADVQFDETNGSQEGHENLDDVGDEGLIRAMKNMSFGDVKPIEVEDKPSTSTQDEPSTFATPSQAQVEVEEEKAQDPPIPPRIHTTLSKDHPIDQVLGDISKGVQTLSRVASICEHYSFVSCLEPKHVDEALCDPDWMNAMHEELNNFARNKVWTLVERPRDHNVIGTKWVFRNKQDENGLVVRNKARLVAQGFTQVEGLDFGETFAPVARLEAICILLAFASWFDIKLFQMDVKSAFLNGEIAELVFVEQPPGFEDPKYPNHDFKIGKVDTTLFTKIIGDDFFVCQIYVDDIIFGSTNEVFCKEFGDMMSREFEMSMIGELSFFLGLQIKQLKDGTFVSQTKYIKDLLKRFGLEDAKPIKTPMATNGHLDLDEGGKPVDLKLYRSMIGSLLYLTASRPDIMFSVCMCAWFQAAPKECHLVAVKRILRYLKYSSTIGLWYPKGAKFKLVGYSDSDYAGCKVDRNSTSGSCQMLGRSLVSWSSKKQNSVALSTAEAEYVSAGSCCAQLLWMKQTLLDYGISFTKTPLLCDNDSAIKIANNPVQHSRTKHIDIRHHFLRDHVAKCDIVISHIRTEDQLADIFTKPLDETRFCKLRNELNVIDFSNVA

SEQ ID NO: 25844 - protein, 1376 aa, Oryza sativa
  unsure (1)..(1376): unsure at all Xaa locations
  Clone ID: TF_OsC1713_3951.pep
MRAQVSTRMPSFISSRSNMRHSPCCLMXSVNDMYGRLNVIVNDLKGLGANYTDLEVAQKMLRALPEKYETLVTMLINSDKSRMTPASLLGKINTNDMYKLKKKEMEEASPSKKCIALQAEVEDKGKGKVNEANEDLEEEIALLARRFNDLLGRRKERGRGSNSNRRRNRRPNKTLSNLRCFECGEKGHFASKCPSKDDDGDKSSKKKSGGYKLMKKLKNSASSGSEEEGGDDASSKKKKMAVVAIKEALSLFAPLCLMAKGSSKVTSLSDSESNDNCNDVSYDELVSMFEELHAYSEKKIVKFMALKKDHASLEVLYEELKTSHERLTISPEKLKEAHDNLLSTTQHEALIDVGISCDLLDDSATCHIAHVASSSISTSCDDLVDMSSSRSSSCVSICDVSLVVENNELKEQVAKLNKSLERCFKGKNTLDKILSEQWCILNKEGLGFIPKKGKKPSHCATRFVKSNGRLMMVALLLDMWVPLYSVVNYRTGGSHWVLDSGCTQHXDRAMFTTFEVGGNEQEKVTFGDNSKGKVIGLGKIAISNDLSIDNVSLVKSLNFNLLSVAQICDLGLSCAFFPQEVIVSSLLDKSCVFKGFRYGNLYLVDFNSSEANLKTCLVAKTSLGWLXHRRLAHVGMNQLSKLSKRDLVVGLKDVKFEKYKLCSACQAGKQIACSHPTKSIMSTSRLLELLHMDLFGPTTYKSIGGNSHCLVIVDDYSRYTWVFFLHVKSIVAELFKKFXKRAQNKFNCTLVKIRSDNGSEFKNTNIEDYCDDLGYASNSKVYRVYNKNKGIVEETADVQFDETNGSQEGHENLDDVGDEGLMRAMKNMSIGDVKPIEVEDKPSTSTQDEPSTSAMPSQAXVEVEEEKAQDPPMPLRIHTALSKDHPIDQVLGDISKGVQTRSRVASICELYSFVSCLEPKHVDEAPCDPDWMNAMHEELNNFARNKVWTLVERPRDHNVIGTKWVFRNKQDENGLVVRNKVRLVAQGFTQVEGLDFGETFAPVARLEDIRILLTFASCFDIKLFQIDVKSAFLNDFKIGKVDTTIFTKIIGDDFFVCQIYVDDIIFGSTNEVFCKEFGDMMSREFEMSMIRELSFFLGLQIKQLKDGTFVSQTKYIKDLLKRFSLEDAKPIKTPMATNGHFDLDEGGKPVDLKLYRSMIGSLLYLTASRPDIMFSVCMCARFQAAPKECHLVAVKRILRYLKHSCTIGLWYPKGAKFKLVGYSDSDYAGCKVDRKSTSGSCQMLGRSLVSWSSKKQNSVDLSTAEAEYVSAGSYCAQLLWMKQTLLDYGISFTKTTLLCDNDSAIKIANNPVQHSRTKHIDIRHHFLRHHVAKCDIVISHIRTEDQLADIFTKPLDETHFCKLRNELNVIDFSNVA

SEQ ID NO: 25845 - protein, 1791 aa, Oryza sativa
  unsure (1)..(1791): unsure at all Xaa locations
  Clone ID: TF_OsC1713_4363.pep
ELVWHLIDHLHAGSLLVTLGGCRLLDGLWRSCLVISPRRLWRRPGAGFAITGTPLTEIDHRNLQLNAQXMNALFNSLSQEEFDRVSNLETAYEIWNKLAEIHEGTSEYKNAKLHFLKIXYETFSMLPHESVNDMYGRLNVIVNDLKGLGANYTDFEVAQKMLRALPENYETLFTMLINSDMSRMTPASLLGKINTNDMYKLKKKEMEEASPSKKCIALQAEVEDKGKGKERGRGSNSNRRRNRRPNKTFSNLRCFECGEKGHFASKCPSKDDDGDKSSKKKSGGYKLMKKLKKEGKKIEAFIGEWDSNEESSASSGSEEEGGDDXSSKKKKMAVVAIKEAPHSLLKGSSKVTSLSDSEGDDDCDDVSYDEFVSMFEELQAYNEKEIVKFKALKKDHASLDVLYEELKTSHERLTISHEKLKEAHDNLLSTTQHGAHIDVGISCDLLDDSATCHIAHVASSSIPTSCDDLVDMPSSSSSSCVSICDASLVVENNELKEQVANXDKSLERCFKGRLMMVALLLDMWVPLYSVVNYRTGGSHWVLDSGCTQHMTGDRAMFTTFEVGGNEQEKVTFGDNSKGKVIGLVVKTSLGWLWHRRLAHVSMNQLSKLSKRDLVVGLKDVKFEKDKLCSACQAGKQVACSHPTKSIMSTSRPLELLHMDLFGPTTYKSIGVERKNRTLIEMARTMLDEYGVSDSFWAEAINTACYATNRLYLHHLLKKTSYELIVGRKPNVAYFRVFGCKCYIYRKGVRLTKFASRCDEGFLLGYASNSKAYRVYNKNKGIVEETANVHFDETNGSQEGHENLDDVGDEGLMRAMKNMSIRDVKPIKVEDKPSTFTQDEPSTSATPSQAQVEVEEEKAQDPPMPQRIHTALSKDHPIDQVLGDISKGVQTRSRVASICEYYSFVSCLEPKHVDEALCDSDWINAMHEELNNFARNKVWTLVKRPRDHNVIGRKWVFRNKQDENGLVVXNNARLVAQGFTQVEGLDFGETFAPVARLEAIRILLAFASCFDIKLFQMDVKSAFLNGEIAELVFVEQPPGFEDPKNPNHVYKLSKALYGLKQAPRAWYERLKDFLLSKDFKIGKVDTTLFTKIIGDDFFVCQIYVDDIIFGFTNEVFCKXFGDLMSRGFEMSMIGELSFFLGLQIKQLKDGTFVSQTKYIKDLLKRFGLEDAKPIKTPMATNGHLDLDEGGKPVDLKLYRSMIGSLLYLTASRPDIMFSVCMCARFQAAPKECHLVAVKRILRYLKHFSTIGLWYPKGAKFKLVGYSDSDYAGCKVDRKSTSVSCQMLGISLVSWSSKKQNSVXPLYRRGGICFGGNXILSFGQNEIYPQNEIEKEFEKIFKTKLGAWQSDRRYMRGLTGQVRRSDRPHRAGLTGRGGPMMPPRTRHGCRAPTLDPMSEPEESSGEDYAQSDEEVEANVEGASEEASGDDVSGSGEDEDEQSDEMNIDPSIQFVVNMRNPSQYTILRHHDQFLRPRDTPDPHFHTAFQKMWVAGDXSEMKWMSDTLQCSISRRQFRQLLNIRLDFGDDLHEEHTHNPLSIDYLSQFYEDGVRYTHGKVAGLRTIPSVVKRIMRATILPRLGNNDDIRGVAWHVIDAIIQGRQFDIVSLMMPEIAIFKRTFTQGIYYAPYIMRLIQXKLGAAGQNLKKHKQYKPRLQPRAPRAPRTVPSSHPGASSSPAPPPPHGYDPNXFFHPHYAYFGMQPNEYFNPVLGAINTLSESIQRLSTRHEALHEDVRGLRTDVGDLNASMGRLHTRVGALDSRVQMLESTQAFVYHRRRDTPNPSSLALPPSPPQ

SEQ ID NO: 25846 - protein, 1614 aa, Oryza sativa
  unsure (1)..(1614): unsure at all Xaa locations
  Clone ID: TF_OsC1713_4366.pep
MSNEVNHVGKAPMFNGTNYSTWKIKMSTHLKAMSFHIWSIVDVGFAITDTPLTEIDHRNLQLNAQAMNALFNSLSQEEFNRVSNLETAYEIWNKLAEIHEGTSEYKDTKLHFLKIQYETFSMLPHESVNDMYGRLNVIVNDLKGLGANYTDLEVAQKMLRALPEKYETLVTMLINCDMSRMTPASLLGKINTNDMYKLKKKEMEEASPSKKCIALQAEVEDKSKSKVNEVNEDLEEEMVLLARKFNDLLGRRMERGRDSNSNRRRNRRPNKTLSNLRCFECGEKGHFASKCPSKDDDGDKSSKKKSGGYKLMKKLKKEGKKIEAFIGEWDSNEESSTSSGSEEEGGDDASSKKKKMAVVAIKEAPSLFAPLCLMAKXSSKVTSLSDSESDDDCDDVSYDELVSIFEELHAYSEKEIVKFKALKKDHASLEVLYEELKTSHERLTISHEKLNSSSSSCISICDASLVVENNELKEQVAKLNKSLERCFKGKNTLDKILSEQRCILNKEGLGFIPNKGKKPSHRATRFVKSNGKYCSKCREVGHLVNYRTDGSHWVLDSGCTQHMTGDRAMFTTFEVGGKEQEKVTFGDNSKGKVIGLVAKTSLGWLWHRRLAHVGMNQLSKLSKRDLVVVLKDVKFEKDKLCSACQAGKQVACSHPTKSIISTSRPLELLHMILFGPPTYKSIGGNSHWLVIVDDYSRYTWEFFLHDKSIVAELFKKFAKRAQNEFSCTLVKIRSDNGSEFKNTNIEDYCDDLGIKHELSATYSPQQNGVVERKNRTLIEMARTMLNEYGYASNSKAYRVYNKNKGIVXETADVQFDETNGSXEGHENLDDVGDEGLMRAMKNMSIGDVKPIEVEDKPSTSTQDEPSTSATPSQAQVEVEEEKAQDPPMPPRIHTALSKDHPIDQVLGDISKGVQTRSRVASICEHYLFVSCLEPKHVDEALCDPDWMNAMHEELNNFARNKVWTLVDRPRDHNVIGTKWVFRIKQDENGLVVRNKARLVAQGFTQXEGLDFGETFAPVARLEAIRILLTFASCFDIKLFQMDVKSAFLNGEIAELVFVXQPPGFEDPKNPNHVYKLSKVLYGLKQAPRAWYERLRDFLLSKDFKIGKVDTTLFTKIIGDDFFLCQIYVDDIIFGSTNEVFCKEFGDMMFREFEMSMIGELSFFLGLQIKQLKNGTFVSQTKYIKDLLKRFGLEDAKPIKTPMATNGHLDLDEGGKPVDLKLYRSMIGSLLYLTASRPDIMFSVCMCAWFQAAPKECHLVAVKRILRYLKHSSTIGLWYPKGEARGVLRFAPIEGSFLXCLPALAMIVVHPLRIPXVSLRNRAEMSTLKGDSEEESGDDVSRSGEDEDEGSDDXMHIDPSIQFVVNMRNPSQYTILRHHDQFLRPRDTPDPRFHTAFQKSVYEQVYAGKAFAEHKGISWRDINXPEFEGLQDLFKTVSIDRIVTLKQDYNEDLIRQFYATFYEDGVRYTHGKVAGLRTIPSVVNRIVRATILPRLGNNDDIMGADWHVIDAIIQGRQFDIVSLMMQEIAISKGTFTXGIYYAPYIMRLIQDKLGAAGQNLKKHKQYKPRLXLGAPRAPRAAPSSHPGASSSSAPPPPPGYYPNAFILPLHLFTGS

SEQ ID NO: 25847 - protein, 1140 aa, Oryza sativa
  unsure (1)..(1140): unsure at all Xaa locations
  Clone ID: TF_OsC1713_4557.pep
MSNEVNHVGKAPMFNGTNYSTWKIKMSTHLKAMRFHIWSIVDVGFAITGTPLTEIDHRNLQLNVQAINDLFNSLSQEEFDRVSNLETAYEIWNKLAEIHEGTSEYKDAKLHFLKIQYETFSMLPHESVNDMYGRLNVIVNDLKGLGANYTDLEVAQKMLRALPEKYETLVTMLINSDMSRMTPASLLGKINTNDMYKLKKKEMEEASPSKKCIALQAEVEDKGKGKVNEANENLEEEIALLARRFNDLLGRRKERGRGCNSNRRRNRRPNKTLSNLRCFECGEKGHFASKCPSKDDDGDKSSKKKSGGYKLMKKLKKEGKKIEAFIGEWDSNEESSASSGSEEEDGDDASSKKMTVVAIKEAPSLFAPLCLMAKGSSKVTSLSDSESDDDCDDVSYDELVSMFEELHAYSEKEIVKFKALKKDHASLEVLYEELKTYHARLTISHEKLKEAHDNLLSTTQHGALIDVGISCDLLDDSATCYIAHVASSSISTSCDDLVDMSSSSSSSCVSICDASLVVENNELKEQVAKLNKSLERCFKGKNTLDKILSEQRCILNKEGLGFIPKKGKKPSHRATRFVKSNGXAHDGSIVARYVGSLILGGELPHRWEPXVLDSGCTQHMTGDRAMFTTFEVGGNEQEKVTFGDNSKGKSIVAELFKKFAKRAKNEFSCTLVKIRSDNGSEFKNTNIEDYCDDLGIKHELSATYSSQQNGVVERKNRTLIEMARTMLDEYGVSDSFWAEAINTACHATNILYLHPLLKKTSYELIVGRKPNVAYFRVFGCKCYIYQKGVRLTKFKSQCDEGFLLGYASNSKTYRVYNKNKGIVEETAVVQFDETNGSQEGHENLDDVGDEGLMRAMKNMSIGDVKPIEVEDKPSTSTQDEPSTSATPSQAQVEVEEEKAQDPPMPPRIHTALSKDHPIDQVLGDISKGVQTRSRVVSICEHYSFVSCLEPKHVDEALCDPEWMKAMHEELNNFARNKVWTLVERPRDHNVIGTKWVFRNKQDENGLVVRNKARLVAQGFTQVEGLDFGETFAPVARLEAVLILLAFASCFDIKLFQMDVKSTFLNGEIAELVFVEQPPDFEDPKNPNHVYKLSKALYGLKQAPRDWYVSVIWDREYHDQRLEADAIAHVAWHLRGRRARG

SEQ ID NO: 25848 - protein, 1865 aa, Oryza sativa
  unsure (1)..(1865): unsure at all Xaa locations
  Clone ID: TF_OsC1713_4827.pep
DLSLITETKLRHLNLHPPLNSLASEADVVATAADGGRCGVGSTAVGGGGRIRLSRRWERRGWWEWTARQLVWHXDHLHAGSSLVTLGGCRLLDGLWRSCPVTSPRRLWRRPGAGFAITGKPLTEIDHRNLQLNAQAMNALFNSLSQEEFDRVSNLETAYEIWNKLAEIHEGTSEYKDAKLHFLKIQYETFSMLPHESVNDMYGRLNVIVNDLKGLGANYTDLEIAQKMLRALPEKYETLVTMLINSDMSRMTPASLLGKINTNDMYKLKKKEMEEASPSKKCIALQTEVEDKGKGKERGRGSNSNRRRNRRPNKTLSNLRCFECGEKGHFASKCPSKDDDGDKSSKKKSGGYKLMKKLKKEGKKIEAFIGEWDSNKESSASSGSEEEGGDDASSKKKKMAVVAIKEAPSLFAPLCLMAKGSSKVTSLSDSESDDDCDDVSYDEFVSMFEELHAYSEKEIVKFKALKKNHASLKVLYEELKTSHERLTISHEKLKETHDNLLSTTQHGAHIDIGISCDLLNDSATCHIAHVASSSISTSCDDLVDMPSSSSSSCVSICDVSLVVENNELKEQVAKLNKSLERCFKGRLMIVVLLLDMWVPLYLVVNYHTDGSHWVLDSGCTQHMTGNRAMFTTFEVGGKEQEKVTFGGNSKGKVIGLVAKTSLGWLWHMRLAHVGMNQLSKLSKRDLVVGLKDVKFEKDKLCSACQAGKQVACSHPTKSIMSTSRPLELLHXMDLFGPTTYKSIGVERKNRTLIEMAMTMLDEYGVSDSFWAEAINTACYATNRLYLHRLLKKTSYVLIVGRKPNVAYFRVFGCKCYIYRKGVRLTKFESRCCDEGFLLGYASNSKAYQVYNKNKGIVEETADVQFDETNGSQEGHENLDDVDDEGLMRDMKNMSIGDVKPIEVEDKPSTSTQDEPSTSASPSQAXIEVEEEKAQDPPMPPRIHTALSKDHPIDQVLGDISKGVQTRSRVASICEHYSFVSCLEPKHVDEALCDPDWMNAMHEXLNNFARNKVWTLIERPRDHNAIGTKWVFRNNQDENRLVVRNKARLVTQGFTQVEGLDFGETFAPVARLEAIRILLGFASCFDIKLFQMDVKSAFLNGEIAELVFVEQPPGFEDPKNSNHVCKLSKGLYGLKQAPRAWYERLRDFLLSKDFKIGKVDTTLFTKIIGDDFFVCQIYVDDIIFGSTNEVFCKEFGDMMSREFEMSMIGELSFFLRLQIKQLKDGTFLSQTKYIKDLLKRFGLEDAKPIKTPMVTNGHLDLDEGGKPVDLKLYHSMIGSLLYLTASRPDIMFSVCMCARFQVAPKECHLVAVKRILRYLKHSSIIGLWYPKGAKFKLVGYSDSDYAGCKVDRKSTSGSCQMLGRSLVSWSSKKQNSVXPLYCRSGICFSGNXILSFGQNEIYPQNKIEKEFEKSFKTKLRWSDRVPAAGLTALGRRSDRHMDGGLTGCWPSAMPPRTRRGRREPTLDPVSENEESNGDEYVQSDDEVMENIEGDEVEVSGDNGSGDGEDDEASDDGSPLDPTIQFVLNLRNAXQYTILRHHDQFRRPNDCNDLRFHTRYQKSVVSGDCDAMKWMSGTLRCSINCRAFKELLHIHFNNRDDLHDEQNHNPFPIDHFSQFYEEGRRHTYGKVVSLRAIPSLINRIVRATILPRCGNNDDICGVAWHVIEAIMDGRRFGVINLMMKEIAISKGTIGQGVYYAPYIMRLIQSKLRQIGNNLKEHKDYKPHLQLSTPRAPRVRQPTFDQGASSSXSPPPPHGYDPSAFFHPQYAYFGMQPNEYFNPVLGAINTLSESIQRLSTGHXALHEDVHGLRTDVGDLNASVGRLHTRVGVLDSXVQMLESTQAFVYHRRRDAPHPSSLARPPSPPQ

SEQ ID NO: 25849 - protein, 1473 aa, Oryza sativa
  unsure (1)..(1473): unsure at all Xaa locations
  Clone ID: TF_OsC1713_4833.pep
HKHIHWVRPDQGRSDRPHSGGLTGVPCPVTSPRRLWRRPGAGFAITGTPLMEIDHRNLQLNAQAMNALFNSLSQEEFDRVSNLETAYEIWNKLAEIHEGTSEYKDAKLHFLKIQYETFSMLPHESVNDMYGRLNVIVNDLKGLGANYTDLEVAQKMLRALPEKYETLVTMLINSDMSRMTPASLLGKINTNDMYKLKKKEMEEASPSKKFNDFLGRRKERGKGSNSNRRRNRRPNKTLSNLRCFECGEKGHFASKCPSKDDDGDKSSKKKSGGYKLMKKLKKEGKKIEAFIEEWDSNEESSPHPGSSKVTSLSDSESDDDCDDVSYDELVSMFEELHAYSEKEIVKFKALKKDHASLEVLYEELKTSHERLTISHEKLKEAHDNLLSTTQHGALIDVGISCDLLDDSATFHIAYVASSSISTSCDDLVDMSSSSSSSCVSICDASLVVENNELKEQVAKLNKRLERCFKGKNTLDKILSEQRCILNKEGLGFIPKKGKKPSHRATRFVKSNGRLMMVALFLDMWVPLYSVVNYHTGGSHWVLDSGCTQHMTGDRAMFTTFEVGRNEQEKVTFGDNSKGKVIGLGKIAISNDLSIDNVSLVKSLNFNLLSVAQICDLSLSCAFFPQEVIVSSLLDKSCVFKGFRYGNLYLVDFNSSEANLKTCLVAKTSLGWLWHRRLAHVGMNQLSKFSKRDLVMGLKDVKFEKDKLCSACQAGKQVACSHPTKSIMSTSKPLELLHMDLFDPTTYKSIGGNSHCLVIVDDYSRYTWVFFLHDKSIVADLFKKFAKRAQNEFSCTLVKIRSNIGSEFKNTNIEDYCDDLGIKHELFATYSPQQNGVVERKNRTLIEMARTMLDEYGVSDSFWAEAINTACHATNRLYLHRVLKKTSYEVIVGRKPNIAYFRVFGCKCYIHRKGVRLTKFESRCDEGFLLGYASKSKAYRVYNKNKGIVEETADVQFDETNGSQEGHENLDDVGDEGLMRVMKNMSIGDVKPIEVEDKPSTSTQDEPSTSAMPSQAQVEVEEEKAQEPPMPPRIHTALSKDHPIDQVLGDISKGVQTRSRVTSICEHYSFVSCLERKHVDEALCDPDWMNAMHEELKNFARNKVWTLVERPRDHNVIGTKWVFRNKQDENGLVVRNKARLVAQGFTQVEGLDFGETFAPVARLEAICILLAFASCFDIKLFQMDVKSAFLNDTKYPNHVYKLSKALYGLRQAPRAWYERLRDFLLSKDFKIGKVDITLFTKIIGDDFFVYQIYVDDIIFGSTNEVFCKEFGDMMSREFEMSMIGELSFFLGLQIKQLKNGTFVSQTKYIKDLLKRFGLEDAKPIKTPMATNGHLDLDEGGKPVDLKLYRSMIGSLLYLTVSRPDIMFSVCMCARFQAAPKECHLVAVKRILRYLKHSSTIGLWYPKGAKFKLVGYSDPDYAGCKVDRKSTSSSCQMLGRSLVSWSSKKQNSVALLXAETEYVSAGSCCAQLLWM

SEQ ID NO: 25850 - protein, 523 aa, Oryza sativa
  unsure (1)..(523): unsure at all Xaa locations
  Clone ID: TF_OsC1713_5136.pep
WRPAPWRPGWCCSGWPIQSRRSGIRSCPVTSPRRLWRRPGAGFAITGTLLMEIDHRNLQLNAQAMNALFNSLSQEEFDRVSNLETAYEIWNKLAEIHEGISEYKDAKLHFLKIQYETFSMLPHESVNDMYGRLNVIVNDLKGLGANYTDLEVAQKMLRALPEKYETLVTMLINSDMSRMTPASLLGKINTNDMYKLKKKEMEEVSHSKKCIVLQAEVKDKGKGKERGRDSNSNRRRNRRPNKTLPNLRCFECGEKGHFASKCPSKDDDGDKSSKKKSGGYKLMKKLKKEGKNIEAFIGEWDSNEESSASSGSEEEGGDDASSKKKKMAVVAIKEAPSLFAPLCLMAKDSSKVAFLSDSESDDDCDDVSYDELVSMFKELYAYSEKEIVKFKARKKDHASLEVLYEELKTSHERLTISHEKLKEAHDNLLSTTQHGVLIDVGISCDLLDDSAICHIAHVVSSSISTSCDDLVDMPSSSSSTCVSICDASLVVENNELKEQVVKLNXSLEMCFKGKDTLDKILSE

SEQ ID NO: 25851 - protein, 885 aa, Oryza sativa
  Clone ID: TF_OsC1713_5267.pep
MELGSPQQGVGNQRVSEPRLCYLTGTPLTEIDHSNLLLNAQVMNALFNSLSQEEFDRVSNLKIAYEIWNKLAEIHEGTSEYKDAKLHFLKIQYETFSMLPHESVNDMYGRLNVIVNDLKGLGATYTDLEVAQKMLSALPEKYETLIAMLINSDMSRMTPASLLGKINTNDMYKLKKKEMEEASPSKKCIALQAEVEDKWKSKVNEANDDLEEEIALLAKRFNDLLGRRKERGRGSNSNRRRNIIPNKTLSNLRCFECGEKGHFASKCPSKANDGDKSSKKKSGGYKLMKKLKKEGKKIEAFIGQWDSNEESSTSSGSEEEGDDDASSKKKNMAVVAIKEAPSLFAPLCLMAKGSSKVTSLSDSESDDDCDDVSYGELVSMFEELHAYSEKEIVKFKALKKDHASLEVLYEELKTSHERLTISHEKLKEAHDNLLSTTQHGAHIDAGISCDLLDDSAICHNNELKEQVAKLNKSLEICFKGKNTLDKILSEQRAAATCSTPPSSPAELHPRRAAASVVAAGRRHRRKVRRGVEKPGRSLPAVAGHRSPVATADRSRAANRPRRRPSSFVVWFEGEYRWVRLVVLYVFMSSKVAADHPISGEVAILVNYRTGGSHWVLDSGCTQHMTGDRAMFTTFEEGGKEQEKVTFGDNSKGKASSPSSPPGPPLGPTRAAPSRPCRARARACAVCRALTAPRVGPTARSSSSSSPEARRSGLLVGVQYLPLLLCFAGTPSPVPASILVVADVPSAAPFILAGSSSRGAASVVGFAAARSTSSPSPCSCRRLPSSSPRRPQSSSSSSSSRRPHRRGVRPSVEPFSSVVRVRQVGRCSPVVVFVLGSASSSLVPAASRLRPRIAAEAVPSPFVSVVPVCLRRARSSLSFPRLVAWW

SEQ ID NO: 25852 - protein, 1731 aa, Oryza sativa
  unsure (1)..(1731): unsure at all Xaa locations
  Clone ID: TF_OsC359_7758.pep
IPTFPESPNLQENILRNFKASKATPGLEXYIPGLEIELCSRXGCSEWLGLCNRIRRSPGQAAYGVESFVQELRTMSFLIGFETAPLYAQIPHDRDEEKCRVKVTLNSNREDIPSVMFEAGEGSYNHACXEVARIAIGELRESYNDRLADTEYRYHPRQPQGSDRGSYLEPAGIENDATTRHLVEMLWAMDETRAKIVIAAQDREDRNRGKICKLEDKVDRLEKELAALKGEAPPQKARVRLTARKRALFVPRYQLAPKMVLTRSNGNGPNPNNNNNNAENPTLAQVLAQQAQLMNLMMQQLQNQQNQGNNHAPPPNKLAEFLRVRPPTFSSTTNPVEAGDCLHAIEKKLDLLQCTDQEKVSFASHQLHGPASEWWDHFRLNRTTAEPISWLEFTAAFRKTHIPSGVVSLKKKEFRALIQGSRSVTEYLHEFNRLARCAPEDVRTDEERQEKFFEGLNDELSYPLMTGDYHDFQKLVDKAIRQEDKYNCMEQKKRRIAHFKAQQGNSQRQRLAMGPQSMLEGGSXSVVRPQRQFFNNNAGNNNRNQAPRPVAALTXNQLAKREQGSKPGVCFNCGDLGHYADKCPKPRRAKVVPAQNNSSAPATKARVNHVAAAEAQGAPDVILGTFPVNSVPTTVLFDSGATHSFLSLSFAGNHGMEVEDLRRPLMVSTPSNQALSSQRSPSVRTEIQGVPFLANLILLESKDLDVILGMDWLARYKGVIDCANRKVTLTSNDGQVVTVHALPSELLRSSLNQITLEEIPIVREYPDVFPDDLPGMPPKRDIEFRIDLVPGTTPIHKRPYRMAANELAEVKRQVDDLLQKGYIRPSSSPWGAPVIFVEKKDHTQRMCVDYRALNDVTIKNKYPLPRIDDLFDQLKGATVFSKIDLRSGYHQLRIKEEDIPKTAFTTKYGLFECTVMSFGLTNAPAFFMNLMNKVFIEYLDKFVVVFIDDILIYSRTNEEHEEHLRLALEKLREHQLYAKFSKCEFWLSEVKFLGHIISAGGVAVDPSNVESVTNWKQPKTVSEIRSFLGLAGYYRRFIENFSKIAKPMTRLLQKDVKYKWSEECEQSFQELKSRLISAPILILHDPKKGFQVYCDASKLGLGCVLMQDGKVVAYASRXLRPHEKNYPTHDLELAAVVHALKIWRHYLFGTRTEVYTDHKSLKYIFIXSDLNMRQQRWLELIKDYDMGIHYHPGKANVVADALSRKGYCNATEGRQLPLKLCKEFERLNLEIVSRGFVAALEAKPTLIDQVREAQINDPDIHEIKKNMRRGKAIGFLEDEQGTVWLGERICVPDNKDLKDAILKEAHDTLYSIHPGSTKMYQDLKERFWWASMKREIAEYVAVCDVCXXVEAEHQKPVGLLQPLKIPEWKWEEIGMDFITGLPRTSSGHHSIWVIVDKLTKMAHFILVRTTYSGSRLAELYMARIVCLHGVPKKIVSDRSSQFTSKFWKKLXEEMGSKLNFSTAYHPQTDGQTERVNQILEDMLRACALDFGGCWDKNLLYAEFSYNNSYQASLQMAPYEALYGRKCRTPLLWDQMGERQVFGTDILREAEEKVKIIQERLRVAHSRHKSYANNRRRDLSFEEGDHVYLRVTPLQGVHRFHTKGKLAPRFVGPYKIVSRRGEVAYQLELPQSLAGVHNVFHVSQLKKCLRVPTEEANLEQIVVQEDLTYIEKPIRILETDERRTKNRVIRFYKVQWSNHSEEESTWEREDELKSAHPHLFASSSKSRGRDSV

SEQ ID NO: 25853 - protein, 1421 aa, Oryza sativa; identical to SEQ ID NO: 18923
  Clone ID: TF_OsC1713_4406.pep

SEQ ID NO: 25854 - protein, 1400 aa, Oryza sativa
  Clone ID: TF_OsC1713_4477.pep
MASRRRATTSNDETQTPDLNTLAGIMATQTQLLQAIASNQGNRGGSSFGEFMRTKPPTFATAEEPMDAEDWLRIIEKKLTLVRVREADKVIFAANQLEGPAGDWWDTYKEAREEDAGEPNWEEFTTAFRDNFVPAAVMRMKKNEFRRLRQGNTTVQEYLNRFTQLARYATRDLADEEEKIDKFIEGLNDELRGPMIGQDHDSFQSLINKVVRLENDRKVVEHNRKRRLAMNRPPQTAPQRPKGTTPSAWRPTVVTTSRPAASSNFHRPVTIQNRAPTPNQAATGSVRPGSCFNCGEYGHFANKCPHPNKTPIRTGANATAIHGTATPAAGRGLFRTPQTNRTATGFGRGVKLRQPMLIHSPGGEIAVDTACIDVPIRLRDVVFPSNLMVLIPQTLDVILGMDWLAKHRGVIDCRRREVTLTTPWGSDMRATMDQDPRLTERAGGIFTMLPLKGMPVVQRFPDVFPEDLPGMPPDRDIEFIIDLIPGTAPISKRPYRMPVNELEELKKQIRELQEKGFVRPSSSPWGAPVLFVKKKDGSMRMCVDYRSLNEVTIKNKYPLPRIDDLFDQLKGAKVFSKIDLRSGYHQLKIRTEDIPKTAFSTRYGLYEFTVMSFGLTNAPAYFMNLMSKVFMDYLDKFVVVFIDDILIYSKDEEEHAEHLRLVLQKLRKHKLYAKFSKCEFWLKEVAFLGHVISAGGVAVDPAKVEAVTEWKASKSVTEIQSFLGLAGYYRRFIEGFSKIARPMTQLFKKEKKFVWSEQCQESFEQLKEKLTSAPILVLPDIRKDFVIYCDASRQGLGGVLMQDGKVVAYASRQLRPHEENYPTHDLELAAVVHALKIWRHYLIGNHCDIYTDHKSLKYIFTQSDLNLRQRRWLELIKDYDLEVHYHPGKANVVADALSRKSHCNHLRMEGMVPELREEIAQLNLYIVPHGQINTLDIQPLLRTQIEEAQKDNEEVREVKERLAAGRAKEFSTDEKDVLWYKKRIYVPKQGGLRGLILKEAHESAYSLHPGSTKMYQDLKEGYWWPNMKRDVAEYVALCDVCQKVKAEHQRPAGLLQPLRIPEWKWDEIGMDFIVGLPKTATGYDSIWVIVDRLTKTARFIPVKTNYSSAKLAELYMTRIVCLHGIPKRIISDRGTQFTSHFWEKVHEALGSYLAFSTAYHPQTDGQTERTNQVLEDMLRACALDFSKDWERCLPYAEFSYNNSFQASLKMSPTEALFGRRCRTPLMWSETGERAVFGPDIIQEAEEKVRLIRDRLKVAQSRQKSYADTRRRNLEFKEGDYVYLKVSPMRGTKRFKVKGKLAPRYVGPFQITARRGEVAYQLQLPENIADVHPIFHVSQLKKCLRVPEEQAPLEEIHISNDLTYPEHPIRILDEAEKRTRSKVWRMYKVQWSNHTEVFISL

SEQ ID NO: 25855 - protein, 1470 aa, Oryza sativa; identical to SEQ ID NO: 18925
  Clone ID: TF_OsC1713_4736.pep

SEQ ID NO: 25856 - protein, 1454 aa, Oryza sativa
  Clone ID: TF_OsC1713_4922.pep
MASRRRATTSNDETQTPDLATLAGVMATQTQLLQAIANNQGNRGGPSFGEFMRTKPPTFATAEEPMDAEDWLRIIEKKLTLIRVREADKVIFAANQLEGPAGDWWDTYKESREEDAGEPNWEEFTTAFRDNFVPAAVMRMKKNEFRRLRQGNTTVQEYLNHFTQLARYATRDLANEEEKIDKFIEGLNDELRGPMIGQDHDSFQSLINKVVRLENDRKVVEHNRKRRLAMNRPPQTAPQRPKGTTSSAWRPTVVTTSRPAASSNFHRPVTIQNRAPAPNQAATGSVRPGSCFNCGEYGHFANKCPHPNKTPIRTGANATAIHGTATPAAGRGLFRTPQTNRTATEFGRGQVNHVRAEEAQEDQGVLMGASHSFISLKASQQHNLIRVKLRQPMLVHSPGGEIAVDTACIDVPIRLRDVVFPSNLMVLIPQTLDVILGMDWLAKHRGIIDCRRREVTLTTPWGSDMRATMDQDPRLTERAGGIFTMLPLKGMPVVQRFPDVFPEDLPGMPPDRDTEFIIDLIPGTAPISKRPYRMPVNELDELKKQIRELQEKGFVRPSSSPWGAPVLFVKKKDGSMRMCVDYRSLNEVTIKNKYPLPRIDDLFDQLKGAKVFSKIDHRSGYHQLKIRTGDIPKTAFSTRYGLYEFTVMSFGLTNAPAYFMNLMNKVFMDYLDKFVVVFIDDILIYSKDEEEHAEHLRLVLEKLRKHKLYAKFSKCEFWLKEVAFLGHVISAGGVAVDPAKVEAVTEWKAPKSVTEIRSFLGLAGYYRRFIEGFSKIARPMTQLLKKEKKFVWSEQCQESFEQLKEKLTSAPILVLPDIRKDFVIYCDASRQGLGGVLMQDGKVVAYASRQLQPHEENYPTRDLELAAVVHALKIWRHYLIGNHCDIYTDHKSLKYIFTQSDLNLRQRRWLELIKDYDLEVHYHPGKANVVADALSRKSHCNHLRMEGMIPELREEIAQLNLHIVPRGQINTLDIQPLLRTQIEEAQKDNEEVREVKERLATGRAKEFSTDEKDVLWYKKRIYVPEQGGLRGLILKEAHESAYSLHPGSTKMYQDLKEGYWWPNMKRDVAEYIALCDVCQKVKAEHQRPVGLLQPLRIPEWKWDEIGMDFIVGLPKTATGYDSIWVIVDRLTKTARFIPVKTNYSSAKLAELYMTRIVCLHGVPKKITSDRGTQFTSHFWEKVHEALGSYLAFSTAYHPQTDGQTERTNQVLEEMLRACALDFSKDWERCLPYAEFSYNNSFQASLKMSPNEALFGRRCRTPLMWSETGERAVFEPDIIKEAEEKVRLIRDRLKVAQSRQKSYADTRRRNLEFKEGDYVYLKVSLMRGTKRFKVKGKLAPRYVGPFQITARRGEVAYQLQLPENIADVHPVFHVSQLKKCLRVPEEQAPLEEIHISNDLTYPEHLVRILDEAEKRTRNKVWRMYKVQWSNHTEDEATWESKEFLRTEYPHLFENW

SEQ ID NO: 25857 - protein, 1304 aa, Oryza sativa
  unsure (1)..(1304): unsure at all Xaa locations
  Clone ID: TF_OsC1713_4988.pep
MEAEDWLCIIEKKLTLVRMREADKVIFTVNQLEGPAGDWWDTYKEAREEDAGEPTWDEFTAAFHENFVPAAVMRMKKNEFRRPRQGNTTVQEYLNRFTQLTRYAIGDLADEEEKIDKFIEGLNDELRGPMIGQDHESFQSLINKVVRLENDRKVVEHNRKRRLAMNRPPQVATQHPKGAASSGWKPTVVTTNRPTAHSNFHRPVTTQNRAPAPNQAATGVMRPGSCFNCGEYGHFANKCPHLNKTPIRTGANAMAIHGAATPAGGRGVRKPMIVHSPGGETLDVILGMDWLAKHRGVIDCRRREVTLTTPWGSDMRATMDQDPRLTERAGGIFTMLPLKGMPVVQLFPDVFPEDLPGMPPDRDIEFIIDLIPGTAPISKRPYRMLVNELEEHKKQIRELQEKGFVRPSSSPWGAPVLFVKKKDGSMRMCVDYRSLNEVTIKNKYPLPRIDDLFDQLKGAKVFSKIDLRLGYHQLKIRTGDIPKTAFSTRYGLYEFTVMSFGLTNAPAYFMNLMNKVFMDYLEKFVVVFIDDILIYSKDEEEHAEHLRLVLQKLRKHKLYKKFSKCEFWLKEVAFLGHVISAGGVAVDPAKVEAVTEWKAPKSVTEIRSFLGLAGYYRRFIEGFSKIARPMTQLLKKEKKFVWSEQCQESFEQLKEKLTSAPILVLPDIRKDFVIYCDASRQGLGGVLMQDGKVVAYASRQLRPHEENYPTHDLELAAVVHALKIWRHYLIGNHCDIYTDHKSLKYIFTQSDLNLRQRRWLELIKDYDLEVHYHPGKANVVADALSRKSHYNHLRMEGMVPELREEIAQLNLHIVPHGRINTLDIQPLLRTQIEEAQKXNEEVREVKERLAAGRAKEFSTDGKDVLWYKKRIYVPEQGGLRGLILKEAHESAYSLHPGSTKMYQDLKEGYWWPNMKRDVAEYVALCDVCQKVKAEHQRPAGLLQPLRIPEWKWDEIGMDFIVGLPKTATGYDSIWVIVDRLNKTARFIPVKTNYSSAKLAELYMTRIVCLHGIPKKIISDRGTQFTSHFWEKVHEALGSYLAFSTAYHPQTDGQTERTNQVLEDMLRACALDFSKDWERCLPYAEFSYNNSFQASLKISPNEALFGRXCRTPLMWSETGERAVFGPDIIQEAEEKVRLIRDRLKVAQSRQKSYADTRRRNLEFKEGDYVYLKVSPMRGTKRFKVKGKLAPRYVGPFQIIARRGEVAYQLQLPEYIADVHPVFHVSQLKKCLRVPEEQAPLEEIHISNDLTYPEHPIRILDEADXRTRSKVWRMYKVQWSNHTEDEATWEGEEFLRTEYPHLFGNW

SEQ ID NO: 25858 - protein, 1430 aa, Oryza sativa
  unsure (1)..(1430): unsure at all Xaa locations
  Clone ID: TF_OsC1713_5164.pep
MASRRRATTSNDETQTPDLTTLAGVMTTQTQLLQAIANNQGNRGGSSFGEFMRTKPPTFATAEEPMDAEDWLRIIEKKLTLVQVREADKVIFAANQLEGPTGDWWDTYKEAREEDAGEPNWEEFTTAFRDNFVPAAVMRMKKNEFRRLRQGNTTVQEYLNRFTQLARYATRDLADEEEKIDKFIEGLNDELRGPMIGQDHDSFQSLINKVVRLENDRKVVEHNRKRRLAMNRSPQTAPQRPKGTTPSAWRPTVVTTSRPAASSNFHKPVTIQNRAPAPNQAATGSVRPGSCFNCGEYGHFANKCPHPNKTPIRTGANATANHGTATPAAGRGLFRTPQTNRTATGFGRGQVKHVRAEEAQEDQGVLMGMFSLNSTPVKVLFDSGASHSFISLKASQQHNLIRVKLRQPMLVHSPGGEIAVDTACIDVPIRLRDVVFPSNLMVLIPQTLDVILGMDWLAKHRGVIDCRRREVTLTTPWGSDMRATMDQDPRLTEHAGGIFTMLPLKGMPVVQRFPDVFPEDLPGMPPDRDIEFIIDLIPGTAPISKRPYRMPVNELEEIKKQIRELQEKGFVRPSSSPWGAPVLFVKKKDGSMRMCVDYRSLNEVTIKNKYPLPRIDDLFDQLKGAKVFSKIDLRSGYHQLKIRTEDIPKTAFSTRYGLYEFTVMSFGLTNAPAYFMNLMNKVFMDYLDKFVVVFIDDILIYSKDEEEHTEHLRLVLQRLRKHKLYAKFSKCEFWLKEVAFLGHVISAGGVAVDPAKVEAVTEWKAPKSVTEIRSFLGLAGYYRRFIEGFSKIARPMTQLLKKEKKFVWSEQCQESFEQLKEKLTSAPILVLPDIRKDFVIYCDASRQGLGGIWRHYLIGNHCDIYTDHKSLKYIFTQSDLNLRQRRWLELIKDYDLEVHYHPGKANVVADALSRKSHCNHLRMEGMVPELREEIAQLNLHIVPHGQINTLDIQPLLRTQIEEAQKDNEEIREVKERLAAGRAKEFSTDEKDVLWYKKRIYVPEQGGLRGLILKEAHESAYSLHPGSTKMYQDLKEGYWWPNMKRDVAEYVALCDVCQKVKAEHQRPAGLLQPLRIPEWKWDEIGMDFIVGLPKIATGYDSIWVIVDRLTKTARFIPVKTNYSSAKLAELYMTRIVCLHGVPMKIISDRGTQFTSHFWEKVHEALGSYLAFSTAYHPQTDGQTERTNQVLEDMLRACALDFSKDWERCLPYAEFSYNNSFQASLKMSLNESLFGRRCRTPLMWSETGERAVLGPDIIQEAEEKVRLIRDRLKVAQSRQKSYADTRRRDLEFKEGDYVYLKVSPMRGTKMFKVKXLAPRYVGPFPIIARQGEVAYHVQLQKNIADVHPVFLCXLKKVLQVPEDQAPLEKIHIPXDLTFPNHPVRIWDEPKKRTRTKVWRMSKVHWSILPEDEPTWESKKFLETDYPHLSEIQ

SEQ ID NO: 25859 - protein, 1470 aa, Oryza sativa
  unsure (1)..(1470): unsure at all Xaa locations
  Clone ID: TF_OsC1713_5256.pep
MASQRRATTSNDETQTPDLTTLAGVMATQTQLLQAIANNQGNRGGSSFGEFMRTKPPTFAIAEEPMDAEDWLRIIEKKLTLVRVREADKVIFAANQLEGPAGDWWDTYKEAREEDAGEPNWEEFTTAFRDNFMPAAVMRMKKNEFRRLRQGNTTVQEYLNRFTQLARYATRDLANEEEKIDKFIEGLNDELRGPMIGQDHDSFQSLINKVVRLENDRKVVEHNRKRRLAMNRPPQTAPQRPKGATSSAWRPTVVTTSRPATSSNFHRPVTIQNRAPAPNQAATGSVRPGSCFNCGEYGHFANKCPHPNKTPIRTGANATAIHGTATPAAGRGLFRTPQTNRTATGFGRGQVNHVRAEEAQEDQGVLMGMFSLNFTPVKVLFDSGASHSFISLKASQQHNLTRVKLRQPMLVHSPGGEIAVDTACIDVPIRLRDVVFPSNLMVLIPQTLDVILGMDWLAKHRGVIDCRRREVTLITPWGSDMRATMDQNPRLTERAGGIFTMLPLKGMPVVQRFPDVFPEDLPGMPPDRDIEFIIDLIPATAPISKRPYRMPVNELKELKKQIRELQEKGFVRPSSSPWGAPVLFVKKKDGSMRMCVDYRSLKEVTIKNKYPLPRIDDLFDQLKGAKVFSKINLRSGYHQLKIRTEDIPKTAFSTRYGLYEFTVMSFGLTNAPAYFMNLMNKVFMDYLDKFVVVFIDDILIYSKDEEEHAEHLRLVLQKLRKHKLYAKFSKCEFRLKEVAFLGHVISASGVAVDPAKVEAVTEWKAPKSVTEIRSFLGLAGYYRTFIEGFSKIARPMTQLLKKEKKFVWSEQCQESFEQLKEKLTSAPILVLPDIRKDFVIYCDASRQGLGGVLMQDGKVVAYASRQLRPHEENYPTHDLELAAVVHALKIXRHYLIGNHCDIYTDHKSLKYIFTQSDLNLRQRRWLELIKDYDLEVHYHPGKANVVADALSRKSHCNHLRMEGMVPEHREEIAQLNLHIVPRGQINTLDIQPLLRTQIEEAQKDNEEIREVKERLAAGRAKEFSTDEKDVLWYKKRIYVPEQGGLRGLILKEAHESAYSLHPGSTKMYQDLKEGYWWPNMKRDVAEYVALCDVCQKVKAEHQRPAGLLQPLRIPEWKWDEIGMDFIVGLPKTATGYDSIWVIVDRLTKTARFIPVKTNYSSAKLAELYMTRIVCLHGISKRIISDRDTQFTSHFWEKVHEALGSYLAFSTAYHPXTDGQTERTNQVLEDMLRACALDFSKDWERCLPYDEFSYNNSFQASLKMSPNEALFGRXCCTPLMWSETGERAVFGLDIIQEAEEKVRLIRDRLKVAQSRQKSYADTRRRNLEFKEGDYVYLKVSPMRGTKRFKVKGKLAPRYVGPFQIIARRGEVAYQLQLPENIADVHPVFHVSQLKKCLRVPEEQAPLEEIHISNDLTYPEHPIRILDEAEKRTRSKVWRMYKVQWSNHTEDEATWESEEFLRTEYPHLFEDW

SEQ ID NO: 25860 - protein, 1427 aa, Oryza sativa; identical to SEQ ID NO: 18930
  Clone ID: TF_OsC1528_2280.pep

SEQ ID NO: 25861 - protein, 1549 aa, Oryza sativa; identical to SEQ ID NO: 18938
  Clone ID: TF_OsC1528_1947.pep

SEQ ID NO: 25862 - protein, 1172 aa, Oryza sativa
  unsure (1)..(1172): unsure at all Xaa locations
  Clone ID: TF_OsC1528_2035.pep
MADNRFVVEQAHEIQTIAKELELLKCVLPDKFVAGCIIAKLPPSWRSFGTAFKHKRQEYSIEGLIASLDVEEKAREKDAASKDDAQQTTNFKRQKKNNNNPNQDERICFVCGQPGHLARKYPQRKGMKAPAGQTSKSANVTIGNTGDGSGYGNLPTVFSVNQSTNWWVDTGANVARGSTFLMANGSHASVHGVGTVDVKFTSGKIVQLRNVQHVPSINRNLVSGSRLTRDGFKLVFESNKVVVSKHGYFISKGYECGGLFRFSLSDFCNKSVNNICGSVDDEANVWHSRLCHINFGLMSRLSSMCLISKFSIVKGSKCHSCVQSKQPRKPHKAAEERNLAPLELLHSDLCEMNEVLTKGGKQYFMTLIDDATRFCYVYLLKTKDEALDYFKIYKAEVENQLDRKIKRLRSDRGGEFFSNEFDLFCDEHDIIHERTPPYSPESNGIAERKNRTLTDLVNAMLDTAGQPKAWWGEALLTTNHVLNRVPNRNKNKTPYEIWIGRKPSLSYLRTWGCLAKVNVPITKKRKLGPKTVDCVFLGYAHYNIAYRFLIVKFEVPDMHVGTIMESRDATFFESFFPMXDTHSGSSQPSEIIPSSITPPXQTEHTHEHVTEEDVSEALRRSKRQRTAKSFGDDFTVYLVDDTPKSISEAXASPDADYWKEAVRSEMDSIIANWTWEVTERPYGCKPVGCKWVFKKKLRPDGTIKKYKARLVAKGYTQKEGEDFFDTYSPVARLTTIRVLLSLAASLGLLVHQMDVKTAFLNGELDEXIYMDQPDGFVVEGQEGKVCKLLKSLYGLKQDPKQWHEKFDKTLTSVGFAVNEADKCVYYRHGGGEGVILCFYVDDILIFGTNLEVINEIKSFLSQNFDMKDLGVADVILSIKLIRGDNGITLLQSHYVEKILNRFGYIDSKPSPTPYDPSLLLRKNKRIARNXLEYSQIIGSLMYLASATRPDISFAVSKLSRFTSNPGDDHWRALERVMHYLKGTMELGLHYSGYPAVLEGYSDSNWISDVDEIKATSGYVFTLGGGAVSWRSCKHTILTRSTMEAELTALDTATVEAKWLRDLLMDLPIVEKPVPAILMNCDNQTTCEKTIEVCQEIEKLRSYNVGLHPNSXKPGRTLHKGTITKCDRQCIEGDGFETHCILERTHLCKLDCWSQSMEILGESSRKLTKDLGV

SEQ ID NO: 25863 - protein, 1604 aa, Oryza sativa
  unsure (1)..(1604): unsure at all Xaa locations
  Clone ID: TF_OsC359_7926.pep
HRTSVPQYPLYPVYGYPSSTVARHVGSFGAQGSTTMTSSFVDNGVSTGPIHGVPTXTMLVWTQVGEIIFPVYTTVPISAGPSIIGNENAVAITPDDPASKDPPAVAENGTSTSYEPEKVPSVAEPCPSDKNSEPTRTTSEVKKSWYPIHKSRKHNLQACWVFLNVQAKIRACKERGIQRTSPTHDVYCPIHKTKNHDFSSYKVFLHAMKTTLPKVQQVGTSRKGTNKEQGATLTSDRFVGVIDIDPHEPSVLHLLEDYGSSSSSTPRDMFAIGGTSTSAHANAGAENQTVTPAQHLGTINAVLREAPYDPVLNDDLARWIERLWESVANLSNAFEEAATRAQQERLIAGAANGEPPEQRTSPRXATHPPRSTGDLRDHLNGRREARRTRDNENHSRHRVSSQRRENEERRHNCRDRDDREQRTPDDAGRGRQHDGDDNGDRRXDNNGGXRQNSREPKRRPRNRTPEPSEPPSSSSSSSSSSSDRHPRRTHNRRQPTAPCTGCRAFNRSLRDVRWPERFRPGAIEKYDGSTDPEEFLQVYSTVLYAAGADDNALANYLPTALKGSARSWLMHLPPYSISSWADLWXQFVANFQGTYKRHAIEDDLHXVVRRFNECRNTIPDITDASVIRAFKTGVRDRYTTQELATRRITTTRSLFEVVDRCAHADDAVRRKNDESKAGGEKKPAKDTPESSKKKSGKSGKRKAQAEVLVSEYKRPPKHPDPQGSDTKRIWCPIHKSDKHSLEECLIFKKSLAKQLALEKGKRVRVVEKATEATTQDSDSAYPDSDLHVSHIFXVPQRRYPIVVEPTIRNIKVARVFVDGGSSINLLFASTLDAMGIPRNELTPTDQPFHGITPXSSSKPLGXITLPVSFGQASNFRAEKITFDVAEFDTAYNAIIGRTALAKFMAASHYAYQVLKMPEPKGTISIQGNTKLAVQCDKQSLDMVEHTPSPPATAEPPKKMIKTTKMPKPDDAIKIVPLSSANPDKTELALITFLRDNADVFAWQLSDMPGVPREVIEYKLMVRPVAKPVKQKLRRFAPDQKQAIREELDKLLKAGFIREVLHPEWLANPVMVRKANGKWRMCVDFTDLNKACPKDHFPLPRIDQLVDSTAGCELLSFLDAYSGYHQISMAKEDEEKTTFITSFGVFCYVKMPFGLITAGNIFQRTVQGALSDQLGNNVEAYVDDIVVKTKTCDSLIDDLRETFDNLRQYRLMLNPEKCTFGVPSGKLLGFLVSGRGIEANPEKIKAIENMKSPTRLKEVLKLTGCMAALSRFVVRMGEQGQHFFALXKKQDKFVWTQEAXEAFIALKCYLSNPPVLVAPQPNEELFLYITATPYSVSTVIVVERENVQRPVYYVSKALHDAKTRYAQIQKLLYAVIMTSRKLHHHFQAHRVTVVSAFPLGEVMRNKDVIGRIAKWVVELSQFDVHFVPRTAIKSEVLADVIADWTMPNNRCLHPLALWILPSQMTRLPTHKANPLILVRIVVVLLLPLEVGGLLSFIFPLALVLGLVHNIGTGLPTIILRRGVFFPSFLLNIKRCYQPLNGVFLSLVRTEVRKLGRPSSFAADHRSSAVAVKPSCHRLPPRRRPSPFVDRRCGEYHRVRLDVFYA

SEQ ID NO: 25864 - protein, 932 aa, Oryza sativa; identical to SEQ ID NO: 18951
  Clone ID: TF_OsC1713_4658.pep

SEQ ID NO: 25865 - protein, 1318 aa, Oryza sativa
  unsure (1)..(1318): unsure at all Xaa locations
  Clone ID: TF_OsC97167_1.pep
MLGAKKLLNCIQDPTIATSAGGVNNLPTSAEKNQALHFLRHHLNTTLKNEYMTEEDPKVLWDSLKDRYGHQVKALLPKAKREWLHLRFQDYKYMEQYNSVLHRIVTFLKLCGEKITDADMIDKTLSTFHANHVNIQRQYRQAKYEKYSELVSVLMEVQGEDETLVENHTSRPNESSATPEANASSFKKGENQNNQNKGKNFWKNGGKVNKMSFKKKGNHSKSKKGSTSGEYGKQDQVCFKCGTRGHWSRICRTPKHLIELYQEKHGKKKSEHESHFTVEIQHSEEKMAAMHIDKHTGQIATIAGSNAHIVGVGRATVVLPHGTKIIINNALLYPESSRTLLSFKDIRANGYHVETKDENKLEFLLITKLDGNRKTVVEKLPSLKSGLYYTHIKPENVALKTIFKNPESYRIWHDRLGHPGLGMMRRIISTSNGHNLRTNDFPNQEDFVCTDCATGKLIVRPSNLKVNAESPVFLQRIQGDICGPINPMSGSFRFPDNRIQSIRMDNAGEFTSKVFNEYCMALGIKVEHSVPHVHTQNGLAESLIKRIKLIARPLLLHSNLPTTCWGHAVLHAAALLQIRPTAYNAVSPMQLTRGYAPNISHLRKFGCAVYAPIPPPKRTSMGPHRKLGIYVGFESPSIIKFLEPLTGDLHMGRYADCIFKEDHFPALGGGKYLQKVECREIEWETKNLLHLDPRTKESDQEVQTIIDLQRIENNLPEAFTNPKGIMKSHIPVVNAPERVEIPHDAEEPVFKLISTSTPTSRKRGRPPVAHNQTKVSRRRPMKQQIGXNTTAPENSEGAHQVDEPPAVICPDGNEPSENARAITTSTGRPEIPDLNIAGNNEDQECERIEEISTSYVDTGETYNRETTIVDIYFAEKIAKIIDLDPEPKSMAECKKRSDWVKWKEAIKAELISLNKRKVFGPVDRTPVGISPVGYKWVFVRKRDENNQVVRYKARLVAQGFTQRPGIDFDETYSPLMDGITFRFLISMAVNLNLEMQLMDVVTAYLYGSLDSEIYMKVPDGIQVPEETKCNIYSVKLQTSLYGLKQSGRMWYNRLSEFLEGKGFIKNDDCPCKTKYCLGLQLEHTHEGVLLHQSAYIQKILEKFNMKDSYPTRTPMVVRSLAVESDPFRPQENNDELLGPECPYLSAIGALMYLANGTRPDIAFAVNLLARFSSVPTKRHWNGIKQIFRYLRGTQDIDLTMAGYANAGYLSDPHKALSQTGYVFLCGGTAISWKSTKQTMVATSTNHSEIIALFEASKECMWLRRVIQHVLNRCGLNITPTPTIIYEDNSACVAQIQTGYVKTSLTKHISPKFFYMHEL

SEQ ID NO: 25866 - protein, 1409 aa, Oryza sativa
  unsure (1)..(1409): unsure at all Xaa locations
  Clone ID: TF_OsC1528_1805.pep
MALVPAGAGADPARGSSGSAFSYPQLTATNYTSWCIRVQAMMEDQGVWDAIEPAAGVAVDPRRDKKARSHLLQSQPEDLLMQVAKKRSAKEVWDCLKTRFVGADRVREARLQTLKGEFGAMVMEPGETLDQYAGRITAMSVRHSALGSTLGDSAMVKKLFDTVPEKFVSLVAGIEQFYDIDTMPFEEAVGRLKAYEERMRKKKAAAGGVTTDGQVLLTQAEWEAHFKKNGGESSPPQKNKPSGEGAGRGQGGRGRGRGRGAGGRGGTPRGDSGAGSGGGGRDKSHIKCFNCEEYGHYSNQCPHPKKKKGEAHLAQTEDAGPALLLAVTEDVPERASCGLVVREQRVWPKLLLADAGGHAGDVWFLDNGASNHMTGDRSKFRELDESITGRVKFGDASTVQIKGKGSILFSCKNDDQWLLQDVYYIPSLQCNMVSLGQLTETGHRVVMDEDVLEVFDKSPWRLVMKXDDPAWLWHARLGHVNFQAMKLLVDKEMXGGVPAIVHPNQLCQSCLVAKQARAPFPAAAHFRAEEPLELLHIDLCGPITPNTMSGNRYFFLIVDDYSRWIWVFVLKTKDQSLDAFVKFKPLAENTAGRRVKTLRSDRGGEFLSGEFAQVCEEAGIQRHLTAPYSPQQNGVVERRNRTVMAMARSLLKGMRVPGRFWGEAVRHAVHLLNRLPTKAMGDRTPFEAWTGRKPQLGHLKVFGCTAHAKNTQPHLKKLDDRSAPYVYLGVEEGSKAHRLFDPRRGRIHVSRDVVFEENVPWEWTSAAGQEPTDFAMEEEPGEQLPSPATAAGVVPPYQAPSPGRRAGKEAVVAAEEVPSPASPVAASPTLPGTPTPGSPSTNSAGVVPSPGTDDNIDTDDGPRRYRSLADVLREAPRVDLVEDECDGEALLAESEEPSSYREAAGQPAWEEAMQREMEAIEKNKTWELAMLPAGHRAIGLKWVYKLKKNTAGEIIKHKARLVAKGYVQKQGVDFEEVFAPVARLDTVRVVLAVAADRRWQVHHLDVKSAFLNGELEEEVYVAQPEGFARSGKEHLVLKLHKALYGLRQAPRAWNIRLDRSLRELGFDRCTQEQAVYTRGRGSDGIIVGVYVDDLIVTGENPSELKVFKEQMMGEFEMSDLGLLTYYLGIEVDQDESATTLKQTAYAKKLLSQFGMMECNSVSIPIDPRSQLSKDPEGHPVDATEYRRIIGSLRYLLHTRPDLSYAVGVASRFMERPTVMHFKAVKQILRYIKGTMDYGLVYAAGTGALKITGYTDSDLAGDLDDRRSTGGMAFYINQSLVAWSSQKQKTVALSSCEAEFMAATTAACQALWLRLLLAEVAGVEEKAVKLFVDNRSAIALMKNPVFHGRSKHIDTRYHFIRECVDGGQIVVEFVRTEEQRADALTKGLPAAKLVTARHLLGVRSLGSRQN

SEQ ID NO: 25867 - protein, 1433 aa, Oryza sativa; identical to SEQ ID NO: 18959
  Clone ID: TF_OsC1528_1995.pep

SEQ ID NO: 25868 - protein, 238 aa, Oryza sativa
  Clone ID: TF_OsC359_6150.pep
NRFSVFFPPKAGETRHVASSCATICVHCEEDHPPDRCPTSRITCFFCEGTDHVPKDCQFSFLLTKKMANQPASSNGEKHQGNTNPRQDYSFSLTPVPGQRNQNEKRKCRVREDICCFNCQGMGHFADKCPKPRNITASTSVHATPCNLKLAPQRIVIHASRSSPIARVATAPTPASALPQGVNAHFQPQQRIVVDGRSCVSPRPTPGQAKGNRPPEGDTKQKTVIRFNQQSEGSFSCE

SEQ ID NO: 25869 - protein, 1590 aa, Oryza sativa
  Clone ID: TF_OsC1713_5144.pep
MERWQIRIHHHWEMGVPRSEGYVIELHRLMRRLRYPRFPIYRVRWCGPVWEARVEVHTRVPLESDYSFPTRHRHDLPETAMQDAAREAFLRLSSIQRAELASTEFAHHPFQEESNSVCTVQDTPCCYNPIVTRLSRWAEAVDDFYEEALLEIDDQQRRVGELETEVTNLTVQQLQLEEEHQAWGSEIDSLKAQLQTEGTDTEPEIEPDITDPSEDETPVHRITFVGGPHTLSTARKSTRPPGKKPKPDPEMASRHRASTSNEETQVPDLTTLAGVMATQTQLLQAIANNQGNRGGSSFGEFMRTKPPTFATADEPMGAEDWLRNIKKKLTLVRMREADKVIFAVNQLEGPAGDWWDTYKEAREEDAGEPTWEEFTAAFRENFVPAAVMRMKKNEFRRLRQGNTTVQEYLNRFTQLARYAIGDLADEEEKIDKLENDQRTVEHNRKRRLAMNRPPQGVPQRLKGATSSGRKPTIVATNRPAAPSNFNRPVAVQNRTPTPTLAAPGVKKNVDCFNCGEYGHYANTCPHPRKTPVRTGANAMTVRGTATPAVGRGLFKTPQTNRTATGFGRGQVNHVRAEEAQEDKGVLMGMFSINSSPVKVLFDSGASHSFISLEASQKHNLTLVGLRKPMIVHSPGGEITVSHACINIPIRLRDVVFPSNLIVVIPQTLDVILGMDWLTKNRGVIDCRRREVTLTTPWGSDIRATMDQDPRLAERAGGIFTMLPMKGMPIVQRLPDVFPEDLPGMPPDRDIEFIIDLIPGTAPISKRPYRMPVNELEELKKQIRELQEKGFVCPSSSPWGAPVLFVKKKDGSMRMCVNYRSLNEVTIKNKYPLPRIDDLFDQLKGAKVFSKIDLRSGYHQLKIRTGDIPKTAFSTRYGLYEFTEEHAEHLRLVLEKLRKHKLYAKFSKCEFWLKEVAFLGHVISAGGVAVDPAKVEAVTEWKAPKSVTEIRSFLGLAGYYRRFIEGFSKIARPMTQLLKKEKEFVWSEQCKESFEQLKEKLTSAPILVLPDNRKDFVIYCDASRQGLGGVLMQDGKVVAYASRQLRPHEENYPTHDLELAAVVHALKIWRHYLIGNHCDIYTDHKSLKYIFTQSDLNLRQRRWLELIKDYDLEVHYHPGKANVVADALSRKSHCNHLRMEEMAPELKEEIAQLNLHIVLRGRINTLDIRPLLRTQIEEAQRENREIQEVKERLAAGFAKEFSTDEKDVLWYKKRIFVLEQGGLRGLILKEAHESAYSLHPGSTEMYQDLKEGYWWPNMKRDVAEYVALYDVCQKVKAEHQRPAGLLQPLRIPEWKWDEIGMDFIVGLPKTATGYDSIWVIVDRLTKTARFIPVKTNYSGAKLAELYMTRIVCLHGVPKRIISDRGTQFTSHFWEKVHEALRSYLAFSTAYHPQTDGQTKRTNQTVERAVFGPDIIKEAEEKVSLIRDHLKVAQSRQKSHADTRRRNLEFKEGDYVCLKVSPMRGTKRFKVKEKLAPRYVGPFQVMARRGEVAYQLQLPENIADVHPVFRVSQLKKCLRVPEEQAPLEEIHISNDLTYPEHPVRILDEAEKRTRSKVWRMYKVQWSNHTEDEATWESEEFLRTEYLHLFENW

SEQ ID NO: 25870 - protein, 1650 aa, Oryza sativa
  Clone ID: TF_OsC359_6360.pep
MMKALVSSSCLPSSACGSRPSLPLFLVCLCVCWAFAAHMAGSVSRRGLDMTGFVLELRGMCVVLGYPPGVDYQARPLPEQEGDDAEPHAAWEVTAVILTGSPERTSLAVTAGGDSFPAACQNAALLAIGTLHQRYPDELQHSPYRYHPRCGGARDFATFRDASSEDDATIVHLARMVEAYDAARIDFQQMVRRGMVENNMKILELRQENLQLKKDLHALEAQLCQLKVAQGEMVMTRRSANTGDGNQPEGSNHNNHGSPPPPPPPPPPPPPDTNAILTQILAQQANMMTAFLHHLQNPPQHNAPPPPPQHSKLAEFLRIRPPTFSSSNNPVDALDWLHAVGKKLDTVQCSDEEKVVFAAHQLQGPASLWWDHLQATQPERQPITWARFTADFRRTHVPAGVVALKKREFRELKQGNRSDVREDEEKQEKFLAGMDPELSVRLVSGDYPDFQRLVDKSIRLEAKHKELESHKRRLANFRNQQGANQRVRYTNPYPGGSSSQQQQQQQQPRSAPRPQFVVRVPQPQQQQNQQGTRAPRPPTPTVQPGQGRRDAQGPQRLCFNCYEPGHFADKCPKPRRQQGKAPPRSNNGGNDVIRGRVNHVTAENVLTTPDVIVGTFLIHSIPATILFDSGASHSFISVPFVGRNQLGVERLRNPLLITTPGVVMTAKYYSPAVPIEIQGIPFPSDLILLDTKNLDVILGMNWLAQFQGVVDCARRTVTLYRGPEQPVVFFAPPTSVSSSELHQIGLSEIPIVREFGDVFPEELLGMPPKREIEFRIDLAPGTTPLYKRPYRMAANELAEVKKQLEELKGKGYIRPSTSPRGAPVIFVEKKDKTKRMCVDYRTLNEVTIKNKYPLPRIDDLFDQLKGATVFSKIDLRSGYHQLRIREEDIPKTAFTTRYGLNCEFWLSEVKFLGHMISAKGAAVDPETVTAVTDWKQPKTVTQIRSFLGLAGYYRRFIENFSQIARPMTQLLKKEEKFVWSPQCEKAFQTLKEMLVSSPVLVLPDTRKDFMVYCDASRQGLRCVLMQEGHVVAYASRQLRPHEGNYPTHDLELAAVVHALKIWRHYLIGNRCEIYTDHKSLKYIFTQSDLNLRQRRWLELIKDYDVGIHYHPGRANVVANALSRKSHCNTLNIRGIPPELNQQMAALKLSIVSRGFLAALEAKPTLLDQIREAQKNDPDMHGLLKNMKQGKAAGFTEDEHGTLWNGNRVCVPDNRELKQLILQEAHESPYSIHPGSTKMYLDLKEKYWWVSMKREIAEFVALCDVCQRVKAEHQRPAGLLQPLQVPEWKWDEIGMDFITGLPKTQGGYDSIWVVVDRLTKVARFIPVKTTYGGNKLAELYFARIVSLHGVPKKIVSDWGSQFTSHFWKKLQEELGTRLNFSTAYHPQTDGQTECLNQILEDMLRACVLDFGKTWDKSLPYAEFSYNNSYQASIQMAPYEALYGRKCRTPLLWDQVGESQVFGTDILREAEAKVRTIRDNLKVAQSRQKSYAYNRRRDLEFAMDDFVYLRVTPLRGVHRFQTKGKLAPRFVGPFRIIARRGEVAYQLELPASLGNVHDVFHVSQLKKCLRVPSEQADSEQIEVREDLTYVERPVKILDTMERRTRNRVIRFCKVQWSNHAEEEATWEREDELKAAHPDLFASSSESRGRDSV

SEQ ID NO: 25871 - protein, 3275 aa, Oryza sativa
  unsure (1)..(3275): unsure at all Xaa locations
  Clone ID: TF_OsC359_7817.pep
MVMPMVTTRRNAATDDGNQPEGSNHNNHGSPPPPPPPPPPPPPDTNAILTQILAQQANMMTAFLHHLQNPPQHNAPPPPPQHSKLAEFLRIRPPTFSNSNNPVDALDWLHAVGKKQDTVQCSDEEKVIFAAHQLQGPASLWWDHFQATQPEGQPITWARFTAAFRRTHVPAGVVALKKREFRELKQGNHSVMEYLHEFNNLARYAPEDVREDEEKQEKFLAGMDPELSVRLVSGDYPDFQRLVDKSIRLEAKHKELESHKRRLANFRNQQGANQRVHYTNPYPGGSSSQQQQQQQQPRSAPRPQFVVRVPQPQQQQNQQGTRAPRPPTLAVQPGQGRRDAQGQQRLCFNCYEPGHFADKCPKPRRQQGQAPPRSNNGGKDVIRGRVNHVTAEDVLTTPDVIVGTFLIHSIPATILFDSGASHSFISVPFVGRNQLRVERLRNPLLITTPGGVMTAKYYSPAVPIEIQGIPFPSDLILLDTKNLDVILGMNWLAQFQGVVIGLSEIPIVREFGDVFPEELLGMLPKREIEFRIDLAPGTTPLYKRPYRMAANELAEVKKQLEELKEKGYIRPSTSPWGAPVIFVEKKDKTKRMCIDYRALNEVTIKNKYPLPRIDDLFDQLKGATVFSKIDLRSGYHQLRIREEDIPKTAFTTRYGLYEFTVMSFGLTNAPAFFMNLMNKVFMEYLDKFVVVFIDDILIYSQSEEDHQHHLRLVLGKLREHQLYAKLSKCEFWLSEVTFLGHVISAKGVAVDPETVTAVTDWKQPKTVTQVRSFLGLAGYYRRFIENFSKIARPMTQLLKKEEKFVWSPQCEKAFKTLEEKLVASPVLILPDTRKDFMVYCDASRQGLGCVLMQDGHVVAYASRQLRPHEGNYPTHDLELAAVVHALKIWRHYLIGNRCEIYTDHKSLKYIFTQSDLNLRQRRLLELIKDYDVGIHYHLGKANVVADALSRKSHCNTLNVCGIPPEPNQQMEALNLSIVSRGFLATLEAKPTLLDQIREAQKNDPDMHGLLKNMKQGKAASFTEDEHGTLWNGNREKYWWVSMKREIAEFVALCDVCQCVKAEHQRPAGLLQPLQVPEWKWDEIGMDFITGLPKTQGGHDSIWVVVDRLTKVARFIPVKTTYGGNKLAELYFARIVSLHGVPKKIVSDRGSQFTSHFWKKLQEELGTRLNFSTAYHPQTDGQTERLNQILEDMLCACVLDFGKTWDKSLPYAEFSYNNSYQASIQMAPYEALYGRKCRTPLLWDQVGESQVFGTDILREAEAKVRTIWDNLKVAQSRQKSYENNRRRDLEFAVGDFVYLRVTPLRGVHRFQTKEKLAPRYVGPFRIIARRGEVAYQLELPASLGNVHDVFHVSQLKKCLRVPSEQADSDQIEVCEDLTYVERPVKILDTMERRTRNRVIRFCKVQWSNHAEEEATWEREDELKAAHPDLFARPPPATIGARARRLPSAVSARPPSGAPRGCQVGPGRQPPAPSAPRPFKDRSSGLCCKALPYFHMSSGANEGYTSCGPVVEMSWHRAGVLLLGAQSCLPVPGVPAVGGIGSMYTSDQSIIYSNSRALGYGQAEQCTQMAGSVTRRGLSMTGFVLELRGMCVVLGYPHGVDYQARPLPEQEGDDAEPHAGWEVTAVILSGSPERTSLAVTAGGDSFPAACQNAALLAIGTLHQRYPDELQHSPYRYHPRHEGARDYATFRDASSEDDATIVHLARMVEAYDVARIDFHQMVRRGMVENNMKILELRQENLQLKKDLDAVEAQLHQLKIAQGEVCRPKRRRVCRSQKITARKSTSRPELVRQSLAWTCFMETPRAEPAPVVPQEGEASGVGSTEDALLLTFHXTTRRNAATGDGNQPEGSNHNHQGNPPPPPPPPPPPPPDTNAILTQILAQQANMMTAFLHHLQNPPQHNAPPPPPEHSKLAEFLRIRPPTFSSSNNPVDALDWLHAVGKKLDTVQCSDEEKVIFAAHQLQGPASLWWDHFQATQPEGQPITWARFTAAFRRTHVPAGVVALKKREFRELKQGNRSVMEYLHEFNNLARYAPEDVREDEEKQEKFLAGMDPELSVRLVSGDYPDFQRLVDKSIRLEAKHKELESHKRRLANFRNQHGANQRVRYTNPYPGGSSSQQQQXQQQPRSAPRPQFVVRVPQPQQQQNQQGTRAPRPPTPTVQPGQGRRDAQGQQRLCFNCFEPGHFADKCPKPRRQQGQAPPRSSNGGKDVIRGRVNHVTAEDVLTTPDVIVGTFLIHSIPATILFDSGASHSFISVPFVGRNQLGVERLRNPLLITTPGGVMTAKYYSSAVPIEIQGIPFPSDLILLDTKNLDVILGMNWLAQFQGVMDCARRTVTLYRGPEQPVVFFAPPTSVKSSELHQIGLSEIPIVREFGDVFPEELPGMPPKREIEFRIDLAPGTTPLYKRPYRMAANELAEVKKQLEELKEKGYIRPSTSLWGAPVIFVEKKDKTKRMCVDYRALNEVTLKNKYPLPRIDDLFDQLKGATVFSKIDLRSGYHQLRIREEDIPKTAFTTRYGLYEFTVMSFGLTNAPAFFMNLMNKVFMEYLDKFVVVFIDDILIYSRSEEDHQHHPRLVLGKLREHQLYAKLSKCEFWLSEVKFLGHVISAKGVAVDPETVTAVTDWKQPKTVTQVRSFLGLAGYYRRFIENFSKIARPMTQLLKKEEKFVWSPQCEKAFQTLKEKLVSSPVLILPDTRKDFMVYCDASRQGLGCVLMQDGHVVAYASRQLRPHEGNYPTHDLELAAVVHALKIWRHYLIGNRCEIYTDHKSLKYIFTQSDLNLRQRRWLELIKDYDVGIHYHPGKANVVADALSRKSHCNTLNVRGIPPELNQQMEALNLSIVGRGFLAALEAKPTLLDQIREAQKNDPDMHGLLKNMKQGKAAGFTEDEHGTLWNGKRRVKAEHQRPAGLLQPLQVPEWKWDEIGMDFITGLPKTQGGYDSIWVVVDRLTKVARFIPVKTTYGGNKLAELYFARIVSLHGVPKKIVSDRGSQFTSHFWKKLQEELGTRLNFSTAYHPQTDGQTERLNQILEDMLRACVLDFGKTWDKSLPYAEFSYNNSYQASIQMAPYEALYGRKCRTPLLWDQVGESQVFGTDILREAESKVRIIRDNLKVAQSRQKSYADNRRRDLEFAVGDFVYLRVTPLRGVHRFQTKGKLAPRYVGPFRIIARRGEVAYQLELPASLGNVHDVFHVSQLKKCLRVPSEQADSEQIEVREDLTYVERPVKILDTMERRTRNRVIRFCKVQWSNHAEEEATWEREDELKAAHPDLFVSPSESRGQDSV

SEQ ID NO: 25872 - protein, 2077 aa, Oryza sativa
  unsure (1)..(2077): unsure at all Xaa locations
  Clone ID: TF_OsC359_5747.pep
TAGPTWQPRGAPEGGLAGTADGRRRTRAPMVAAGDQRRDGAAPERGEGRGKXKQRSSAHPGTTRTAETTTGAEEGGGAVRIDEDGGAPTVGGRNGGADEVDEDAAKPMEVTPRREEVRGDDGGELKLGGDGGERGRRREHESDGESPFFPPSLLGRLGPLPSLSLLSPAAQSASSPPRAADGRARPPPSLTGGAHPHARKERPLVILAGSPERTSLTVTAGGDSFPAACQSAALLAIGTLHQRYPDELQHSPYRYHPRRGGARDYATFRDASSEDDATIMHLARMVEAYDAARIDFHQMVRHGMVENNMKILELRQENLQLKKDLDAVEAQLHQLKIAQGEVCRPKRRRVCRSQKITARKSTSRPELVRQSLAWTCFVETPRAEPAPVVPQEGEASGVGSTEDALLLTFRPGPSQQRNAATGDGNQPEGSNHNHQGSPPPPPPPPPPPPPPDTNAILTQILAQQANMMTAFLHHLQNPPQHNAPPPPPQHSKLAEFLRIRPPTFSSSNNPVDALDWLHAVGKKLDTVQCSDEEKVIFAANQLQGPASLWXDHFQATQPEGQPITWARFTAAFRRTHVPAGVVALKKREFRELKQGNRSVTEYLHEFNNLARYAPEDVREDEEKQEKFLVGMDPELSVRLVSGDYPDFQRLVDKSIRLEAKHKELESHKRRLANFRNQQGANQRVRYTNPYPGGSSSQQQQQQQQPRSAPRPQFVVRVPQPQQQQNQQGTRAPHPPTPTVQPGQGSRHAQGPQRLCFNCFEPGHFADKCPNPRRQQGQAPPRSNNGGKDVIRGRVNHVTAEDMLTTPDVIVGTFLIHSIPATILFDSGASHSFISVPFVGRNQLGVERLRNPLLITTPGGVMTAKYYSPAVPIEIQGIPFPSDLILLDTKNLDVILGMNWLAQFQGVVDCARRTVTLYRGPEQPVVFFAPPTSVSSSELHQIGLSEIPIVREFGDVFPEELPGMPPKREIEFRIDLAPGTTPLYKRPYRMAANELAEVKKQLEELKEKGYIRPSTSPWGAPVIFVEKKDKTKRMCVDYRALNEVTIKNKYPLPRIDDLFDQLKGATLFSKIDLRSGYHQLRIREEDIPKTAFTTRYGLYEFTVMSFGLTNAPAFFMNLMNKVFMEYLDKFVVVFIDDILVYSQSEEDHQHHLRLVLGKLREHQLYAKLSKCEFWLSEVKFLGHVISAKGVAVDPETVTAVTDWKQPKTVTQVRSFLGLAGYYRRFIENFSKIARPMTQLLKKEEKFVWSPQCEKAFKTLKEKLVASPVLILPDTRKDFMVYCDASRQGLGCVLMQDGHVVAYDSRQLRPQEGNYPTHDLELAAVVHALKIWRHYLIGNRCEIYTDHKSLKYIFTQSDLNLRQRRWLELIKDYDVGIHYHPGKANVVADALSRKSHCNTLNVRGIPPELSQQMEAPDTXAIVGRGFLAAWRXXXXXXXXXXXXXXXXXXXXXXXXXXXXXXXXXXEFTEXXTLCDVCQRVKAEHQRPAGLLQPLQVPEWKWDEIGMDFITGLPKTQGGYDSIWVVVDRLTKVARFIPVKTTYGGNKLAELYFARIVSLHGVPKKIVSDRGSQFTSHFWKKLQEELGTRLNFSTAYHPQTDEQTERLNQILEDMLRACVLDFGKTXDKSLPYAEFSYNNSYQASIQMAPYEALYGRKCRTPLLWDQVGESQVFGTDILREAEAKVRTIRDNLKVAQSRQKSYADNRRRNLEFAVDDFVYLRVTPLRGVHRFQTKGKLAPRYVGPFRIVARRGEVAYQLELPASLGNVHDVFHVSQLKKCLRVPSEQADSEQIEVREDLTYMERPVKILDTMERRTRNRVIRFCKVQWSNHAEEEAIWEREDELLPPRRRLLRLRRVLADLVHPSVLPADRRNAAVPVDPSHTAAFLRSGRRSRRRRRPGVSRGPPFSFPPSLPSLGRRSAVPMAAAGDHRGAGASPPVGCAGEAAFGRAPRRLPAGIELAPSPSLSTVADDLRPAFSARRDRLPPRRRLLRLRRTAVDPVHPLDELADRRNAADPVDQSRAAAFLRSGRLFCRRRRPRVSRGPPPLFPLPFPSLGRCSAVPMATAGDHRGAGAASRWLRH

SEQ ID NO: 25873 - protein, 1351 aa, Oryza sativa
  Clone ID: TF_OsC1713_4419.pep
MSNEVNHVGKAPMFNGTNYSTWKIKMSTHLKAMSFHIWSIVDVGFAITGTPLTEIDHRYLQLNAQAMNALFNSLSQEEFDRVSNLETAYEIWNKLAEIHEVTSEYKDAKLHFLKIQYETFSMLPHESVNDMYGRLNVIVNDLKGLGVNYTDLEVAQKILGALPEKYETLVTMLINSDISRMTPASLLGKINTNDMYKLKKKEMEEASSPSKKCIALQAEVEDKGKGKVNEANEDLEEEIALLARRFNDLLGRRKERGRGSNSNRRRNSRPNKTLSNFRCFECGEKGHFASKCPSKDDDGDKSSKKKSGGYKLLKKLKKEGKKIEAFIGEWDSNEESSASSGSEEEGGDDASSKKKKMTVVAIKEAPSLFAPLCLMAKGSSKVTSLSDSESNNDCDDVSYDELVSMFEELHAYSEKEIVKFKTLKKDHASLEVLYKELKTSHERLTISHEKLKEAHDNLLFTTQHGAHIDVGISCDLLDDSTTCHIAHVASSSISTSCDDLVDMPSSSSCVSICDTSLVVENNELKEQVAKLNKSLERCFKGRLMMVALLLDMWVPLYSVVNYRTGGSHWVLDSGCTQHMTGDRAMFTTFEVGGKEQEKVTFGDNSKGKVIELVAKTSLGWLWHRRLAHVGMNQLSKLSKRDLVVGLKDVKFEKDKLCSACQAEAINTACHATNRLYLHRLLKKTFYELIVGRKPNVAYFRIFGCKCYIYRKGVRLTKFESRCDEGFLLGNASNSKAYRVYNKNKGIVEETADVQFDETNGSQEGHENLDDVGDEGLMRAMKNMSIGDVKPIEVEDKPSTSTQDEPSTSATPSQAQVEVEEEKAQDPPMPPSIHTALSMDHPIDQVLGDISKGVQTRSRVASICEHYSFVSCLEPKHIDEALFDPDWMNAMHEELNSFARNKVWTLVERPRDHNVIGTKWVFRNKQDENGLVVRNKARLVAQLKDGTFVSQTKYIKDLLKRFGLEDAKPIKTPMATNGHLDLDEGVMPPRTRHSRRAPTPDPMSEPEESSGEDYAQSDEEVEANVEGASEEASRDDVSDSGEDEDEQSDEMKIDPSIQFVVNMRNPSQYTILRHHDQFLRPRVTPDPRFHTVFQKTVYEQVYVGKAFAEYKWISWRDINETPEFKSLQDLFKTVGIDRIVTLKQDYNEDLIRQFYATVWVAGDYSDMKWMSDTLQCSISRRQFRRLLNIRLDFGHDLHEAHTHNPLSIDYLSQFYEDGARYTHGKVAGLRTIPSVVNRIVRATILPRLGNNDDIWGVAWHVIDAIIQGRQFDIVSFMMQEIAISKGTFTQGIYYAPYIMRLIKDKLGAAGQNLKKHKQYKPRLQLGAPRVRPDQGRSDRRALAGLTGHKTAV

SEQ ID NO: 25874 - protein, 639 aa, Oryza sativa; identical to SEQ ID NO: 18996
  Clone ID: TF_OsC1713_4729.pep

SEQ ID NO: 25875 - protein, 1959 aa, Oryza sativa
  unsure (1)..(1959): unsure at all Xaa locations
  Clone ID: TF_OsC1528_2012.pep
MAGFSLISCAVGIIFFSVCYLPAAPAAALSFNYSTFSSDNQEDFTFEGNASIHDGCIDFVANGTWGRGYRPYSTGRVSYKLPVRLWDAATGEVASFTTTFSFNITPMNISDKGDGMAFFLVSYPSRMPLTADGDTLGLVSNKPENAPAGGDQFVAVEFDTYPNPGLDPNATGDHIGIDINSVRSLTTEPLTNSSLIGNMTAIVHYDSSSSILSVKLWINDTTKPPYNLSYEIVDLKKKLPENVTIGFSAATGASDELHQLTSWYFNSSSSFEHKHGRAGVVAGATVGATLFVVLLFTAAAILIRRRRIKNRKEAEDEQDISSDSEDNDGEPIVEIEMGTAPRRLPYYELVEATKNFAVEEKLGQGGFGSVYRGYLREQGLAVAIKRFAKDSSKQGRKEYKSEIKVISRLRHRNLVQLVGWCHGRNELLLVYELVPNRSLDVHLHGNGTFLTWPMRIKIVLGLGSALLYLHQEWEQCVVHRDIKPSNVMLDESFSAKLGDFGLARLIDHTIGIKTMTAMSGTPGYLDPECVITGRASAESYVYSFGIVLLEVACGRRPMSLLDSQNNGVFRLVEWAWDLYGKGDVLMAADKRLDGDYDSAEMERVIALGLWCVHPDPSVRPSIRDAMAILQSSGGQLPVLSAKMPVPMYAPPMASFDGLAVCVIYRDVVVLRCDAVVVHIDDERPCYSHLVFLDYSIPIVSVHRQSGEQVSGTSAFDVLHREKAAIRRCDFTMAGFADALRPDKFTGVHFKRWQIRVALWLTAMKCFWVSTGKPEGILAADQHKQFEKATTLFVGCILSVLGNRLVEVYMHMTNAKELWDALNTKFGATDASNDLYIMEQFHDYRMADNRSVVEQAHEEYSVEGLIVSLDVEEKAREKDAASKGDGGQSSANVVHKAQNKSKGKYKAQQTTNFKKQKKNNNNPNQDERTCFVCSQPSHLARKCPQRKGMKAPAGQTSKSANVTIGNTGDGSGYGXRGSTVLMGNGSHASVHGVGTVDLKFTSGKIVQLKNVQHVSSIDRNLVSGSRLTRDGFKLFFESNKVVVSKHGYFIGKGYECGGLFRFXLSDFCNKSVNHICGSVDDEANVXHSRLCHINFGLMSRLSSMCLIPKFSIVKGSKCHSCVQSKXPRKPHKAAEERNLAPLELLHSDLCEMNGVLTKGGKRYFMTLIDDATRFCYVYLLKTKDDALDYFKIYKAEVENQLDRKIKRLRSDRGGEFFSNEFDLFCEEHGIIHERMPPYSPESNGIAERKNRTLTDLVNAMLDTAGLPKAWWGEALLTLNHVLNRVPNRNKDKTPYEIWIGRKPSLSYLRTWXCLAKVNVPITKKRKLGPKTMDCVILGYAYHSIAYRFLIVKSEEPDMHVGTIMESRDATFFESFFPMKDTHSSSSQSSEIIPSSITPPEQTEHTHEHVTEEDDSAAPRRSKRQRTAKSFGKDFTLYLVDDTPKSISEAYASPDADYWKETVRSEMDSIIANGTWEVTERPYGCKPMGCKWVFKKKLRPDGTIEKYKARLIAKGYTQKEGGDFFDTYSPVARLTTIRVLLSLAASHGLLVHQMDVKTTFLNGELDEEIYMDQPDGFVVEGQEGKVCKLLKSLYGLKQASKQWHEKFDKTLTSAGFAVNEADKCVYYRHGGGEGVILCLYVDDILIFETNLEVINEVKSFLSQNFDMKDLGVADIILNIKLIRGENGITLLQSHYVEKILNRFGYIDSKPSPTPDDPSLLLRKNKRIARNQLEYSQIIISLMYLASATRPDISFAVSKLNRFTSNPGDDHWRVLERVMRYLKGTVELGLHYTGYPAVLEGYSDSNWISDVDEIKATSGYVFTLGGGAVXWRSCKQTILTRSTMEAELMALDTATVEAEWLHDLLMDLPIVEKSTCEKTIEVCQEIKKLXSYNVGLHPNSXKPGRSFHEGTITKCDRQCIEGDGFETHSILQRTHLCELDCWSQSMEILGESSRKLTIDLGV

SEQ ID NO: 25876 - protein, 1786 aa, Oryza sativa; identical to SEQ ID NO: 19005
  Clone ID: TF_OsC1528_1880.pep

SEQ ID NO: 25877 - protein, 1499 aa, Oryza sativa
  unsure (1)..(1499): unsure at all Xaa locations
  Clone ID: TF_OsC91_2308.pep
MSGQAGDGNDGDKGVKIPYDYPPTSTSYVSTYSGKAPYFNGTDYAAWKHKMKMHLKSINPSIWRIVEKVYVLQNPEDPTKEDDENEHKNAQAANAILSALSGSEFNRVDGIESAKMIWDTLRNLHEGTDSVRESKVEILKGQFERFVMLDGLGSKDMTDGVVVKKMVRAITPRNSTLVTIIRERPDYKTLTPHDLLGRILAHDMLMQESNDVIQYINQSSTTSIKKEDLALKAKEEEEENRKSKSKAEIDDEEMALLVKKFGKFMRRSGFFKGGSSKHYSNKSSGKHSARVCYVCKEPGHFIADCSHLKDGSHIKEDKKKGEKKEKHKHSKQEHYGQAHLGMIFGSESESSSSDEGVATFAVKPSSPPRLFDYSSDEDAPICLMAKKPKVPSPPKSFNVDLVSDEEDEVMDDELFKSITKESLPHLSELLGRIEDQYATLERQEVLLIREKERSHELKSELAKEREKNEALQNEKLMRLLHNGLLKCHMGSKALKKYLGYQRDNFNHEGLGKNDSGRVVAKYVGPRGENISIKRVLWVPKALVTNMRGPKQEYVSGGRSWVIDSGCTNHMTGEESMFSTLDPNGTSQDNIVFRDDGKGKASPCWYEESSQASKARXHILGLTNVQFEKDRVCSACQAGKQIGAHHPVKNVMTTSRPLELLHMDLFRPIAYLSIGGNKYGLVIVDDFSRFTWVFFLHDKSETQAIFKKFARRAQNEFDLKIKNIRSDNGKEFKNTCIESFLDEEGIKHEFSAPYSPQQNGVAERKNRTLIEMARTMLDEYKTSDRFWVEAVNTACHAINRLYLHRLLKKTLYELLTGNKPNVSYFRVFGSKCYILNKKARSSKFAPKVDEGFLLGYGSNECAYHVFNKTSGIVEIACDVTFDETNGSQVEQVDSHVLGEEDPSEAIKRLALGDVRPREPQQGASSSTQVEPPTSTQADDPSTSSLDQGEEGEQVPPSPINLACPRIHQSIQRDHPTDNILGDINKGVSTRSRIANFCEHYSFVSSLEPLRVEEALNDPDWVMAMQEELNNFTRNEWIFRNKQDEAEVVIRNKARLVAQGFTQIEGLDFGETFAPVARLESIRILLAFATNLNFKLYQMDVKSAFLNGPINELVYVEQPPGFKDPKYPNHVYKLHKALYGLKQAPRAWYECLRNFLVKNGFEIGKADSTLFTKRHDNDIFVCQIYVDDIIFGSTNKSFSEEFSRMMTKRFEMSMMGELKFFLGLQIKQLKEGTFICQTKYLKDMLKKFGMKNAKPIHTPMPSNGHLDLNEQGKDVDQKVYRSIIGSLLYLCASRPDIMLSVCMCARFQATPKECHLVAVKRILRYLVHTPNLGFWYPKGARFDLIGYADADYAGCKVDRKSTSGTCQFLGRSLVSWSSKKQNSVALSTAEAEYVSAGSCCAQLLWMKQTLRDYGLNVSKIPLLCDNESTIKIANNPVQHSQTKHIDIRHHFLRDHSTKGDIDIQHVRTDKQLADIFTKPLDETRFCELRSELNILDSRNVA

SEQ ID NO: 25878 - protein, 469 aa, Oryza sativa
  Clone ID: TF_OsC1528_1619.pep
MAENDRKTGPGVAEGDWRDLRGSAMDGAPDARAEERAEPKQQSGSDFWAARQDIGQTWYKGLNRLAVQRLVTKCARMGRPSQADEIMRSRGTSRVEDWSHRIIANTTRVKDLLAQQGGSKALKGVKPAKMEDDDWEEMQLQAAATIRLCLSDQKLYGLKMQEGADLTAHVNVFNQLVTDLVKMDVEVDDEDKAIVLLCSLPKSYEHVVTTLTYGKETIKTKDITSALLARDQMRKNKEGETSQAEGLLVKEDHAGHKVKKNKKKKMVQCFRCDEWGHISRECPTLKGKAKANTVTSSNDSDSDGCDFLTMSSAQSKDAEAWILDSASLFHMTPRKEWFSSYKSGEFGFVYLGDDTSYPAMGVGEVKIKLEDGGEHVLQGVRHVPGLKRNLISLGTLHEEGLIFRGNRNRKTIEIMNGKMAVMTGEKVESHLYKLRGCTVAGGVQEEAVAGIAIAFGGGGSGADSSGGLQ

SEQ ID NO: 25879 - protein, 1112 aa, Oryza sativa
  unsure (1)..(1112): unsure at all Xaa locations
  Clone ID: TF_OsC359_5822.pep
MIVRQHRPFNSSSFHQGASGSQNHQGGQPNCSAAPRPPTAPAQSAPSAEAKKETGTKPGSCFNCGEHGHFADKCPKPRRAGPRFVQAHVNHASAEEAQPAPEVVLGTFPINSVPATVLFDSGATHSFISKKFVGIHGLRKEELSTPMRVHTPGNSSTLVSYSPSVLIEIHRSRFLANLILLESKDLDVILGMDWMTKFKGVIDCANRTVTLTNEKGETVVYKSPVSRKQGISLNQIEVENPVAIEEKSSRKLEDISIVCEYPEVFPEDLTTMPPKREIEFRIDLAPGTAPIYKRPYRMVANELAEVKKQVDEQLQKGYIRPSTSPWGAPVIFVQKKDKTKRMCVDYRALNEVTIKNKYPLPRIDDLFEQLKGAKVFSKIDLRSGYHQLRIREEDISKTAFTTRFGLYECTVMSFGLTNAPAFFMNLMNKVFMEFLDKFVVVFIDDILIYSKSEEEHEQHLRLVLEELKEQQLYAKFSKCDFWLSEDKFLGHVITAQGIAVDPANVESVTKWTPPKTVSQIRSFLGLAGYYRRFIEIFSRIARPMTQLLKKDEKFKWTAECDKSFEELKKKLVSAPVLILPDQTKDFQVYCDASRHGLGCVLMQEGRVVAFASRNRCEVYTDHKSLKYIFTQPDLNLRQRRWLELIKDYDMSIHYHPGKANVVADALSRKSYCNALCTEGMCKELQQELERLNMGIVEHGFVAALEARPTLVDQVRAAQVNDPEIAELKKNMRVRKARDILEDEHGMIWMGERLCVPDDKELNDLILTEAHQTQYSIHPGSTKMYQDLKEKFWWASMKREIAEFVALCDVCQRVKAEHQRPAGLLQPLQIPEWKWEEIGMDFITGLPRTSSGHDSIWVVVDRLTKVAHFIPVHTTYTGKXFSYNNSYQASLHMAPFKALYGWKCXRSIVRPLFWDQTGERQLFGTEVLTEAEEKVRTVRERLRIAQSRQKSYADNLRRELTFEAGDYVYLRVTPLRGVHRFQTKGKLAPRFVGPYRILERRGEVAYQLELPSNMIGIHDVFHVSQLKKCLRVPEEQADSEHINIQEDLTYVEKPVRILETSERRTRNKVTRFCRVQWSHHSDEEATLEREDELKAAHPHLFTSSSESRGRDSV

SEQ ID NO: 25880 - protein, 1764 aa, Oryza sativa
  unsure (1)..(1764): unsure at all Xaa locations
  Clone ID: TF_OsC359_6222.pep
MADHPPNHRGEGMDDFVAELARMTLVVGYPNAPEYSTVPPLNGELPHRVRLEVHGYVGTCLANMVVEASGGTADHACXEAAYLMMARLRERHNYIFCNTAYHFHPRRASGDDVNTFRPTAGENDTTFGHMCAVMRGMDRMHSDLHKASKALNDRKLVRIIALKDEIARLKKENAXLKGLSALGGVRIRTTPRKSTTAPVRIQLAPRNPPPPAAPPAAPPAVPVAPVSAPASALSFAPASAARGLASGSHDRSSSMVNTRNGSRAAGEDSNSEERTDGGHPNSASGNGPPLLPENPTLAQVMTHQTQMMAAMMQQQHQQMHQRMQQQTEQQQQXQFGPPLPQFKLPEFLRVRLPTFSSTTNPMEANDXLHAIEKKLNLLQCNDQEKVAFATHQLQGPTSAWWDNHMATRSLGTEVTWAEFCRSFRKAQVPDGVVVQKKREFRALHQGNRTVTEYLYEFNRLARYAPEDVRTDAEKQEKFLAGLDDELTNQLISGDYADFEKLVDKAIHQEDQRNKMDRKRKAAQFRSNQGSHQRPRFFPGQQGGPTTMIVRQHRPFNSSSFHQGANGSQNHQGGQPNRSAAPRPPMAPAXSAPSAQAKKETGTKPGSCFNCGEHGHFADKCPKPRRAGPRFVQARVNNATVLFDSAPEVVLGTFPVNSIPATVLFDSGATHSFISKKFVGIHGLIREELSTPMRVHTPGNSSTSVQFSPSIRIEIQRSPFLANLILLESKDLDVILGMDWLTKFKGVIDCANRTVTLTSEKGETLVYKSPVSPKQGASLNQIEVEIPAVTEEKSSRKLEDIPIVCEYPEVFPEDLTTMPPKREIEFRIDLTPRTAPIXKRPYRMAANELAEVKKQVDEQLQKGYIRPSTSPWGAPVIFVEEKDKTKRMCVDYRALNEVTIKNKYLLPRIDDLFDQLKGAKVFSKIDLRSGYHQLRIQEENIPKTAFTTRYGLYECTVMSFGLTNAPAFFMNLMNKVFMEFLDKFVVVFIDDILIYSKSEEEHEKLKEHQLYAKFSKCDFXLSEVKFLGHVITAQGVAVNPLNVESVTKWTPPKTVSQIRSFLGLAGYYCRFIENFSRIARPMTQLLKKDEKFKWTAECDKSFEELKERLVSAPVLILPDQTKDFQVYCNTSRHGPGCVLMQEGRVVVYASWQLCPHEGNYPTHDLELAAVVHDLKIWRRYLIGNRCEVYTDHKSLKYIFTQPDLNLRQRRWLELIKDYDMSIHYHPGKANVVADALSRTSYCNALCTEGMCKELQQELEHFNLELVEHGYVAALEARPTLVDQVRAAQVNDPEIAELKKNTRVGKARDFLEDEHGTIWMGERLCVPDDKELKDLILTEAHQTQYSIHPGSTKMYQDLKEKFXXASMRREIAEFVALCDVCQLVKAEHQRLVGLLQPLQIPEWKWEEIGMDFITGLPRTSSGHNSIWVVVDRLTKVAHFIPVHTTYTGKRLAELYLSRIMCLHGVPKKIXSDRGSQFTSNFWQKLQEELGTRLNFSTTYHPQTDGQTERVNQILEDMLKACALDFGGAWDKNLPYVEFSYNNSYQASLQMAPFEALYGRKCRTPLFWDQTGERQLFGTEVLTEAEEKVRTVRERLRIAQSRXKSYTENRRRELTFEAGDYVYLRVTPLRGVHRFQSKGKLAPRFVGPYKILERRGEVAYQLELPSNMIGIHDVFHVSQLKKCLRVPEEQADSEHIDIQEDLTYVEKPVRILETSERRTRNKVTRFCRVQWSHHSEEETTWEREDELKAAHPHLFASSSESRGRDSV

SEQ ID NO: 25881 - protein, 965 aa, Oryza sativa
  unsure (1)..(965): unsure at all Xaa locations
  Clone ID: TF_OsC359_7153.pep
MAAAQPVRAAMAKSTPTVDIPTAPLAMGNRAVTEYLHEFNRQARYAPEDVRTDAEKQEKFLAGLDDELTNQLISRDYADFEKLVDKAIRQEDQRNKMDRKRKAAQFRSNQGSHQRPRFTPGQQGGPTTMIVHQYRPFNSSSFHQVASGSQNHPGGQPNRSAAPRPPMATAQAAPSVQAKKETGVKPGSCFNCGEHGHFADKCPKLRRAGPRFAQARVNHASAEEAQAALEVVLEIQISPFLANLVLLESKDLDVILGMDWLTKFKGIIDCANRTVTLTNERGETVVYKSPVALKQGISLNQIEVENSVVTAEKSSRKLEDIPIVCEYSEVFPEDLTTMPPKREIEFRIDLAPGTAPIYKRPYRMAANELAEVKKQVDEQLQKGYIRPSTSPWGAPVIFVEKKDKTKRMCVDYRALNEVTIKNKYPLPRIDDLFDQLKGAKVFSKIDLRSGYHQLRIREEDIPKTAFTTRYGLYECTVMSFGLTNAPAFFMNLMSKVFMEFLDKFVMVFIDDILIYSKSEEEHEQHLRLVLEKLKEHQLYAKFSKCDFWLSEVKFLGHVITAQGVAVDPSNVESVTKWTPPKTVSQIRSFLGRAGYYRRFIENFSRIARPMTQLLKKDEKFKWTAECDKGFEELKKKLVSALVLNLPDQTKDFQVYCDASRHGLGCILMXGRVVAYASRQLRLHEGNYPTHDLELAARHGLRSWIKSEQLMXYPEIAELKKNMRVGKARDFHEDEHGTIWLGERLCVPDDKELKDLILTEAHQTQYSIHPGSTKMYQDLKEKFWWASMRREIAEFVALCDVCQRVKAEHKRPAGLLQPLQIPEWKWEEIGMDFITDGQTESVNQILEDMLRACALDFGGAWDKSLPYAEFSYNNNYQASLQMAPFEALYGRKCRTPLFWDQTGKRQLFGTEVLTEAEEKVRTIRERLRIAQSRQKSYADNRRRELTFEAGDYVYLRVTPLRGVHRF

SEQ ID NO: 25882 - protein, 167 aa, Oryza sativa
  Clone ID: TF_LIB4371-025-R1-K1-B10.pep
GDECVFVHLPPPTGGCSLRRPPSRKSPAAAPSSSWADVVRAPRAGPPTLSQRDIEAGWCVVKRRSKSSSAGPTTAISPPASARPIPRWLQGRCFCCLGLGHLKAACKEPRRCYRCWYPGHLERDCKEGSSPKRAAGTAAATLAKAAQIATAKKGGAPLTARLAKKGG

SEQ ID NO: 25883 - protein, 2007 aa, Oryza sativa
  Clone ID: TF_OsC359_5505.pep
MEPEISAADSFPSGRPLSLPTLFKRSPCLSPPFPPLAALSPRRIRARAVVLSLRRRRRAPVRRRRRPVPPPASASPPSASPRSRRPRPLLRFARQPPEHRRPRRPEPRRRLSPLWSPFPSSPSTRGEPRTAISFPPSLPSLGRRSACLWPPPATIGARARRLPSAVPARPPSGAPRGCQVGPGRQPPAPAGTADAWDPRRQPASAACARSTVDPPRPYKDRSSGLCCKALPYFHMSSGANEGYTSCGPVVEMSWHRAGVLLLGAQSCLHVPGVPAVGGIGSVLLSMARMGWKLCHVFRLYTVVMAGSVTRRGLDMTGFVLELRGMCVVLGYPHGVDYQGRPLPEQEGDDGEPHAAWEVTAVILAGSPERTSLAVTAGGDSFPAASQSAALLAIGTLHQRYPDELQHSPYRYHPRRGGARDYATFRDASSEDDATIVHLARMVEAYDAARIDFHQMVRRGMVENNLKILELRQENLQLKKDLDAVEAQLHQLKIAQGEVCRPKRRRVCRSQKITARKSTSRPELVRQSLAWTCFVETPRAEPAPVVPQEGEASGVGSTEDALLLTFRPGPSQRRSANTGDGNQPEGSNHHHQGSPPPPPPPPPPPPPDTNAILTQILAQQANMMTAFLHHLQNPPQHNAPPPPPQHSKLAEFLRIRPPTFSSSNNPVDALDWLHAVGKKLDTVQCSDEEKVIFAAHQLQGPASLWWDHFQATQPEGQPITWARFTAAFRRTHVPAGVVALKKREFRELKQGNRSVMEYLHEFNNLARYAPEDVREDEEKQEKFLAGMDPELSVRLVSGDYPDFQRLVDKSIRLEAKHKELESHKRRLANFRNQQGANQRIRYTNPYPGGSSSQQQQQQQQPRFAPRPQFVVRVPQPQQQQNQQGTRAPRPPTPTVQPGQGRRDAQGPQRLCFNCFEPGHFADKCPKLRRQQGQAPSRSNNGEKDVIWGRVNHVTAEDVLTTPDVIVGTFLIHSIPATILFDSGASHSFISVPFVGRNQLGVERLRNPLLITTPGGVMTAKYYSPAVPIEIQGIPFPSDLILLDTKNLDVILGMNWLAQFQGVVDCARRTVTLYRGPEQPVVFFAPPTSVSSSELHQIELLEIPIVREFGDVFPEELPGMPPKREIEFRIDLAPGTTPLYKRPYRTAANELAEVKKQLEELKEKGYIRPSTSPWGAPVIFVEKKDKTKRMCVDYRALNELKGATVFSKIDLRSGYHQLRIREEDIPKTAFTTRYGLYEFTVMSFGLTNAPAFFMNLMNKVFMEYLDKFVVVFIDDILVYSQSEEDHQHHLRLVLGKLREHQLYAKLSKCEFWLSEVKFLGHVISAKGVAVDPETVTAVTDWKQPKTVTQVRSFLGLAGYYRRFIENFSKIARPMTQLLKKEEKFVWSPQCEKAFKTLKEKLVSSPVLILPDTRKDFMDGHVVAYASRQLRPHEGNYPTHDLELAAVVHALKIWRHYLIGNRCEIYTDHKSLKYIFTQSDLNLRQRRWLELIKDYDVGIHYHPGKANVVADALSRESHCNTLNVRGIPPELSQQMEALNLSIVGRGFLAALEAKPTLLDQIREAQKNDPDMHGLLKNMKQGKAAGFTEDEHGTLWNGNRVCVPDNRELKQLILQEAHESPYSIHPGSTKMYLDLKEKYWWVSMKREIAEFVALCDVCQRVKAEHQRPAGLLQPLQVPEWKWDEIGMDFITGLPKTQGGYDSIWVVVDRLTKVARFIPVKTTYGGNKLAELYFARIVSLHGVPKKIVSDRGSQFTSHFWKKLQEELGTRLNFSTAYHPQTDGQTERLNQILEDMLRACVLDFGKTWDKSLPYAEFSYNNSYQASIQMAPYEALYGRKCRTPLLWDQVGESQVFGTDILREAEAKVRTIRDNLKVAQSRFRTKGKLAPRYVGPFRIVARRGEVAYQLELPASLGNVHDVFHVSQLKKCLRVPSEQTDPEQIEVREDLTYVERPVKILDTMERRTRNRVIRFCKVQWSNHAEEEATWEREDELKAAHPDLFASSSESRGRDSV

SEQ ID NO: 25884 - protein, 1787 aa, Oryza sativa
  unsure (1)..(1787): unsure at all Xaa locations
  Clone ID: TF_OsC359_5520.pep
MSWHRAGVLLLGXSVLPACPGSSGRRXGIGSVLLSMARMGWKLCHVFRLYTVVMAGSVTRRGLDMTGFVLELRGMCVVLGYPHGVDYQGRPLPEQEGDDAEPHAAWEVTAVILAGSPERTSLTVTAGGDSFPAACQSAALLAIGTLHQRYPDELQHSPYRYHPRRGGARDYATFRDASSEDDATIMHLARMVEAYDAARIDFHQMVRRGMVENNMKILELRQENLQLKKDLDAVEAQLHQLKIAQGEVCRPKRRRVCRSQKITARKSTSRPELVRQSLAWTCFVETPRAEPAPVVPQEGEASGVGSTEDALLLTFRPGPSQRRSAATGDSNQPEGSNHHHQGSPPPPPPPPPPPPDTNAILTQILAQQADMMAAFLHHIQNPPQHNAPPPPSQHSKLAEFLRIRPLTFSSSNNPVDALDWLHAVGKKLDTVQCSDEEKVIFAAHQLQGPASLWWDHFQATQPEGQPITWARFTAAFRRTHVPAGVVALKKREFRELKQGNRSVTEYLHEFNNLARYAPEDVREDEEKQEKFLAGMDPELSVRLVSGNYPDFQRLVDKSIRLEAKHKELESHKRRLANFRNQQGANQRVRYTNPYPGGSSSQQQQQQQQPRSAPRPQFVVRVPQPQQQQNQQGTRAPRPPTPTVQPGQGRRDAQGPQRLCFNCFEPGHFADKCPKPRRQQGQAPPRSNNGGKDVIRGRVNHVTAEDVLTTPDVIVGTFLIHSIPATILFDSGASHSFISVPFVGRNQLGVERLRNPLLITTPGGVMTAKYYSPAVPIEIQGIPFPSDLILLDTKNMDVILGMNCSSELHQIGLSEIPIVREFGDVFPDELPGMPPKREIEFRIDLAPGTTPLYKRPYRMAANELAEVKKQLEELKEKGYIRPSTSPWGAPVIFVEKKDKTKRMCVDYRALNEVTIKNKYPLPRIDDLFDQLKGATVFSKIDLRSGYHQLRIRDEDIPKTAFTTRYGLYEFTVMSFGLTNAPAFFMNLMNKVFMEYLDKFVVVFIDDILVYSQSEEDHQHHLCLVLGKLREHQLYAKLSKCEFWLSEVKFLGHVISAKGVAVDPETVTAVTDWKQPKTVTQVRSFLGLAGYYRRFIENFSKIAQPMTQLLKKEEKFVWSPQCEKAFKTLKEKLVASPVLILPDTRKDFMVYCDASRQGLGCVLMQDGHVVAYASRQLRPHEGNYPTHDLELAAVVHALKIWRHYLIGNRCEIYTDHKSLKYIFTQSDLNLRQRRWLELIKDYDVGIHYHPGKANVVADALSRKSHCNTLNVRGIPPKLSQQMEALNLSIVGRGFLAALEAKPTLLDQIREAQKNDPDMHGLLKNMKQGKAAGFTEDEHGTLWNGNRVCVPDNRELKQLILQEAHESPYSIHPGSTKMYLDLKEKYWWVSMKREIAEFVALCDVCQRVKAEHQRPAGLLQPLQVPEWKWDEIGMDFITGLPKTQGGYDSIWVVVDRLTKVARFIPVKTTYGGNKLAELYFARIVSLHGVPKKIVSDRGSQFTSHFWKKLQEELGTRLNFSTAYHPQTDGQTERLNQILEDMLRACVLDFGKTWDKSLPYAEFSYNNSYQASIQMAPYEALYGRKCRTPLLWDQVGESQVFGTDILREAEAKVRTIRDNLKVAQSRQKSYADNRRRNLEFAVDDFVYLRVTPLRGVHRFQTKGKLAPRYVGPFRIVARHGEVAYQLELPASLGNVHDVFHVSQLKKCLRVPSEQADSEQIEVREDLTYVERPVKILDTMERRTRNRVIRFCKVQWSNHAEEEATWEHEDELKAAHPDLFASSSESRGRDSV

SEQ ID NO: 25885 - protein, 838 aa, Oryza sativa
  unsure (1)..(838): unsure at all Xaa locations
  Clone ID: TF_OsC359_5522.pep
MSWHRAGVLLLGAQSCLPVPGVPAMAGSVTRRGLDMTGFVLELRGMCVVLGYPHGVDYQGRPLPEQEGDDGEPHAAWEVTAVILAGSPERTSLAVTAGGDSFPAASQSAALLAIGTLHQRYPDELQHSPYRYHPRRGGARDYATFRDASSEDDATIVHLARMVEAYDAARIDFHQMVRRGMVENNLKILELRQENLQLKKDLDAVEAQLHQLKIAQGEVCRPKRRRVCRSQKITARKSTSRPELVRQSLAWTCFVETPRAEPAPVVPQEGEASGVGSTEDALLLTFRPGPSQRRSANTGDGNQPEGSNHHHQGSPPPPPPPPPPPPPDTNAILTQILAQQANMMTAFLHHLQNPPQHNAPPPPPQHSKLAEFLRIRPPTFSSSNNPVDALDWLHAVGKKLDTVQCSDEEKVIFAAHQLQGPASLWWDHFQATQPEGQPITWARFTAAFRRTHVPAGVVALKKREFRELKQGNRSVMEYLHEFNNLARYAPEDVREDEEKQEKFLAGMDPELSVRLVSGDYPDFQRLVDKSIRLEAKHKELESHKRRLANFRNQQGANQRIRYTNPYPGGSSSQQQQQQQQPRFAPRPQFVVRVPQPQQQQNQQGTRAPRPPTPTVQPGQGRRDAQGPQRLCFNCFEPGHFADKCPKLRRQQGQAPSRSNNGEKDVIWGRVNHVTAEDVLTTPDVIXREFGDVFPEELPGMPPKREIEFRIDLAQETTPLYKRPYRMAANELAEVKKQLEELKEKGYIRPSTSPWGAPVIFVEKKDKTKRMCIDYRALNEVTIKTKYPLPRIDDLFDQLKGATVFSKIDLRSGYHQLRIREEDIPKTAFTTRYGLYEFT

SEQ ID NO: 25886 - protein, 540 aa, Oryza sativa
  unsure (1)..(540): unsure at all Xaa locations
  Clone ID: TF_OsC359_5526.pep
MKILELRQENLQLKKDLDAVEAQLHQLKIAQGEVCRPKRRRVCRSQKITARKSTSRPELVRQSLAWTCFVETPRAEPAPVVPQEGEASGVGSNHNHQGNPPPPSXPPPPPPPDTNAILTQILAQQANMMTTFLHHLQNPPQQNAPPPPPQHSKLAEFLRIRPPTFSSSNNPVDALDWLHAVGKKLDTVQCSDEEKVIFAAHQLQGPASLWWDHFQATQPEGQPITWARFTAAFRRTHVLAGVVALKKREFRELKQGNRSVMEYLHEFNNLARYAPEDVREDEEKQEKFLAGMDPELSVRLVSGDYPDFQRLVDKSIRLEAKHKELESHKRRLANFRNQQGANQRVRYTNPYPGGSSSQQQQQQQQPRSAPRPQFVVRVPQPQQQQNQQGTRAPRPPTPAVQPGQGHRDAQGQQRLCFNCFEPGHFADKCPKPRRQQGQAPPRSNNGGKDVIRGRVNHVTAEDVLTTPDVIVEKKDKTKRMCVDYRALNEVTIKNNVSRQSTNDRPDSSNHSKYPNGNGMKLGWISSPDFQRPKVDMILYG

SEQ ID NO: 25887 - protein, 710 aa, Oryza sativa; identical to SEQ ID NO: 19196
  Clone ID: TF_OsC359_5535.pep

SEQ ID NO: 25888 - protein, 1319 aa, Oryza sativa; identical to SEQ ID NO: 19056
  Clone ID: TF_OsC359_5541.pep

SEQ ID NO: 25889 - protein, 833 aa, Oryza sativa
  unsure (1)..(833): unsure at all Xaa locations
  Clone ID: TF_OsC359_5556.pep
MSSGANEGYTSCGPVVEMSWHRAGVLLLGAQSCLPVPEVPAVGGIGSMYTSDQSIIYSNSRALGYGQAEQCTQMAGSVTRRGLDMTGFVLELRGMCVVLGYPHGVDYQARPLPEQEGDDAEPHAGWEVTAVILAGSPERTSLAVTAGGDSFPAACXNAAFLAIGTLHQRYPDELQHSPYRYHPRRGGARDYATFRDASSEDDATIMHLARMVEAYDAARIDFHQMVRRGMVENNMKILELRQENLQLKKDLDAVEAQLHQLKIAQGEVCRPKRRRVCRSQKITARKSTSRPELVRQSLAWTCFVETPRAEPAPVVPQEGEASGVGSTEDALLLTFRPGPSQRRSAATGDGNQPEGSNHHQGSPPPPPPPPPPPPPDTNAILTQILAQQANMMTAFLHHLQNPPQHNAPPPPPQHSKLAEFLRIRPPTFSSSNNPVDALDWLHAVGKKLDTVQCSDEEKVIFAAHQLQGPASLWWDHFQATQPEGQPITWARFTAAFRRTHVPAGVVALKKREFRELKQGNRSVMEYLHEFNNLARYAPEDVREDEEKQEKFLAGMDPELSVRLVSGDYLDFQRLVDKSIRLEAKHKELESHKRRLANFRNQQGANQRVRYTNPYPGGSSSQQQQQQQQPRSAPRPQFVVRVPQPQQQQNQQGTRAPRPPTPTVQPGQGRRDAQGPQRLCFNCFEPGHFADKCPKPRRQQGQAPPRSNNGGKDVIRGRVNHVTAEDVLTTPDVIVGTFLIHSIPATILFDSGASHSFMSVPFVGRNQLGVERLRNPLLITTPGGVMTANVSRQSTNDRPDFSNLSKYQNGNGMKLGWISSPDFQKPKVDMILYG

SEQ ID NO: 25890 - protein, 1779 aa, Oryza sativa
  unsure (1)..(1779): unsure at all Xaa locations
  Clone ID: TF_OsC359_5558.pep
MSSGANEGYTSCGPVVEMSWHRAGVLLLGAQSCLPVPGVPAVGGVGSMYTSDQSIIYSNSRALGYGQAEQCTQMAGSVSRRGLDLTSFVLELRGMCVALGYPHGVDYQGRPLPEQEGDDAEPHAAWEVTAVILTGSPERTSLAVTAGGDSFSAACQNAALLAIGTLHQRYLDELQHSPYRYHPRRGGARDYATFRDASSEDDATIMHLARMVXAYDAARIDFHQMVRPGMVENNMKILELRQENLQLKKDLDVVEAQLHQLKIAQGEVCRPKRCRVCRSQKITARKSTSRPELVRQSLAWTCFVETPRAEPAPVVPQEGEASGVGSTEDALLLTFHXTTRRSAATGDGNQPEGSNHNNHGSPPPPPPPPPPDTNAILTQILAQQANMMAVFLHHIQNPPHHNAPPPPPQHSKLAEFLRIRPPTFSSSNNPVDALDWLHAVGKNLDTVQCSDEEKVVFAAHQLQGPASLWWDHFQATQPEGQPITWARFTAAFRRTHVPAGVMALKKREFRELKQGNRSVMEYLHEFNNLARYAPEDVREDEEKQEKFLAGMDPELSVRLVSGDYPDFQRLVDKSIRLEAKHKELESHKRRLANFRNQQGANQRIRYTNPYPGGSSSQQQQQXQQPRSAPRPQFVVRVPQPQQQQSQQGTHAPRPPTPAAQSGQGRRDVQGPQRLCFNCFEPGHFADKCPKSRRQQGQAPPRSNNGGKDVIRGRVNHVTAEDVLTTPDVIVGTFLIHSIPATILFDSGASHSFISVPFVGRNQLGVERLRNPLLITTPGGVMTAKYYSPAVPIEIQGIPFPSDLILLDTKNLDVILGMNWLAQFQGVVDCARRTVTLYRGPEQPVVFFAPPTSVSSSELHQIGLSEIPIVREFGDVFPEELPGMPPKREIEFRIDLATGTTPLYKRPYRMAANELAEVKKQLEELKEKGYIRPSTSPWGAPVIFVEKKDKTKRMCVDYRALNEVTIKNKYPLPRIDDLFDQLKGATVFSKIDLRSGYHQLRIREEDIPKTAFTTRYGLYEFTVMSFGLTNAPAFFMNLMNKVFMEYLDKFVVVFIDDILVYSQSEEDHQHHLRLVLGKLREHQLYAKLSKCEFWLSEVKFLGHVISAKGVAVDPETVTAVTDWKQPKTVTQIRSFLGLAGYYRRFIENFSKIARPMTQLLKKEEKFVWSPQCEKAFQTLKEKLVSSPVLIMPDTRKDFTVYCDASRQGLGCVLMQDGHVVAYASRQLRPHEGNYPTHDLELAAVVHALKIWRHYLIGNRCEIYTDHKSLKYIFTQSDLNLRQRRWLELIKDYDVGIHYHPGKANMVADALSRKSHCNTLNVRGIPPELNQQMEALNLSIVGRGFLAALEAKPTLLDQIREAQKNDPDMRGLLKNMKQGKAAGFTEDEHGTLWNGNRRVKAEHQRPAGLLQPLQVPEWKWDEIGMDFITGLSKTQGGYDSIWVVVDRLTKVARFIPVKTTYGGNKLAELYFARIVSLHGVPKKIVSDRGSQFTSHFWKKLQEELGTRLNFSTTYHPQTDGQTERLNQILEDMLRACVLDFGKTWDKSLPYAEFSYNNSYQASIQMAPYEALYGCKCRTLLLWDQVGESQVFGTDILREAKAKVRTIRDNLKVAQSRQKSYADNRRRDLEFAVDDFVYLRVTPLRGVHRFQTKGKLAPRFVGPFRIIARCGEVAYQLELPASLGNVHDVFHVSQLKKCLRVPSEQADSEQIEVREDLAYVERPVKILDTMERRTRNRVIRFCKVQWSNHAEEEATWEREDELKAAHPDLFASSSESRGRDSV

SEQ ID NO: 25891 - protein, 1050 aa, Oryza sativa
  unsure (1)..(1050): unsure at all Xaa locations
  Clone ID: TF_OsC359_5560.pep
MEPRSPRPIPPSPAALSPSRRYIFAPRAFLLRFRRSPLALAVGFVLATSTSLSAVAADLRYAADVAPGSLPTRRHLHPLRRVVVHPVRPFASPADRRSSVALVIPNRAAVFLRFGRRCRRRRRPGVSRRPSLRFPLLSSLSGAAPPRRWSPAVTIGARVRRLPSAVPARPPSGAPRGCQVGPGRQPPAPAGAADAWDPRRRPPPAACSRSTVDPPRPFKDRSSGLCCKALPYFHMSSGANEGYTSCGPVVEMSWQRVGALLLGAQSCLPVPGVPAVGGIGSMYTSNQSIIYSNSRALGYGQAEQCTQMAGSVTRRGLDMTGFVLELRGMCVVLGYPHGVDYQARPLPEQEGEDAEPHAGWEVTAVILSGSPGRTSLAVTAGGDSFPAACQNAALLAIGTLHQRYPDELQHSPYRYHPRRGGARDFATFRDASSEDDATIVHLARMVEAYDAARIDFHQMVRRGMVENNMKILELRQENLQLKKDLDAVEAQLHQLKIAQGEDCRPKRRRVCRSQKITARKSTSRPELVRQSLAWTCFVETPRVEPVPVVPQEGEASGVGSTEDAPLLTFXVTTRRNVNTGDGNQPEGSNHNHQGNPPPPPPPPPPPPPDTNAILTQILAQQANMMTAFLHHLQNPSQQNAPPPPPQHSKLAEFLRIRPPTFSSSNNPVDALDWLHAVGKKLDTVQCSDEEKVIFAAHQLQGPASLWWDHFQATQPEGQPITWARFTAAFRRTHVPAGVVALKKREFRELKQGNRSVMEYLHEFNNLARYAPEDVREDEEKQEKFLAGMDPELSVRLVSGDYPDFQRLVDKSIRLEAKHKELESHKRRLASFRNQQGANQRVRYTNPYPGGSSSQQQQQQQQPRSAPRPQFVVRVPQPQQQQNQQGTRAPRPPTPAVQPVQGRRDAQGPQRLCFNCFEPGHFADKCPKPRRQQGQAPPRPNNGGKDVIRGRVNHVTAEDVLTTPNVIVGTFLIHSIPATILFDSGASHSFISVPFVGKNQLGVERLRXNPLLITTPGGVMTAKYYSPAVPIEIQGIPFPSDLILLNTNNLD

SEQ ID NO: 25892 - protein, 1763 aa, Oryza sativa
  unsure (1)..(1763): unsure at all Xaa locations
  Clone ID: TF_OsC359_5596.pep
MSSGANEGYTSCGPVVEMSWHRAGVLLLGAQSCLPVPGVPAVGGIGSMYTSDQSIIYSNSRALGYGQAEQCTQMAGSVTRRGLDMTGFVLELRGMCVVLGYPHGVDYQARPLPKQEGDDAEPHAAWEVTAVILAGSPERTSLAVTAGGDSFPAACQNAALLAIGTLHQRYPDELQHSPYRYHPHRGGARDYATFRDASSEDDATIVHLARMVEAYDAARIDFHQMVRRGMVENNLKILELRQENLQLKKDLDAVEAQLHQLKIAQGEVCRPKRRRVCRSQKITARKSTSRPELVRQSLAWTCFVETPRAEPAPVVPQEGEASGVGSTEDALLLTFHXTTRRSANAGDGNQPEGSNRNHHGSPPPPPPPPPPPPPDTNAILTQILAQQANMMTAFLHHLQNPPQQNAPPPPPQHSKLAEFLRIRPPTFSSSNNPVDALDWLHAVGKKLDTVQCSDEEKVIFAAHQLQGPASLWWDHFQATQPEGQPITWARFTAAFRRTHVPAGVVALKKREFXELKQGNRSVMEYLHEFNNLARYAPEDVREDEEKQEKFLAGMDPELSVRLVSGDYPDFQRLVDKSIRLEAKHKELESHKRRLANFRNQQGANQRVRYTNPYPGGSSSQQQQQQQQPRSVPRPQYVVRVPQPQQQQSQQGTRAPRPPTPAVQSGQGCRDAQGQQRLCFNCFEPGHFADKCPKPRRQQGQAPPRSNNGGKDVIQGRVNHVTAEDVLTTPDVIVGTFLIHSIPATILFDSGASHSFISVPFVGRNQLGVERLRNPLLITTPGGVMTAKYYSPAVPIEIQGIPFPSDLILLDTKNLDVILGMNWLAQFQGVVDCARRTVTLYRGPEQPVVFFAPPTSVSSSELHQIGLSEIPIVREFGDVFPEELPGMPPKREIEFRIDLAPGTTPLYKRPYRMAANELAEVKKQLEELKEKGYIRPSTSPWGAPVIFVEKKDKTKRRCVDYRALNEVTIKNKYPLPRIDDLFDQLKGATVFSKIDLRSGYHQLRIREEDIPKTAFTTRYGLYEFTVMSFGLTNAPAFFMNLMNKVFMEYLDKFVVVFIDDILIYSQSEEDHQHHLRLVLGKLREHQLYAKLSKCEFWLSEVKFLGHVISAKGVAVDPETVTAVTDWKQPKTVTQVRSFLGLAGYYRRFIENFSKIARPMTQLLKKEEKFVWSPQCEKAFQTLKEKLVSSPVLVLPDTRKDFMVYCDASRQGLGCVLMQDGHVVAYASRQLRPHEGNYPTHDLELAAVVHALKIWRHYLIGNRCEIYTDHKSLKYIFTQSDLNLRQRRWLELIKDYDVGIHYHPGKANVVADALSRKSHCNTLNVRGIPPELNQQMEALNLGIVSRGFLAALEAKPTLLDQIREAQKNDPDMHGLLKNMKQGKAAGFTEDEHGTLWNGNRRVKAEHQRPAGLLQPLQVPEWKWDEIGMDFITGLPKTQGGYDSIWVVVDRLTKVARFIPVKTTYGGNKLAELYFARIVSLHGVPKKIVSDRGSQFTSHFWKKLQEELGXNQILEDMLRACVLDFGKTWDKSLPYAEFSYNNSYQASIQMAPYEALYGRKCRTPLLWDQVGESQVFGTDILREAEAKVRTIRDNLKVAQSRQKSYADNRRRDLEFAVGDFVYLRVTPLRGVHRFQTKGKLAPRYVGPFRIIARRGEVAYQLELPASLGNVHDVFHVSQLKKCLRVPSEQADSAQIEVREDLTYVERPVKILDTMERRTRNRVIRFCKVQWSNHAEEEATWEREDELKAAHPDLFASSSESRGRDSV

SEQ ID NO: 25893 - protein, 1778 aa, Oryza sativa; identical to SEQ ID NO: 19229
  Clone ID: TF_OsC359_5714.pep

SEQ ID NO: 25894 - protein, 673 aa, Oryza sativa
  unsure (1)..(673): unsure at all Xaa locations
  Clone ID: TF_OsC359_5748.pep
QILAQQANMMAAFLHHIQNLPQNNAPPPPPPPQHSKLAEFLRIRPPTFSSSHNPIDALDWLHAVGKKLDTVQCNDEEKVIFAAHQLQGPASLWWDHFQATQPEGQPITWARFTAAFRRTHVPAGVMALKKREFRELKQGNRSVMEYLHEFNNLARYAPEDVREDEEKQEKFLAGMNPELSVRLVSGDYPDFQRLVDKSIRLEAKQKELESHKRRLANFRNQXGANQRIRYTNPYPRGSSSQQQQQQPRSAPLPQFVPGQGHRDAQGQQRLCFNCFEPGHFADKCPKPRRQQGQAPPRPNNGGKDVIRGRVNHVTAEDVLTTPDVIVGTFLIHSIPATILFDSRASHSFISVPFVGRNQLGVERLMNPLLITTPGGVMTTKYYSPAVPIEIQGIPFPSDLILLDTKNXDVILGMNWLAQFQGVVDCARRTVTLYRGPDQPVVFFAPPTSAGSSVLHXLGLPEIPIVNEFGDVFPEELPGMPPKREIEFRIDLAPGTTPLYKRPYRMAANKLAEVKKQLEELKEKGYIRPSTSPWGAPVIFVEKKDKTKRMCVDYRALNEVTIKNKYPLPRIDDLFDQLKGATVFSKIDLRSGYHQLRIREKDIPKTAFTTLYGLYEFTVMSFGLTNASAFFMNLMNKVFMEYLDKFVVVFIDDILVYSQSEEDHQHGCRVGPGR

SEQ ID NO: 25895 - protein, 1703 aa, Oryza sativa
  unsure (1)..(1703): unsure at all Xaa locations
  Clone ID: TF_OsC359_5749.pep
MDISRANEGYTSCGPVVEMSWHRAGVLLLGXSVLPTCPGDSGRRXGIGSVLLSMARMGWKLCHVFRLYTVVMAGSINRRGLDLTGFVLELRGMCVVLGYPHGVDYQGRQLPEQEGDDAEPHAAWEVTAVILTGSPERTSLAVTAGGDSFSAACQNAALLAIGTLHQRYPDELQHSPYRYHPRRGGARDHATFRDASSEDDATIMHLARMVEAYDAARIDFHQMVRRGMVENSMKILELRQENLQLKKDLDAVEAQLHQLKIAQGEVCRPKRRRVCRSQKITARKSTSRPELVRQSLAWTCFVETPRAEPAPVVPQEGEASGVGSTEDALLLTFRPGPSQRRSANTGDGNQPEGSNHNNHGSPPPPPPPPPPPPLDTNAILTQILAQQANMMAAFLHHIQNPPQHNAPPPPPQHSKLAEFLRIRPPTFSSSNNPVDALDWLHAVGKKLDTVQCSDEEKVVFAAHQLQGPASLWWDHFQATQPEGQPITWARFTAAFRRTHVPAGVMALKKREFRELKQGNRSVMEYLHEFNNLARYAPEDVREDEEKQEKFLAGMDPELSVRLVSGGSSSQQQQQQQPRSAPRPQFVVRIPQPQQQQSQQGTRAPRPPTTAAQSGQGRRDVQGPQRLCFNCFEPGHFADKCPKPRRQQGQAPPRSNNGGKDVIRGRVNHVTAEDVLTTPDVIVGTFLIHSIPATILFDSGASHSFISVPFVGRNQLGVERLRNPPLITTPGGVMTAKYYSPAVPIEIQGIPFPSDLILLDTKNLDVILGMNWLAQFQGVVDCARRTVTLYRGPEQPVVFFAPPTSVSSLELHQIGLSEIPIVKEFGDVFPEELPGMPPKREIEFRIDLAPGTTPLYKRPYRMAANELAEVKKQLEELKEKGYIRPSTSPWGAPVIFVEKKDKTKRMCVDYRALNEVTIKNKYPLPRIDDLFNQLKGATVFSKIDLRSGYHQLRIREEDIPKTAFTTRYGLYEFTVMSFGLTNAPAFFMNLMNKVFMEYLDKFVVVFIDDIMVYSQSEEDHQHHLRLVLGKLREHQLYAKLSKCEFWLSEVKFLGHVISAKGVAVDPETVTAVTDWKQPKTVTQIRSFLGLAGYYRRFIENFSKIARPMTQLLKKEEKFVWSPQCEKAFQTLKEKLEGHVVAYASRQLRPHEGNYPTHDLELAAVVHALKIWRHYLIGNRCEIYTDHKSLKYIFTQSDLNLRQRRWLELIKDYDVGIHYHPGKANVVADALSRKSHCNTLVVRGIPPELNQQMEALNLSIVSRGFLATLEAKPSLLDQIREAQKNDPDMRGLLKNMKQGKAAGFTEDEHGTLWNGNRVCVPDVRELKQLILQEAHESPYSIHPGSTKMYLDLKEKYWWVSMKREIAEFVALCDVCQRVKAEHQRPAGLLQPLQVPEWKWDEIGMDFITGLPKTQGGYDSIWVVVDRLTKVARFIPVKTTYGGNKLAELYFARIVSLHGVPKKIVSDRGSQFTSHFWKKLQEELGTRLNFSTAYHPQTDGQTERLNQILEDMLRACVLDFGKTWDKSLTYAEFSYNNSYQASIQMAPYEALYGRKCRTPLLWDQVGESQVFGTDILREAEAKVRTIRDNLKVAQSRQKSYADNRRRDLEFAVDDFVYLRVTPLRGVHRFQTKGKLAPRFVGPFRIIARRGEVAYQLELPASLGNVHDVFHVSQLKKCLRVPSEQADSESNGATTPRKKLPGSVKTS

SEQ ID NO: 25896 - protein, 1664 aa, Oryza sativa
  unsure (1)..(1664): unsure at all Xaa locations
  Clone ID: TF_OsC359_5759.pep
MDISRANEGYTSCGPMAGSINRRGLDLTGFVLELRGMCVVLGYPHGVDYQGRQLPEQEGDDAEPHAAWEVTAVILTGSPERTSLAVTAGGDSFSAACQNAALLAIGTLHQRYPDELQHSPYRYHPRRGGARDHATFRDASSEDDATIMHLARMVEAYDAARIDFHQMVRRGMVENSMKILELRQENLQLKKDLDAVEAQLHQLKIAQGEMVTTRRSANTGDGNQPEGSNHNNHGSPPPPPPPPPPPPLDTNAILTQILAQQANMMAAFLHHIQNPPQHNAPPPPPQHSKLAEFLRIRPPTFSSSNNPVDALDWLHAVGKKLDTVQCSDEEKVVFAAHQLQGPASLWWDHFQATQPEGQPITWARFTAAFRRTHVPAGVMALKKREFRELKQGNRSVMEYLHEFNNLARYAPEDVREDEEKQEKFLAGMDPELSVRLVSGDYPDFQRLVDKSIRLEAKHKELESHKRRLANFRNQQGANQRIRYTNPYPGGSSSQQQQQQQPRSAPRPQFVVRVPQPQQQQSQQGTRAPRPPTPAAQSGQGRRDVQGPQRLCFNCFEPGHFADKCPKPRRQQGQAPPRSNNGGKDVIRGRVNHVTAEDVLTTPDVIVGTFLIHSIPATILFDSGASHSFISVPFVGRNQLGVERFRNPLLITTPGGVMTAKYYSPAVPIEIQGIPFPSDLILLDTKNLDVILGMNWLAQFQGVVDCARRTVTLYRGPEQPVVFFAPPTSVSSSELHQIGLSEIPIVREFGDVFPEELPDMPPKREIEFRIDLAPGTTPLYKRPYRMAANELAEVKKQLEELKEKGYIRPSTFPWGAPMIFVEKKDKTKRMCVDYRALNKVTIKNKYPLPRIDDLFDQLKGATVFSKIDLRSGYHQLRIREEDIPKTAFTTRYGLHGHIILVYSQSEEDHQHHLRLVLGKLREHQLYAKLSKCEFWLSEVKFLGHVISAKGVAVDPETVTXPDWKQPKTVTQIRSFLGLAGYYRXLLKKKYKFVWSPQCEKAFKTLKEKLVSSPVLILPDTRKDFMVYCDASRQGLGCVLMQEGHVVAYASRQLRPHEGNYPTHDLELAAVVHALKIWRHYLIGNRCEIYTDHKSLKYIFTQSDLNLRQRRWLELIKDYDVGIHYHPGKANVVVDALSQKSHCNTLNVRGIPPELNQQMEALNLSIVGRGFLAALEAKPTLLDQIREAQKNDPDMRGLLKNMKQGKAAGFTEDEYGTLWNGNRVCVPDNRELKQLILQEAHESPYSIHPGSTKMYLDLKEKYWWVSMKREIAEFVALCDVCQRVKAEHQRPAGLLQPLQVPEWKWDEIGMDFITGLPKTQGGYDSIWVVVDRLTKVARFIPVKTTYGGNKLAELYFARIVSLHGVPKKIVSDRGSQFTSHFWKKLQEELGTRLNFSTAYHPQTDGQTERLNQILEDMLRACVLDFGKTWDKSLPYAEFSYNNSYQASIQMAPYEALYGRKCRTSLLWDQVGESQVFGTDILREAEAKVRTIRDNLKVAQSWQKSYADNRRRNLEFAVDDFVYLRVTPLRGVHRFQTKGKLAPRYVGPFRIVARRGEVAYQLELPASLGNVHDVFHVSQLKKCLRVPSEQADSEQIEVREDLTYVERPVKILDTMERRTRNRVIRFCKVQWSNHAEEEATWEREDELKAAHPDLFASSSESRGRDSV

SEQ ID NO: 25897 - protein, 2355 aa, Oryza sativa
  Clone ID: TF_OsC359_5812.pep
MDEVGGRWTFSRANEGYTSCGPMAGSVTRRGLDMTGFVLELRGMCVVLEYPHGVDYQARPLPEQEGEDAEPHAGWEVTAVILSGSPERTSLAVTAGGDSFPAACQNAALLAIGTLHQRYPDELQHSSYRYHPRRGGARDFATFRDASSEDDATVVHLARMVEAYDAARIDFHQMVRRGMVENNMKILELRQENLQLKKDLDALEAQLHQLKIAQGEISRPKRRRVCRSQKITARKSTSRPELVRQSLAWTCFVETPRAEPAPVVPQEGEASGVGSSEGALLLTFRPGPSQRRNVNTGEGNQPEGSNPNPQGNPPPPPPPDTNAILTQILAQQANMMNAFLHHLQNPPQQNAPPPPPQHSKLAEFLRIRPPTFSSSNNPVDALDWLHAVGKKLDTVQCSDEEKVIFAAHQLQGPASIWWDHFQATQPAGQPITWARFTSAFRRTHYLHEFNNLARYAPEDVREDEEKQEKFLAGMDPELSVRLVSGDYPDFQRLVDKSIRLEAKHKELESHKRRLANFRNQQGANQRVRYTNPYPGGSSSQQQQQQQQPRSAPRPQFVVRVPQPQQQQNQQGTRAPRPPTPAVQPVQGRRDAQGQQRLCFNCFEPGHFADKCPKPRRQQGQAPPRSNNGGKDVIRGRVNHVTAEDVLTTPDVIVGTFLVQSIPATILFDSGASHSFISVPFVGRNQLGVERLRNPLLITTPGGVMTAKYYSPAVPIEIQGIPFPSDLILLDTKNLDVILGMNWLAQFQGVVDCARRTVTLYRGPEQPVVFFAPPTSVRSSELHQIELSEIPIVREFGDVFPEELPGMPPKREIEFRIDLAPGTTPLYKRPYRMAANELAEVKKQLEELKEKGYIRPSTSPWGAPVIFVEKKDKTKRMCVDYRALNEVTIKNKYPLPRIDDLFDQLKGATVFSKIDLRSGYHQLRIREEDIPKTAFTTRYGLYEFTVMSFGLTNAPAFFMNLMNKVFMEYLDKFVVVFIDDILIYSQSEEDHQHHLRLVLGKLREHQLYAKLSKCEFWLSEVKFLGHVISAKGVAVDPETVTAVTDWKQPKTVTQIRSFLGLAGYYRRFIENFSKIARPMTQLLKKEEKFVWSPQCEKAFQTLKEKLVSSPVLILPDTRKDFMVYCDASRQGLGCVLMQDGHVVAYASRQLRPHEGNYPTHDLELAAVVHALKIWRHYLIGNRCEIYTDHKSLKYIFTQSDLNLRQRRWLELIKDYDVGIHYHPGKANVVADALSRKSHCNTLNVRGIPPELSQQMEALNLSIVGRGFLAALEAKPTLLDQIREAQKNDPDMHGLLKNMKQGKAAGFTEDEHGTLWNGKRVCVPDSRELKQLILQEAHESPYSIHPGSTKMYLDLKEKYWWVSMKREIAEFVALCDVCQRVKAEHQRPAGLLQPLQVPEWKWDEIGMDFITGLPKTQGGYDSIWVIVDRLTKVARFIPVKTTYGGNKLAELYFARIVSLHGVPKKIVSDRGSQFTSHFWKKLQEELGTRLNFSTAYHPQTDGQTERLNQILEDMLRACVLDFGKTWDKSLPYAEFSYNNSYQASIQMAPYEALYGRKCRTPLLWDQVGESQVFGTDILREAEAKVRIIRDNLKVAQSRQKSYADNRRRDLEFAVDDFVYLRVTPLRGVHRFQTKGKLAPRYVGPFRIIARRGEVAYQLELPASLGNVHDVFHVSQLKKCLRVPSEQADSEQIEVREDLTYVEKPVKILDTMERRTRNRVIRFCKVQWSNHAEEEATWEREDELKAAHPDLVEVEAVDWENEQGKTHHLDHIESQTSWDPGSGCQFGLNHHRPWVKAAARAEEAAKEEAARARQAEATAAAGASTGPTPSGNPQATASGEARDVAAGTSPGPTSPGDAQDQTGPGDIPEPSTSSGGPSRIAFSPRRLFSSSSVAPLSAEPILQALAAANTAVLDGFSAQVEALRAERAELEAAWARVEEGRRSVDAMVEVGRKAHRRHISELEARKAALAEIAREVEEEREAALIATTAMIEAQDTLRLQHASWEAELKKKLDAAQGVLDSAAARERRVTETEAASRRREEALEARAMALEEHAGAVERGLTDREAAAVLREATLAAHEAACAEEECALRLREDALAERERALEEAEATTKRLADSLSLREAAQEEQARRNLECVRAERAALEQRAADLEAREKELDARARVGGAAAGESDLAARLAAAEHTVADMQRALDSSIGEAEALRLAGEMGPDMLWDSVSRMDRAGRQAGLWKGQTRMRPANLEGLAPHLNRMAWVLEQLPEELEKTIKSSSRDLARGAVELVLASYQARDPNFSPWMALEEFPPGTEDDARARVRDAADHIVNGFEGSAPRLAFAPSSDEEGDASGEDDGGDEAGDPGASE

SEQ ID NO: 25898 - protein, 1295 aa, Oryza sativa
  Clone ID: TF_OsC359_6001.pep
MVTPMVTTRRNVNTGEGNQPEGSNPNPQGNPPPPPPPDTNAILTQILAQQANMMNAFLHHLQNPPQQNAPPPPPQHSKLAEFLRIRPPTFSSSNNPVDALDWLHAVGKKLDTVQCSDEEKVVFAAHQLQGPASLWWDHFQATQPEGQPITWTRFTAAFRKTHVPAGVVALKKREFRELKQGSRSVMEYLHEFNNLARYAPEDVREDEEKQEKFLAGMDPELSVRLVSGDYPDFQRLVDKSIRLEAKHKELESHKRRLANFRNQQGANQRVRYTNPYPGGSSSQQQQQQQQQPRSAPRPQFVVRIPQPQQQQNQQGTRAPRPPTPTVQPVQGRRDAQGPQRLCFNCFEPGHFADKCPKPRRQQGQVPPRSNNGGKDVIRGRVNHVTAEDVLTTPDVIVELHQIGLSEIPIVREFGDVFPEELPGMPPKREIEFRIYLAPGTTPLYKRPYRMAANELAEVKKQLEELKEKGYIRPSTSPWGAPVIFVEKKDKTKRMCVDYRALNEVTIKNKYPLPRIDDLFDQLKGATVFSKIDLRSGYHQLRIREEDIPKTTFTTRYGLYEFTVMSFGLTNAPAFFMNLMNKVFMEYLDKFVMVFIDDILVYSQSEEDHQHHLRLVLGKLHEHQLYAKLSKCEFWLSEVKFLGHVISAKGVAVDPETVTAVTDWKQPKTVTQIRSFLGLAGYYRRFIENFSKIARPMTQLLKKEEKFVWSPQCEKAFQTLKEKLVSSPVLILPDTRKDFMVYCDASRQGLGCVLMQDGHVVAYASRQLRPHEGNYPTHDLELAAVVHALKIWRHYLIGNRCEIYTDHKSLKYIFTQSDLNLQQRRWLELIKDYDVGIHYHPGKANVVADALSRKSHCNTLNVRGIPPELNQQMEALNLSIVGRGFLAALEAKPTLLDQIREAQKNDPDMHGLLKNMKQGKAAGFTEDEHGTLWNGNREKYWWVSMKREIAEFVALCVVCQRVKAEHQRPAGLLQPLQVPEWKWDEIGMDFITGLPKTQGGYDSIWVVVDRLTKVARFIPVKTTYGGNKLAELYFARIVNLHGVPKKIVSDRGSQFTSHFWKKLQEELGTRLNFSTAYHPQTDGQTERLNQILEDMLRACVLDFGKTWDKSLPYAEFSYNNSYQASIQMAPYEALYGRKCRTPLLWDQVGESQVFGTDILREAEAKTKGKLAPRFVGPFRIIARRGEVAYQLELPASLGNVHDVFHVSQLKKCLRVPSEQADSEQIEVREDLTYVERPVKILDTMERRTRNWVIRFCKVQWSNHAEEEATWEREDELKAAHPDLFASSSESRGRDSV

SEQ ID NO: 25899 - protein, 1769 aa, Oryza sativa
  unsure (1)..(1769): unsure at all Xaa locations
  Clone ID: TF_OsC359_6007.pep
MSWHRAGVLLLGAQSCLPVPGVPAVDGIGSMYTSDQSKIYSNSRALGYGQAEQCTQMAGSVSRRGLDMTGFVLELRGMCVVLGYPHGVDYQARPFPEQEGDDAEPHAAWEVTAVILAGSPERTSLTVTAGGDSFPAACQSAALLAIGTLHQRYPDELQHSPYRYHPRRGGARDYATFRDASSEDDATIVHLARMVEAYDAARIDFHQMVRRGMVENNMKILELRQENLQLKKDLDAVEAQLHQLKIAQGEVCRPKRRRVCRSQKITARKSTSRPELVRQSLAWTCFVETPRAEPAPVVPQEGEASGVGSTEDALLLTFRPGPSQQXDEQLVGLRVCSTRRNAGTSDGNQPEGSNHNNHGSPPSPXXXPSPPPPDTNAILTQILAQQANMMTAFLHHLQNPPQHNAPPPPPQHSKLAEFLRICPPTFSSSNNPVDALDWLHAVGKKLDTVQCSDEEKVIFAAHQLQGPASLWWDHFQATQPEGQPITWARFTPAFRRTHVPAGVVALKKREFRELKQGNRSVMEYLHEFNNLARYAPEDVREDEEKQEKFLAGMDPELSVCLVSGDYPDFQRLVDKSIRLEAKHKELESHKRRLANFHNQQGANQRVRYTNPYPGGSSSQQQQQQQQPRSAPRPQFVVRVPQPQQEQNQQGTRAPRPPPPTVQPGQGRRDAQGPQRLCFNCFEPGHFADKCPKPRRQQGQAPPRPNNGGKDVIRGRVNHVTAEDVLTTPDVIVGTFLIHSIPATILFDSGASHSFISVPFVGRNQLGVERLRNPLLITTPGGVMTAKYYSPAVPIEIQGIPFPSDLILLGTKNLDVILGMNWLAQFQGVVDCARRTVTLYRGPGQPVVFFAPPTSVSSSELHQIGLSEIPIVREFGDVFPEELPGMPPKREIEFQIDLAPGTTPLCKRPYRMAANELAEVKKQLEELKEKGYIRPSTSPWGAPVIFVEKKDKTKRMCVDYRALNEVTIKNKYPLPRIDDLFDQLKGATVFSKIDLRSGYHQLRIRDEDIPKTAFTTRYGLYEFTVMSFGLTNAPAFFMNLMNKVFMEYLDKFVVVFIDDILIYSQSEEDHQHHLRLVLGKLREHQLYAKLSKCEFWLSEVKFLGHVISAKGVAVDPETVIAVTDWKQPKTVTQVRSFLGLAGYYRRFIENFSKIARPMTQLLKKEEKFVWSPQCEKAFRTLKEKLVASPVLILPDTRKDFIVYCDASRQGLGCVLMQDGHVVAYASRQLRPHEGNYPTHDLELAAVVHALKIWRHYLIGNRCEIYTDHKSLKYIFTQSDLNLRQRRWLELIKDYDVGIHYHPGKANVVADALSRKSHCNTLNVRGIPPELNQQMEALNLSIVSRGFLAALEAKPTLLDQIREAQKNDPDMHGLLKNMKQGKAAGFTEDEHGTLWNGNRVCVPDIRELKQLILQEAHESPYSIHPGSTKMYLDLKEKYWWVSMKREIAEFVALCDVCQRVKAEHQRPAGLLQPLQVPEWKWDEIGMDFITGLPKTQGGYDSIWVVVDRLTKVARFIPVKTTYGGNKLAELYFARIVSLHGVPKKIVSDRGSQFTSHFWKKLQEELGTRLNFSTAYHPQTDGQTERLNQILEDMLRACVLDFGKTWDKSLPYAEFSYNNSYQASIQMAPYEALYGRKCRTPLLWDQVGESQVFGTDILRQAEAKVRTIRDNLKMAQSRQKSYADNRRRDLEFAADDFVYVRVTPLRGVHRFRTKGKLAPRYVGPFRITARRGEVVTTGNNPTGIPYVRALILVPGGKAQHTQRLTRDSGRLG

SEQ ID NO: 25900 - protein, 1804 aa, Oryza sativa; identical to SEQ ID NO: 19116
  Clone ID: TF_OsC359_6023.pep

SEQ ID NO: 25901 - protein, 1805 aa, Oryza sativa; identical to SEQ ID NO: 19140
  Clone ID: TF_OsC359_6034.pep

SEQ ID NO: 25902 - protein, 1828 aa, Oryza sativa
  Clone ID: TF_OsC359_6104.pep
MSWHRAGVLLLGAQSCLPVPVVPAVGGVGSVLLSKARMGWKLCHVFRLYTVVMAGSVTRRGLHMTGFVLELRGMCVVLGYPHGVDYQARPLPEQEGEDAEPHAGWEVTAVILSGSPERTSLAVTAGGDSFPAACQNAALLAIGTLHQRYPDELQHSPYRYHPRRGGARDYATFRDASSEDDATVVHLARMVEAYDAARIDFHQMVRRGMVENNMKILELRQENLQLKKDLDALEAQLHQLKIAQGEDSRPKRRRVCRSQKITARKSTSRPELVRQSLAWTCFVETPRAEPAPVVPQEGEASGVGSSEVLIVSSPSLFAGSVRGFQMVTTRRNVNTGEGNQPEGSNPNHQGNPPPPPPPPPPPDTNAILTQILAQQANLMNAFLHHLQNPPQHNAPPPPPQHSKLAEFLRIRPPTFSSSNNPVDALDWLHAVGKKLDTVQCSDEEKVIFAAHQLQGPASLWWDHFQATQPEGQPITWTRFTAAFRRTHVPAGVVALKKREFRELKQGNRSVMEYLHEFHNLARYAPEDVREDEEKQEKFLAGMDPELSVRLVSWDYPDFQRLVDKSIRLEAKHKELESHKRRLANFRNQQGANQRVRYTNPYPGGSSSQQQQQQQPRSAPRPQFVVRVPQQQQQQNQQGTRAPRPPTPTVQPVQGRRDAQGQQRLCFNCFEPGHFADKCPKPRRQQGQAPPRSNNGGKDVLRGRVNHVTAEDVLTTPDVIVGTFLVHSIPATILFDSGASHSFISVPFVGKSQLGVERLRNPLLITTPGGVMTAKYYSPAVPIEIQGIPFPSDLILLDTKNLDVILGMNWLAQFQGVVDCARRTVTLYRGPEQPVVFFAPPTSVRSSELHQIGLSEIPIVREFGDVFPEELPGMPPKREIEFRIDLAPGTTPLHKRPYRMAANELAEVKTQLEELKEEGYIRPSTSPWGAPVIFVEKKDKTKRMCVDYRALNEVTIKNKYPLPRIDDLFDQLKGATVFSKIDLRSGYHQLRIREEDIPKTAFTTRYGLYEFTVMSFGLTNAPAFFMNLMNKVFMEYLDKFVVVFIDDILIYSQSEEDHQHHLRLVLGKLREHQLYAKLSKCEFWLSEVKFLGHVISAKGVAVDPETVTAVTDWKQPKTVTQIRSFLGLAGYYRRFIENFSKIARPMTQLLKKEEKFVWSPQCEKAFQTLKEKLVSSPVLILPDTRKDFMVYCDASRQGLGCVLMQDGHVVAYASRQLRPHEGNYPTHDLELAAVVHALKIWRHYLIGNRCEIYTDHKSLKYIFTQSDLNLRQRRWLELIKDYDVGIHYHPGKANVVADALSRKSHCNTLNVRGIPPELNQQMEALNLNIVGRGFLAALEAQPTLLDQIREAQKNDPDMHGLLKNMKQGKAAGFTEDEHGTLWNGKRVCVPDSRELKQLILQEAHESPYSIHPGSTKMYLDLKEKYWWVSMKREIAEFVALCDVCQRVKAEHQRPAGLLQPLQVPEWKWDEIGMDFITGLPKTQGGYDSIWVIVDRLTKVARFIPVKTTYGGNKLAELYFARIVSLHGVPKKIVSDRGSQFTSHFWKKLQEELGTRLNFSTAYHPQTDGQTERLNQILEDMLRACVLDFGKTWDKSLPYAEFSYNNSYQASIQRAPYEALYGRKCRTPLLWDQVGESQVFGTDILREAEAKVRIIRDNLKVAQSRQKSYADNRRRDLEFAVYDFVYLRVTPLRGVHRFQTKGKLAPRYVGPIRITARRGEVAYQLELPASLGNVHDVFHVSQLKKCLRVPSEQADSEQIEVREDLTYVEKPVKILDAMERRTRNRVIRFCKVQWSNHAEEEATWEREDELKAAHPDLFASSSESRGRDSV

SEQ ID NO: 25903 - protein, 1332 aa, Oryza sativa
  unsure (1)..(1332): unsure at all Xaa locations
  Clone ID: TF_OsC359_6110.pep
MKITARKSTSRPELVRQSLAWTCFVETPRAEPAPSMVTTRRSAATGEGSHPEGSNHNNHGSPPPPPPPPPPPPPPDTNSILTQILAQQANMMAAFLHHIQNPPQHNVPPPSPPPQHSKLAEFLRIRPPTFSSSNNPVDALDWLHAVGKKLDTVQCNDEEKVIFAAHQLQGPASLWWDNFQAMQPEGQPITWARFTAAFRRTHVPAGVMALKKREFRELKQGNRSVMEYLHEFNDLARYAPEDVREDEEKQEKFLAGMDPELSVRLVSGDYPDFQRLVDKSIRLEAKHKELESHKRRLANFRNQQGANQRIRYTNPYPGGSSSQQQQQQQPRSAPRPQFVVRVPQPQQQQSQQGTRAPRPHVPAVQPGQGRRDAQGQQRLCFNCFEPGHFADKCPKPRRQQGQAPPRPNNGGKDVIRGRVNHVTAEDVLTTPDVIVGTFLIHSIPATILFDSGASHSFISVPFMGRNQLGVERLRNPLLITTPGGVMTAKYYSPAVPIEIQGIPFPSDLILLDTKNLDVILGMNWLAQFQGVVDCARRTVTLYRGPDQPVVFFAPPTSVDNSELHQIGLSKIPIVREFGDVFLEELPGMTPKREIEFRIDLAPGTTPLYKRPYRMAANELAEVKRQLEELKEKGALNEVTIKNKYPLPRIDDLFDQLKGATVFSKIDLRSGYHQLRIREEDIPKTAFTTRYGLYEFTVMSFGLTNAPAFFMNLMNKVFMEYLDKFVVVFIDDILVYSQSEEDHQQHLCLVLGKLREHHLYAKLSKCEFWLSEVKFLGHVISAKGVAVDPETVTAVTDWKQPKTVTQVRSFLGLAGYYRRFIENFSKIARPMTQLLKKEEKFVWSPQCEKAFQTLKEKLEGHVVAYASRQLRPHEGNYPTHDLDLAAVVHALKIWRHYLIGNRCEIYTDHKSLKYIFTQSDLNLRQRRWLELIKDYDVGIHYHPGKANVVADSLSRKSRCNTLGVRGIPLELNQQMEALNLSIVGRGFLATLEAKPTLLDQIREAHKNDPDMHGLLKNMKQGKAAGFTEDEHGTLWNGNRXFVALCDVCQRVKGEHQRPAGLLQPLQVPEWKWDEIGMDFITGLPKTQGXWDKSLPYTEFSYNNSYQASIQMAPYEALYGCKCRTPLLWDQVGESQVFGTDILREAEDKVRTIRDNLKVAQSRQKSYADNRRRNLEFAVDDFVYLWVTPLRGVHRFQTKGKLAPRFVGPFRIIARRGEVAYQLELPASFGNMHDVFHVSQLKKCLRVPSEQADSEQIEVREDLTYVERTVKILDTMERRTRNWVIRFCKVQWSNHAEEEATWEREDELKAAHPDLFANAAASEDPLFVEVEADV

SEQ ID NO: 25904 - protein, 1405 aa, Oryza sativa
  unsure (1)..(1405): unsure at all Xaa locations
  Clone ID: TF_OsC359_6132.pep
MVMPLSLFAGSVWGFQMVTTRRNAATSDGNQLEGSNHNNHGSPPPPPPPPPPPPPDTNAILTQILTQQANMMAAFLHHIQNPPQHNAPPPPPQHSKLAEFLRIRPPTFSSSNNPVDVLDWLHAVGKKLDTVQCSDEEKVVFAAHQLQGPASLWWDHFQATQPEGQPITWARFTAAFRRTHVPAGVMALKKREFRELKQGNRSVMEYLHEFNNLARYAPEDVREDEEKQEKFLAGMDPELSVRLVSGDYPDFQRLVDKSIRLEAKHKELESHKRRLANFRNQQGANQRIRYTNPYPGGSSSQQQQPRSAPRPQFVVRVPQPQQQQSQQGTHAPRPPTPAAQSGQGRRDVQGPQRLCFNCFEPGHFADKCPKSRRQQGQAPPCSNNGGKDVIRGRVNHVTAEDVLTTPDVIVGTFLIHSIPATILFDSGASHSFISVPFVGRNQLGVERLRNPLLITTPGGVMTAKYYSPAVPIEIQGIPFPSDLILLDTKNLDVILGMNWLAQFQGVVDCARRTVTLYRGPEQPVVFFAPPTSVSSSELHQIGLSEIPIVREFGDVFPEELPGMPPKREIEFRIDLAPGTTPLYKRPYRMAANELAEVKKQLEELKEKGALNEVTIKNKYPLPRIDDLFDQLKGATVFSKIDLRSGYHQLRIREEDIPKTAFTTRYGLYEFTVMSFGLTNAPAFFMNLMNKVFMEYLDKFVVVFIDDILVYSQSEEDHQHHLRLVLGKLRKHQLYAKLSKYEFWLSEVKFLGHVISAKGVAVDPETVTAVTDWKQPKTVTQIRSFLGLAGYYRRFIENFSKIARPMTQLLKKEEKFVWSPQCEKAFKTLKEKLVSSLVLILPDTRKDFMRRWLELIKDYDVGIHYHPGKANVVADAQSRKSHCNTLNVRGIPPELNQQMEALNLSIVGRGFLAALEAKPTLLDQIREAQKNDPDMHGLLKNMKQGKAAGFTEDEHGTLWNGNRXFVALCDVCQRVKAEHQRPAGLLQPLQVPEWKWNEIGMDFITGLPKTQGGYDSIWXAYHPQTDGQTERLNQILEDMLRACVLDFGNTWDKSLPYAEFSYNNSYQASIQMAPYEALYGRKCRTPLLWDQVGESQVFGTDILREAEAKVRTIRDNLKVAQSRQKSYADNRRRDLEFAVDDFVYLRVTPLRGVHRFQTKGKLAPRFVGPFRIIARRGEVAYQLELPASLGNVHDVFHVSQLKKCLRVPSEQADSEQIEVREDLTYVERPVKILDTMERRTRNRSAAVVAPDLLPLRRRLLRFRRNLADLVHPSVSLADRRNAAVPVYPSRAAAFLRSGRRSRCRRRPGVSCGPPIRFPLPFPLSGAAPPRRWSPAATIVARVRRLPSAVPAWPPSGAPRGCHVGPGRQPPAPSDAAASEDPLFVKVEATFGKVSKASHIILEHIES

SEQ ID NO: 25905 - protein, 1805 aa, Oryza sativa
  unsure (1)..(1805): unsure at all Xaa locations
  Clone ID: TF_OsC359_6141.pep
MDEVGGRWTFSRANEGYTSCGPMAGSVTRRGLDMTGFVLELRGMCVVLGYPHGVDYQARPLPEQEGEDAEPHAGWEVTAVILSGSPEWTSLAVTAGGDSFPAACQNAALLAIGTLHQRYPDELQHSPYRYHPRRGGASDHATFRDASSEDDATVVHLARMVEAYDAARIDFHQMVRRGMVENNLKILELRQENLQLKKDLDALEAQLHQLKVAQGEICRPKRRRVCRSQKITARKSTSRPELVRQSLAWTCFVETPRAEPAPVVPQEGEASGVGSSEGALLLTFRPGPSQRSPSLFAGSVWGFQMVSTRRNVNTGEGNQPEGSNPNPQGNPPPPPPPPDTNAILTQILAQQANMMNAFLHHLQNLPQQNAPPPPPQHSKLAEFLRIRPPTFSSSNNPVDALDWLHAVGKKLDTVQCSDEEKVIFAAHQLQGPASLWWDHFQATQPEGQPITWARFTAAFRRTHVPAGVVALKKREFRELKQGNRSVMEYLHEFNNLARYAPEDVREDEEKQEKFLAGMDPELSVRLVSGDYPDFQRLVDKSIRLEAKHKELESHKRRLXANFRNQQGANQRVRYTNPYPGGSSSQQQQQQQPRSAPRPQFVVRVPQQQQQQNQQGTRAPRPPTPTVQPVQGRRDAQGQQRLCFNCFEPGHFADKCPKPRRQQGQAPPRSNNGGKDVIRGRVNHVTAEDVLTTPDVIVGTFLVHSIPATILFDSGASHSFISVPFVGKNQLGVERLRNPLLITTPGGVMTAKYYSPAVPIEIQGIPFPSDLILLDTKNLDVILGMNWLAQFQGVVDCARRTVTLYRGPEQPVVFFAPPTSVRSSELHQVGLSEIPIVREFGDVFPEELPGMPPKREIEFRIDLAPGTTPLYKRPYRMAANELAEVKKQLEELKEKGYIRPSTSPWGAPVIFVEKKDKTKRMCVDYRALNEVTIKNKYPLPRIDDLFDQLKGATVFSKIDLRSGYHQLRIREEDIPKTAFTTRYGLYEFTVMSFGLTNAPAFFMNLMNKVFMEYLDKFVVVFIDDILIYSQSEEDHQHHLRLVLGKLREHQLYAKLSKCEFWLSEVKFLGHVISAKGVAVDPETVTAVTDWKQPKTVTQIRSFLGLAGYYRRFIENFSKIARPMTQLLKKEEKFVWSPQCEKAFQTLKEKLVSSPVLILPDTRKDFMVYCDASRQGLGCVLMQDGHVVAYASRQLRPHEGNYPTHDLELAAVVHALKIWRHYLIGNRCEIYTDHKSLKYIFTQSDLNLRQRRWLELIKDYDVGIHYHPGKANVVADALSRKSHCNTLNVRGIPPELNQQMEALNLSIVGRGFLAALEAKPTLLDQIREAQKNDPDMHGLLKNMKQGKAAGFTEDEHGTLWNGKRVCVPDSRELKQLILREAHESPYSIHPGSTKMYLDLKEKYWWVSMKREIAEFVALCDVCQRVKAEHQRPAGLLQPLQVPEWKWDEIGMDFITGLPKTQGGYDSIWVIVDRLTKVARFIPVKTTYGGNKLAELYFARIVSLHGVPKKIVSDRGSQFTSHFWKKLQEELGTRLNFSTAYHPQTDGQTERLNQILEDMLRACVLDFGKTWDKSLPYAEFSYNNSYQASIQMAPYEALYGRKCRTPLLWDQVGESQVFGTDILREAEAKVRIIRENLKVAQSRQKSYADNRRRDLEFAVDDFVYLRVTPLRGVHRFQTKGKLAPRYVGPFRITARRGEVAYQLELPASLGNVHDVFHVSQLKKCLRVPSEQADSEQIEVREDLTYVERPVKILDTMERRTRNRVIRFCKVQWSNHAEEEATWEREDELKAAHPGLFASSSESRGRDSV

SEQ ID NO: 25906 - protein, 1774 aa, Oryza sativa
  unsure (1)..(1774): unsure at all Xaa locations
  Clone ID: TF_OsC359_6142.pep
MAGSISRRGLDLTGFVLELRGMCVVLGYPHGVDYQGRLLLEQEGDDAEPHAAWEVTAVILTGSPERTSLAVTAGGDSFSAACQNAALLAIGTLHQRYPDELQHSPYRYHPRRGGARDYATFRDASSEDDATIMHLARMVEAYDAARIDFHQMVRRGMVENNMKILELRQENLQLKKDLDAVEAQLHQLKIAQGEVCRPKRRRVCRSQKITARKSTSRPELVRQSLAWTCFVETPRAEPAPVVPQEGEASGVGSTEDLSLFAGSVWGFQMVTTRRSAATGDGNQPEGSNHNNHGSPPPPPPPPPPPPPDTNAILTQILAQQANMMTAFLHHLQNPPQQNAPPPPPQHSKLAEFLRIRPPTFSSSNNPVDALDWLHAVGKKLDTVQCSDEEKVVFAAHQLQGPASLWWDHFQATQPEGQPITWARFTAAFRRTHVPAGVMALKKREFRELKQGNRSVMEYLHEFNNLARYAPEDVREDEEKQEKFLAGMDPELSVRLVSGDYADFQRLVDKSIRLEAKHKELESHKRRLANFRNHQGANQRVRYTNPYPGGSSSQQQQQQQPRSAPRPQFMVRVPQPQQQQSQQGTRAPRPPMPAVQPGQGRRDVQGPQRLCFNCFEPGHFADKCPKPRRQQGQAPPRSNNGGKDVIRGRVNHVTAEDVLTTPDVIVGTFLIHSIPATILFDSGASHSFISVPFVGRNQLGVERLRNPLLITTPGGVMTAKYYSPAVPIEIQGIPFPSDLILLDSKNLDVILGMNWLAQFQGVVDCARRTVTLYRGPEQPVVFFAPPTSVSSSELHQIGLSEIPIVREFGDVFPEELPGMPPKREIEFWIDLAPGTTPLYKRPYRMAANELAEVKKQLEELKEKGYIRPSTSPWGAPVIFVEKKDKMKRMCVDYRALNEVTIKNKYPLPRIDDLFDQLKGATVFSKIDLRSGYHQLRIREEDIPKTAFTTRYGLYEFTVMSFGLTNAPAFFMNLMNKVFMEYLDKFVVVFIDDILVYSQSEEDHQHHLRLVLGKLREHQLYAKLSKCEFWLSEVKFLGHVISAKGVAVDPETVTAVTDWKXPKTVTQIRSFLGLAGYYRRFIENFSKIARPMTXLLKKEEKFVWSPQCEKAFQTLKEKLVSSPVLILPDTRKDFMVYCDASRQGLGCVLMQDGHVVAYASRQLRPHESNYPTHDLELATVVHALXKIWRHYLNGNRCEIYTDHKSLKYIFTQSDLNLRQRRWLELIKDYDVGIHYHPGKANVVTDALSQKSHCNTLNVRGIPPELNQQMEALNLSIVGRGFLAALEAKPTLLDQIREAQKNDPDMHGLLNNMKQGKAAGFTEDEHGTLWNGNRVCVPDNRELKQLILQEAHESPYSIHPSSTKMYLDLKEKYWWVSMKREIAEFVALCDVCQRVKAEHQRPAGLLQPLQVPEWKWDEIGMDFITGLPKTQGGYDSIWVVVDRLTKVARFILVKTTYGGNKLAELYFARIVSLHGVPKKIVSDRGSQFTSHFWKKLQEELDTRLNFSTAYHPQTDGQTECLNQILEDMLRACVLDFGKTWDKSLPYAEFSYNNSYQASIQMAPYEALYGRKCRTPLLWDQVGESQVFGTDILREAEAKVRTIRDNLKVAQSRQKSYADNRRRNLEFAVDDFVYLRVTPLRGVHRFQTKGKLAPRFVGPFRIIARRGEVAYQLELPASLGNVHDVFHVSQLKKCLRVPSEQTDSEQIEVREDLTYVERPVKILDTMERRTRNRVIRFCKVQWSNHAEEEATWEREDELKAAHPDLFASSSESRGRDSV

SEQ ID NO: 25907 - protein, 1375 aa, Oryza sativa
  unsure (1)..(1375): unsure at all Xaa locations
  Clone ID: TF_OsC359_6230.pep
MSSGANEGYTSCGPVVEMSWHRAGVLLLGXSVLPACPGGSGRRXGIVSMYTSDQSTTYSNSRALGYGQAEQCTQKAGSVTRRGLDMTGFVLELRGMCVVLGYPHGVDYQARPLPEQEGDDAEPHAGWEVTAVILSGSPERTSLAVTAGGDSFPAACQSAALLAIGTLHQRYPDELYNWHYRYHPCCGXPATTLTFRDASSKDDATIMHLARMVEAYDAARIDFHQMVRRGMVENNMKIQELRQENLQLKKDLDAVEAQLHQLKIAQGEVCRPKRRRVCRSQKITARKSTSRPELVRQSLAWTCFVETPRAEPAPVVPQEGEASGVGSTEDALLLTFHXTTRRNAATSDGNQPEGSNHNNHGSPPPPPPPPPPPPPPPDTNAILTQILAQQANMMTAFLHHLQNPPQHNAPPPPPQHSKLAEFLRIRPPTFSSSNNPVDALDWLHAVGKKLDTVQCSDEEKVIFAAHQLQGPASLWWDHFQATQPEGQPITWARFTAAFRRTHVPAGVVALKKREFRELKQGNRSVMEYLHEFNNLARYAPEDVREDEEKQEKFLAGMDPELSVRLVSVDYPDFQCLVDKSIRLEAKHKELESHKRRLANFRNQQGANQRVRYTNPYPGGSSSQQQQQQQQPRSAPRPQFMVRVPQPQQQQSQQGTRAPRPPTPTVQPGQGRRDVQGPQRLCFNCFEPGHFADKCPKPRRQQGQVPPRSNNGGKDVIRGRVNHVTAEDVLTTPDVIVGTFLIHSIPATILFDSGASHSFISVPFVGRNQLGVERLRNPLLITTPGGVMTAKYYSPAVPIEIQGIPFPSDLILLDTKNLDVILGMNWLAQFQGVVDCARRTVTLYRGPEQPVVFFAPPTSVRSSELHQIGLSEIPIVREFGDVFPEELPGMPPKREIEFRIDLAPGTIPLYKRPYRMAANELAEVKKQLEELTEKGYIRPSTSPWGAPVIFVEKKDKTKRMCVDYRALNEVTIKNKYPLPRIDDLFDQLKGATVFSKIDLRSGYHQLRIREEDIPKTAFTTRYGLYEFTVMSFGLTNAPAFFMNLMNKVFMEYLDKFVVVFIDDILIYSQSEEDHQHHLRLVLGKLREHQLYAKLSKCEFWLSEVKFLGHVISAKGVAVDPETVTAVTDWKQSKTVTQVRSFLGLAGYYRRFIENFSKIARPMTQLLKKEEKFVWSPQCEKAFKTLKEKLVASPVLILPDTRKDFMVYCDASRQGLGCVLMQDGHVVAYASRQLRPHEGNYPTHDLELAAVVHALKIWRHYLIGNRCEIYTDHKSLKYIFTQSDLNLRQRRWLELIKDYDVGIHYHPGKANVVADALSRKSHCNTLNICGIPPELNQQMAARNLSIVSRGFLAALEAKPTLLDQIREAQKNDPDMHG

SEQ ID NO: 25908 - protein, 985 aa, Oryza sativa
  unsure (1)..(985): unsure at all Xaa locations
  Clone ID: TF_OsC359_6231.pep
MGTLHQRYPYELQHSPYRYHPRRGGARDYATFRDASSEDDATIVHLARMVEAYNAARIDFHQMVRRGMVENNMKILELRQENLQLKKDLDAVEAQLHQLKIAQGKVCRPKRRRVCRSQKITARKSTSRPELVRQSLAWTCFIETPRAEPAPVVPQEGEASGVALSLFAGSVWGFQMVTTRRNAVTGDGNQPEGSNHNHQGNPPSPSPPPPPPPPDTNAILTQILAQQANMMTAFLHHLQNPPQQNAPPPPPQHSKLAEFLRIRPPTFSSSNNPVDALDWLHAVGKKLDTVQCSDEEKVIFAAHQLQGPASLWWDHFQATQPEGQPITWARFTAAFRRTHVPAGVVALKKREFRELKQGNRSVMEYLHEFNNLARYAPEDVREDEEKQEKFLAGMDPELSVRLVSGDYPDFQRLVDKSIRLEAKHKELESHKRRLANFRNQQGANQRVRYTNPYPGGSSSQQQQQQQQPRSAPRPQFVVRVPQPQQQQNQQGTRAPRPPTQTVQPGQGRRDAQGQQRLCFNCFEPGHFADKCPKPRRQQGQAPPRPNNGGKDVIRGRVNHVMAEDVLTTPDVIVVTAVPDWKQPKTVTQVRSFLGLAGYYRXRVKAEHQRPAGLLQPLQVPEWKWDEIGMDFITGLPKTQGGYDSIWVVVDRLTKVARFIPVKTTYGGNKLAELYFARIVSLHGVPKKIVSDRGSQFTSHFWKKLQEELGTRLNFSTAYHPQTDGQTERLNQILEDMLRACVLDFGKTWDKSLPYAEFSYNNSYQASIQMAPYEALYGRKCRTPLLWDQVGESQVFGTDILREAEAKVRTIRDNLKVAQSRQKSYADNRRRDLEFAVGDFVYLRVTPLRGVHRFQTKGKLAPRFVGPFRIIARHGEVAYQLELPASLGNVHDVFHVSQLKKCLRVPSEQADSEQIEVREDLTYVERPVKILDTMERRTRNRVIRFCKVQWSNHAEEEATWEREDELKAAHPDLFASPSESRGRDSV

SEQ ID NO: 25909 - protein, 1806 aa, Oryza sativa; identical to SEQ ID NO: 19210
  Clone ID: TF_OsC359_6295.pep

SEQ ID NO: 25910 - protein, 1783 aa, Oryza sativa; identical to SEQ ID NO: 19151
  Clone ID: TF_OsC359_6321.pep

SEQ ID NO: 25911 - protein, 1779 aa, Oryza sativa
  unsure (1)..(1779): unsure at all Xaa locations
  Clone ID: TF_OsC359_6368.pep
MSWHRAGVLLLGAQSCLPVPGVPAVGGMVGLGWLGTSWDPGSGCRFGXIIVGLGLRQMAGSISRRGLDLTGFVLELXGHGRPLPEQEGDDAEPHAAWEVTAVILTSSPERTSLAVTAGGDSFSAACQNAALLAIGTLHQRYPDELQHSPYRYHPRHGGARDFATFRDASSEDDATIMHLARMVEAYDATCIDFHQMVRRGMVENNMKILEPRQENLQLKKDLDAVEAQLHQLKIAQGEVCRPKRRRVCRSQKITARKSTSRPELVRQSLAWTCFVQTPRAEPAPVVPQEGEASGVGSTEDALLLTFRPGPSQRRSANTGDGNQPEGSNHNNHGSPPPPPPPPPPPPPDTNAILTQILAQQAYMMTAFLHHLQNPPQQNAPPPPPQHSKLAEFLRIRPPTFSSSNNPVDALDWLHAVGKKLDTVQCSDEEKVVFAAHRLQGPASLWWDHFQATQPEGQPITWARFTAAFRRTHVPAEVMALKKREFRELKQGNRSVMEYLHEFNNLARYAPEDVREDEEKQEKFLAGMDPELSVRLVSGDYPDFQRLVDKSIRLEAKHKELESHKRRLANFRNQQGANQRVRYTNPYPGGSSSQQQQQQQPRSAPRPQFVVRVPQPQQQQSQQGTRATRPPMPAVQPGQGRRDVQGPQRLCFNCFEPGHFADKCPKPRRQQGQPPPRSNNGGKDVIRDRVNHVTAEDVLTTPDVIVGTFLIHSIPATILFDSGASHSFISVPFVGRNQLGVERLRNPLLITTPGGVMTAKYYSPAVPIEIQGIPFPSDLILLDTKNLDVILGMNWLAQFQGIVDCARRTVTLYRGPEQPVVFFAPPTSISSSELHQIGLSEIPIVREFGDVFPEELPGMPPKREIEFRIDLSPGTTPLYKRPYRMAANELAKVKKQLEELKEKGYIRPSTSPWGAPVIFVEKKDKTKRMCVDYRALNEVTIKNKYPLPRIDDLFDQLKGATVFSKIDLRSGYHQLRIREEDIPKTAFTTRYGLYEFTVMSFGLTNAPAFFMNLMKKVFMEYLDKFVVVFIDDILVYSQSEEDHKHHLRLVLGKLREHQLYAKLSKCEFWLSEVKFLGHVISAKGVAVDPETVTAVTDWKQPKTVTQIRSFLGLAGYYRRFIENFSKIARPMTQLLKKEEKFVWSPQCEKAFQTLKEKLVSSPVLILQDTRKDFMVYCDASRQGLGCVLMHDGHVVAYASRQLRPHEGNYPTHDLELAAVVHALKIWRHYLIGNHCEIYTDHKSLKYIFTQSDLNLRQRRWLELIKDYDVGIHYHPGKANVVADALSRKSHCNTLNVRGIPPELNQQMEALNLSINMKQGKAAGFTEDEHGTLWNGNRVCVPDNRELKQLILQEAHESPYSIHPGSTKMYLDLKEKYWWVSMKREIAEFVALCDVCQRVKAEHQRPAGLLQPLQVPEWKWDEIGMDFITGLPKTQGGYDSIWVVVDRLTKVARFIPVKTTYGGNKLAELYFARIVSLHGVPKKIVSDRGSQFTSHFWKKLQEELGTRLNFSTAYHPQTDGQTEHLNQILEDMLRACVLDFGKTWDKSLPYAEFSYNNSYQASIQMAPYEALYGRKCRTPLLWDQVGESQVFGTDILRKAEAKVRTIRDNLKVAQSRQKSYADNRRRDLEFAVDDFVYLRVTPLRGVHRFQTKGKLAPRFVGPFRIIARRGEVAYQLELPASLGNVHDVFHVSQLKKCLRVPSEQADSEQIEVREDLTYVERPVKILDTMERRTRNRVIRFCKVQWSNHAEEEATWEREDELKAAHPDLFASSSESRGRDSV

SEQ ID NO: 25912 - protein, 406 aa, Oryza sativa; identical to SEQ ID NO: 19246
  Clone ID: TF_OsC359_6432.pep

SEQ ID NO: 25913 - protein, 1344 aa, Oryza sativa
  Clone ID: TF_OsC359_6549.pep
MVMPMVTTRRNAATGDGNQPEGSNHNHQGNPPPPPPPPPPPPPDTNAILTQILAQQANMMTAFLHHLQNPPQHNAPPPPQHSKLAEFLRIRPPTFSSSNNPVDALDWLHAVGKKLDTVQCSDEEKVIFAAHQLQGPASLWWDHFQATQPEGQPITWARFTAAFRRTHFNNLARYAPEDVREDEEKQEKFLAGMDPELSVRLVSGDYPDFQRLVDKSIRLEAKHKELESHKCRLANFRNQQGANQRVRYTNPYPGGSSSQQQQQQQQQPRSAPRPQFVVRIPQPQQQQNQQGTRAPRPPTPTVQPGQGRRDAQGQQRLCFNCFEPGHFADKCPKPRRQQGQAPPRSNNGGKDVIRGRVNHVTAEDVLTTPDVIVELHQIGLSEIPIVREFGDVFPEELPGMPPKREIEFRIDLAPGTTPLHKRPYRMAANELAEVKKQLEELKEKGYIRPSTSPWGAPVIFVEKKDKTKRMCVDYRALNEVTIKNKYPLPRIDDLFDQLKGATVFSKIDLRSGYHQLRIREEDIPKTAFTTRYGLYEFTVMSFGLTNAPAFFMNLMNKVFMEYLDKFVVVFIDDILIYSQSEEDHQHHLRLVLGKLREHQLYAKLSKCEFWLSEVKFLGHVISAKGVAVDPETVTAVTDWKQPKTVTQVRSFLGLAGYYRRFIENFSKIARPMTQLLKKEEKFVWSPQCEKAFQTLKEKLVSSPVLILPDTRKDFMVYCDASRQGLGCVLMQDGHVVAYASRQLRPHEGNYPTHDLELAAVVHALKIWRHYLIGNRCEIYTDHKSLKYIFTQSDLNLRQRRWLELIKDYDVGIHYHPGKANVVADALSRKSHCNTLNVRGIPPELNQQMEALNLSIVSRGFLAALEAKPTLLDQIREAQKNDPDMHGLLKNMKQGKAAGFTEDEHGTLWNGKRVCVPDNRELKQLILQEAHESPYSIHPGSTKMYLDLKEKYWWVSMKREIAEFVALRDVCQRVKAEHQRPAGLLQPLQVPEWKWDEIGMDFITGLPKTQGGYDSIWVVVDRLTKVARFIPVKTTYGGNKLAELYFARIVSLHGVPKKIVSDRGSQFTSHFWKKLQEELGTRLNFSTAYHPQTDGQTERLNQILEDMLRACVLDFGKTWDKSLPYAEFSYNNSYQASIQMAPYEALYGRKWRTPLLWDQVGESQVFGTDILREAEAKVRIIRDNLKVAQSRQKSYADNRRRDLEFAVDDFVYLRVTPLRGVHRFQTKGKLAPRYVGPFRIVARRGEVAYQLELPASLGNVHDVFHVSQLKKCLRVPSEQADSEQIEVREDLTYVERPVKILDTMERRTRNRVIRFCKVQWSNHAEEEATWEREDELKAAHPGLFA

SEQ ID NO: 25914 - protein, 1803 aa, Oryza sativa; identical to SEQ ID NO: 19216
  Clone ID: TF_OsC359_6552.pep

SEQ ID NO: 25915 - protein, 1538 aa, Oryza sativa; identical to SEQ ID NO: 19097
  Clone ID: TF_OsC359_6647.pep

SEQ ID NO: 25916 - protein, 1868 aa, Oryza sativa
  unsure (1)..(1868): unsure at all Xaa locations
  Clone ID: TF_OsC359_6674.pep
MDEVGGRWTFSRANEGYTSCGPVVEMSWQRVGALLLGAQSCLPVPEVPAVGGIGSMAGSVTRRGLDMTGFVLELRGMCVALGYPHGVDYQARPLPDQEGDDAEPHAGWEVTAVILSGSPERTSLAVTAGGDSFPAACQNAALLAIGTLHQRYPDELQHSPYRYHPRRGGAHDYATFRDASSEDDATIVHLARMVEVYDAARIDFHQMVRRGMVENNLKILELRQENLQLKKDLDAVEAQLHQLKIAQGEVCRPKRRRVCRSQKITARKSTSRPELVRQSLAWTCFVETPRAEPAPVVPQEGEASGIGSTEALSLFAGSVWGFQMVTTRRNAATGDGNQPEGSNHNHQGNPPPPPPPPPPPPPDTNAILTQILAQQANMMTAFLHHLQNPPQHNAPPPPPQHSKLAEFLRIRPPTFSSSNNPVDALDWFHAVGKKLDTVQCSDEEKVIFAAHQLQGPASLWWDHFQATQPEGQPITWARFTAAFRRTHVPAGVVALKKREFRELKQGNRSVMEYLHEFNNLARYAPEDVREDEEKQEKFLAGMDPELSVRLVSGDYPDFQRLVDKSIRLEAKHKELESHKRRLANFRNQQGANQRGRYTNPYPGGSSSQQQQQQQQPRPAPRPQFVVRFPQPQQQQNQQGTRAPRPPTPTVQPGQGRRDAQGQQRLCFNCFEPGHFADKCPKPRRQQGQAPPRSNNGGKDVIRGRVNHVTAEDVLTTPDVIVGLSEIPIVREFGDVFPEELPGMPPKREIEFRIDLAPGTTPLHKRPYRMAANELAEVKKQLEELKEKGYIRPSTSPWGAPVIFVEKKDKTKRMCVDYRALNEVTIKNKYPLPRIDDLFDQLKGATVFSKIDLRSGYHQLRIREEDIPKTAFTTRYGLYEFTVMSFGLTNALAFFMNLMNKVFMEYLDKFVVVFIDDILIYSQSEEDHQHHLRLVLGKLREHQLYAKLSKFIENFSKIARPMTQLLKKEEKFVWSPQCEKAFQTLKEKLVSSPVLILPDTRKDFMVYCDASRQGLGCVLMQDGHVVAYASRQLRPHEGNYPTHDLELAAVVHALKIWRHYLIGNRCEIYTDHRSLKYIFTQSDLNLRQRRWLELIKDYDVGIHYHPGKANVVADALSRKSHCNTLNVRGIPPELSQQMEALNLSIVSRGFLAALEAKPTLLDQIREAXQKNDPDMHGLLKNMKQGKAAGFTEDEHRTLWNGKRVCVPDNRELKQLILQEAHESPYSIHPGSTKMYLDLKEKYWWVSMKREIAEFVALCDVCQRVKAEHQRPAGLLQPLQVPEWKWDEIGMDFITGLPKTQGGYDSIWVVVDRLTKVARFIPVKTTYGGNKLAELYFARIVSLHGVPKKIVSDRGSQFTSHFWKKLQEELGTRLNFSTAYHPQKDGQTERLNQILEDMLRACVLDFGKTWDKSLPYAEFSYNNSYQASIQLAPYEALYGRKCRTPLLWDQVGESQVFGTDILREAEAKVRIIRDNLKVAQSRQKSYADNRRRDLEFAVGDFVYLRVTPLRGVHRFQTKGKLAPRYVGPFRIVARRGEVAYQLELPASLGNVHDVFHVSQLNKCLRVPSEQADSEQIEVREDLTYVERPVKILDTMERRTRNRVIRFCKLQWSNHAEEEATWEREDELKAAHPDLLATARARGCGDAWDPRRRPASAACARSTVDREGDAWAPLPWTRPTVHGGPGARGWRRSAPWVPRVSRTRGRGRLTAGPTWQPRGRARGRPRRRGRRERRARAPMVTAGDHRRGGAAPEREEGRGKANGGPRLTPGQRRRRERRPERRKTAARLGMTMATALRRSASETEARTRSTAMRRCRGRWRRVRRKSGAAAAAERSSAAMAERAEHGASTNPTARASGERRKRKSGARATFK

SEQ ID NO: 25917 - protein, 1826 aa, Oryza sativa; identical to SEQ ID NO: 19221
  Clone ID: TF_OsC359_6898.pep

SEQ ID NO: 25918 - protein, 1511 aa, Oryza sativa; identical to SEQ ID NO: 19077
  Clone ID: TF_OsC359_6901.pep

SEQ ID NO: 25919 - protein, 1758 aa, Oryza sativa
  unsure (1)..(1758): unsure at all Xaa locations
  Clone ID: TF_OsC359_6955.pep
MDISRANEGYTSCGPVVEMSWHRAGVLLLGXSVLPAYPGGSGRRXGIGSVLLSMARMGWKLCHVFRLYTVVMAGSVTRRGLDMTGFVLELRGMCVVLGYPHGVDYQARPLPEQEGDDAEPHAGWEVTAVILSGSPERTSLAVTAGGDSFPAACQSAALLAIGTLHQRYPDELQHSPYRYHPRRGGARDYATFRDASSEDDATIVHLARMVEAYDAARIDFHQMVRRGMVENNMKILELRQENLQLKKDLDAVEAQLHQLKIAQGEVCRPKRRRVCRSQKITARKSTSRPELVRQSLAWTCFVEIPRAEPAPVVPQEGEASGVGSTEDALLLTFRPGPSQRRSANTGDGNQPEGSNHHHQGSPPPPPPPPPPPPPDTNAILTQILAQQANMMTAFLHHLQNPPQHNAPPPPPQHSKLAEFLRIRPPTFSSSNNPVDALDWLHAVGKKLDTVQCSDEEKVIFAAHQLQGPASLWWDHFQATQPEGQPITWARFTAAFRRTHVPAGVVALKKREFRELKQGNRSVMEYLHEFNNLARYAPEDVREDEEKQEKFLAGMDPELSVRLVSGDYPDFQRGSSSQQQQQQQQPRSAPRPQFVVRVPQPQQQQNQQGTRAPRPPTPTVQPGQGRRDAQGPQRLCFNCFEPGHFADKCPKPRRQQGQAPPRSNHGGKDVIRGRVNHVTAEDVLTTPDVIVGTFLIHSIPATILFDSGASHSFISVPFVGRNQLGVERLRNPLLITTPGGVMTAKYYSPAVPIEIQGIPFPSDLILLDTKNLDVILGMNWLAQFQGVVDCARRTVTLYRGPEQPVVFFAPPTSVSSSELHQIGLSEIPIVREFGDVFPEELPGMPPKREIEFRIDLAPGTTPLYKRPYRMAANELAEVKKQLEELKEKGYIRPSTSPWGAPVIFVEKKDKTKRMCVDYRALNEVTIKNKYPLPRIDDLFDQLKGATVFSMIDLRSGYHQLRIREEDIPKTAFTTRYGLYEFTVMSFGLTNAPAFFMNLMNKVFMEYLDKFVVVFIDDILIYSQSEEDHQHHLRLVLGKLREHQLYAKLSKCEFWLSEVKFLGHVISAKGVAVDPETVTAVTDWKQPKTVTQVRSFLGLAGYYRRFIENFSKIARPMTQLLKKEEKFVWSPQCEKAFKTLKEKLVSSPVLILPDTRKDFMVYCDASRQGLGCVLMQDGHVVAYASRQLRPHEGNYPTHDLELAAVVHALKIWRHYLIGNRCEIYTDHKSLKYIFTQSDLNLRQRRWLELIKDYDVGIHYHPGKANVVADALSRKSHCNTLNVRGIPLELSQQMEALNLSIVGRGFLAALEAKPTLLDQIREAQKNDPDMHGLLKNMKQGKAAGFTEDEHGTLWNGNRVCVPDNRELKQLILQEAHESPYSIHPGSTKMYLDLKEKYWWVSMKREIAEFVALCDVCQRVKAEHQRPAGLLQPLQVPEWKWDEIGMDFITGLPKTQGGYDSIWVVVDRLTKVARFIPVKTTYGGNKLAELYFARIVSLHGVPKKIVSDRGSQFTSHFWKKLQEELGTRLNFSSAYHPQTDGQTERLNQILEDMLRACVLDFGKTWDKSLPYAEFSYNNSYQASIQMAPYXALYGRKSEHALVDQVGESQVFGXDDFVYLRVTPLRGVHRFRTKGKLAPRYVGPFRIVARRREVAYQLELPASLGNVHDVLHVSQLKKCLRVPSEQADSEQIEVREDLTYVERPVKILDTMERRTRNRVIHFCKVQWSNHVEEEATWEREDELKAAHPDLFTSSSESRSRDSF

SEQ ID NO: 25920 - protein, 1666 aa, Oryza sativa
  unsure (1)..(1666): unsure at all Xaa locations
  Clone ID: TF_OsC359_7002.pep
MDISRANEGYTSCGPMAGSINRRGLDLTGFVLELRGMCVVLGYPHGVDYQGKQLLEQEVILTGSPERTSLAVTAGGDSFSAACQNAALLAIGTLHQRYPDELQHSPYRYHPRRGGARDYATFQDASSEDDATIMHLARMVEAYDAARIDFHQMVRRGLVKNNMKILELRQENLQLKKDLDAVEAQLCQLKIAQGEMVTTRRSAATGDGNQPEGSNPNIQGGPPPPPPPPPPPPPDTNSILTQILAQQANMMAAFLHHIQNPPQHNAPPPPPPPQHSKLAELLRIRPPTFSSSNNPVDALDWLHAVGKKLDTVQCNDEEKVIFAAHQLQGPASLWWDHFQATQPEGQPITWARFTAAFRRTHVPAGVMALKKREFRELKQGNRSVMEYLHGFNNLARYAPEDVREDEEKQEKFLARMDPELSVRLVSGDYPDFQRLVDKSIRLEAKHKELESQKRRLANLRNQQGANQRVRYTNPYPGGSSSQPQQQQSQQGTRVPRPPAPVVQPGQGRREVQGQQRLCFNCFEPGHFADKCPKPRRQQGQAPPRPNNGGKDVIRGRVNHVTAEDVLTTPDVIVGTFLIHSIPATILFDSGASHSFISVPFVGRNQLGVERLRNPLLITTPRGVMTAKYYSPAVPIEIQGIPFPSDLILLDTKNLDVILGMNWLAEFQGVVDCARRTVTLYRGPEQPVVFFAPPTSIGSSELHQIGLSEIPIVSEFGDVFPEELPGMPPKREIEFRIDLAPGTTPLYKRLYRMAANELAEVKKQLEELKEKGYIRPSTSPWGAPVIFVEKKDKTKRMCVDYRALNEVTIKNKYPLPRIDDLFDQLKGATVFSKIDLRSGYHQLRIREEDIPKTAFTTRYGLYEFTVMSFGLTNAPAFFMNLMNKVFMEYLDKFVVVFIDDILVYSQSEEDHQQHLRLVLGKLREHQLYAKLSKCEFWLSEVKFLGHVISAKGVAVDPETVTAVTDWKQPKTVTQVRSFLGLAGYYRRFIENFSKIARPMTQLLKKEKKFVWSPQCEKAFQTLKEKLVSSPVLILPDTRKDFMVCCDASRQGLGCVLMQEGHVVAYASRQLRHHEGNYPTHDLELAAVVHALKIWRHYLIGNRCEIYTDHKSLKYIFTQSDLNLRQRRWLELIKDYDVGILYHPGKANVVADALSRKSRCNTLGVRGIPPELHQQMEALNLSIVGRGFLATLEAKPTLLDQIREAQKNDPDMHGILKNMKQGKAAGFTEDEHGTLWNGSRVCVPDDKELKQLIVQEAHESPYSIHPGSTKMYLDLKGTYWWVSMKWEIAEFVALCDVCQRVKAEXRPAGLLQPLQVPEWKWDEIGMDFITGLPKTQGGXRFIPVKTTYGGNKLAELYFARIVSLHGVPKKIVSDRGSQFTSHFWKKLQEELGTRLNFSTAYHPQTDGQTERLNQILEDMLRACVQDFRKTWDKSLPYAEFSYNNSYQASIQMALYEALYGRKCRTPLLWDQVGESQVFGTDILREAEAKVRTIRENLKVAQSRQKSYADNRRRDLEFAVDDFVYLRVTPLRGVHRFQTKGKLAPRFVGPFRIIARHGEVANQLELPASLGNVHDVFHVSQLKKCLRVLSEQADSEQIEVREYLTYVERPVKILDAMERRTRKRVIRFCKVQWSNHAEEEATWEREDELKAAHPDLFASSSESRGRDSV

SEQ ID NO: 25921 - protein, 2016 aa, Oryza sativa
  unsure (1)..(2016): unsure at all Xaa locations
  Clone ID: TF_OsC359_7171.pep
MEPRSPRPFPPSPAALSPSRRYIFAPRASLLRFRRSPLALAVGFVLAPSSSLSAVAANLRFAAVVAPDFLPTRRHLHRLRRVVVDPVRSSVSPADRRSTVALVIPNRAAASRRFGRRFRRPRRPGVSRGPPFAFPLLSALSGAAPPRRWSPAVTIGERVRRLPSAVPARPPSAASRGCQVGPGRQPPAPAGAADAWDPRRRPPPAACSRSTVDPPRPYKDRSSGLCCKALPYFHMSSGANEGYTSCGPVVEMSWQRVGALLLGAQSCLPVPEVPAVGGIGSMYTSDQSLIYSNSRALGYGQAEQCTQMAGSVTRRGLHMTGFVLELRGMCVVLGYPHGVDYQARPLPEQEGEDAEPHAGWEVTAVILSGSPERTSLAVTAGGDSFPAACQNAALLAIGTLHQRYPDELQHSPYRYHPRRGGARDFATFRDASSEDDATIVHLARMVEAYDAARIDFHQMVRRGMVENNMKILELRQENLQLKKDLDAVEAQLHQLKIAQGEVCRPKRRRVCRSQKITARKSTSRPELVRQSLAWTCFVETPRAEPAPVVPQEGEASGVGSTEDALLLTFHXTTRRNAVTGDGNQPEGSNHNHQGNPPPPLPXPPPPPPDTNAILTQILAQQANMMTTFLHHLQNPPQQNAPPPPPQHSKLAEFLRIRPPTFSSSNNPVDALDWLHAVGKKLDTVQCSDEEKVIFAAHQLQGPASLWWDHFQATQPEGQPITWARFTAAFRRTHVPAGVVALKKREFRELKQGNRSVMEYLHEFNNLARYAPEDVREDEEKQEKFLAGMDPELSVRLVSGDYPDFQRLVDKSIRLEAKHKELESHKRRLANFRNQQGANQRVRYTNPYPGGSSSQQQQQQQQPRSAPRPQFVVRVPQPQQQQNQQGTRAPRPLTPAVQPGQGHRDAQGQQRLCFNCFEPGHFADKCPKPRRQQGQAPPRSNNGGKDVIRGRVNHVTAEDVLTTPDVIVGTFLVHSIPATILFDSGASHSFISVPFVGRNQLGVERLRNPLLITTPGGVMTAKYYSPAVPIEIQGIPFPSDLILLDTKKLDVILGMNWLAQFQGVVVCARRTVTLYRGPEQPVVFFAPPASVRSSELHQIGLSEIPIVREFGDVFPEELPGMPPKREIEFRIDLAPGTTPLYKRPYRMAANELAEVKKQLEELKEKGYIRPSTSPWGAPVIFVEKKDKTKRMCVDYRALNEVTIKNKYPLPRIDDLFDQLKGATVFSKIDLRSGYHQLRIREEDIPKTAFTTRYGLYEFTVMSFGLTNAPAFFMNLMNKVFMEYLDKFVVVFIDDILIYSQSEEDHQHHLRLVLGKLREHQLYAKLSKCEFWLSEVKFLGHVISAKGVAVDPETVTAVTDWKQPKTVTQIRSFLGLAGYYRRFIENFSKIARPMTQLLKKEEKFVWSPQCEKAFQTLKEKLVSSPVLILPDTRKDFMVYCDASRQGLGCVLMQDGHVVAYASRQLRPHEGNYPTHDLELAAVVHALKIWRHYLIGNRCEIYTDHKSLKYIFTQSDLNLRQRRWLELIKDYDVGIHYHPGKANVVADALSRKSHCNTLNVRGIPPELSQQMEALNLSIVGRGFLAALEAKPTLLDQIREAQKNDPDMHGLLKNMKQGKAAGFTEDEHGTLWNGNRRVKAEHQRPAGLLQPLQVPEWKWDEIGMDFITGLPKTQGGYDSIWVVVDRLTKVARFIPVKTTYGGNKLAELYFARIVSLHGIPKKIVSDRGSQFTSHFWKKLQEELGTRLNFSTAYHPQTDGXTERLNQILEDMLRACVLDFGKTWDKSLPYAEFSYNNSYQASIQMAPYEALYGRKCRTPLLWDQVGESQVFGTDILREAEAKVRTIRDNLKVAQSRQKSYADNRRRDLEFAVDDFVYLRVTPLRGVHRFQTKGKLAPRYVGPFRIIARRGEVAYQLELPASLGNVHDVFHVSQLKKCLRVPSEQADSEQIEVREDLTYVERPVKILDTMERRTRNRVIRFCKVQWSNHAEEEATWEREDELKAAHPDLFASSSESRGRDSV

SEQ ID NO: 25922 - protein, 994 aa, Oryza sativa
  unsure (1)..(994): unsure at all Xaa locations
  Clone ID: TF_OsC359_7226.pep
MAAGPPAPVSSLPRPPSLDPALFKPSPLLLLQFPPLAALPPRRNQGRAVALSLRRRHRAPVRRRRRPGSPPTSAPPPSALPHPRRPRPPLRFGRRPPERRRPRRLEPRRRLPPLRPPFSSSPSTXGEPWTAASFPPSLPLSRPPLRRAYGRRRRPXGAGAASRRPHRLGRPRAHRVAAAWGPAVSRPRPXVRLTRGTHGAGRXSPGAPGPPWTHLGHIRTGLRASVAKHYRXFHMSSGTNEGYTSCGPVVEMSWHRAGVLLLGAQSCLPVPGVPAVGGIGSMYTSDQSIIYSNSRALGYGQAEQCTQMAGSINRRGLDLTGFVLELRGMCVVLGYPHGVDYQGKQLPEQEGDDAEPHAAWEVTAVILTGSPERTSLAVTAGGDSFSAACQNAALLAIGTLHQRYPDELQHSPYRYHPRRGGARDYATFRDASSEDDATIMHLARMVEAYDAARMDFHQMVRRGLVENNMKILELRQENLQLKKDLDVVEAQLCQLKIAQGEVCRPKRRRVCRSLKITARKSTSRPELVRQSLAWTCFVETPRAEPAPVVPQEDGVSGVGSTEDALLLTFHGXTRRSAATGDGNQPVGSNHNNHGSPPPPPPPPPPPPLDTNTILTQIIAQRANMMAAFLHHIQNPPQHNAPPPPPQHSKLAEFLRIRPPTFSSSNNPVDALDWLHAVGKKLDTVQCNDEEKVIFAAHXLQGPASLWWDHFQATXPEGQPITWARFTASFQRTHVPVGVMALKKREFXELKQGNRSMMEYLHEFNNLARYAPEDVREDEEKQEKFLAGMDPELSVRLVSGDYPDFQRLVDKSIRLEAKHKELESHKRRLANFRNQQGANQRVRYTNPYPGGSSSQQQQQQQPRSTSRPQFVVHVPQPQQQQSQQGTRAPRPPTPAVQPVQGRRDAQGQQRLCFNCFEPGHFADKCPKPRCQQGQAPPRSNNGGKDVIRGRVNHVTAENVLTTPDVIVGTFLIHSIPATIFVTSQNDSKIHPLNYA

SEQ ID NO: 25923 - protein, 987 aa, Oryza sativa
  unsure (1)..(987): unsure at all Xaa locations
  Clone ID: TF_OsC359_7283.pep
SGPQRLCFNCFEPGHFADKCPKPRRQQGQAPPRSNNGGKDVIRGRVNHVTAEDVLTTPDVIVGTFLVHSXPLYRGPEHPVVFFAPPTSGMPPKREIEFRIDLAPGTTPLHKRPYRMAANELAEVKKQLEELKEKGYIRLSTFPWGAPVIFVEKKDKTKRMCVDYRALNEVTIKNKYPLPRIDDLFDQLKGATVFSKIDLRSGYHQLRICEEDIPKTAFTTRYGLYEFTVMSFGLTNAPAFFMNLMNKVFMEYLDKFVVVFIDDILIYSQSEEDHQHHLRLVLGKLREHQLYAKLSKCEFWLPEVKFLGHVISAKGVAVDPETVTAVTDWKQPKTVTQVRSFLGLAGYYRRFIENFSKIARPMTQLLKKEEKFVWSPQCEKAFQTLKEKLVSSPVLILPDTRKDFMVYCDASRQGFGCVLMQDGHVVAYASRQLRPHEGNYPTHDLELAAVVHALKIWRHYLIGNRCEIYTDHKSLKYIFTQSDLNLRQRRWLELIKDYDVGIHYHPGKANVVADALSRKSHCNTLNVRDIPPELNQQMEALNLSIVGRGFLAALEAKPTLLDQIREAQKNDPDMHGLLKNMKQGKAAGFTEDEHGTLWNGKRVCVPDNRELKQLILQEAHESPYSIHPGSTKMYLDLKEKYWQSTSDRPDFSNLSKYQNGNGMKLGWISSPDFQKPKVDMILYGTAYHPQTDGQTERLNQILEDMLRACVLDFGKTWDKSLPYAEFSYNNSYQASIQMAPYEALYGRKCRTPLLWDQVGESQVFGTDILREAEAKVRIFRDNLKVAQSRQKSYADNRRRDLEFAVGDFVYLRVTPLRGVHRFQTKGKLAPRYVGPFRILARRGEVTYQLELPASLGNVHDVFHVSQLKKCLRVPSEQADSEQIEVREDLTYVERPVKILDTMERWTRNRVIRFCKVQWSNHAEEEATWEREDELKAAHPDLFANAAASEDTLFVEVEADVWESEQGNLAQFFPSPEEELLEDEGFGV

SEQ ID NO: 25924 - protein, 1777 aa, Oryza sativa; identical to SEQ ID NO: 19195
  Clone ID: TF_OsC359_7369.pep

SEQ ID NO: 25925 - protein, 1831 aa, Oryza sativa
  unsure (1)..(1831): unsure at all Xaa locations
  Clone ID: TF_OsC359_7370.pep
MEVDEVGGRWTFSRANEGYTSCGPVVEMSWHRAGVLLLGAQSCLPVPGVPAVGGIGSVLLSMARMGWKLCHVFRLYTVVMAGSVTRRGLDMTGFVLELRGMCVVLGYPHGVDYQARPLPEQEGEDAEPHAGWEVTAVILSGSPERTSLAVTAGGDSFPAACQNAALLAIGTLHQHYPDELQHSPYRYHPRRGGARDYATFRDASSEDDATIVHLARMVEAYDAARIDFHQMVRRGMVENNMKILELRQENLQLKKDLDAVEAQLHQLKIAQGEDCRPKRXCRSQKITARKSTSRPELVRQSLAWTCFVETPRAEPAPVVPQEGETSGVGXNVNTGDGNQPEGSNPNHQGNPPSPSASPPPPPPDTNAILTQILAQQANMMTAFLHHLQNPPQQNAPPPPPQHSKLAEFLRIRPPTFSSSNNPVDALDWLHAVGKKLDTVQCSDEEKVIFAAHQLQGPASLWWDHFQATQPEGQPITWARFTAAFRRTHVPAGVVALKKREFRELKQGNRSVMEYLHEFNNLARYAPEDVREDEEKQEKFLAGMDPELSVRLVSGDYPDFQRLVDKSIRLEAKHKELESHKRRLANFRNQQGANQRVRYTNPYPGGSSSQQQQQQPRSAPRPQFVVRVPQPQQQQNQQGTRVPRPPTPAVQPGQGRRDAQGQQRLCFNCFEPGHFADKCPKPRRQQGQAPPRSNNGGKDVTRGRVNHVTAEDVLTTPDVIVGTFLIHSVPATTLFDSGASHSFISVPFVGRNQLGVERLRNPLLITTPGGVMTAKYYSPAVPIEIQGIPFPSDLILLDTKNLDVILGMNWLAQFQGVVDCARRTVTLYRGPEQPVVFFAPPTSVRSSELHQIGLSEIPIVGEFGDVFPEELPGMPPKREIEFRIDLAPGTTPLYKRPYRMAANELAEKKDKTKRMCVDYRALNEVTIKNKYPLPRIDDLFDQLKGATVFSKIDLRSGYHQLRIREEDIPKTAFTTRYGLYEFTVMSFGLTNAPAFFMNLMNKVFMEYLDKFVVVFIDDILIYSQSEEDHQHHLRLVLGKLREHQLYAKLSKCEFWLSEVKFLGHVISAEGVAVDPETVTAVTDWKQPKTVTQIRSFLGLAGYYRRFIENFSKIARPMTQLLKKEEKFVWSPQCEKAFQTLKEKLVSSPVLILPDTRKDFMVYCDASRQGLGCVLMQDGHVVAYASRQLRPHEGNYPTHDLELAAVVHALKIWRHYLIGNRCEIYTDHKSLKYIFTQSDLNLRQRRWLELIKDYDVGIHYHPGKANVVADALSRKSHCNTLNARGIPPELNQQMEALNLSIVGRGFLAALEAKPTLLDQIREAQKNDPDMHGLLKNMKQGKAAGFTEDEHGTLWNGNRRVKAEHQRPAGLLQPLQVPEWKWDEIGMDFITGLPKTQGGYDSIWVVVDRLTKVARFIPVKTTYGGNKLAELYFARISQTAGMELGTRLNFSTAYHPQTDGQTERLNQILEDMLRACVLDFGKTWDKSLPYAEFSYNNSYQASIQMAPYEALYGRKCRTPLLWDQVGESQVFGTDILREAEAKVRIIRDNLKVAQSRQKSYADNRRRDLEFAVGDFVYLRVTPLRGVHRFQTKGKLAPRYVGPFRIIARRGEVAYQLELPASLGNVHDVFHVSQLKKCLRVPSEQADSEQIEVREDLTYVERPMKILDTMERRTRNRVIRFCKVQWSNHAEEEATWEREDERRHRLPEPRRRLLPLRPPFSSSSLSRGEPKTAVRLPPFLLFLGCHSAAPLVAGGDHRGAGARRSRRPRRRGRPRARPRGYQVGPAVSRPRPRVRLTRGTHGADRRQPRAPGPPWTERLVHPRINKTPTSGHSIH

SEQ ID NO: 25926 - protein, 1913 aa, Oryza sativa
  unsure (1)..(1913): unsure at all Xaa locations
  Clone ID: TF_OsC359_7388.pep
MDISRTNEGYTSCGPVVEMSWHRAGVLLLGXSVLPTCPGGSGRRXGVGSVLLSMARMGWKLCHVFRLYTVVMAGSINRRGLDLTGFVLELRGMCIVLGYPHGVDYQGKQLPEQEGDDAEPHAAWEVTAVILTGSPERTSLAVTAGGDSFSAACQNAALLAIGTLHQRYPDELQHSPYRYHPRRGGARDYATFRDASSEDDATIMHLARMVEVYDAARIDFHQMVRRGLVENNMKILELRQENLQLEKDLDAVEAQLRQLKIAQGEVCRLKRRRVYRSLKITARKSTSRPELVRQSLAWTCFVETPRAEPAPVVPQEDGASGVGSTKDALLLTFRPGPSEQVVWGMVMPMVTTRRRANTGDGNQPEGSNHNNHGSPPPPPPPPPPPPPDTNAILTQILAQQANMMPAFLHHIQNPPQHNAPPPPPQHSKLVEFLRIRPPTFSSSNNPVDALDWLHAVGKKLDTVQCSDEEKVIFAAHQLQGPASLWWDHFQATQPEGQPFTWARFTAAFRRTHVPAEVMALKKREFRELKQGNRSVMEYLHEFNNLARYAPEDVREDKEKQEKFLAGMDPELSMRLVSGDYPDFQRLVDKSIRLEAKHKKLESHKRCLANFRNQQGANQRVRYTNPYLGGSSSQQQQQQQPRSAPRPHFVVRVPQPQQQQSQQGTRAPRPPTPAVQPGQGRRDVQGQQRLCFNCFEPGHFADKCPKPRRQQGQPPPRPNNDGKDVIWGRVNHVTAEDVLTTPNVIVGTFLIHSIPTTILFDSGASHSFISVPFVGRNQLGVERLRNSLLITTPRGVMTAKYYSPAVPIEIQGIPFPSDLILLDTKNLDVILGMNWLAQFQGVVDCARRTVTLYRGPEQPVVFFAPPTSVGSSELHQIGLSEIPIVREFGDVFPEELPGMPPKREIEFRIDLAPGTTPLYKRPYRMASNELAELKGATVFSKIDLRSGYHQLRIREEDIPKTAFTTRYGLYEFTVMSFGLTNAPTFFMNLMNKVFMEYLDKFVVVFIDDILVYSQSEEDHQHHLRLVLGKLREHQLYAKLSKCEFWLSEVKFLGHVISAKGVAVDPETVTAVTGWKQSKTVTQIRSFLGLAGYYRRFIENFSKIARPMTQLLKKEEKFVWSPQCEKAFQTLKEKLVSSPVLILPDTRKDFMVYCDALRQGLGCVLMQEGHVVAYASRQLRPHEGNYPTHDLELAAVVHALKIWRHYLIGNRCEIYTDHKSLKYIFTQSDLNLRQRRWLELIKDYDVGIHYHPGKANVVANALSRKSHCNTLDVRGIPPELNQQMEALNLSIVGRGFLATLEAKPTLLDQIREAQKNDPDMRGLLKNMKQGKAAGFTEDEHGTLWNGNRVCVPDDRELKQLKLQEAHESPYSIHPGSTKMYLDLKEKYWWVSMQREIAEFVALCDVCQRVKAEHQRPAGLLQPLQVPEWKWDEIGMDFITGLPKTQGGYNSIWVVVDRLTKVARFIPVKTTYGGNKLAELYFARIVSLHGVPKKIVSDRGSQFTSHFWKKLQEELRTRLNFSTAYHPQTDGQTERLNQILEDMLRACVLDFGKTWDKSLPYAEFSYNNSYQASIQMAPYEALYGRKCRTPLLWDQVGESQVFGTDILREAEAKVRTIRDNLKVAQSRQKSYADNRRCNLEFAVDDFVYLRVTPLRGVHRFQTKGKLAPRFVGPFRIIARRGEVAYQLELPASLGNVHDVFHVSQLKKCLRVPSEQADSEQIEVREDLTYVERPVKILDTMERRTRNRVIRFCKVQWSNHAEEEATWEREDEPRELRRRINGARDRRADFLPFGPPFLTPNLRLRRVLVDLVHSSVSPADRRNAAVLVDPSRAAAFLRFGRRFRCHRRPGVSRGPPFHFPLLSSLSGAAPRAGGRRRRPSGRGCAASRRPCRRGRLRARLAAARWGPAVSRPRLGGG

SEQ ID NO: 25927 - protein, 1753 aa, Oryza sativa; identical to SEQ ID NO: 19119
  Clone ID: TF_OsC359_7411.pep

SEQ ID NO: 25928 - protein, 2018 aa, Oryza sativa
  unsure (1)..(2018): unsure at all Xaa locations
  Clone ID: TF_OsC359_7419.pep
MAAGSSATDSPSSGRSLLLPTLHKHSPCLPPSFPPLAALSPRRNRARAVVLSLRRRRRAPVRRRRRPGPPPVSASPSSGSPRPRRSRPPLRFARRPPERRRPRRPEPRRRLPPLRSPFPSSPSTRGEPWTAHFVSPFPLLSRAPLRRAGGRRRRPSGRGCAASRRLCRRGRLRARPAAAMWGPAVSRPCPRVRLTRGTHGAXGRRKPRAPGPPWTHLGHIRTGLRASVAKHYRXFHMSSGANEGYTSCGPVVEMSWHRAGVLLLGAQSCLPVPGVPAVGGIGSMYTSDQSKIYSNSRALGYGQAEQCTQMAGSVSRRGLDMTGFVLELRGMCVVLGYPHGVDYQARPLPEQEGDDAEPHAAWEVTAVILAGSPERISLTVTAGGDSFPAACQSAALLAIGTLHQRYPDELQHSPYRYHPRRGGARDYATFRDASSEDDATIVHLARMVKAYDAARIDFHQMVRRGMVENNMKILELRQENLQLKKDLDAVEAQLHQLKIAQGEVCRPKRRRVCRSQKITARKSTSRPELVRQSLAWTCFVETPRAEPTPVVPQKGEASGVGSTEDALLLTFHGXTRRNAATSDGNQPEGSNHNNHGSPPPPPPPPPPPPPDTNAILTQILAQQANMMTAFLHHLQNPPQHNAPPPPPQHSKLAEFLRIRPPTFSSSNNPVDALDWLHAVGKKIDTVQCSDEEKVIFAAHQLQGPASLWWDHFQATQPEGQPITWARFTAAFRRTHVPAGVVALKKREFRELKQGNRSVMEYLHEFNNLARYAPEDVREDEEKQKKFLAGMDPELSVRLVSGDYPDFQRLVDKSIRLEVKHKELESHKRRLANFRNQQGANQRVRYTNPYPGGSSSQQRQQQQQPRSAPRPQFVVRVPQPQQQQSQQGTRAPRPPTPTVQPGQGRRDASGPQRLCFNCFEPGHFADKCPKPRRQQGQAPPRSNNGGKDVIRGRVNHVTAEDVLTTPDVIVGTFLIHSIPATILFDSGASHSFISVPFVGRNQLGVERLRNPLLITTPGGVMTAKYYSPAVPIEIQGIPFPSDLILLDTKNLDVVLGMNWLAQFQGVVDCARRTVTLYRGPGQPVVFFAPPTSVSSSELHQIGLSEIPIVREFGDVFPEELPGMPPKREIEFRIDLALGTTPLCKRPYRMAANELAEVKKQLEELKEKGYIRPSTSPWGAPVIFVEKKDKTKRMCVDYRALNEVTIKNKYPLPRIDDLFDQLKGATVFSKIDLRSGYHQLRIREEDFPKTAFTTRYGLYEFTVMSFGLTNAPAFFMNLMNKVFMEYLDKFVVVFIDDILIYSQSEEDHQHHLLLVLGKLREHQLYAKLSKCEFWLSEVKFLGHVISAKGVAVDPETVTAVTDWKQPKTVTQVRSFLGLAGYYRRFIENFSKIARPMTQLLKKEEKFVWSPQCEKAFRTLKEKLVASPVLILPDTRKDFIVYCDASRQGLGCVLMQDGHVVAYASRQLRPHEGNYPTHDLELAAVVHALKIWRHYLIGNRCEIYTDHRSLKYIFTQSDLNLRQRRWLELIKDYDVGIHYHPGKANVVADALSRKSHCNTLNVRGIPPELNQQMEALNLSIVSRGFLATLEAKPTLLDQIREAQKNDPDMHGLLKNMKQGKAAGFTEDEHGTLWNGNRRVKAEHQRPAGLLQPLQVPEWKWDEIGMDFITGLPKTQGGYDSIWVVVDRLTKVARFIPVKTTYGGNKLAELYFARIVSLHGVPKKIVSDRGSQFTSHFWKKLQEELGTRLNFSTAYHPQIDGQTERLNQILEDMLRACVLDFGKTWDKSLPYAEFSYNNSYQASIQMAPYEALYGRKYRTPLLWDQVGESQVFGTDILREAEAKVRTIRDNLKVAQSRQKSYADNRRRDLEFAVDDFVYLRVTPLRGVHRFRTKGKLAPRYVGPFRITARRGEVAYQLELPASLGNVHDVFHVSQLKKCLRVPSEQADSEQIVVREDLTYVERPVKILDTMERRTRNRVIRFCKVEWSNHAEEEATWEREDELKAAHPDLFASSSESRGRDSV

SEQ ID NO: 25929 - protein, 1805 aa, Oryza sativa; identical to SEQ ID NO: 19132
  Clone ID: TF_OsC359_7446.pep

SEQ ID NO: 25930 - protein, 1806 aa, Oryza sativa
  Clone ID: TF_OsC359_7451.pep
MSWHRAGVLLLGAQSCLPVPGVTAVGGIGSVLLSIARMGWKLCHVFRLYTVVMAGSVSRRGLDMTGFVLELRGMCVVLGYPHGVDYQARPLPEQEGDDAEPHAAWEVTAVILTGSPERTSLAVTAGGDSFPAACQSAALLAIGTLHQRYPDELQHSPYRYHPRRGGARDYATFRDASSEDDATIVHLACMVEAYDAARIDFHQMVRRGMVENNMKILELRQENLQLKKDLDAVEAQLHQLKIAQGEVCRPKRRRVCRSQKITARKSTSRPELVRQSLAWTCFMETPRAEPAPMVPQEGEASGVGSTEDALLLTFRPGPSQRRSVNTGDGNQPEGSNHNNHGSPPPPPPPPPPPPPDTNAILTQILAQQANMMTAFLHHLQNPLQQNAPPPPPQHSKLAEFLRIRPPTFSSSNNPVDALDWLHAVGKKLDTVQCSDEEKVIFAAHQLQGPASLWWYHFQATQPEGQPITWARFTAAFRRTHVPAGVVALKKREFRELKQGNLSVMEMCGKMRRSKRSSGMDPELSVRLVSGDYPDFQRLVDKSIRLEAKHKELESHKRRLANFRNQQGANQRVRYTNPYPGGSSSQQQQQQQPRSAPRPQFVVRVPQPQQQQSQQGTRAPRPSTPTVQPGQGRRDAQGPQRLCFNCFEPGHFADKCPKPRRQQGQAPPRSNNGGKDVIRGRVNHVTAEDVLTTPDVIVGTFLIHSIPATILFDSGASHSFISVPFVGRNQLGVERLRNPLLITTPGGVMTAKYYSPAVPIEIQGIPFPSDLILLDTKNLDVILGMNWLAQFQGVVDCARRTVTLYRGPEQPVVFFAPPTSVSSSELHQIGLSEIPIVREFGDVFPEELPGMPPKREIEFRIDLAPGTTPLYKRPYRMAANELAEVKKQLEELKEKGYIRPSTSPWGAPVIFVEKKDKTKRMCVDYRALNEVTIKNKYPLPRIDDLFDQLKGATVFSKIDLRSGYHQLRIREEDIPKTAFTTRYGLYEFTVMSFGLTNAPAFFMNLMNKVFMEYLDKFVVVFIDDILVYSQTEEDHQHHLRLVLGKLREHQLYAKLSKCEFWLSEVKFLGHVISAKGVAVDPETVTAVTDWRQPKTVTQIRSFLGLAGYYRRFIENFSKIARPMTQLLKKEEKFVWSPQCEKAFQTLKEKLVSSPVLILPDTRKDFMVYCDAARQGLGCVLMQDGHVVAYASRQLRPHEGNYPTHDLELAAVVHALKIWRHYLIGNCCEIYTDHKSLKYIFTQSDLNLRQRRWLELIKDYDVGIHYHPGKANVVADALSRKSHCNTLNVRGIPLELNQQMEALNLSIVGRGFLAALEAKPTLLDQIREAQKNDPDMRGLLKNMKQGKATGFTEDEHGTLWNGNRVCVPDNRELKQLILQEAHESPYSIHPGSTKMYLDLKKKYWWVSMKREIAEFVALCDVCQRVKAEHQRPAGLLQPLQVPEWKWDEIGMDFITGLPKTQGGYDSIWVVVDRLTKVARFIPVKTTYGGNKLAELYFARIVSLHGVPKKIVSDRGSQFTSHFWKKLQEELGTRLNFSTAYHPQTDGQTERLNQILEDMLRACVLDFGKTWDKSLPYAEFSYNNSYQASIQMAPYEALFQTKGKLAPRFVGPFRIIARRGEVAYQLELPASLGNVHDVFHVSQLKKCLRVPSEQADSEQIEVREDLTYVERPVKILDTMERRTRNRVIRFCKVQWSNHAEEEATWEREDERRAPVRRRRRPGPSPASASPPSASPHPRRPRPPLRFGRRPPERRRPRRPVPHRRLSPLRSPFPSSPSTRGEPWTAVSFPPSLPSLGRRSAVPMAAAGDH

SEQ ID NO: 25931 - protein, 1655 aa, Oryza sativa
  unsure (1)..(1655): unsure at all Xaa locations
  Clone ID: TF_OsC359_7468.pep
MAGSVTRRGLDMTGFVLELRGMCVVLGYPHGVDYQARPLPEQEGEDAEPHAGWEVTAVILSGSPERTSLAVTAGGDSFPAACQNAALLAIGTLHQRYPDELQHSPYRYHPRRGGARDYATFRDASSEDDATVVHLARMVEAYDAARIDFHQMVRRGMVENNMKILELRQENLQLKKDLDAVEAQLHQLKIAQGEVCRPKRRRVCRSQKITARKSTSRPELVRQSLAWTCFVETPRAEPTPVVPQKGEASGVDGETRRNAATSDGNQPEGSNHNNHGSPPPPPPPPPPPPPDTNAILTQILAQQANMMTAFLHHLQNPPQHNAPPPPPQHSKLAEFLRICPPTFSSSNNPVDALDWLHAVGKKLDTVQCSDEEKVIFAAHQLQGPASLWWDHFQATQPEGQPITWARFTAAFRRTHVPAGVVALKKREFRELKQGNRSVMEYLHEFNNLARYAPEDVREDEEKQEKFLAGMDPELSVCLVSGDYPDFQRLVDKSIRLEAKHKELESHKRRLANFHNQQGANQRVRYTNPYPGGXLLAAATAAAATSLRASTSIRGARPTAAAADESTRDSCAXPPPPTVQPGQGRRDAQGPQRLCFNCFEPGHFADKCPKPRHQQGQAPPRPNNGGKDVIRGRVNHVTAEDVLTTPDVIVGTFLIHSIPATILFDSGASHSFISVPFVGRNQLGVERLRNPLLITTPGGVMTAKYYSPAVPIEIQGIPFPSDLILLDTKNLDIGLSEIPIVREFGDVFPEELPGMPPKREVEFRIDLAPGTAPLYKRPYRMAANELAEVKEQLEELKEKGYIRPSTSPWGAPVIFVEKKDKTKRMCVDYRALNEVTIKNKYPLPRIDDLFDQLKGATVFSKIDLRSGYHQLRIREEDIPKTAFTTRYRLYEFTVKSFGLTNAPAFFMNLMNKVFMEYLDKFVVVFIDDILIYSQSEEDHQHHLRLVLGKLREHQLYAKLSKCEFWLSEVKFLGHVISAKGVAVDPETVTAVTDWKQPKTVTQVRSFLGLAGYYRRFIENFSKIARPMTQLLKKEEKFVWSPQCEKTFKTLKEKLVSSPVLILPDTRKDFMVYCDASRQGLGCVLMQDGHVVAYASRQLRPHEGNYPTHDLELAAVVHALKIWRHYLIGNRCEIYTDHKSLKYIFTQSDLNLRQRRWLELIKDYDVGIHYHPGKANVVADALSRKSHCNTLNVRGVPPELNQQMEALNLSIVSRGFLAALEAKPTLLDQIREAQKNDPDMHGLLKNMKQGKAAGFTEDEHGTLWNGNRVCVPVNRELKQLILQEAHESPYSIHPGSTKMYLDLKEKYWWISMKREIAEFVALCDVCQCVKAEHQRPAGLLQPLQVPEWKWDEIGMDFITGLPKTQGGYDSIWVVVDRLTKVARFIPVKTTYGGNKLAELYFARITDGQTERLNQILEDMLRACVLDFGKTWDKSLPYAEFSYNNSYQASIQMAPYEALYGRKCRTPLMWDQVGESQVFGTDILREAEAKVRTIRDNLKVAQSRQKSYADNRRRDLEFAVDDFVYLRVTPLRGVHRFRTKGKLAPRYVGPFRIVARRGEVAYQLELPASLGNVHDVFHVSQLKKCLRVPSEQADSEQIEVREDLTYVERPVKILDTMERRTRNRVIRFCKVQWSNHAEEEATWEREDELKAAHPDLFA

SEQ ID NO: 25932 - protein, 1382 aa, Oryza sativa
  Clone ID: TF_OsC359_7471.pep
MSWHRAGVLLLGAQSCLPVPRVPAVGGIGSVLLSMARMGWKLCHVFRPYTVVMAGSISRRGLDLTGFVLELRGMCVVLGYPHGVDYQGRPLPEQEGDDAEPHAAWEVTAVILTGSPERTSLAVTAGGDSFPAACQNAALLAIGTLHQRYPDELQHSPYRYHPRRGGARDFATFRDASSEDDATIMHLARMVEAYDAARIDFHQMVRRGMVENNMKILELRQENLQLKKELDAVEAQLHQLKIAQGEVCRPKRRRVCRSQKITARKSTSRPELVRQSLAWTCFVETPRAEPAPVVPQEGEASGVGSTEDALLLTFRPGPSQRRSANTGDGNQPEGSNHNNHGSPPPPPPPPPPPPPDTNAILTQILAQQANMMTAFLHHLQNPPQQNAPPPPPQHCKLAEFLRIRPPTFSSSNNPVDALDWLHAVGKKLDTVQCSDEEKVIFAAHQLQGPASLWWDHFQATQPEGQPITWARFTAAFRRTHVPAGVVALKKREFRELKQGNRSVMEYLHEFNNLARYALEDVREDEEKQEKFLAGMDPELSVRLVSGDYPDFQRLVDKSIRLEAKHKELESHKRRLANVRNQQGANQRVRYTNPYPGGSSSQQQQQQQPRSAPRPQFVVRVPQPQQQQSQQGTRVPRPPTPAAQSGQGRRDASGPQRLCFNCFEPGHFADKCPKPRRQQGQAPPRSNNGGKDVIRGRVNHVTAEDVLTTPDVIVGTFLIHSIPATILFDSGASHSFISVPFVGRNQLGVERLRNPLLITTPGGVMTAKYYSPAVPIEIQGIPFPSDLILLDTKNLDVILGMNWMAQFQGVVDCARRTVTLYRGPEQSVVFFAPPTSVSSSELHQIGLSEIPIVREFGDVFPEELPGMPPKREIEFRIDLAPGTTPLYKRPYRMAANELAEVKKQLEELKEKGALNEVTIKNKYPLPRIDDLFDQLKGATVFSKIDLRSGYHQLRIREEDIPKTAFTTRYGLYEFTVMSFGLTNAPAFFMNLMNKVFMEYLDKFVVVFIDDILVYSQSEEDHQHHLRLVLGKLREHQLYAKLSKCEFWLSEVKFLGHVISAKGVAVDPETVTAVTDWKQPKTVTQVRSFLGFAGYYRRFIENFSKIARPMTQLLKKEEKFVWSPQCEKAFQTLKEKLVSSPVLTLPDTRKDFMVYCDASRQGLGCVLMQDGHVVAYASRQLRPHEGNYPTHDLELAAVVHALKIWRHYLIGNRSEIYTDHKSLKYIFTQSDLNLRQRRWLELIKDYDVGIHYHPGKANVVADALSRKSHCNTLNVRGIPPELNQQMEALNLSIVGRGFLVALEAKPTLLDQIREAQCRDRENCLFPNASVLIPVPGKAGTGTTETNGEGTASAAILGQRRDAAGTRLDDAEPRTEARTGLQRLA

SEQ ID NO: 25933 - protein, 1791 aa, Oryza sativa; identical to SEQ ID NO: 19173
  Clone ID: TF_OsC359_7495.pep

SEQ ID NO: 25934 - protein, 1697 aa, Oryza sativa
  Clone ID: TF_OsC359_7522.pep
MAGSVTRRGLDMTGFILELRGMCVVLGYPHGVDYQARPLPEQEGDDAEPHAAWEVTAVILSGSPERTSLAVTAGGDSFPAACQNAALLAIGTLHQRYPDELQHSPYRYHPRRGGARDYATFRDASSEDDATIVHLARMVEAYDAARIDFHQMVRRGMVENNLKILELRQENLQLKKDLDAVEAQLHQLKIAQGEVCCPKRRRVCRSQKITARKSTSRPELVRQSLAWTCFVETPRAEPAPVVPQEGEASGVGSTEDALLLTFRPGPSQRRNAATGDGNQPEGSNHNHQGNPPPPPPPPPPPPPDTNAILTQILAQQANMMTAFLHHLQNPPQQNAPPPPPQHSKLAEFLRIRPPTFSSSNNPVDALDWLHAVGKKLDTVQCSDEEKVIFAAHQLQGPASLWWDHFQATQPEGQPITWARFTAAFRRTHVPAGVVALKKREFRELKQGNRSVMEYLHEFNNLARYAPEDVREDEEKQEKFLAGMDPELSVRLVSGDYPDFQRLVDKSIRLEAKHKELESHKRRLANFRNQQGANQRVRYTNPYPGGSSSQQQQQQQQPRSAPRPQFVVRVPQPQQQQNQQGTRAPRPPTPTVQSGQGRRDAQGQQRLCFNCFEPGHFADKCPKPRRQQGQAPPHSNNGGKDVIRGRVNHVTAEDVLTTPDVIVGTFLVHSIPATILFDSGASHWFISVPFVGRNQLGVERLRNPLLITTPGGVMTAKYYSPAVPIEIQGIPFPSDLILLDTKNLDVILGMNWLAQFQGVVDCARRTVTLYRGPEQPVVFFAPPTSVSSSELHQIGLSEIPIVREFGDVFPEELPGMPPKREIEFRIDLAPGTTPLHKRPYRMAANELAEVKKQLEELKEKGYIRPSTSPWGAPVIFVEKKDKTKRMCVDYRALNEVTIKNKYPLPRIDDLFDQLKGATVFSKIDLRSGYHQLRIREEDIPKTAFTTRYGLYEFTVMSFGLTNAPAFFMNLMNKVFMEYLDKFVVVFIDDILVYSQSEEDHQHHLRLVLGKLREHQLYAKLSKCEFWLSEVKFLGHVISAKGVSVDPETVTTVTDWKQPKTVTQVRSFLGLAGYYRRFIENFSKIARPMTQLLKKEEKFVWSPQCEKAFQTLKEKLVSSPVLILPDTRKDFMVYCDASRQGFGCVLMQDGHVVAYASRQLRPHEGNYPTHDLELAAVVHALKIWRHYLIGNRCEIYTDHKSLKYIFTQSDLNLRQRRWLELIKDYDVGIHYHPDMRQGKAAGFTEDEHGTLWNGKRVCVPDSRELKQLILQEAHESPYSIHPGSTKMYLDLKEKYWWVSMKREIAEFVALCDVCQRVKAEHQRPAGLLQPLQVPEWKWDEIGMDFITGLPKTQGGYDSIWVIVDRLTKVARFIPVKTTYGGNKLAELYFARIVSLHGIPKKIVSDRGSQFTSHFWKKLQEELGTRLNFSTAYHPQTDGQTERLNQILEDMLRACVLDFGKTWDKSLPYAEFSYNNSYQASIQMAPYEALYGRKCRTPLLWDQVGESQVFGTDILREAEAKVRIIRDNLKVAQSRQKSYADNRRRDLEFAVDDFVYLRVTPLRGVHRFQTKGKLAPRYVGPFRIIARRGEVAYQLELPASLGNVHDVFHVSQLKRCLRVPSEQADSEQIEVREDLTYVERPVKILDTRERRTRNRVIRFCKVQWSNHAEEEATWEREDELKAAHPDLFASSSESRGRDSV

SEQ ID NO: 25935 - protein, 1125 aa, Oryza sativa
  unsure (1)..(1125): unsure at all Xaa locations
  Clone ID: TF_OsC359_7570.pep
MDEVGGRWTFSRANEGYTSCGPVVEMSWHRAGVLLLGAQSCLPVPGVPAVGGIGSMYTSDQSIIYSNSRALGYGQAEQCTQMAGSVTRRGLHMTGFVLELRGMCVVLGYPHGVDYQARPLPEQEGDDAEPHAGWEVTAVILSGSPERTSLAVTAGGDSFPAACQNVALLAIGTLHQRYPDELQHSPYRYHPRRGGARDYATFRDASSEDDATIVHLARMVEAYDAARIDFHQMVPRGMVENNMKILELRQENLQLKKDLDAVEAQLHQLKIAQGEVCRPKRRRVCRSQKITARKSTSRPELVRQSLAWTCFVETPRAEPAPVVPQEGEASGVGXHGGCAVAHLPSWPVAAVDEQLVGLRMVTTRRNAATGDGNQPEGSNHNHQGNPPPPSPSPSPPPPDTNAILTQILAQQANMMTAFLHHLQNPPQQNAPPPPPQHSKLAEFLRIRPPTFSSSNNPVDALDWLHAVGKKLDTAQCSDEEKVIFAAHQLQGPASLWWDHFQATQPEGQPITWARFTAAFRRTHVPAGVVALKKREFRELKQGNRSVMEYLHEFNNLARYAPEDVREDEEKQEKFLAGMDLELSVRLVSGDYPDFQRLVDKSIRLEAKHKELESHKRRLANFRNQQCANQRVRYTNPYPGGSSSQQQQQQQQPRSAPRPQFVVRVPQPQQQQNQQGTRAPRPPTPTVQPGQGRRDAQGQQRLCFNCFEPGHFADKCPKPRRQQGQAPPRSNNGGKDVIRGRVNHVTAEDVLTTPDVIVGTFLVHPIPATILFDSGASHSFISVPFVGRNQLGVERLRNPLLITTPGGVMTAKYYSPAVPIEIQGIPFPSDLILLDTKNLDVILGMNWLAQFQGVVDCARRTVTLYRGPEQPVVFFAPPTSVSSSELHQIGLSEIPIVREFGDVFPEELPGMPPKREIEFRIDHAPGTTPLHKRPYRMAANELAEVKKQLEELKEKGYIRPSTSPWGAPVIFVEKKDKTKRMCVDYRALNEVTIKNKYPLPRIDDLFDQLKGATVFSKIDLRSGYHQLRIREEDIPKTAFTTRYGLYEFTGMSFGLTNAPAFFMNLMNKVFMEYLDKFVVVFIDDILIYSQSEGDHQHHLRLVLGKLREHQLYTCLSRPKTTLKYIL

SEQ ID NO: 25936 - protein, 1799 aa, Oryza sativa; identical to SEQ ID NO: 19135
  Clone ID: TF_OsC359_7601.pep

SEQ ID NO: 25937 - protein, 1917 aa, Oryza sativa
  Clone ID: TF_OsC359_7609.pep
MGKPSNKRSSLEMKALVSSSCLPSSACGRRPSLPLFPMAGSVTRRGLDMTGFVLELRGMCVALGYPHGVDYQARPLPEQEGDDAEPHAGWEVTAVILAGSPERTSLTVTAGGDSFPAACQSAALLAIGTLHQRYPDELQHSPYRYHPRHGGARDYATFRDASSEDDATIVHLARMVEAYDAARIDFHQMVRRGMVENNMKILELRQENLQLKKDLDAVEAQLHQLKIAQGEVCRPKRRRVCRSQKITARKSTSRPELVRQSLAWTCFVETPRAEPAPVVPQEGEASGVGSTEALSLFAGSVWGFQMVTTRRNANTGDGNQPESSNHNHQGNPPPPPPPPPPPPPDTNAILTQILAQQANMMTAFLHHLQNPPQHNAPPPPPQHSKLAEFLRIRPPTFSSSNNPVDALDWLHAVGKKLDTVQCSDEEKVIFAAHQLQGPASLWWDHFQATQPEGQPITWARFTAAFRRTHVPAGVVALKKREFRELKQGNRSVMEYLHEFNNLARYAPEDVREDEEKQEKFLAGMDPELSVRLVSGDYPDFQRLVDKSIRLEAKHKELESHKRRLANFRNQQGANQRVRYTNPYPGGSSSQQQQQQQQPRSAPRPQFVVRVPQPQQQQNQQGTRAPHPPTPTVQSGQGRRDAQGQQRLCFNCFEPGHFADKCPKPRRQQGQAPPRSKNGGKDVIRGRVNHVTAEDVLTTPDVIVGTFLVHSIPATILFDSGASHSFIFVPFVGRNQLGVERLRNPLLITTPGGVMTAKYYSPAVPIEIQGIPFPSDLILLDTKNLDVILGMNWLAQFQGVVDCARRTVTLYRGPAQPVVFFAPSTSIRSSELHQIGLSEIPIVREFGDVFPEELPGMPPKREIEFRIDLAPGTTPLHKRPYRMAANELAEVKKQLEELKEKGYIRPSTSPWGAPVIFVEKKDKTKRMCVDYRALNEVTIKNKYPLPRIDDLFDQLKGATVFSKIDLRSGYHQLRIREEDIPKTAFTTRYGLYEFTVMSFGLTNAPAFFMNLMNKVFMEYLDKFVVVFIDDILIYSHSEEDHQHHLRLVLGKLREHQLYAKLSKCEFWLSEVKFLGHVISAKGVAVDPETVTAVTDWKQPKTVTQVRSFLGLAGYYRRFIENFSKIARPMTQLLKKEEKFVWSPQCEKAFQTLKEKLVSSPVLILPDTRKDFMVYCDASRQGLGCVLMQDGHVVAYASRQLRPHEGNYPTHDLELAAVVHALKIWRHYLIGNRCEIYTDHKSLKYIFTQSDLNLRQRRWLELIKDYDVGIHYHPGKANVVADALSRKSHCNTLNVRGIPPELSQQMEALNLSIVSRGFLAALEAKPTLLDQIREAQKNDPDMHGLLKNMKQGKAAGFTEDEHGTLWNGKRVCVPDNRELKQLILQEAHESPYSIHPGSTKMYLDLKEKYWWVSMKREIAEFVALCDVCQRVKAEHQRPAGLLQPLQVPEWKWDEIGMDFITGLPKTQGGYDSIWVVVDRLTKVARFIPVKTTYGGNKLAELYFARIVSLHGVPKKFVSDRGSQFTSHFWKKLQEDLGTRLNFSTAYHPQTDGQTECLNQILEDMLRACVLDFGKTWDKSLPYAEFSYNNSYQASIQMAPYEALYGRKCRTPLLWDQVGESQVFGTDILREAEAKVRTIRDNLKVAQSRQKSYADNRRCDLEFAVDDFVYLRVTPLRGVHRFQTKGKLAPRYVGPFRIVARRGEVAYQLELPASLGNVHDVFHVSQLKKCLRVPSEQADSEQIEVREDLTYVERPVKILDTMERRTRNRVIRFCKVQWSNHAEEEATWEREDELLRPFPPLAALPPRRIRARDVALSLRRRRRAPVRRCRRPGPPPTSAPPHSGSPHPRQPRPPLRVGRRPPERRRPRRPEPRRCLPPLRPPPPSPPSPRGEPWTVASFPPSLPSLGHLSAAPVVAGGDH

SEQ ID NO: 25938 - protein, 2102 aa, Oryza sativa
  unsure (1)..(2102): unsure at all Xaa locations
  Clone ID: TF_OsC359_7625.pep
MAAGSSAPVSPSSGRPLSLPTLYKHSPCLPPPFPPLAAPSLRRNRARAVALSLRRHRRAPVCRRRRPGPSSASAPPPSVSPQPRRPRPPLRFARRQPERRRPRLPEPRRRLPPLRSPFPSSPSTRGELWTAXFVSPFPPLSRAPLYRAGGHRRRPSXGRGCAASRRLCRRGRLRARPAAAMWGPAVSRPRPRVRLTRGTHGAGRCEPGAPGPPWTHLGHIRTGLRASVAKHYRXFHMSSGANEGYTSCGPVVEMSWHRAGVLLLGAQSCLPVPGVPGVGGIGSMYTSDQSIIYSNSRALGYGQAEQCTQMAGSVSRRGLDLTGFVLELRGMCVVLGYPHGVDYQGRPLPEQEGDDAEPHAAWEVTAVILTGSPERTSLAVTAGGDSFSAACQSAALLAISTLHQRYPDELQHSPYRYHPRRGGARDYATFRDASSEDDATIMHLARMVEAYDAARIDFHQMVRHGMVENNLKILKLRQENLQLKKDLDAVEAQLHQLKIAQREVCRPQRRRVCRSQKITARKSTSRPELVRQSLAWTCFVETPRAEPAPVVPQEGEASGVGSMEDALLLTFHGXTRRNAATSDSNQPEGSNHNNHGSPPPPPPPPPPPPPDTNAILTQILAQQANMMAAFLHHIQNPPQHNAPPPPPQHSKLAEFLRIRPPTFSSSNNPVDALDWLHAVGKKLDTVQCSDEEKVIFAAHQLQGPASLWWDHFQATQLEGQPITWARFTAAFRRTHVPAGVMALKKREFRELKQGNRSVMEYLHEFNNLARYAPEDVREDEEKQEKFLAGMDPELSVRLVSGDYPDFQRLVDKSIRLEAKHKELESHKRRLANFRNQQGANQRIRYTNPYPGGSSSQQQQPRSAPRPQFVVRVPQPQQQQSQQGTRAPRPPTPAAQSGQGRRDVQGPQRLCFNCFEPGHFADKCPKPRRQQGQAPPHSNNGGKDVIWGRVNHVTAEDVLTTPDVIVGTFLIHSIPATILFDSGASHSFISVPFVGRNQLGVERLRNPLLITTPGGVMTAKYYSPAVPIEIQGIPFPSDLILLDTKNLDVILGMNWLAQFQGVVDCARRTVTLYRGPEXPVVFFAPPTSVSSSELHQIGLSEIPIVREFGDVFPEELPGMPPKREIEFRIDLAPGTTPLYKRPYRMAANELAEVKKQLEELKEKGYIRLSTSPWGAPVIFVEKKDKTKRMCVDYRALNEVTIKNKYPLPRIDDLFDQLKGATVFSKIDLRSGYHQLRIREEDIPKTAFTIRYGLYEFTVMSFGLTNAPAFFMNLMNKVFMEYLDKFVVVFIDDILVYSQSEEDHQHHLRLVLGKLREHQLYAKLSKCEFWLSEVTDWKQPKTVTQIRSFLGLAGYYRRFIENFSKITRPMTQLLKKEEKFVWSPQCEKAFKTLKEKLVSSPVLILLDTRKDFMVYCDASRQGLGXVLMQDGHVVAYASRQLRPHEGNYPTHDLELAAVVHALKIWRHYLIGNRCEIYTDHKSLKYIFTQSDLNLRQRRWLELIKDYDVGIHYHPGKANVVADALSRKSHCNTLNVRGIPPELNQQMEALNLSIVGRGFLAALEAKPTLLDQIREAQKNDPDMHGLLKNMKQGKATGFTEDEHGTLWNGNRRVKAEHQRLAGHLQPLQVPEWKWDEIGMDFITGLPKTQGGYDSIWVVVDRLTKVARFILVKATYGGNKLAELYFARIVSLHGVPKKIVSDRGSQFTSHFWKKLQEELGTRLNFSTAYHPQTDGQTERLNQILEDMLRACVLDFGKTWDKSLPYAEFSYNNSYQASIQMAPYEALYGRKCRTPLLWDQVGESQVFGTDILREAEAKVRTIRDNLKVAQSRQKSYVDNRRRDLEFAVDDFVYLRVTPLRGVHRFQTKGKLAPRFVGPFRIIARRGEVAYQLELPASLGNVHDVFHVSQLKKCLRVPSEKADSEXIEVREDLTYVERPVKILDTMERRTRNRVIRFFKVHWSNHAEEEATWEREDEPPRASLHRFRHSPLSLPAGIELAPSPSLSVVAAELRSAAVVAPDHLSPRRHLLRLRRIPGDLVHPSVSLADRRSTVDPVHPSRAAAFLRSGRRFRLRRRPGVSRGPPLLFPLPFPSLGRRSAVPMDAAGDH

SEQ ID NO: 25939 - protein, 1755 aa, Oryza sativa
  Clone ID: TF_OsC359_7654.pep
MDISRTNEGYTSCGPVVEMSWHSAGVLLLGAQSCLPILEVPAVGGVGSVLLSMARMGWKLCHVFRPYAVVMAGSVNRHGLDLCGFVLELRGMCIVLGYPHGVDYQGKKLPEQDGDDAEPHAAWEVTAVILTGSPERTSLAVTAGGDSFSAACQNAALLAIGTLHQRYPDELQHSPYRYHPRRGGARDYATFWDASSEDDATIMHLACMVEAYDAARIDFHHMVRRGLVENNMKILELRQENLQLKKDLDAVEAQLFQLKIAQGEVCHPKRRRVCRSLKITARKSTFRPELVRQSLAWTCFVETPCAEPAPVVPQEEEASGVGSTEDMVTTRRSAVAGDGNQPEGSNPNTQGGPPPPPPPPPPPPPDTNPILTQILAQQANMMAAFLHHIQNPPQHNAPPPPPPQHSKLAEFLRIRPPTFSSSNNPVDALDWLHAVGKKLDTVQCNNEEKIIFATHQLQGPASLWWDHFQATQPEGHPITWARFTAAFRRTHVPAGVMALKKREFRELKQGNRSVMKYLHEFNNLARYAPEDVREDEEKQEKFLVGMDPELSVRLVSGDYPDFQRLQQQQPQPRFAPRPQFVVRVPQPQQQQSQQGTRALRPPAPAVQLGQGRMDAQGQQRLCFNCFEPGHFADKCPKPRRQQGQAPPCPNNGGNDVARGRVNHVTAEDVLTTPDVIVGTFLIHSIPATILFDSGASYSFISVPFVGRNQLGVERPRNPLLITTPGGDMTAKYYSPTVPIEIQGIPFPFDLILLDTNNLDVILGMNWLAQFQGVVDCARRTVILYQGPKQPVVFFAPPTSVGSSELHQIGLSEIPIVSEFGDVFPEELPGMPPKREIEFRIDLAPGTTPLYKRPYRMAANKLAEVKKQLEELKKKGALNEVTIKNKYPLPRINDLFDQLKGAIVFSKIDLRSGYHQLRIREEDIPKTAFTTRYGLFEFTVMSFGLTNAPAFFMNLMNKVFMEYLDKFVVVFIDDILLSKCEFWLSEVTDWKQPKTVTQIRSFLGLAGYYRRFIENFSKITRPMTQLLKKEEKFVWSPQCEKAFKTLKEKLVSSPVLILLDTRKDFMDGHVVAYASRQLRPHEGNYPTHDLELAAVVHALKIWRHYLIGNRCEIYTDHKSLKYIFTQSDLNLRQRRWLELIKDYDVGIHYHPGKANVVADALSRKSHCNTLNVRGIPPELNQQMEALNLSIVGRGFLAALEAKPTLLDQIREAQKNDPDMHGLLKNMKQGKATGFTEDEHGTLWNGNRVCVPDNRELKQLILQEAHESPYSIHPGSTKMYLDLKEKYWWVSMKREIVEFVALYDVCQRVKAEHQRPAGLLQPLQVPEWKWDEIGMDFITGLPKTQGGYDSIWVVVDRLTKVARFIPVKATYGGNKLAELYFARIVSLHGVPKKIVSDRGSQFTSHFWKKLQEELGTRLNFSTAYHPQTDGQTERLNQILEDMLRACVLDFGKTWDKSLPYAEFSYNNSYQASIQMAPYEALYGRKCRTPLLWDQVGESQVFGTDILREAKAKVRTIRDNLKVAQSRQKSYADNRRRDLEFAVDDFVYLRVTPLRGVHRFQTKGKLAPRFVGPFRIIARRGEVAYQLELPASLGNVHDVFHVSQLKKCLRVPSEQADSEQIEVREDLTYVERPVKILDTMERRTRNRVIRFCKVQWSNHAEEEATWEREDELLPLRHRLLRLRHVLADLVHSSVSPADRRNTAVLVNPSRAAAFLRSGRRFRRPRRPGVSRGPTLSLPPSLPSLGRRSAASVVAGGDH

SEQ ID NO: 25940 - protein, 1786 aa, Oryza sativa; identical to SEQ ID NO: 19217
  Clone ID: TF_OsC359_7656.pep

SEQ ID NO: 25941 - protein, 2045 aa, Oryza sativa
  unsure (1)..(2045): unsure at all Xaa locations
  Clone ID: TF_OsC359_7699.pep
FPASFPPLFPLSLSDSFGNPPANFAGVIDGAEIAAPVSFPSGRPLSLPTLFKHSPCLPPPFPTLAAFSPRRNRARAVVLSLRRCRRASVRRRRRPGPPPASASPPSASPRPRRPRPPLRFARRPPERRRPRRPEPRRRLSPLRSPFPSSPSTRGEPRTXHLASPFPPLSRAPLRRAGGRRRXPSGRGRAASRRPCRRGRHRARPAAAMWGPAVSRPRPRVRLTRGTHGAGRRKPCAPGPPWTHLGHIRTGVRASVAKHYRXFHMSSGANEGYTSCGPVVEMSWHRAGVLLLGAQSCLPVPGVPAVDGIGSMYTSDQSKIYSNSRALGYGQAEQCTQMAGSVSRRGLDMTGFVLELRGMCVVLGYPHGVDYQARPFPEQEGDDAEPHAAWEVTAVILAGSPERTSLTVTAGGDSFPAACQSAALLAIGTLHQRYPDELQHSPYRYHPRRGGARDYATFRDASSEDDATIVHLARMVEAYDAARIDFHQMVRRGMVENNMKILELRQENLQLKKDLDAVEAQLHQLKIAQGEICRPKHRRVYRSQKITARKSTSRPELVRQSLAWTCFVETPRAEPAPVVPQEGEASGVGSTEDALLLTFHGXTRRNAATSDGNQPEDSNHNNHGSPPPPPPPPPPPPPDTNAILTQILAQQANMMTAFLHHLQNPPQHNAPPPPPQHSKLAEFLRICPPTFSSSNNPVDALDWLHAVGKKLDTVQCSDEEKVIFAAHQLQGPASLWWDHFQATQPEGQPITWARFTAAFRRTHVPAGVVALKKREFRELKQGNRSVMEYLHEFNNLARYAPEDVREDEEKQEKFLAGMDPELSVCLVSGDYPDFQRLVDKSIRLEAKHKELESHKRRLANFHNQQGANQRVRYTNPYPGGSSSQQQQQQQQPRSAPRPQFVVRVPQPQQEQNQQGTRAPRPPPPTVQPGQGRRDAQGPQRLCFNCFEPGHFADKCPKPRRQQGQAPPRPNNGGKDVIRGRVNHVTAEDVLTTPDVIVGTFLIHSIPATILFDSGASHSFISVPFVGRNQLGVERLRNPLLITTPGGVMTAKYYSPAVPIEIQGIPFPSDLILLGTKNLDVILGMNWLAQFQGVVDCARRTVTLYRGPEQPVVFFAPPTSVRSSELHQIELSEIPIVREFGDVFPEELPGMPPKREIEFRIDLAPGTAPLYKRPYRMAANELAEVKKQLEELKEKGYIRPSTSPWGAPVIFVEKKDKTKRMCVDYRALNEVTIKNKYPLPRIDDLFNQLKGATVFSKIDLRSGYHQLRIREEDIPKTAFTTRYGLYEFTVMSFGLTNAPAFFMNLMNKVFMEYLDKFVVVFIDDILIYSQSEEDHQHHLRLVLGKLREHQLYAKLSKCEFWLSEVKFLGHVISAKGVAVDPETVIAVTDWKQPKTVTQVRSFLGLAGYYRRFIENFSKIARPMTQLLKKEEKFVWSPQCEKAFQTLKEKLVSSPVLILPDTHKDFMVYCDASRQGXGCVLMQDGYVVAYASRQLRPHEGNYPTHDLELAAVVHALKIWWHYLIGNRCEIYTDHKSLKYIFTQSDLNLRQRRWLELIKDYDVGIHYHPGKANVVADALSRKGHCNTLNVRGIPPELNQQMEALNLSIVSRGFLAALEAKPTLLDQIREAQKNAPDMHGLLKNMKQGKAAGFTEDEHGTLWNGNRRVKAEHQRPAGLLQPLQVPEWKWDEIGMDFITGLPKTQGGYDSIWVVVDRLTKVARFIPVKTTYRGNKLAELYFARIVSLHGVPKKIVSDRGSQFTSHFWKKLQEELGTRLNFSTAYHLQTDGQTERLNQILEDMLRACVLDFEKTWDKSLPYAEFSYNNSYQASIQMAPYEALYGRKCRTPLMWDQVGESQVFGTDILREAEAKVRTIRDNLKVARSRQKSYADNRRRDLEFAVDDFVYLRVTPLRGVHRFRTKGKLAPRYVGPFRIVARRGEVAYQLELPASLGNVHNVFHVSQLKKCLRVPSEQADSEQIEVREDLTYVERPVKILDTMERRTRNRVIRFCKDQWSNHAEEEATWEREDELKAAHPDLFASSSESRGRDSV

SEQ ID NO: 25942 - protein, 1736 aa, Oryza sativa
  unsure (1)..(1736): unsure at all Xaa locations
  Clone ID: TF_OsC359_7713.pep
MYTSDQSKTYSNSRALGYGQAEQCTQMAGSVTRRGLDMTGFVLELRGMCVVLGYPHGVDYQARPLPDQEGDDAEPPAAWEVTAVILSGSPERTSLAVTAGGDSFPAACQNAALLAIGTLHQRYPDELQHSPYRYHPRRGGARDYATFRDASSEDDATIVHLARMVEAYDAARIDFHQMVRRGMVENNLKILELRQENLQLKKDLDAVETQLHQLKIAQGEICRPKRRRVCRSQKITARKSTSRPELVRQSLAWTCFVETPRAEPAPVVPQEGEASGVGSTEDALLLTFHXMTRRNAATGDGNQPEGSNHNHQGNPPPPPPPPPPPPPDTNAILTQILAQQANMMTAFLHHLQNPPQLNAPPPPPQHSKLAEFLRIRPPTFFSSNNPVDALDWLHAVGKKLDTVQCSDEEKVIFAAHQLQGPASLWWDHFQATQPEGQPITWARFTAAFRRTHVPAGVVALKKREFRELKQGNRSVMEYLHEFNNLARYAPEDVREDEEKQEKFLAGMDPELSVRLVSGDYPDFQRLVDKSIRLEAKHKELESHKRRLANFRNQQGANQRVRYTNPYPGGSSSQQQPQQQQQPRSAPRPQFVVRIPQPQQQQNQQGTRAPRPPTPTVQPGQGRRDAQGQQRLCFNCFEPGHFADKCPKPRRQQGQAPPRSNNGGKDVIRGRVNHVTAEDVLTTPDVIVGTFLVHSIPATILFDSGASHSFISVPFVGRNQLGVERLRNPLLITTPGGVMTAKYYSPAVPIEIQGIPFPSDLILLDTKNLDVILGMNWLAQFQGVVDCARRTVTLYRGPEQPVVFFAPPTSVRSSELHQIGLSEIPIVREFGDVFPEELPGMPPKREIEFRIDLAPGTTPLHKRPYRMAANELAEVKKQLEELKEKGYIRPSTSPWGAPVIFVEKKDKTKRMCVDYRALNEVTIKNKYPLPRIDDLFDQLKGATVFSKIDLRSGYHQLRIREEDIPKTAFTTRYGLYEFTVMSFGLTNAPAFFMNLMNKVFMEYLDKFVVVFIDDILIYSQSEEDHQHHLRLVLGKLREHQLYAKLSKCEFWLSEVKFLGHVISAKGVAVDPETVTAVTDWKQPKTVTQVRSFLGLAGYYRRFIENFSKIARPMTQLLKKEEKFVWSPQCEKAFQTLKEKLVSSPVLILPDTRKDFMVYCDASRQGLGCVLMQDGHVVAYASRQLRPHEGNYPTHDLEVAAVVHALKIWRHYLIGNRCEIYTDHKSLKYIFTQSDLNLRQRRWLELIKDYDVGIHYHPGKANVVADALSRKSHCNTLNVRGIPPELNQQMEALNLSIVSRGFLAALEAKPTLLDQIREAQKNDPDMHGLLKNMKQGKAAGFTEDEHGTLWNGKRRVKAEHQRPAGLLQPLQVPEWKWDEIGMDFITGLPKTQGGYDSIWVVVDRLTKVARFIPVKTTYGGNKLAELYFARIVSLHGVPKKIVSDRGSQFTSHFWKKLQEELGTRLNFSTAYHPQTDGQTERLNQILEDMLRACVLYFGKTWDKSLPYAEFSYNNSYQASIQMAPYEALYGRKCRTPLLWDQVGESQVFGTDILREAEAKVRIIRDNLKVAQSRQKSYADNRRRDLEFAVDDFVYLRVTPLRGIHRFQTKGKLAPRYVGPFRIIARRGEVAYQLELPASLGNVHDVFHVSQLKKCLRVPSEQADSGQIEVREDLTYVERPVKILDTMERRTRNRVIRFCKVQWSNHAEEEATWEREDELKAAHPDLFASSSESRGRDSV

SEQ ID NO: 25943 - protein, 1803 aa, Oryza sativa
  unsure (1)..(1803): unsure at all Xaa locations
  Clone ID: TF_OsC359_7732.pep
MVLMVAPRPYMDRSSGLCCKALPYFHMSSGANEGYTSCGPVVEMSWHRAGVLLLGAQSCLPVPGVPAVGGIGSMYTSDQSIIYSNSRALGYGQAEQCTQMAGSVSRRGLDMTGFVLELRGMCVVLGYPHGVDYQGRPLPEQEGDDAEPHAAWEVTAVILTGSPERTSLAVTAGGDSFSAACQSAALLAICTLHQRYPDELQHSPYRYHPRRGGARDYATFRDASSEDDATIMHLARMVEAYDAARIDFHQMVRRGMVENNLKILELRQENLQLKKDLDAVEAQLHQLKIAQGEVCRPKRRRVCRSQKITARKSTSRPELVRQSLAWTCFVENPRAEPAPVVPQEGEASGVGSTEDALLLTFHXMTRRSASTGDGNQPEGSNHNHQGSPPPPPPPPPPPPPDTNAILTQILAQQANMMIAFLHHLQNPPQHNAPPPPPQHSKLAEFLRIRPPTFFSSNNPVDALDWLHAVGKKLDTVQCSDEEKVIFAAHQLQGPASLWWDHFQATQPEGQPITWARFTAAFRRTHVPAGVVALKKREFRELKQGNRSVMEYLHEFNNLARYAPEDVRXDEEKQEKFLAGMDPELSVRLVSGDYPDFQRLVDKSIRLEAKHKELESHKRRLANFRNQQGANQRVRYTNPYPGGSSSQQQPRSAPRPQFVVRVPQPQQQQSQQGTRAPRPPTPTVQPGQGRRDAQGPQRLCFNCFEPGHFADKCPKPRRQQGQAPPRSNNGGKDVIRGRVNHVTAEDVLTTPDVIVGTFLIHSIPATILFDSGASHSFISVPFVGRNQLGVERLRNPLLITTPGGVMTAKYYSPAVPIEIQGIPFPSDLILLDTKNLDVILGMNWLAQFQGVVDCARRTVTLYRGPEQPVVFFAPPTSVRSSELHQIVLSEIPIVREFGDVFPEELPGMPPKREIEFRIDLAPGTTPLYKRPYRMAANELAEFKKQLEELKEKGYIRPSTSPWGAPVIFVEKKDKTKRMCVDYRALNEVTIKNKYPLPRIDDLFDXLKSATVFSKIDLRSGNHQLRIREEDIPKTAFTTRYGLYEFTVMSFGLTNAPAFFMNLMNKVFMEYLDKFVVVFIDDILIYSQSEEDHQHHLRLVLGKLREHQLYAKLSKCEFWLSEVKFLGHVISAKGVAMDPETVTAVTDWKQPKTVTQVRSFLGLAGYYRRFIENFSKIARPMTQLLKKEEKFVWSPQCEKAFQTLKEKLVSSLVLVLPDTRKDFMVYCDASRQGLGCVLMQDGHVVAYASRQLRPHEGNYPTHDLELAAVVHALKIWRHYLIGNRCEIYTDHKSLKYIFTQSDLNLRQRRWLELIKDYDVGIHYHPGKANVVADALSRKSHCNTLNVRGIPPELNQQMEALNLSIVGRGFLATLEAKPTLLDQIREAQKNDPDMRGLLKNMKQGKAAGFTEDEHGALWNGNRRVKAEHQRPAGLLQPLQVPEWKWDEIGMDFITGLPKTQGGYDSIWVVVDRLTKVARFIPVKTTYGGNKLAELYFARIVSLHGVPKKIVSDRGSQFTSHFWKKLQEELGTRLNFSTAYHPQTDGQTERLNQILEDMLRACVLDFGKTWDKSLPYAEFSYNNSYQASIQMAPYEALYGRKCRTPLLWDQVGESQVFGTDILREAEAKVRTIRDNLKVAQPRQKSYADNRRRNLEFAVDDFVYLRITPLRGVHRFRTKGKLAPRFVGPFRIIARRGEVAYQLELPASLGNVHDVFHVSQLKKCLRVPSEQADSEQIEVREDLTYVERPVKILDTMERRTRNRVIRFCKVQWSNHAEEEATWEREDELKAAHPDLFASSSESRGRDSV

SEQ ID NO: 25944 - protein, 269 aa, Oryza sativa
  Clone ID: TF_OsC359_7733.pep
MFGPMAFFPRLVSDVDFGAGFITSGIRAYGRSMVEEVVEAYMKLGDGQGRGVADADSESGHSACGTIVEDEAKSNTRRGGDADSDLKKSEAIGLMKSAKEFHGIALQSNKSPRQKEIGLGPLGGGDLGRRASSAESVSVMDAEAVEKQQHLDISTSGSPSINCGQAISAKGAAREFSLRMRKSVDVGFISSVHKMIRKKGFSPCLLGRIQFAWQDDCGDMREGGALLRVESEGRNYRDTGVSCYDEPGGGLSGRLGVSGEKGSTQVLVH

SEQ ID NO: 25945 - protein, 1261 aa, Oryza sativa
  unsure (1)..(1261): unsure at all Xaa locations
  Clone ID: TF_OsC359_7737.pep
MDISRTNEGYTSCGPVVEMSWHRAGVLLLGPQSCLPVPEVPAVGGVGSVLLSMARMGWKLCHVFRPYTVVVCDTWLHVRKIVTTGNNPTGVPDVRALILVPGGKAQHTQRQTRNSGRLGRRPQAQQQQNQQGTRAPRPPTPTVQPGQGRRDAQGQQRLCFNCFEPGHFADKCPKPRRQQGQAPPRPNNGGKDVIRGRVNHVTAEDVLTTPDVIVGTFLIHSIPATILFDSGASHSFISVPFVGKNQLGVERLRNPLLITTPGGVMIAKYYSPAVPIEIQGIPFPSDLILLDTKNLDVILGMNWEFGEVFPEELPGMPPKREIEFRIDLAPGTTPLHKRPYRMAANELAEVKKQLEELKEKGYIRPSTSPWGAPVIFVEKKDKTKRMCVDYRALNEVTIKNKYPLPRIDDLFDQLKGATVFSKIDLRSGYHQLRIREEDIPKTAFTTRYGLYEFTVMSFGLTNAPAFFMNLMNKVFMEYLDKFVVVFIDDILIYSQSEEDHQHHLRLVLGKLREHQLYAKLSKCEFWLSEVKFLGHVISAKGVAVDPETVTAVTDWKPPKTVTQVRSFLGLEGYYRRFIENFSKIARPMTQLLKKEEKFVWSPQCENAFQTLKEKLVSSPVLILPDTRXDFMVYCDASRQGLGXYASRQLRPHEGNYPTHDLELAAVVHALKIWRHYLIGNRCEIYTDHKSLKYIFTQSDLNLRQRRWLELIKDYDVGIHYHPGKANVVADALSRKSHCNTLNVRGIPPELNQQMEALNLSIVGRGFVAALEAKPILLDQIREAQKNDPDMHGLLKNMKQGKAAGFTEDEHGTLWNGNRVCVPDSRELKQLILLEAHESPYSIHPGSTKMYLDLKEKYWWVSMKREIAEFVALCDVCQRVKAEHQRPAGLLQPLQVPEWKWDEIGMDFITGLPKTQGGYDSIWVVVDRLTKVARFIPVKTTYGGNKLAELYFARIVSLHGVPKKIVSDRGSQFTSHFWKKLQEELGTRLNFSTAYHPQTDGQTERLNQILEDMLRACVLDFGKTWDKSLPYAEFSYNNSYQASIQMAPYEALYGRKCRTPLLWDQVGESQVFGTDILREAEAKVRIIRDNLKVAQSRQKSYADNRRRDLEFAVGDFVYLRVTPLRGVHRFQTKGKLAPRYVGPFRINARRGEVAYQLELPASLGNVHDVFHVSQLKKCLRVPSEQADSEQIEVREDLTYVERPVKILDTMERRTRNRVIRFCKVQWSNHAEEEATWEREDELKAAHPDLFASSSESRGRDSV

SEQ ID NO: 25946 - protein, 1707 aa, Oryza sativa
  Clone ID: TF_OsC359_7743.pep
MARMGWKLCHVFRLYTVVMAGSVSRRGLDMTGFVLELRGMCVVLGYPHGVDYQGRPLPEQEGDDAEPHAAWEVTAVILTGSPERTSLAVTAGGDSFPAACQNAALLAIGTLHQRYPDELQHSPYRYHPRRGGARDYAIFRDASSEDDATIMHLARMVEAYDAARIDFHQMVRRGMVGNNMKILELRQENLQLKKDLDAVEAQLHQLKIAQGEMVKTRRNAATGDGNQPEGSNHNHQGSPPPPPSPPPPPPPDTNAILTQILAQQANMMTAFLHHLQNPPQQNAPPPPPQHSKLAEFLRIRPPTFSSSNNPVDALDWLHAVGKKLDTVQCSDEEKVIFAAHQLQGPASLWTHVPAGVVALKKREFRELKQGNRSVMEYLHELNNLARYAPEDVREDEEKQEKFLAGMDPELSVRLVSGDYPDFQRLMDKSIRLEAKHKELESHKRRLANFRNQQGANQRVRYTNPYPGGSSSQQQQQQQQPRSAPRPQFVPGQGRRDAQGPQRLCFNCFEPGHFADKCPKPRRQQGQAPPRSNNGGKDVIRGRVNHVTAEDVLTTPDVIVGTFLIHSIPATILFDSGASHSFIFVPFVGRKQLGVERLRNPLLITTPGGVMTAKYYSHAVPIEIQGIPFPSDLILLDTKNLDVILRMNWLAQFQGVVDCARRTVTLYRGPEQPVVFFAPPTSVSSSELHQIGLSEIPIVREFGDVFPEELPGMPPKREIEFRIDLAPGTTPLYKRPYRMAANELAEKKDKMKRMCVDYRALNEVTIKNKYPLPRIDDMFDQLKGATVFSKIDLRSGYHQLRIREEDIPKTAFTTRYGLYEFTVMSFGLTNAPAFFMNLMNKVFMEYLDKFVVVFIDDILIYSQSEEDHQHHLRLVLGKLREHQLYAKLSKCEFWLSEVKFLGHVISAKGVAVDPETVTAVTDWKQPKTVTQVRSFLGLAGYYRRFIENFSKIARPMTQLLKKEEKFVWSPQCEKAFQTLKEKLVSSPVLILPDTRKDFMVYCDASRQGLGCVLMQDGHVVAYASRQLRPHEGNYPTHDLELAAVVHALKIWRHYLIGNRCEIYTDHKSLKYIFTQSDLNLRQRRWLELIKDYDVGIHYHPGKANVVADALSRKSHCNTLDVRGIPPELNQQMEALNLSIVGRGFLATLEAKPTLLDQIREAQKNDPDMRGLLKNMKQGKAAGFTEDEHGTLWNGNRVCVPDDRELKQLILQEAHESPYSIHPGSTKMYLDLKEKYWWVSMKREIAEFVALCDVCQRVKAEHQRPAGLLQPLQVPEWKWDEIGMDFITGLPKTQGGYDSIWVVVDRLTKVARFIPVKTTYGGNKLAELYFARIVSLHGVPKKIVSDRGSQFTSHFWKKLQEELGTRLNFSTAYHPQTDGQTERLNQILEDMLRACVLDFGKTWDKSLPYAEFSYNNSYQPSIQMAPYEALYGRKCRTPLLWDRVGESQVFGTDILREAEAKVRTIRDNLKVAQSRQKSYADNRRRNLEFAVDDFVYLRVTPLRGVHRFQTKGKLAPRYVGPFRIIARCGEVAYQLELPASLGNVHDVFHVSQLKKCLRVPSEQADSEQIEVREDLTYVERPVKILDTMERRTRNRVIHFCKVQWSNHAEEEATWEREDELLPFRRRLLRVRRDLADLVHLSVSVADRRNTAVPVGGDHRGAGAPPPVGCAGVAAFGRVPRPVHRGPWGCRVGPTPVDPVRAPSPLGSAI

SEQ ID NO: 25947 - protein, 1713 aa, Oryza sativa; identical to SEQ ID NO: 19180
  Clone ID: TF_OsC359_7797.pep

SEQ ID NO: 25948 - protein, 1822 aa, Oryza sativa
  Clone ID: TF_OsC359_7801.pep
MSWHRAGVLLLGAQSCLPVPEVPAVGGIGSVLLSMARMGWKLCHVFRLYTVVMAGSVTRRGLDMTGFVLELRGMCVVLGYPHGVDYQARPLPEQEGDDAEPHAGWEVTAVILSGSPERTSLAVTAGGDSFPAACQSAALLAIGTLHQRYPDELQHSPYRYHPRRGGARDYATFRDASSEDDATIVHLARMVEAYDAARIDFHQMVRRGMVENNMKILELRQENLQLKKDLDAVEAQLHQLKIAQGEVCRPKRRRVCRSQKITARKSTSRPELVRQSLAWTCFVEIPRAEPAPVVPQEGEASGVGSTEDALLLTFRPGPSQRRSANTGDGNQPEGSNHHHQGSPPPPPPPPPPPPPDTNAILTQILAQQANMMTAFLHHLQNPPQHNAPPPPPQHSKLAEFLRIRPPTFSSSNNPVDALDWLHAVGKKLDTVQCSDEEKVIFAAHQLQGPASLWWDHFQATQPEGQPITWARFTAAFRRTHVPAGVVALKKREFRELKQGNRSVMEYLHEFNNLARYAPEDVREDEEKQEKFLAGMDPELSVRLVSGDYPDFQRLVDKSIRLEAKHKELESHKRRLANFRNQQGANQRVRYTNPYPGGSSSQQQQQQQQPRSAPRPQFVVRVPQPQQQQNQQGTRAPRPPTPTVQPGQGRRDAQGPQRLCFNCFEPGHFADKCPKPRRQQGQAPPRSNNGGKDVIRGRVNHVTAEDVLTTPDVIVGTFLIHSIPATILFDSGASHSFISVPFVGRNQLGVERLRNPLLITTPGGVMTAKYYSPAVPIEIQGIPFSSDLILLDTKNLDVILGMNWLAQFQGVVDCARRTVTLYRGPEQPVVFFAPPTSVSSSELHQIGLSEIPIVREFGDVFPEELPGMPPKREIEFRIDLAPGTTPLYKRPYRMAANELAEVKKQLEELKEKGYIRPSTSPWGAPVIFVEKKDKTKRMCVDYRALNEVTIKNKYPLPRIDDLFDQLKGATVFSKIDLRSGYHQLRIREEDIPKTAFTTRYGLYEFTVMSFGLTNAPAFFMNLMNKVFMEYLDKFVVVFIDDILIYSQSEEDHQYHLRLVLGKLREHQLYAKLSKCEFWLSEVKFLGHVISAKGVAVDPETVTAVTDWKQPKTVTQVRSFLGLAGYYRRFIENFSKIARPMTQLLKKEEKFVWSPQCEKAFKTLKEKLVSSPVLILPDTCKDFMVYCDASRQGLGCVLMQDGHVVAYASRQLRPHEGNYPTHDLELDAVVHALKIWRHYLIGNRCEIYTDHKSLKYIFTQSDLNLRQRRWLELIKDYDVGIHYHPGKANVVADALSRKSHCNTLNVRGIPLELSQQMEALNLSIVGRGFLAALEAKPTLLDQIREAQKNDPDMHGLLKNMKQGKAAGFTEDEHGTLWNGNRVCVPDNRELKQLILQEAHESPYSIHPGSTKMYLDLKEKYWWVSMKREIAEFVALCDVCQRVKAEHQRPAGLLQPLQVPEWKWDEIGMDFITGLRKTQGGYDSIWVVVDRLTKVARFIPVKTTYGGNKLAELYFARIVSLHGVPKKIVSDRGSQFTSHFWKKLQEELGTRLNFSTAYHPQTDGQTERLNQILEDMLRACVLDFGKTWDKSLPYAEFSYNNSYQASIQMAPYEALYGRKCRTPLLWDQVGESQVFGTDILREAEAKVRTIRDNLKVAQSRQKSYADNRRRDLEFAVDDFVYLRVTPLRGVHRFRTKGKLAPRYVGPFRIVARRGEVAYQLELPASLGNVHDVFHVSQLKKCLRVPSEQADSEQIEVREDLTYVERPVKILDTMERRTRNRVIRFCKVQWSNHVEEEATWEREDELKAAHPDLFASSSESRGRDSV

SEQ ID NO: 25949 - protein, 2309 aa, Oryza sativa
  unsure (1)..(2309): unsure at all Xaa locations
  Clone ID: TF_OsC359_7868.pep
MKRVLVDGGASLSIISPAAFNALKAPGMKLQPSLPIIGVTPGHTWPLGHVELPITFGDSTNFRTERIDFDVADLNLPYNAVLGRPALVKFMAATHYAYLQMKIPGPSGPITVFGDVKVTLACAEQRADNLAVATEPQAPEASASHASKKRLTSADEESALVSFLRANSDVFEWKPSDMPGVPREVIEHRLAMRLDARPVRQKVRCQAPERQAFIREEVARLLEADFIREVIHPEWLANPVVVPKANGKLRMCIDYTDLNKACPKDPFPLPRIDQIVDSTAGFTLPKSSPAHQWSPRSPRRFPSPPAALSHSQPYLNAPRASLLRFRRPPLALPVGFELAPSSSLSAVAAELRFAAVVAPDLLPLRRRLLRLRRVLVDLVHSSVSPADRRSTIVLVDPSRAAASLRFGRRSRRRRQPGVSRGPPFRFPLPSPLSAAAPPCLWPPIYLNSRVITVLFSHAYLPLLRPYYCYCYYYLVHPRTNKTPTSEHSTHGTGFRLGSGCMVLIVAPRPYKDRSSGLCCKALPYFHMSSGANEGYTSCGPVVEMSWHRAGVLLLGAQSCLPVPGVPAVGGIGSMYTSDQSIIYSNSRALGYGQAEQCTQMAGSVTRRGLDMTGFVLELRGMCVVLGYPHGVDYQARPLPEQEGDDAEPHAAWEVTAVILAGSPERTSLTVTAGGDSFPAACQSAALLAIGTLHQRYPDELQHSPYRYHPRRGGARDHATFRDASSEDDATIVHLARMVEAYDAARIDFHQMVRRGMVENNLKILELRQENLQLKKDLDAVEAQLHQLKIAQGEICRPKRRRVCRSQKITARKSTSRPELVRXSLAWTCFVETPRAEPAPVVPQEGEASGVGSTEDALLLTFHXMTRRNANTGDGNQPEGSNHNHQGNPPPPPPPPPPPPPDTNAILTQILAQQANMMTAFLHHLQNPPQLNPPPPPPQHSKLAEFLRIRPPTFSSSNNPVDALDWLHAVGKKLDTVQCSDEEKVIFAAHQLHGPASLWWDHFQAMQPEGQPVTWARFTAAFRRTHVPAGVVALKKREFRELKQGNRSVMEYLHEFNNLARYTPEDVRKDEEKQEKFLAGMDPELSVRLVSGDYPDFQRLVDKSIRLEAKHKELESHKRRLANFRNQQGANQRVRYTNPYPGGSSSQQQQQQQQPRSAPRPQFVVRVPQPQQQQNQQGTRAPRPPTPTVQPGQGRRDASGPQRLCFNCFEPGHFADKCPKPRRQQGQAPPRPNNGGKDVSRGRVNHVTAEDVLTTPDVIVGTFLIHSIPATILFVSGASHSFISVPFVGRNQLGVQCLRNPLLIXTTRGGVMPAKYYSPAVPIEIQGIPFPSDLILLDTKILDVILGMNWLAQFQGVVDCARRTVTLYRGPEQPVVFFAPPTSVRSSELHQIGLSEIPIVREFGDVFPEELPGMPPKREIEFRIDLAPGTTPLYKRPYRMAANELAGVKKQLEELKEKGYIRPSTSPWGAPVIFVEKKDKTKRMCVDYRALNEVTIKNKYPLPRIDDLFDQLKGATVFSKIDLRSGYHQLRIREEDIPKTAFTTRYGLFEFTVMSFGLTNAPAFFMNLMNKVFMEYLDKFVVVFIDDILIYSQSEEDHQHHLRLVLGKLREHQLYAKLSKCEFWLSEVKFLGHVISAKGVAVDPETVTAVTDWKQPKTVTQVRSFLGLAGYYRRFIENFSKIARPMTQLLKKEEKFVWSPQCEKAFQTLKEKLVSSPVLILPDTRKDFMVYCDASRQGLGCVLMQDGHVVAYASRQLRPHEGNYPTHDLELAAVVHALKIWRHYLIGNRCEIYTDHKSLKYIFTQSDLNLRQRRWLELIKDYDVGIHYHPGKANVVADALSRKSHCNTLNVRGIPLELNQQMEALNLSIVGRGFLTTLEAKPTLLDQIREAQKNDPDMHGLLKNMKQGKAAGFTEDEHGTLWNGNRRVKAEHQRPAGLLQPLQVPEWKWDEIGMDFITGLPKTQGGYDSIWVVVDRLTKVARFIPVKTTYGGNKLAELYFARIVSLHGVPKKIVSDRGSQFTSHFWKKLQEELGTRLNFSTAYHPQTDGQTERLNQILEDMLRACVLDFGKTWDKSLPYAEFSYNNSYQASIQMAPYEALYGRKCRTPLLWDQVGESQVFGTDILREAEAKVRTIRDNLKVAQSQQKSYADNRRRDLEFAVDDFVYLRVTPLRGVHRFQTKGKLAPRYVGPFRIVARRGEVAYQLELPASLGNVHDVFHVSQLKKCLLVPSEQADSEQIEVREDLTYVERPVKILDTMERRTRNRVIRFCKVQWSNHAEEEATWEREDELKAAHPDLFDSSSESRGRDSV

SEQ ID NO: 25950 - protein, 1821 aa, Oryza sativa; identical to SEQ ID NO: 19141
  Clone ID: TF_OsC359_7872.pep

SEQ ID NO: 25951 - protein, 1034 aa, Oryza sativa
  unsure (1)..(1034): unsure at all Xaa locations
  Clone ID: TF_OsC359_7881.pep
MGKKLDTVQCNDEEKVIFAAHQLQGPASLWWDHYQATQPEGQPITWARFTAAFRRTHVPAGVMALKKREFRELKQGNRSVMEYLHEFNNLARYAPEDVREDEEKQEKFLAGMDPELSVRLVSGDYLDFQRLVDKSIRLEAKHKELESHKRRLTNFRNQQGANQRIRYTNPYPGGSSSQQQQQQQQPRSVPQPQFVDPRALLYPPPPSPSQQGTRAPHPPTPAVQPGQGRRDVQCQQRLCFNCFEPGHFADKCPKPRRQQGQAPPRPNNGXIGLSETLIVSEFGDVFPEELPGMPPKREIEFRIDLARGTTPLYKRPYRMAANELVEVKKQLEELKEKGALNEVTIKNKYPLPRIDDLFDQLKGATVFSKIDLRSGYHQLRIREEDIPKTAFTTRYGLYEFTVMSFGLTNAPAFFMNLMNKVFMEYLDKFVVVFIDDILLSEVKFLGHVISAKGVAVDPETVTAVTDWKQPKTVTQVRSFLGLAGYYRRFIENFSKIARPMTQLLKKEEKIVWSPQCEKAFQTLKEKLEGHVVAYASRQLRPHEGNYPTNDLVLAAVRRWLELIKDYDVGIHYHPGKANVVADALSRKSHCNTLGVRDIPSELNQQMEALNLNIVSHGFLATLEAKPTLLDQIREAQKNDPDMHGILKNMKQEFVALCDVCQRVKAEHQRPAGLLQPLQVPEWKWDEIGMDFITGLPKTQGGYDSIWVVVDRLTKVARFIPVKTTYGGSKLAELYFARIVSLHGVPKKIVSDRGSQFTSHFWKKLQEELGTRLNFSTAYHPQTDGQTERLNQILEDMLRACVLDFGKTWDKSLPYAEFSYNNSYQASIQMAPYEALYGRKCRTPLLWDQVGESQVFGTDILREAEAKVRTIRENLKVAQSRQKSYADNRRRNLEFAVDDFVYLRVTPLRGVRWFQTKGKLAPRFVGPFRIIARRGEVAYQLELPASLGNVHDVFHVSQLKKCLRVPSEQADSEQIEVREDLTYVERLVKILDNMERRTRNRVIRFCKVQWSNHAEEEATWEREDELKAAHPDLFA

SEQ ID NO: 25952 - protein, 1986 aa, Oryza sativa
  unsure (1)..(1986): unsure at all Xaa locations
  Clone ID: TF_OsC359_7928.pep
MAAGSPAPVSFPADRPLSLPTLFKPSPLLPRPFLPLAAPFPRQNRARAVVLSLLRHRRPPAGPLRSPGPPPASASSPQASPCRRXPCPPPRRARRPPKRHSPRPPEPRHRLPPLRTPPLPSPSTRGETWTTXLFPPSLPLSWPPLRCAYGRRRRPXGAGAASRRPRRRGRLRARRVAVAWGPAVSRPCPRVRLMRGAYGAGRXSPGAPGPPWTHLGHIRTGLWASVAKHYRXFHMSSGRXEKGPTCGPHMSVTRVRGGAAAAWAEFMLPLVKLYIVSTFGVPCLLGQGIIHARKERPLGYFRXDNVCXMAGNINRHGLDLTGFVLELRGMFVVLGYPHGVDYQGKKLPEQDGDDAEPRAAWEVTAVILTGSPERTSLAVTAGGDSFPAACQNAALLVIGTLHQRYLDELRHSPYSYHPRXGACDYATFRDASSEDDATIMHLARMVEAYDAARIDFHHIVRRGLVENNMKILELRQENLQLKKDLDAVEAQLCQLKIAKGEVCRPKRRRVCRNLKITARKSTSRPELVRQSLAWTCFVEIPCAESAPLVPQEEGASGVGSTEDVLLLTFHGXTRRSAVTGEGSHPEGSNPNNHDSPPPPPPXPPPPPPDTNPILTQILAQQANVMAAFLHHIQNPPQHNAPPPPPPLQHSKLAEFLRIRPPTFSSFNNPVDALDWLHAVGKKLDTVQCNDEEKVIFATHQLQGPASLWWDHFQATQPEGXPITWARFTAAFRRTHVPAGVMALKKREFRELKQGNRSVMEYLHEFNNLARYAPEDVREDEEKQQKFLAGMDPELSVHLVSRDYPDFQRLVDKSIHLEAKHKELESHKRRLANFSNQQGANQRVRYTNPYPGGSSSQQQQQQQPRPAPRPPYVVRVPQPQQQQNQQGTRAPRPPAPAVQPGQGRRDAQGQQRLCFNCFEPGHFADKCPKPRRQQGQAPPRPNNGGKDVTGGCVNHVTAEDVLTTPDVIVGTFLIHSIPATILFDSGASHSFISVPFVGRNQLGVERLRNPLLITTPGVVMTTKYYSPAVPIEIQGIPFPXDLILLDTKNLDVILGMNWLAQFQGVVDCARRTVTLYRGPDQPVVFFAXPTPAGTSVLHQLGLSVISIVSEFGDVFPEELPGMPPKREIEFRIDLAPGATPLYKRPYRMAANELAEVKKQLEELKENGYIRPSTSPWSAPVIFVEKKDKTKRMCVDYRALNEVTIKNMYPLPQIDDLFDQLKGATVFSKIDLRSGYHQLRIREEDIPKTALTTRYGLYEFTVMLFGLTNSPAFFMNLMNKVFMEYLDKFVVVFIDDILVYSESEEDHQQHLRLVLGKLREHXLYAKLSKCEFLLSEVKFLGHVISAKGVAVDPKTVTAVTDWKQPKTVTQVRSFLGLAGYYRRFIENFSKIARPMTQLLKKEEKFVWSPQCEKAFQTLKEKLVSSPVLILLDTRKDFLVYCDASRQGLGCVLMQEGHVVAYASRQLRPHEGNYPTHDLELAAVVHDLKIWRHYLIGNRCEIYTDHKSLKYIFTQSDLNLQQRRWLELIKDYDVGIHYHPSKANVVADALSRKSHCSTLGVRGIPPELNQQLEALNLSIVSYGFLAMLEAKPTLLDQIREAQKNDPDIHGILKNMKQGKAAGFTEDEHGTLWNGNHRVKAEHQRPARLLQPLQVPEWKWDEIGMDFITGVPKTQGGYDSIWVIVDRLTKVAWFIPVKTTYGGNKLAELYFARIVSLHGVPKKIVSDRGSQFTYHPQTDGQTDHPNQVLXKTWDKSLPYAEFSYNNSYQASIQMAPYEALYGRKCRTPLLWDQVGESQVFGTDILREAEAKVRTIXDNLKVAXSRQKSYADNRRRNLEFAVDDFVYLRVTLLRGVHRFQTKGKLPPRFVGPFRIIARRGEVAYQLELPASLGNVHDVFHVSQLKKCLRVPSEQADSEQIEVREDLTYVEKPVKILDTIERRTRNRVIRFCKVQWSNHAEEEATWEREDELKAAHPDLFASSSESRGRDSV

SEQ ID NO: 25953 - protein, 2015 aa, Oryza sativa
  unsure (1)..(2015): unsure at all Xaa locations
  Clone ID: TF_OsC359_7996.pep
MAAGSSTTDSPSSGRSLLLPTLHKHSPCLPPSFPPLAALSPRRNRARNVVLSLRRRRRAPVRRRRRTGPPPVSASPSSGSPRPRQSRPPLRFARRPPERRRPRRPEPRRPLSPLRSPFPSSPSTRGEPWTAHFASPFPPLSRAPLRRAGGRRRRPSGRGRAASRRLCRRGRLRARPAAAMWGPVVSRPRPRVRLTRGTHGAGRRKPRAPGPPWTHLGHIRTGVRASVAKHYRXFHMSSGANEGYTSCGPVVEMSWHRAGVLLLGAQSCLPVPGVPAVGGIGSMYTSDQSKIYSNSRALGYGQAEQCTQMAGSVSRRGLDMTGFVLELRGMCVVLGHPHGVDYQARPLPEQEGDDAEPHAAWEVTAVILAGSPERTSLTVTAGGDSFPAACQSAALLAIGTLHQRYPDELQHSPYRYHPRRGGARDYATFRDASSEDDATIVHLARMVEAYDAARIDFHQMVRRGMVENNMKILELRQENLQLKKDLDAVEAQLHQLKIAQGEICRPKHRRVYRSQKITARKSTSRPELVRQSLAWTCFVETPRAEPAPVVPQEGEASGVGSTEDALLLTFHGXTRRNAATSDGNQPEDSNHNNHGSPPPPPPPPPPPPPDTNAILTQILAQQANMMTAFLHHLQNPPQHNAPPPPPQHSKLAEFLRICPPTFSSSNNPVDALDWLHAVGKKLDTVQCSDEEKVIFAAHQLQGPASLWWDHFQATQPEGQPITWARFTAAFRRTHVPAGVVALKKREFRELKQGNRSVMEYLHEFNNLARYAPEDVREDEEKQEKFLAGMDPELSVCLVSGDYPDFQRLVDKSIRLEAKHKELESHKRRLANFHNQQGANQRVRYTNPYPGGSSSQQQQQQQQPRSAPRPQFVVRVPQPQQEQNQQGTRAPRPPPPTVQPGQGRRDAQGPQRLCFNCFEPGHFADKCPKPRRQQGQAPPRPNNGGKDVIRGRVNHVTAEDVLTTPDVIVGTFLIHSIPATILFDSGASHSFISVPFVGRNQLGVERLRNPLLITTPGGVMTAKYYSPAVPIEIQGIPFPSDLILLGTKNLDVILGMNWLAQFQGVVDCARRTVTLYRGPEQPVVFFAPPTSVRSSELHQIELSEIPIVREFGDVFPEELPGMPPKREIEFRIDLAPGTAPLYKRPYRMAANELAEVKKQLEELKEKGYIRPSTSPWGAPVIFVEKKDKTKRMCVDYRALNEVTIKNKYPLPRIDDLFNQLKGATVFSKIDLRSGYHQLRIREEDIPKTAFTTRYGLYEFTVMSFGLTNAPAFFMNLMNKVFMEYLDKFVVVFIDDILIYSQSEEDHQHHLRLVLGKLREHQLYAKLSKCEFWLSEVKFLGHVISAKGVAVDPETVIAVTDWKQPKTVTQVRSFLGLAGYYRRFIENFSKIARPMTQLLKKEEKFVWSPQCEKAFQTLKEKLVSSPVLILPDTHKDFMVYCDASRQGXGCVLMQDGYVVAYASRQLRPHEGNYPTHDLELAAVVHALKIWWHYLIGNRCEIYTDHKSLKYIFTQSDLNLRQRRWLELIKDYDVGIHYHPGKANVVADALSRKSHCNTLNVRGIPPELNQQMEALNLSIVSRGFLATLEAKPTLLDQICKAQKNDPDMHGLLKNMKQGKAAGFTEDEHGTLWNGNRRVKAEHQRPAGLLQPLQVPEWKWDEIGMDFITGLPKTQGGYDSIWVVVDRLTKVARFIPVKTTYGGNKLAELYFARIVSLHGVPKKIVSDRGSQFTSHFWKKLQEELGTRLNFSTAYHPQTDGQTERLNQILEDMLRACVLDFGKTWDKSLPYAEFSYNNSYQASIQMAPYEALYGRKCRTPLLWDQVGESQVFGTDILREAEAKVRTIRDNLKMAQSRQKSYADNRRRDLEFAADDFVYVRVTPLRGVHRFRTKGKLAPRYVGPFRITARRGEVVTTGNNPTGIPYVRALILVPGGKAQNTQRQTRNSGRLGRRPQALDGRHELDTKAFIFKELLFWTWEKLSKTEYNHRTQQDTPTNATRHIFLTCYHAPHTTTVYRRKT

SEQ ID NO: 25954 - protein, 1846 aa, Oryza sativa
  Clone ID: TF_OsC359_8144.pep
MEVDEVGGRWTFSRANEGYSCGPVVEMSWHRAGVLLLGAQSCLPVPGPVGGIGSVLLSMARMGWKLCHVFRLYTVVMAGSVTRRGLDMTGFVLELRGMCVVLGYPHGVDYQARPLPDQEGDDAEPHAGWEVTAVILSGSPERTSLAVTAGGDSFPAACQNAALLAIGTLHQRYPDELQHSPYRYHPRRGGACDHATFRDASSEDDATIVHLARMVEAYDAARIDFHQMVRRGMVENNMKILELRQENLQLKKDLDTVEAQLHQLKIAQGEVCRPKRRRICRSQKITARKSTSRPELVRQSLAWTCFVETPRAEPAPVVPQEGEASGVGSTEGALLLTFRPGPSQRRNANTGDGNQPEGSNHNHQGNPPPPPPPPPPPPPDTNAILTQILAQQANMMTAFLHHLQNPPQQNAPPPPPQHSKLAEFLRIRPPTFSSSNNPVDALDWLHAVGKKLDTVQCSDEEKVIFAAHQLQGPASLWWDHFQATQPEGQPITWARFTAAFRRTHVPAGVVALKKREFRELKQGNRSVMEYLHEFNNLARYAPEDVREDEEKQEKFLAGMDPELSVRLVSGDYPDFQRLVDKSIRLEAKHKELESHKRRLANFRNQQGANQRVRYTNPYPGGSSSQQQQQQQQPRSAPRPQFVVRVPQPQQQQNQQGTRAPRPPTPTVQPGQGRRDAQGQQRLCFNCFEPGHFADKCPKPRRQQGQAPPRSNNGGKDVIRGRVNHVTAEDVLTTPDVIVGTFLVHSIPATILFDSGASHSFISVPFVGRNQLGVERLRNPLLITTPGGVMTAKYYSPAVPIEIQGIPFPSDLILLDTKNLDVILGMNWLAQFQGVVDCARRTVTLYRGPEQPVVFFAPPTSVRSSELHQIELSEIPIVREFGDVFPEELPGMPPKREIEFRIDLAPGTTPLHKRPYRMAANELAEVKKQLEVLKEKGYIRPSTSPWGAPVIFVEKKDKTKRMCVDYRALNEVTIKNKYPLPRIDDLFDQLKGATVFSKIDLRSGYHQLRIRKEDIPKTAFTTRYGLYEFTVMSFGLTNAPAFFMNLMNKVFMEYLDKFVVVFIDDILIYSQSEEDHQHHLRLVLGKLREHQLYAKLSKCEFWLSEVKFLGHVISAKGVAVDPETVTAVTDWKQPKTVTQVRSFLGLAGYYRRFIENFSKIARPMTQLLKKEEKFVWSPQCEKAFQTLKEKLVSSPVLILPDTRKDFMVYCDASRQGLGCVLMQDGHVVAYASCQLRPHEGNYPTHDLELAAVVHALKIWRHYHIGNRCEIYTDHKSLKYIFTQSDLNLRQRRWLELIKDYDVGIHYHPGKANVVADALSRKSHCNTLNVRGIPPELSQQMEALNLSIVGRGFLAALEAKPTLLDQIREAQKNDPDMHGLLKNMKQGKATGFTEDEHGTLWNGKRVCVPDNRELKQLILQEAHESPYSIHPGSTKMYLDLKEKYWWVSMKREIAEFVALCDVCQRVKAEHQRPAGLLQPLQVPEWKWDEIGMDFITGLPKTQGGYDSIWVVVDRLTKVARFIPVKTTYGGNKLAELYFARIVSLHGVPKKIVSDRGSQFTSHFWKKLQEELGTRLNFSTAYHPQTDGQTERLNQILEDMLRACVLDFGKTWDKSLPYAEFSYNNSYQASIQMAPYEALYGRKCRTPLLWDQVGESQVFGTDILREAEAKVRIIRDNLKVAQSRQKSYADNRRRDLEFAVGDFVYLRVTLLRGVHRFQTKGKLAPRYVGPFRINARRGEVAYQLELPASLGNVHDVFHVSQLKKCLRVPSEQADSEQIEVREDLTYVERPMKILDTMERRTRNRVIRFCKVQWSNHAEEEATWEREDELKAAHPDLFASSSESRGRDSV

SEQ ID NO: 25955 - protein, 1219 aa, Oryza sativa
  Clone ID: TF_OsC359_8156.pep
MVTAGDHRRGGAAPERAERRGKREGRSTAHPGTTRTAETTAGVEKGGGAVRDAEGDGAPAVGGRSGAADGVDGDAATRKEVTPSREEDRSDDGGETELGGDGGERGARREHESDGESERRAAETEERSTGDDFIAPRGREGGRGGRKPAAEFSGSIDDAGEDCGRDSNESEGEREGKEGETGEGITGDVTLRRGKPPALVARRMVTTRRNVNTGEGNQPEGSNPNHQGNPPPPPPPDTNAILTQILAQQANMMTAFLHHLQNPPQQNAPPPPPQHSKLAEFLRIRPPTFSSSNNPVDALDWLHAVGKKLDTVQCSDEEKVIFAAHQLQGPASLWWDHFQATQPEGQPITWARFTAAFRRTHVPAGVVALKKREFRELKQGNRSVMEYLHEFNNLARYAPEDVREDEEKQEKFLAGMDPELSVRLVSGDYPDFQRLVDKSIRLEAKHKELESHKRRLANFRNQQGANQRVRYTNPYPGGSSSQQQQQQQQPRSAPRPQFVVRVPQPQQQQNQQGTRAPRPPTPAVQPVQGRRDAQGQQRLCFNCFEPGHFADKCPKPRRQQGQAPPRSNNGGKDVIRGRVNHVTAEDVLTTPDVIVGTFLVHSIPATILFDSGASHSFISVPFVGRNQLGVERLRNPLLITTPGGVMTAKYYSPAVPIEIQGIPFPSDLILLDTKNLDVILGMNWLAQFQGVVDCARRTVTLYRGPEQPVVFFAPPTSVRSSELHQIGLSEIPIVREFGDVFPEELPGMPPKREIEFRIDLAPGTTPLHKRPYRMAANELAEVKKQLEELKGKGYIRPSTSPWGASVIFVEKKDKTKRMCVDYRALNEVTIKNKYPLPRIDDLFDQLKGATVFSKIDLRSGYHQLRIREEDIPKTAFTTRYGLYEFTVMSFGLTNAPAFFMNLMNKVFMEYLDKFVVVFIDDILIYSQSEEDHQHHLRLVLGKLREHQLYAKLSKCEFWLSEVKFLGHVISAKGVAVDPETVTAVTEWKQPKTVTQIRSFLGLAGYYRRFIENFSKIARPMTQLLKKEEKFVWSPQCEKAFQTLKEKLVSSPVLILPDTRKDFMVYCDASRQGLGCVLMQDGHVVAYASRQLRPHEGNYPTHDLELAAVVHALKIWRHYLIGNRCEIYTDHKSLKYIFTQSDLNLRQRRWLELIKDYDVGIHYHPGKANVVACHVVINSSRIKNHSDISPPSSSLSRAAGRLQPPLPPRRSAVRSRRRLL

SEQ ID NO: 25956 - protein, 2273 aa, Oryza sativa
  Clone ID: TF_OsC359_8161.pep
MTGFVLELRGMCVVLGYPHGVDYQARPLPEQEGDDAEPHAAWEVTAVILAGSPERTSLTVTAGGDSFPAACQNAALLAIGTLHQRYPDELQHSPYRYHPRRGGARDHATFRDASSEDDATIVHLARMVEAYDAARIDFHQMVRRGMVENNMKILELRQENLQLKKDLDAVEAQLHQLKIAQGEVCRPKRRRVCRSQKITARKSTSRPELVRQSLAWTCFVETPRAEPAPVVPQEGEASGIGSTEDALLLTFRPGPSQRRNAVTGDGNQPEGSNHNHQGNPPPPPPPPPPPPPDTNAILTQILAQQANMMTAFLHHLQNPPQLNAPPPPPQHSRLAEFLRICPPTFSSSNNPVDVLDWLHAVGKKLDTVQCSDEEKVIFAAHQLQGPASLWWDHFQATQPEGQPITWARFTAAFRRTHVPAGVVALKKREFRELKQGNRSVMEYLHEFNNLARYAPEDVREDEEKQEKFLAGMDPELSVRLVSGDYPDFQRLVDKSIRLEAKHKELESHKRRLANFRNQQGANQRVRYTNPYPGGSSSQQQQPRSAPRPQFVVRVPQPQQQQNQQGTRAPRPPTPAVQPVQGRRDAQGQQRLCFNCFEPGHFADKCPKPRRQQGQAPPRSNNGGKDVIRGRVNHVTAEDVLTTPDVIVGTFLVQSIPATILFDSGASHSFISVPFVGRNQLGVERLRNPLLITTPGGVMTAKYYSPAVPIEIQGIPFPSDLILLDTKNLDVILGMNWLAQFQGVVDCARRTVTLYRGPEQPVVFFAPPTSVRSSELHQIELSEIPIVREFGDVFPEELPGMPPKREIEFRIDLAPGTTPLYKRPYRMAANELAEVKKQLEELKEKGYIRPSTSPWGAPVIFVEKKDKTKRMCVDYRALNEVTIKNKYPLPRIDDLFDQLKGATVFSKIDLRSGYHQLRIREEDIPKTAFTTRYGLYEFTVMSFGLTNAPAFFMNLMNKVFMEYLDKFVVVFIDDILIYSQSEEDHQHHLRLVLGKLREHQLYAKLSKCEFWLSEVKFLGHVISAKGVAVDPETVTAVTDWKQPKTVTQIRSFLGLAGYYRRFIENFSKIARPMTQLLKKEEKFVWSPQCEKAFQTLKEKLDGHVVAYASRQLRPHEGNYPTHDLELAAVVHALKIWRHYLIGNRCEIYTDHKSLKYIFTQSDLNLRQRRWLELIKDYDVGIHYHPGKANVVADALSRKSHCNTLNVRGIPPELSQQMEALNLSIVGRGFLAALEAKPTLLDQIREAQKNDPDMHGLLKNMKQGKAAGFTEDEHGTLWNGKRVCVPDSRELKQLILQEAHESPYSIHPGSTKMYLDLKEKYWWVSMKREIAEFVALCDVCQRVKAEHQRPAGLLQPLQVPEWKWDEIGMDFITGLPKTQGGYDSIWVIVDRLTKVARFIPVKTTYGGNKLAELYFARIVSLHGVPKKIVSDRGSQFTSHFWKKLQEELGTRLNFSTAYHPQTDGQTERLNQILEDMLRACVLDFGKTWDKSLPYAEFSYNNSYQASIQMAPYEALYGRKCRTPLLWDQVGESQVFGTDILREAEAKVRIIRDNLKVAQSRQKSYADNRRRDLEFAVDDFVYLRVTPLRGVHRFQTKGKLAPRYVGPFRIIARRGEVAYQLELPASLGNVHDVFHVSQLKKCLRVPSEQADSEQIEVREDLTYVEKPVKILDTMERRTRNRVIRFCKVQWSNHAEEEATWEREDELKAAHPDLFATARAEEAAKEEAARARQAEATAAAGASTGPTPSGNPQATASGEARDVAAGTSPGPTSPGDAQDQTGPGDIPEPSTSSGGPSRIAFSPRRLFSSSSVAPLSAEPILQALAAANTAVLDGFSAQVEALRAERAELEAAWARVEEGRRSVDAMVEVGRKAHRRHISELEARKAALAEIAREVEEEREAALITTTAMIEAQDTLRLQHASWEAELKKKLDAAQGVLDSAAARERRVTETEAASRRREEALEARAMALEEHAGAVERGLTDREAAAVLREATLAAHEAACAEEECALRLREDALAERERALEEAEATTKRLADSLSLREAAQEEQARRNLECVRAERAALEQRAADLEAREKELDARARVGGAAAGESDLAARLAAAEHTVADMQRALDSSIGEAEALRLAGEMGPDMLWDSVSRMDRAGRQAGLWKGQTRMRPANLEGLAPHLNRMAWVLEQLPEELEKTIKSSSRDLARGAVELVLASYQARDPNFSPWMALEEFPPGTEDDARARVRDAADHIVNGFEGSAPRLAFAPSSDEEGDASGEDDGGDEAGDPGASE

SEQ ID NO: 25957 - protein, 1436 aa, Oryza sativa
  Clone ID: TF_OsC359_8190.pep
MEMEEVGGRWTSVPGVPAVGGIGSVLLSMARMDWKLCHVFRLYTVVMAGSVTRRGLDMTGFVLELRGMCVVLGYPHGVDYQARPLPEQEGDDAEPHAGWEVTAVILSGSPERTSLAVTAGGDSFPAACQNAALLAIGTLHQRYPDELQHSPYRYHPRRGGARDYATFRDASSEDDATIVHLARMVEAYDAARIDFHQMVRRGMVENNLKILELRQENLQLKKDLDAVEAQLHQLKIAQGEDCRPKRRCVCRSQKITARKSTSRPELVRQSLAWTCFVETPRAEPAPVVPQEGEASGVGSTEDALLLTFRPGPSQRRNANTGDGNQPEGSNHNHQGNPPPPPPPPPPPPPDTNAILTQILAQQANMMTAFLHHLQNPPQHNAPPPPPQHSKLAEFLRIRPPTFSSSNNPVDALDWLHAVGKKLDTVRCSDEEKVVFAAHQLQGPASLWWDHFQATQPEGQPITWARFTAAFRRTHVPAGVVALKKREFRELKQGNRSVMEYLHEFNNLARYAPEDVREDEEKQEKFLAGMDPELSVRLVSGDYPDFQRLVDKSIRLEAKHKELESHKRRLANFRNQQGANQRVRYTNPYPGGTSSQQQQQQQPRPAPRPQFVVRVPQPQQQQNQQGTRAPRPPTPTVQPVQGRRDAQGPQRLCFNCFEPGHFADKCPKPRRQQGQAPPRSNNGGKDVIRGRVNHVTAEDVLTTPDVIVGTFLVHSIPATILFDSGASHSFISVPFVGRNQLGVERLRNPLLITTPGGVMTAKYYSPAVPIEIQGIPFPSDLILLDTKNLDVILGMNWLAQFQGVVDCARRTVTLYRGPEQPVVFFAPPTSVRSSELHQIGLSEIPIVREFGDVFPEELPGMPPKREIEFRIDLAPGTTPLYKRPYRMAANELAEVKKQLEELKEKGYIRPSTSPWGAPVIFVEKKDKTKRMCVDYRALNEVTIKNKYPLPRIDDLFDQLKGATVFSKIDLRSGYHQLRIREEDIPKTAFTTRYGLYEFTVMSFGLTNAPAFFMNLMNKVFMEYLDKFVVPRRAAVAAAVVSRRRHHRVRKVAAVPVHRFAAAEDRRSTVAAVDPIFSAAFSSTPPPSVGLPPTFWSSVSSPRRDLRLGALRLCRRAAVRRRACAVRAVRAAEPPPVLTSSLTPFPRYRGGTEAHGDMMWGCVLWVQWYTSGQRYYRRFIENFSKIARPMTQLLKKEEKFVWSPQCEKAFQTLKEKLVSSPVLILPDTRKDFMVYCDASRQGLGLSVHGGPGARGWRRPAPWVPRVSRTRGRGRLTAGPHLAAAGRARRRPRRHGRRENGAPAPRWSPPATNGAAEWHPRERREGGSERSGPRLTPVDGDDGNGGRKRRKAAARFGTTRTTAFRRSASEAEGRTRSTTTRRSRRRRRREGRKSGATAAANRSSAATAERRCDGASTIPTGRASGERRKRRRRARGTFK

SEQ ID NO: 25958 - protein, 945 aa, Oryza sativa
  unsure (1)..(945): unsure at all Xaa locations
  Clone ID: TF_OsC359_8241.pep
DPPWFLRRGKPPALVARRMRCCSPSMVTTRRSAVTGDGNQPEGSNHNNHGSPPPPPPPPPPPPPDTNAILTQILAQQANMMAAFLHHIQNPPQHNAPPPPPQHSKLAEFLRIRPPTFSSSNNPVDALDWLHAVGKKLDTVQCSDEEKVVFAAHQLQGPASLWWDHFQATQPEGQPITWARFTAAFRRTHVPAGVMALKKREFRELKQGNRSVMEYLHEFNNLARYAPEDVRENEEKQEKFLAGMDPELSVRLVSGDYPDFQRLVDKSIRLEAKHKELESHKRRLANFRNQQGANQRIRYTNPYPGGSSSQQQQQQQQPCSAPRPQFVVRVPQPQQQQSQQGTRAPRPPTPAVQSGQGRRDVQGPQRLCFNCFEPGHFADKCPKPRRQQGQAPPRSNNGGKDVIRGQVNHVTAEDVLTTPDVIVGTFLIHSIPATILFDSGASHSFISVPFVGRNQLGVERLRNPLLITTPGGVMTAKYYSPAVPIEIQGIPFPSDLILLDTKNLDVILGMNWLAQFQGVVDCARRTVTLYRGPEQPVVFFAPPTSVSSSELHQIGLSEIPIVREFGDVFPEELPGMPPKREIEFRIDLAPGTTPLYKRPYRMAANELAEVKKQLEELKEKGYIRPSTSPWGSPVIFVEKKDKTKRMCVDYRALNEVTIKNKYPLPWIDDLFDQLKGATVFSKIDLRSRYHXLRIREEDIPKTAFTTXYGLYEFTVMSFGLTNAPAFFMNLMNKVFMEYLDKFVVVFIDDILVYSQSEEDHQHHLRLVLGKLREHQLYAKLSKCEFWLSEVKFLGHVISAKGVAVDPETVTAVTDWKQPKTVTQIRSFLGLAGYYRRFIENFSKIARPMTQLLKKEEKFVWSPQCEKAFQTLKEKLVSSPVLILPDTRKDFMVYCDASRQGLGCVLMQDGHVVAYASRQLRPHEGNFPTERSIKATQIPAKITVSA

SEQ ID NO: 25959 - protein, 1800 aa, Oryza sativa
  unsure (1)..(1800): unsure at all Xaa locations
  Clone ID: TF_OsC359_8245.pep
RAGPTAPTAASRVRPGPPWTERLTRGPHFPWTRANEGYTSCGPVVEMSWHRAGVLLLGAQSCLPVPGVSAVGGVGSVLLSMARMGWKLCHVFRPYTVVMAGSINRRGLDLTGFALELRGMCVVLGYPHGVDYQGKQLPEQEGDDAEPHATWEVTVVILTGSPERTSLAVTAXMVRRGLVENNKQILELHXENLQLKKDLDAVEAQLRQLKIAQGEVCRPKRRRVCRSLKITARKSTSRPELVRQSLAWTCFVETPRAEPAPMVPQEDGASGVGXHGGCAAAHLPPWPVAAVDEQLVGLRMVTTRRSAVTGEGSHPEGSNHNNHGSPHPPPPPPPPPPPDTNAILTQILAQQANMMAAFLHHIQNLPQHNAPPPPPQHSKLAEFLRIRPPTFASSNNPVDALDWLHAVGKKLDTVQCSDEEKVIFAAHQLQGPASLWWDHFQATQPEGQPITWARFTAAFRRTHVPAGVMALKKREFRELKQGNRSVMEYLHEFNNLARYAPEDVREDEEKQEKFLAGMDPELSVRLVFGDYSDFQRLVDKSIRLEVKHKELESHKRRLATFRNQQGANQRVRYTNPYPGGSSLQQQPRSAPRPQFVVRVPQPQQQQSQQGTRAPRPPTPAMQPGQGRGDVQGQQRLCFNCFEPGHFADKCPKPRRQQGQAPPRPNNGGKDVIRGRVNHVTAEDVLTTPDIIVGTFLIHSIPATILFDSGASHSFISVPFVGRNQLGVERLRNPLLITTPGGVMTAKYYSPAVPIEVQGIPFPSDLILLDTKNLDVILGMNWLAQFQGVVDCARRTVTLYRGPEQPVVFFAPPTSVGSSELHQIRLSKIPIVREFGDVFPEELPGMPPKREIEFRIDLAPGTTPQYKRPYRMASNELAEVKKQLEELKEKGYIRPSTSPWGAPVIFVEKKDKTKRMCVDYRALNEVTIKNKYPLPRIDDLFDQLKGATVFSKIDLHSGYHQLRIREEDIPKTAFTTRYGLYEFTVMSFGLTNAPAFFMNLMNKVFMEYLDKFVVVFIDDILVYSQSEEDHQHHLRLVLGKLREHQLYDKLSKCEFWLSEVKFLGHMISAKGVAVDPETVTAVTDWKQPKTVTQIRSFLGLAGYYRRFIENFSKIARPMTQLLKKEEKFVWSPQCEKAFQTLKEKLVSSPVLILPDTRKDFIVYCDASRQGLGCVLMQEGQVVAYASRQLRPHEGNYPTHDLELAAVVHALKIWQHYLIGNRCEIYTDHKSLKYIFTQSDLNLRQRRWLELIKDYDVGIHYHPGKANVVADALIRKSHYNTLDVRGIPPELNQQMEALNLSIVGRGFLATLEAKLTLLDQIREAQKNDPDMRGLLKNMKQGKAAGFTEDEHGTLWNGNRVCVPDDRELKQLILQEAHESPYSIHPGSTKMYLDLKEKYWWVSMKREIAEFVALCDVCQRVKAEHQRPAGLLQPLQVPEWKWDEIGMDFITGLPKTQGGYDSIWVVVDRLTKVARLIPVKTTYGGNKLAELYFARIVSLHGVPKKIVSDRGSQFTSHFWKKLQEELGTRLNFSTAYHPQTDGQTERLNQILEDMLRACVLDFGKTWDKSLPYAEFSYNNSYQASIQMAPYEALYGRKCRTPLLWDQVGESQVFRTDILREAEAKVRTIRDNLKVAQFRQKSYADNRRRNLKFAVDDFVYLRVTPLRGVHRFQTKGKLTPRFVGPFRIIARRGEVAYQLELPTSLGNVHDVFHVSQLKKCLRVPSEQADSEQIEVREDLTYVERPVKILDTMERRTRNRVIPFCKVQWSNHAEEEATWEREDEMKAAHPDLFASSSESRGRDSV

SEQ ID NO: 25960 - protein, 1794 aa, Oryza sativa
  Clone ID: TF_OsC359_8260.pep
MSSGANEGYTSCGPMAGSVTRRGLDMTGFVLELRGMCVVLGYPHGVDYQARPLPEQEGEDAEPHAGWEVTAVILSGSPERTSLAVTAGGDSFPAACQNAALLAIGTLHQRYPDELQHSPYRYHPRRGGARDHATFRDASSEDDATVVHLARMVEAYDAARIDFHQMVRRGMVENNMKILELRQENLQLKKDLDALEAQLHQLKIAQGEGSRPKRRRVCRSQKITARKSTSRPELVRQSLAWTCFVETPRAEPAPVVPQEGEASGVGSSEGALLLTFRPGPSQRSPSLFAGSVWGFQMVTTRRNVNTGEGNQPEGSNPNPQGNPPPPPPPDTNAILTQILAQQANMMNAFLHHLQNPPQQNAPPPPPQHSKLAEFLRIRPPTFSSSNNPVDALDWLHAVGKKLDTVQCSDEEKVVFAAHQLQGPASLWWDHFQATQPEGQPITWTRFTAAFRRTHVPAGVVALKKREFRELKQGNRSVMEYLHEFNNLARYAPEDVREDEEKQEKFLAGMDPELSVRLVSGDYPDFQRLVDKSIRLEAKHKELESHKRRLANFRNQQGANQRVRYTNPYPGGSSSQQQQQQPRPAPRPQFVVRVPQQQQQQNQQGTRAPRPPTPAVQPVQGRRDASGPQRLCFNCFEPGHFADKCPKPRRQQGQAPPRSNNGGKDVIRGRVNHVTAEDVLTTPDVIVGTFLVHSIPATILFDSGASHSFISVPFVGKNQLGVERLRNPLLITTPGGVMTAKYYSPAVPIEIQGIPFPSDLILLDTKNLDVILGMNWLAQFQGVVDCARRTVTLYRGPEQPVVFFAPPTSVRSSELHQISLSEIPIVREFGDVFPEELPGMPPKREIEFRIDLAPGTTPLHKRPYRMAANELAEVKKQLEELKEKGYIRPSTSPWGAPVIFVEKKDKTKRMCVDYRALNEVTIKNKYPLPRIDDLFDQLKGATVFSKIDLRSGYHQLRIREEDIPKTAFTTRYGLYEFTVMSFGLTNAPAFFMNLMNKVFMEYLDKFVVVFIDDILIYSQTEEDHQHHLRLVLGKLREHQLYAKLSKCEFWLSEVKFLGHVISAKGVAVDPETVTAVTEWKQPKTVTQIRSFLGLAGYYRRFIENFSKIARPMTQLLKKEEKFVWSPQCEKAFQTLKEKLVSSPVLILPDTRKDFMVYCDASRQGLGCVLMQDGHVVAYASRQLRPHEGNYPTHDLELAAVVHALKIWRHYLIGNRCEIYTDHKSLKYIFTQSDLNLRQRRWLELIKDYDVGIHYHPGKANVVADALSRKSHCNTLNVRGIPPELNQQMEALNLSIVGRGFLAALEAKPTLLDQIREAQKNDPDMHGLLKNMKQGKAAGFTEDEHGTLWNGKRVCVPESRELKQLILQEAHESPYSIHPGSTKMYLDLKEKYWWVSMKREIAEFVALCDVCQRVKAEHQRPAGLLQPLQVPEWKWDEIGMDFITGLPKTQGGYDSIWVVVDRLTKVARFIPVKTTYGGNKLAELYFARIVSLHGIPKKIVSDRGSQFTSHFWKKLQEELGTRLNFSTAYHPQTDGQTERLNQILEDLLRACVLDFGKTWDKSLPYAEFSYNNSYQASIQMAPYEALYGRKCRTPLLWDQVGESQVFGTDILREAEAKVRIIRDNLKVAQSRQKSYADNRRRDLEFAVDDFVYLRVTPLRGVHRFQTKGKLAPRYVGPFRIIARRGEVAYQLELPASLGNVHDVFHVSQLKKCLRVPSEQADSEQIEVREDLTYVERPVKILDTMERRTRNRVIRFCKVQWSNHAEEEATWEREDELKAAHPDLFASSSESRGRDSV

SEQ ID NO: 25961 - protein, 2479 aa, Oryza sativa
  unsure (1)..(2479): unsure at all Xaa locations
  Clone ID: TF_OsC359_8276.pep
MTGFVLELRGMCVVLGYPHGVDYQARPLPEQEGEDAEPRAGWEVTAVILSGSPERTSLAVTAGGDSFPAACQNAALLAIGTLHQRYPDELQHSPYHYHPRRGGARDFATFRDASPEDDATIVHLARMVEAYDAARIDFHQMENLQLKKDLDAVEAQLHQLKIAQGEICRPKRRRVCRSQKITARKSTSRPELVRQSLAWTCFVETPRAEPAPVVPQEGEASGVGSSEALSLFAGSVWGFQMVTTRRNAVTGDGNQPEGSNHNHQGNPPPPPPPPPPPPPDTNAILTQILAQQANMMTAFLHHLQNPPQQNAPPPPPQHSKLAEFLRIRPPTFSSSNNPVDALDWLHAVGKKLDTVQCSDEEKVVFAAHQLQGPASLWWDHFQATQPEGQPITWARFTAAFRRTHVPAGVVALKKKEFRELKQGNRSVMEYLHEFNNLARYAPEDVREDEEKQEKFLAGMDPELSVRLVSGDYPDFQRLVDKSIRLEAKHXQQQQQQPRPAPRPQFVVRVPQPQQQQNQQGTRAPRPPTPAVQPVQGRRDAQGQQRLCFNCFEPGHFADKCPKPRRQQGQAPPRSNNGGKDVIRGHXLSEIPIVREFGDVFPEELPGMPPKREIEFRIDLAPGTTPLHKRPYRMAANELAEVKKQLEELKEKGYIRPSTSPWGAPVIFVEKKDKTKRMCVDYRALNEVTIKNKYPLPRIDDLFDQLKGATVFSKIDLRSGYHQLRIREEDIPKTAFTTRYGLYEFTVMSFGLTNAPAFFMNLMNKVFMEYLDKFVVVFIDDILIYSQSEEDHQHHLRLVLGKLREHQLYAKLSKCEFWLSEVKFLGHVISAKGVAVDPETVTAVTDWKQPKTVTQIRSFLGLARYYRRFIENFSKIARPMTQLLKKEEKFVWSPQCEKAFQTLKEKLVSSPVLILPDTRKDFMVYCDASRQGLGCVLMQDGHVVAYASRQLRPHEGNYPTHDLELAAVVHALKIWRHYLIGNRCEIYIDHKSLKYIFTQSDLNLRQRRWLELIKDYDVGIHYHPGKANVVADALSRKGHCNTLNVRGIPPELNQQMEALNLSIVGRGFLAALEAKPTLLDQIREAQKNDPDMHGLLKNMKQGKAAGFTEDEHGTLWSGKREKYWWVCMKREIAEYVALCDVCQRVKAEHQRPAGLLQPLQVPEWKWDEIGMDFITGLPKTQGGYDSIWVVVDRLTKVARFIPVKTTYGGNKLAELYFARIVSLHGVPKKIVSDRGSQFTSHFWKKLQEELGTRLNFSTAYHPQTDRQTERLNQILEDMLRACVLDFGKTWDKSLPYAEFSYNNSYQASIQMAPYEALYGRKCRTPLLWDQVGESQVFRTDILREAEAKVRIIRDNLKVAQSRQKSYADNRRRDLEFAVDDFVYLRVTPLRGVHRFQTKGKLAPRYVGPFRIVARRGEVAYQLELPASLGNVHDVFHVSQLKKCLRVPSEQADSEQIEVREDLTYVERPVKILDTMERRTRNRHIPISSPVLPNLGVEIPFKEAGPPATLADGWGPPVIAFLPPQPPLARALTPPPPRIPPHPAVPARHNEGGIIPRDSLSQFPHFPLSLSLGFVRFPSRKPRRRNQWRPRSPRPFPPFPGTLSFSRCYLNVSRALLLRFRRSPLALPVGIEPAPLHLSAVAAVLRFAAAVAPDFLPTRRDLHRLRRGPVDLVRALGLLADRRSTVVLAVPNRAAAFFRFGRRSRRRRRPGRAPPSFQPSPSLGKTTVVLAKSSPSSSDPSPSPEITGAASPSSTRRFPPLPPRRRRRLLVFRRRLGHRNQHPHRLGTAGYAGKEEEWQREDEEAEESCTPLVFGDIPHPWARNWARARYQKNDDGTIFMPNAEDQRVYEAIKELVAEQQASQEACSQRREDDLLTKALGNKEHRGRTRGVGSSVPWKNGFPDYKWQYKKRTSNKAEKDARLGAKIRASIRAELTSEFDEKLESMRAKIRQEIREEQQNPQAAAAAAHEELGSPTQKRSSCASTELAENSTSVDSAVDHITVTEPTICTLTVRVMPTFTVPAAEGLAYKSTLETRVHGAQLRADCANVQVDSVKPEYELFPLKYPPNDEVLSLGNARGTFIQWPKDLIEIRVTTRPTTAAGGRPPKRPASTPSAPPAQDRHAQSYDVQLQYDTDFGEDRMEADSKAIHEPPPMKKSRKAHSSPQRITLDKPEANGRGRGGKVQASLLAPRKLDLGKGQEETKGKEVKKKYVAPQEFKLGMPLVGDDVLATMGTAWKDLHLYYMEKSNARKPSKATDILGEHDGKPFLGPTNYVVVDFKDLFDLYRLRTVDTSLLKCYSLLSWQWCQKHAPEVAFLDPQVVTVTNLQNDRQGMVNYIYDTLWSCRDKEYIIAHWILLVITPKLSTCHYLNSRIDKNAYDWTPIQLAIDEVWAQYVQRGGLRKTGHDTVILKKDFPVKQQIDPLRVWRHVCGIAQAYPVRDRSQHSSLVGAGVRTPGVGTSAPARYIPSFIAIIARKPLYEEG

SEQ ID NO: 25962 - protein, 1832 aa, Oryza sativa
  Clone ID: TF_OsC359_8285.pep
MATAGDHRGAGAASRRLRRLGRPRARRVAAAWGPARPYKDRSSGLCCKALPYFHMSSGANEGYTSCGPMAGSVTRRGLDMSGFVLELRGMCVVLGYPHGVDYQARPLPEQEGEDAEPHAGWEVTAVILSGSPKRTSLAVTAGGDSFPAACQNAALLAIGTLHQRYPDELQHSPYRYHPRRGGARDFATFRDASSEDDATVVHLARMVEAYDAARIDFHQMVRRGMVENNMKILELRQENLQLKKDLDALEAQLHQLKIAQGEDSRPKRRRVCRSQKITARKSTSRPELVRQSLAWTCFVETPRAEPAPVVPQEGEASGVGSSEGALLLTFRPGPSQRRNVNTGEGNQPEGSNPNPQGNPPPPPPPDTNAILTQILAQQANMMNAFLHHLQNPPQQNAPPPPPQHSKLTEFLRIRPPTFSSSNNPVDALDWLHAVGKKLDTVQCSDEEKVVFAAHQLQGPASLWWDHFQATQPEGQPITWARFTAAFRRTHVPAGVVALKKREFRELKQGNRSVMEYLHEFNNLARYAPEDVREDEEKQEKFLAGMDPELSVRLVSGDYPDFQRLVDKSIRLEAKHKELESHKRRLANFRNQQGANQRVRYTNPYPGGSSSQQQQQQQQPRPAPRPQFVVRVPQQQQQQNQQGTRAPRPPTPAGQPVQGRRDASGPQRLCFNCFEPGHFADKCPKPRRQQGQAPPRPNNGGKDVIRGRVNHVTAEDVLTTPDVIVGTFLVHSIPATILFDSGASHSFISVPFVGKNQLGVERLRNPLLITTPGGVMTAKYYSPAVPIEIQGIPFPSDLILLDTKNLDVILGMNWLAQFQGVVDCARRTVTLYRGPEQPVVFFAPPTSVRSSELHQIELSEIPIVREFGDVFPEELPGMPPKREIEFRIDLAPGTTPLHKRPYRMAANELAEVKKQLEELKEKGYIRPSTSPWGAPVIFVEKKDKTKRMCVDYRALNEVTIKNKYPLPRIDDLFDQLKGATVFSKIDLRSGYHQLRIREEDIPKTAFTTRYGLYEFTVMSFGLTNAPAFFMNLMNKVFMEYLDKFVVVFIDDILIYSQSEEDHQHHLRLVLGKLREHQLYAKLSKCEFWLSEVKFLGHVISAKGVAVDPETVTAVTDWKQPKTVTQIRSFLGLAGYYRRFIENFSKIARPMTQLLKKEEKFVWSPQCEKAFQTLKEKLVSSPVLILPDTRKDFMVYCDASRQGLGCVLMQDGHVVAYASRQLRPHEGNYPTHDLELAAVVHALKIWRHYLIGNRCEIYTDHKSLKYIFTQSDLNLRQRRWLELIKDYDVGIHYHPGKANVVADALSRKSHCNTLNVRGIPPELNQQMEALNLSMVGRGFLAALEAKPTLLDQIREAQKNDPDMHGLLKNMKQGKAAGFTEDEHGTLWNGKRVCVPDSRELKQLILQEAHESPYSIHPGSTKMYLDLKEKYWWVSMKREIAEFVALCDVCQRVKAEHQRPAGLLQPLQVPEWKWDEIGMDFITGLPKTQGGYDSIWVIVDRLTKVARFIPVKTTYGGNKLAELYFARIVSLHGIPKKIVSDRGSQFTSHFWKKLQEELGTRLNFSTAYHPQTDGQTERLNQILEDMLRACVLDFGKTWDKSLPYAEFSYNNSYQASIQMAPYEALYGRKCRTPLLWDQVGESQVFGTDILREAEAKVRIIRDNLKVAQSRQKSYADNRRRDLEFAVDDFVYLRVTPLRGVHRFRTKGKLAPRYVGPFRIVARRGEVAYQLELPASLGNVHDVFHVSQLKKCLRVPSEQANSEQIEVREDLTYVEKPVKILDTMERRTRNRVIRFCKVQWSNHAEEEATWEREDELKAAHPDLFASSSESRGRDSV

SEQ ID NO: 25963 - protein, 1858 aa, Oryza sativa; identical to SEQ ID NO: 19121
  Clone ID: TF_OsC359_8301.pep

SEQ ID NO: 25964 - protein, 1270 aa, Oryza sativa
  Clone ID: TF_OsC359_8310.pep
MVTTRRNANTGDGNQPEGSNHNHQGNPPPPPPPPPPPPPDTNAILTQILAQQANMMTAFLHHLQNPPQHNAPPPPPQHSKLAEFLRIRPPTFSSSNNPVDALDWLHAVGKKLDTVQCSDEEKVIFAAHQLQGPASLWWDHFQATQPAGQPITWARFTAAFRRTHVPAGVVALKKREFRELKQGNRSVMEYLHEFNNLARYAPEDVREDEEKQEKFLAGMDPELSVCLVSRDYPDFQRLVDKSIRLEAKHKELESHKRRLANFRNQQGANQRVRYTNPYPGGSSSQQQQQQQQPRSAPRPQFVVRVPQPQQQQNQQGTRAPRPPTPTVQPGQGRRDTQGNFPGRDKRLCFNCFEPGHFADKCPKPRRQQGQAPPRSNNGGKDVIRGRVNHVTAEDVLTTPDVIVGTFLIHSIPATILFDSGASHSFISVPFVGRNQLGVERLRNPLLITTPGGVMTAKYYSPAVPIEIQGIPFPSDLILLDTKNLDVILGMNWLAQFQGIGLSEIPIVREFGDVFPEELPGMPPKREIEFRIDLAPGTTPLYKRPYRMAANELAEVKKQLEELKEKGYIRPSTSPWGAPVIFVEKKDKTKRMCVDYRALNEVTIKNKYPLPRIDDLFDQLKGATVFSKIDLRSGYHQLRIREEDIPKTAFTTRYGLYEFTVMSFGLTNAPAFFMNLMNKVFMEYLDKFVVPRRAAVAAAVVSRRRHHRVRKVAAVPVHRFAAAEDRRRTGDAVDPIFSAAFSSTPPPSVGLPPTFWSSVSSPRRDLRLGALRLCRRAAVRRRACAVRAVRAAEPPPVLTSSLTPFPRYRGGTEAHGDMMWGCVLWVQWYTSGQRYYRRFIENFSKIARPMTQLLKKEEKFVWSPQCEKAFQTLKEKLVSSPVLILPDTRKDFMVYCDASRQGLGCVLMQDGHVVAYASRQLRPHEGNYPTHDLELAAVTTGNNPTGIPHVRALILVPGGKTEPQTKPYPLDMWKYGSALQQRPEDRRGRGRADRVHGSGAHASASRSTADREHAAGGGRRRGSHASAVPAGAVGLRPAPYWEAWGPPLRLAPPFVGPLTVCVAGAGWGSGYCVGGLNVPSWESGVGRAGVAGGSGGWRGRGGVGGVWDDGGAWLRVGFAGALRSVRLRSAHVPMAAFINYRLALFDVLGLLGGCVAVVGCLCDGFWGSPGWRATTGTAAETEEAGGAFGTTRTTAFRRSASEAEGRTRSTTTRRSRRRRRREGRKSGATAAANRSSAATAERRCDGASTIPTGRASGERRKRRRRARGTFK

SEQ ID NO: 25965 - protein, 1829 aa, Oryza sativa
  Clone ID: TF_OsC359_8331.pep
MAAGSSAPFPPRPAALSPSRPYINPPRASLHRFRHSPLSLPAGIELAPSPSLSVVAAELRSAAVVAPDHLSPRRRLLRLRRIPGDLVHPSVSLADRRSTVDPIHPSRATAFLRTGRRFRRCRRPGVSRGPPLLFPLPFPSLGRRSAVPMAAAGDHRGAGVPPPAAAPAWPPSGAPCGYRVGPGYQPPAPSAPRPYKDRSSGLCCKALPYFHMSSGTNEGYTSCGPVVEMSWHRAGVLLLGAQSCLPVPEVPAVGGIGSMAGSVSRRGLDMTGFVLELRGMCVVLGYPHGLDYQGRPLPEQEVTAGGDSFSAACQSAALLAISTLHQRYPDELQHSPYRYHPRRGGARDYATFRDASSEDDATIMHLARMVEAYDAARIDFHQMVRRGMVENNLKILELRQENLQLKKDLDAVEAQLHQLKIAQGEVCHPKRRRVCRSQKITARKSTSRPELVRQSLAWTCFVETPRAEPAPVVPQEGEASGVGSTEDALLLTFRPGPSQRSNNPVDVLDWLHAVGKKLDTVQCSDEEKVVFAAHQLQGPASLWWDHFQATQPEGQPITWARFTAAFRRTHVPAGVMALKKREFRELKQGNRSVMEYLHEFNNLARYAPEDVREDEEKQEKFLAGMDPELSVRLVSGDYPDFQRLVDKSIRLEAKHKELESHKRRLANFRNQQGANQRIRYTNPYPGGSSSQQQQPRSAPRPQFVVRVPQPQQQQSQQGTHAPRPPTPAAQSGQGRRDVQGPQRLCFNCFEPGHFADKCPKSRRQQGQAPPDVIVGTFLIHSIPATILFDSGASHSFISVPFVGRNQLGVERLRNPLLITTPGGVMTAKYYSPAVPIEIQGIPFPSDLILLDTKNLDIGLSEIPIVREFGDVFPEELPGMPPKREIEFRIDLAPGTTPLYKRPYRMAANELAEVKKQLEELKEKGYIRPSTSPWGAPVIFVEKKDKTKRMCVDYRALNEVTIKNKYPLPRIDDLFDQLKGATVFSKIDLRSGYHQLRIREEDIPKTAFTTRYGLYEFTVMSFGLTNAPAFFMNLMNKVFMKYLDKFVVVFIDDILVYSQSEEDHQHHLRLVLGKLRKHQLYAKLSKYEFWLSEVKFLGHVISAKGVAVDPETVTAVTDWKQPKTVTQIRSFLGLAGYYRRFIENFSKIARPMTQLLKKEEKFVWSPQCEKAFKTLKEKLVSSPVLILPDTRKDFMVYCDASRQGLGCVLMQDGHVVAYASRQLQPHEGNYPTHDLELAAVVHALKIWRHYLIGNRCEIYTDHKSLKYIFTQSDLNLRQRRWLELIKDYDVGIHYHPGKANVVADAQSRKSHCNTLNVRGIPPELNQQMEALNLSIVGRGFLAALEAKPTLLDQIREAQKNDPDMHGLLKNMKQGKAAGFTEDEHGTLWNGNRSSWPFVMCASVSRQSTNDRPDFSNLSKYQNGNGMKLGWISSPDFQKPKVDMILYGTAYHPQTDGQTERLNQILEDMLRACVLDFGKTWDKSLPYAEFSYNNSYQASIQMAPYEALYGRKCRTPLLWDQVGESQVFGTDILREAEAKVRTIRDNLKVAQSRQKSYADNRRRDLEFAVDDFVYLRVTPLRGVHRFQTKGKLAPRFVGPFRMIARRGEVAYQLELPASLGNVHDVFHVSQLKKCLRVPSQQADSEQIEVREDLTYVERPVKILDTMERRTRNRSAAVVAPDLLPLRRRLLWFRRNLADLVHPSVSPADRRNAAVPVYPSRAAAFLRSGRRSRRRRRPGVSCGPPIRFPLPSPLSGAAPPRRWSPAATIGARVRRLPSAVPAWPPSGAPRGCHVGPGRQPPAPSDAAASEDPLFVEVEADVWESEQGKSHHL

SEQ ID NO: 25966 - protein, 1505 aa, Oryza sativa
  unsure (1)..(1505): unsure at all Xaa locations
  Clone ID: TF_OsC359_8385.pep
MVTTRRSAATGECSHPEGSNHNNHGSPPPPPSPPPPPPPDTNAILTQILAXQANMMAAFLHHIQNPPQHNAPPPPPQHSKLAEFLRIRPPTFSSSNNPVDALDWLHAVGKKLDTVQCSDEEKVIFGAHQLQGPASLWWDHFQATQPEGQPITWARFTAAFRRTHVPAGVMALKKREFRELKQGNRSVMEYLHEFNNLARYAPEDVREDEEKQEKFLAGMDPELSVRLVSGDYPDFQRLVDKSIRLEAKHKELESHKRRLANFRNQQGANQRVRYTNPYPGXSSSQQQQQQQPRSVPRPQFVVRVPQPQQQQSQQGTRAPRPPTLAVQPGQVRRDVQGQQRLCFNCFEPGHFADKCPKPRRQQGQAPPRSNNGGKDVIRGRVNHVTAEDVLTTPDVIVGTFLIHSIPATILFDSGASHSFISMPFVGRNQLGVERLRNPLLITTPGGVMTAKXYSPAVPIEIQGIPFPSDLILLDTKNLDVILGMNWLAQFQGVVDCARRTVTLYRGPEQPVVFFAPPTSVGSSELHQIGMSEIPIVREFGDMFPEELPGMPPKREIEFRIDLAPGTTPQYKRPYRMASNELAEVKKQLGELKEKGYIRPSTSPWGAPVIFVEKKDMTKRMCVDNRALNEVTIKNKYPLPRIDDLFDQLKGATVFSKIDLRSGYHQLRIREEDIPKTAFTTRYGLYEFTVMSFGLTNAPAFFMNLMNKVFMEYLDKFVVVFIDDILVYSQSEEDHQQHLRLVLGKLREHQLYAKLSKCEFWLSEVKFLGHMISAKGVAVDPETVTAVTDWKQPKTVTQVRSFLGLAEYYRRFIKNFSKIARPMTQLLKKEEKFVWSPQCEKAFQTLKEKLVSSPVLILPDTRKDFLVYCDASRQGLGCVLMQEGHMVAYASQQLRPHEGNYPTHDLELAAVVHALKIWRHYLIGNRCEIYTDHKSLKYIFTQSDLNLRQRRWLELIKDXDVGIHYHPGKTNVVADALSRKSRCNTLGVRGIPPKLHQQMEALNLSIVGRGFLATLEAKPTLLDQIREAQKNDPDMHGILKNMKQGKAAGFTEDEHGTLWNGNRVCVPDDRELKQLILQEAHESPYSIHPGSTKMYLDLKEKYWWVSMKREIAEFVALYDVCQRVKAEHQRPAGLLQPLQVLEWKWDEIGMDFITGLPKTQGGYDSIWVVVDRLTKVARFIPVKTTYGGNKLAELYFARIVSLHGVPKKIVSDRGSQFTSHFWKKLQEELGTRLNFSTAYHPQTDGQTECLNQILEDMLRACILDFGKTWDKSLPYAEFSYNNSYQASIQMAPYEALYGRKCRTPLLXDQVGESQVFGTDILREAEAKVRTIRDNLKVAQSRQESYADNRRRNLEFAVDDFVYLRVTPLRGVHRFQTKGKLASRFVGPFRIIARRGEVAYQLELPASLGNVHDVFHVSQLKKCLRVLSEQADSEQIEVRENLTYMERPVKILDTMERRTRNRVIRFCKVQWSNHAEEEATWERENELKAAHPDLFASSSESRGRDSV

SEQ ID NO: 25967 - protein, 1857 aa, Oryza sativa
  Clone ID: TF_OsC359_8402.pep
MVLMVAPRPYKDRSSGLCCKALPYFHMSSGANEGYTSCGPMAGSVTRRGLDMTGFVLELRGMCVVLGYPHGVDYQARPLPEQEGEDAEPHAGWEVTAVILSGSPERTSLAVTAGGDSFPAACQNAALLAIGTLHQRYPDELQHSPYRYHARRGGARDYATFRDASSEDDATVVHLARMVEAYDAARIDFHQMVRRGMVENNMKILELRQENLQLKKDLDAVEAQLHQLKIAQGEDSRPKRRRVCRSQKITARKSTSRPELVRQSLAWTCFVETPRAEPAPVVPQEGEASGVGSSEGALLLTFRPGPSQRSPSLFAGSVRGFQMVTTRRNVNTGEGNQPEGSNPNHQGNPPPPPPPDTNAILTQILAQQANMMNAFLHHLQNPPQQNAPPPPPQHSKLAEFLRIRPPTFSSSNNPVDALDWLHAVGKKLDTVQCSDEEKVIFAAHQLQGPASLWWDHFQATQPEGQPITWARFTAAFRRTHVPAGVVALKKREFRELKQGNRSVMEYLHEFNNLARYAPEDVREDEEKQEKFLAGMDPELSVRLVSGDYPDSQRLVDKSIRLEAKHKELESHKRRLANFRNQQGANQRVRYTNPYPGGSSSQQQQQQQQPRSAPRPQFVVRVPQQQQQQNQQGTRAPRPPTPTVQPVQGRRDAQGQQRLCFNCFEPGHFADKCPKPRRQQGQAPPRSNNGGKDVIRGRVNHVTAEDVLTTPDVIVGTFLVHSIPATILFDSGASHSFISVPFVGRNQLGVERLRNPLLITTPGGVMTAKYYSPAVPIEIQGIPFPSDLILLDTKNLDVILGMNWLAQFQGVVDCARRTVTLYRGPEQPVVFFAPPTSVRSSELHQIGLSEIPIVREFGDVFPEELPGMPPKREIEFRIDLAPGTTPLHKRPYRMAANELAEVKTQLEELKEKGYIRPSTSPWGAPVIFVEKKDKTKRMCVDYRALNEVTIKNKYPLPRIDDLFDQLKGATVFSKIDLRSGYHQLRIREEDIPKTAFTTRYGLYEFTVMSFGLTNAPAFFMNLMNKVFMEYLDKFVVVFIDDILIYSQSEEDHQHHLRLVLGKLREHQLYAKLSKCEFWLSEVKFLGHVISAKGVAVDPETVTAVTDWKQPKTVTQIRSFLGLAGYYRRFIENFSKIARPMTQLLKKEEKFVWSPQCEKAFQTLKEKLVSSPVLILPDTRKDFMVYCDASRQGLGCVLMQDGHVVAYASRQLRPHEGNYPTHDLELAAVVHALKIWRHYLIGNRCEIYTDHKSLKYIFTQSDLNLRQRRWLELIKDYDVGIHYHPGKANVVADALSRKSHCNTLNVRGIPPELNQQMEALNLNIVGRGFLAALEAQPTLLDQIREAQKNDPDMHGLLKNMKQGKAAGFTEDEHGTLWNGKRVCVPDSRELKQLILQEAHESPYSIHPGSTKMYLDLKEKYWWVSMKREIAEFVALCDVCQRVKAEHQRPAGLLQPLQVPEWKWDEIGMDFITGLPKTQGGYDSIWVIVDRLTKVARFIPVKTTYGGNKLAELYFARIVSLHGVPKKIVSDRGSQFTSHFWKKLQEELGTRLNFSTAYHPQTDGQTERLNQILEDMLRACVLDFGKTWDKSLPYAEFSYNNSYQASIQMAPYEALYGRKCRTPLLWDQVGESQVFGTDILREAEAKVRIIRDNLKVAQSRQKSYADNRRRDLEFAVDDFVYLRVTPLRGVHRFQTKGKLAPRYVGPFRITARRGEVAYQLELPASLGNVHDVFHVSQLKKCLRVPSEQADSEQIEVREDLTYVEKPVKILDAMERRTRNRVIRFCKVQWSNHAEEEATWEREDELRHRHPEPRRRFPPLRPPFSSSSLSRGEPKTAVRLPPSLLSLGRRSAAPVVAGGDH

SEQ ID NO: 25968 - protein, 1636 aa, Oryza sativa; identical to SEQ ID NO: 19252
  Clone ID: TF_OsC359_7886.pep

SEQ ID NO: 25969 - protein, 1432 aa, Oryza sativa
  Clone ID: TF_OsC359_5737.pep
FPPWVLPPPPPPPPPPPPDTNAILTQILAQQANMTAAFLHHIQNPPQHNAPPPPPPPQHSKLAEFLRIRPPTFSSSNNPVDALDWLHAVGKKLDTVQCNDEEKVIFATHQLQGPASLWWDHFQATQPEGQPITWARFTAAFRRTHVPAGVMALKKREFRELKQGNRSVMEYLHEFNNLARYAPEDVREDEEKQEKFLAGMDSELSVRLVSGDYPDFQRLVDKSILLEAKHKELESHKRRLANFRNQQGANQRVRYTNPYLGGSSSQQQQQQPRSAPRPQFVVRVPQPQQPQGQQGPRAPRPPAPAVQPGQGHRDVQGQQRLCFNCFEPGHFAEKCPKPRRQQGQAPPRPNNGGKDVARGHVNHVTAEDVLTTPDVIVGTLLIHSIPATILFDSGASHSFISVTFVGRNQLGVERLRNPMLITTPGGVMTAKYYSPAIPIEIQGIPFPSDLILLDTKNLDVILGMNWLAQFQGVVDCARRTVTLYRGPEQPVVFFAPPTSVSSSELHQIGLSEIPIVREFGDVFPEELPGMPPKREIEFRIDLAPGTTPLYKRPYRMAANELAEVKKQLEELKGKGYIRPSTSPWGAPVIFVEKKDKTKRMCVDYRALNEVTIKNKYPLPRIDDLFDQLKGATVFSKIDLRSGYHQLRIREEDIPKTAFTMRYGLYEFTVMSFGLTNAPAFFMNLMNKVFMEYLDKFVVVFIDDILVYSQSEEDHQQHLCLVLGKLREHQLYAKLSKCEFWLSEVKFLGHMISAKGVAVDPETVTAVTDWKQPKTVTQIRSFLGLAGYYRRFIENFSKIARPMTQLLKKEEKFVWSPQCEKAFKTLKEKLVSSPVLILPDTHKDFMVYCDASRQGLGCVLMQEGHVVAYASRQLRPHEGNYPTHDLELAAVRRWLELIKDYDVGIHYHPGKANVVADALSRKSHCNTLNVRGIPPELNQQMEALNLSIVGRGFLAALEAKPTLLDQIREAQKNDPDMRGLLKNMKHGKAAGFTEDEHGTLWNGNREAHESPYSIHPGSTRMYLDLKEKYWWVSMKREIAEFVALCDVCQRVKAEHQRPAGLLQPLQIPEWKWDEIGMDFITGLPKTQGGYDSIWVVVDRLTKVARFIPVKTTYGGNKLAELYFARIVSLRGVPKKIVSDRGSQFTSHFWKKLQEELGTRLNFSTAYHPQTDGQTERLNQILEDMLHACVLDFGKTWDKSLPYAEFSYNNSYQASIQMAPYEALYGRKCRTPLLWDQVGESQVFGTDILREAEATVRTIRENLKVAQSRQKSYADNRRHDLEFAVDDFVYLRVTPLRGVHRFQTKGKLAPRFVGPFRITARRGEVAYQLELPASLGNVHDVFHVSQLKKCLRVPSEQADSEQIEVREDLTYVERPVKILDTMERRTRNRVIRFCKVQWSNHAEEEATWEREEELKAAHPDLFASSSESRGRDSV

SEQ ID NO: 25970 - protein, 1498 aa, Oryza sativa
  Clone ID: TF_OsC1528_1659.pep
MAALTDDANGEGASQPRTGPYSSGRAGGSRRAATAEQHDDEPSLAQLLANQNRLFERMVANSENMGAAMAQQANQAPSKLADVQRTHPPHFSSAADPLAADDWLRDIEIKLNLCRCDPVEKATFAAYYLQGAAAAWWETYKTLIPPDEPITWTVFREGFRSAHIPAGLMEIKKKEFLNLKQGNMPFMEFMERFNYLGRYAASDLNTETKKVELCRDRLAPELKHALAAHEITSMKTLVALRVESSEKEVVEDRKRKWAAKKFAGSSSSTRPRLAPSPAVRPMAPQPPRQMYVPPRPQTQLVRQVPRAVQAAGDASRNANVTCYNCGKKGHYSPSCPYPKTGTSGPYSQGAPQQPRGPPQVQPGQRGAPAVPKPAPTFGRGRLNHVTAEEATDAPGVVLGTFLVHSIPLTVLFDSGATHSFMSTLKAKQLDLKTEFLSDAMRIQSPGSTMVTKLLCKGVELIIDGVKFKANLILLDTLGLDVILGMDWLTKHEGTIDCAHRTVTLRSTDGQFVRFTFEQTSTSNQPSIQSLSIPELKSVPIVNEYSDVFPDELPGMPPDRDIEFVIDLIPGTAPIAKRPYRMTSENLMELKKKLNEQLAKGFIRPSSSPWGCPVLFVPKKDGTMRMCVDYRPLNEVTIKNKYPLPRIDDLFDQLTGARVFSKIDLRLGYFQLKIRPEDIPKTAFTTRYGLFEYTVVSFGLTNAPASFMNMMNKIFMEYLDKFVVVFIDDILIYSKSEEEHAQHLRMVLDKLREHQLYAKFSKCEFWLKEVEFLGHVLSEGGIAVNPRNVQNVLNWKQPQNVPEIRSFLGLAGYYRRFIENFSKIARPLTQLLKKENKFIWSEACETSFHELKRRLTTAPVLVMPDVLKPFHVYCDASHHGLGCVLMQEGKVVAYASRQLRPHEINYPTHDLQLAAVVHALKIWRHYLVSNRCEIFTDHKSLKYFFTQPDLNLRQRRWLELIKDYDLGIHYHPGKANVVADTLSRKLHHLAVIETINQPSLSSEFQKLNLGLVEDGYVAALALQPTLYSQIKAAQSIDEEVAEIMKEINSKPQSIYTLNSDGMVMLGKRIFVPNNQHLRETILDEAHQTPLSIHPGCTKMYQDIRTQYWWPSLRRDIAAYVAICDVCQRVKAEHQRPAGLLQPLQVPEWKFDEVGMDFITGLPKTPNGHDSIWVIMDRLTKVAHFIPVHVTYGGAKLAELYLTHIVRLHGVPKVIVSDRGTQFTSRFWKNLHELLGTKLFLSTAFHPQTGGQVERTNQILEDMLRACVLEHNTNWEKCLSFAEFSYNNSFQSSIQMSPFEALYGRKCRTPLYWSEVGERQFFGPAIINEAEKNVTLIRDRLKEAQTRQKSYSDRRRRELSFDVGDHVYLKVSPMRGTQRFQIHGKLAPRYIGPYQIISKRGQVAYQLELPFQLSNIHDVFHVSQLKKCLRTPIEHTSLEDINLKPNLSYQEYPIRILEESERRTRKSSIKILRVQWSNHTADEATWEREDRLKAEFPSFF

SEQ ID NO: 25971 - protein, 1494 aa, Oryza sativa; identical to SEQ ID NO: 19262
  Clone ID: TF_OsC359_6268.pep

SEQ ID NO: 25972 - protein, 1074 aa, Oryza sativa; identical to SEQ ID NO: 19260
  Clone ID: TF_OsC65158_1.pep

SEQ ID NO: 25973 - protein, 1756 aa, Oryza sativa
  unsure (1)..(1756): unsure at all Xaa locations
  Clone ID: TF_OsC359_6599.pep
RRSSPVRGPDPPWTALPEPLTGELPHRVRLEVHGYVGTCLANMVVEASGGPADHACQEAAYLMMARLRERHNYIFHDTVYRFHPRRASSDDVSTFRPTAGENDTTFGHMCAVMRGLDRMHSDLDKATKALNDGKLMRIVALKDEIARLKRENAQLKGLPAPGGVRIRTTPRKTMTAPVRIQLAPRNPPPSAAPAAPPVPPAVPAAPAPAPASALSFAPASAARGPARGNGGWLDLMVYTRNGSRATGEGSNGEERTEGVHPNSNSGNGPPPLPENPTLAQVMAHQTQMMAAMMQQMQQQHQQMHQRMLQHAEQQHQQFGPPPPQSKLPEFLRVRPPTFSSTTNPMEANDWLHAIEKKLNLLQCNDQEKVAFATHQLQGPASAWWDNHMATRPPGTEVTWAEFCRSFRKAQVPDGVVAQKKREFRALHQGNRTVMEYLHEFNRLARYAPEDVRTDAEKQEKFMAGLDDELTNQLISGDYADFERLVDKAIRQEDQRNKMDRKRKAAQFRAPQGSHQRPRFAPGQQGGPTTMIVRQYRPFNPSNFPHGAGGSQTHHRGQSNRGAAPRPPMAPAQSGPPAQAKKETGAKPGSCFNCGELGHFADKCSKPRRAGPRFIRARVNHASAEEAQAAPEVVLGTFPVNSIPATVLFDSGATHSFISKKFVGMHGLIREELSTPMRVHTPRNSSTSVQFSPSITIEIQRSPFLANLILLESKDLDVILGMDWLTKFKGVIDCANRTVTLTNEKGETVVYKSLDSSKRGVFLNQIETEIPVDTVEKNLRKWEDIPIVCEYPEVFPEDLTTMPPKREIEFRIDLAPGTAPIYKRPYRMAANELAEVKKQVDEQLQKGYIRPSTSPWGAPVIFVEKKDKTKRMCVDYRALNEVTIKNKYPLPRIDDLFDQLKGAKVFSKIDLRSGYHQLRIREEDIPKTAFTTRYGLYECTVMSFGLTNAPAFFMNLMNKVFMEFLDKFVVVFIDDILIYSKSEEEHEQHLRLVLEKLKEHQLYAKFSKCDFWSTEVKFLGHVITAQGVAVDPSNVESVTKXTPPKTVSQIRSFLGLAGYYHQFIENFSRIARPMTQLLKKDEKFKWTAECDKSFEELKKKLVSAPVLILPDQMKDFQVYCDASRHGLGCVLMQEGRVVAYASRQLRPHEGNYPTHDLELAAVVHALKIWRHYLIGNRCEVYTDHKSLKYIFTQPDLNLRQXRWLELIKDYDMGIHYHPGKANVVADALSRKSYCTALCIEGMCEELRQEFEHLNVGIVEHGFVAALEARPTLVDQVRAAQVNDSEIAELKKNMRVGKARDFHEDEHGTIWLGERLCVPDDKELKDLILTEAHQTQYSIHPGSTKMYQDLKEKFWWVSMRREIAEFVALCDVCQRVKAEHQRPAGLLQPLQIPEWKWEEIGMDFITGLPRTSSGHDSIXVVVDRLTKVSHFIPVHTTYTGKRLAELYLSRIMCLHGVPKKIVSDQGSQFTSKFWQKLQEELGTRLNFSTAYHPQTDGQTERVNQILEDMLRACALDFGGAWDKSLPYAEFSYNNSYQASLQMAPFEALYGRKCRTPLFWDQTGERQLFGTEVLAEAEEKVRIIRERLRIAQSRQKSYADNRRRELTFEAGDYVYLRVTPLRGVHRFQTKGKLAPRFVGPYKILERRGEVAYQLELPSNMIGIHDVFHVSQLKKCIRVPEEQADSEHIDIQEDLTYVEKPVRILDTSERRTRNKITRFCRVQWSHHSEEEATWEREDELKAAHPHLFTSSSESRGRDSV

SEQ ID NO: 25974 - protein, 506 aa, Oryza sativa
  Clone ID: TF_OsC1528_2334.pep
MWIRGGREATDGRAKPASLARRGGRGGPMTMRSWTVNTRVATAVRTVYGQRVWRRRKLHEFLGRRRTGAGGPSQADTIGSQDEIVKTNTDGTEKGEYSGGDRPVRSRVGKLAPTCMKFDLVKFDGFGNFGLWQTRVKDLLAQQEVSKALKGVKPAKMEDDDCEEMQLQAAATIRRCLSDQIMYHVMEETSPKIIWEKLEAQFMSKTLTNKRYLKQKLYGLKMQEGADLTAHVNVFNQLVTDLVKMDVEVDDEDKAIVLLCSLPESYEHVMRKNKEGETSQAEGLLVKEDHAGHKVKKNKKKKMVKCFRCDEWGHIRRECPTLKGKAKANVATSSNDSDSDGCDLLTMSSAQSKDAEAWILDSASSFHVTPRKEWFSSYKSGEFGFVYLGDDTSYPAVGVGEVKIKLEDGGEHVLQGVRHVPGLKRNLISLGTLHEEGLIFRGNRNRKTIEIMKGKMTMMTGEKVESHLYKLRGCTVAGVVQEEAVAGIAIAFGGGGSGADSSGGLR

SEQ ID NO: 25975 - protein, 462 aa, Oryza sativa; identical to SEQ ID NO: 19275
  Clone ID: TF_OsC359_5686.pep

SEQ ID NO: 25976 - protein, 2112 aa, Oryza sativa; identical to SEQ ID NO: 19276
  Clone ID: TF_OsC91_1942.pep

SEQ ID NO: 25977 - protein, 223 aa, Oryza sativa
  Clone ID: TF_OsC547_335.pep
LAEGNPVSPHEIKMIGYTESLDKLGFPLSRELATDLILQSLPPSFEPFIMNFNMNNLNRTLAEVHGMLKTAEESIKKNSNHVMVMHKRKPNNKKSGQKRKLNSDEITSTGNSKTKVQKTGPAKDTECFFCKETGHWKRNCRKYLEHLKQMQQDGKSSTLGINVIEINLATSSTDSWVFDSSFSMKDLGEAVYILGIRIYRDRSNRLIGLSQSTYIDKVLKRLN

SEQ ID NO: 25978 - protein, 445 aa, Oryza sativa
  unsure (1)..(445): unsure at all Xaa locations
  Clone ID: TF_OsC93807_1.pep
MLLRLPCARGPAPAAAARWRPPGRAARTAPRLGRGHAAASSADGSGAPSSPLFVLCHSQALTLALPPQSLHYDYDPLADLLGPDVDPTSSQRSFNAGVILVTWLIWKEHNESLRGVQSLRNTAPVAEKGKLRSWVGPNGQYYRELPCPSCRGRGYTPCKQCGIDRSSLDCPMCNGKGIRECVQCAGECVIWQESIDEQPWEKVRSSSPLKVKEDDEVDKLEIKINTSKRSRRTYPSPSPEVALKISRSLRSLNAKTGLFTKHMKIIHQDPKLHAQRVAAIKKTKGTAAARKHASETQKAFFSNPENRLKRSIAMKGVKFFCSKCGQEGHRSFYCPTVREISGRAHFRCRLCGGKGHNSRTCGKPKSENECQRQPRHCSQCGERGHNRRNCPRSTTVEVEDVKIYSEXKQDNVHSSGIYSCSFCSAKGHNRRTCPKRKASIGQQKD

SEQ ID NO: 25979 - protein, 52 aa, Oryza sativa
  Clone ID: TF_jC-osroLIB3475021f01a1.pep
IGLGFRVYAICYSIGHLILLVVSVAARGGLLRCLSIICFVNHFLHEVTPGLS

SEQ ID NO: 25980 - protein, 1511 aa, Oryza sativa; identical to SEQ ID NO: 19284
  Clone ID: TF_OsC359_7398.pep

SEQ ID NO: 25981 - protein, 1475 aa, Oryza sativa; identical to SEQ ID NO: 19308
  Clone ID: TF_OsC1713_4193.pep

SEQ ID NO: 25982 - protein, 1200 aa, Oryza sativa
  unsure (1)..(1200): unsure at all Xaa locations
  Clone ID: TF_OsC359_6606.pep
SVPRRSRPFRRAAAAAVTSSLTSSGSSAVSRSWTRSISAVHLGSIPSFPESPFSPEKSLKSSKASKATPGLEWYIPGLEIELCSRDGCSEWLGLCNRMPRYKPEYLFGVEGFVQELRTMSFVIGFGTAPFYAQIPHDRHEERCRVKVTLNSNSEDILSVMFEAGGRNYIHACQEVARIAIGELRDRYSDQLADTEYRYHPRQPQGSDRGSYLETEGIENDATTRHLVEMLWAMDESHAETVLAAQDREDWNRGKICKLEDKVDRLEKELAALKGEAPPQKARIRLTARKRALFVPRYQLAPKMVNTRSNGNGPNLNNPNNNNNNEGNPTLAQVLAQQTQLMHMMMQQLQNQQNQGNNHAPPQNKLAEFLRVRPPIFSSTTNPVEAGDWLHAIEKKLDLLQCTDQEKVSFASHQLLGPASEWWDHFRLNRTTAEPITWLELTAAFRKTHIPSGVVSLKKKEFRSLTQGSRSVTEYLHEFNRLARYAPEDVRNDEERQEKFLEGLNDELSYPLMTGDYSNFQKLVDKAIRQEDKYNRMEQKKRRIAQFKIQQGNNQKPRLTFVPQSMPHGGSSSVVRPQRQFFNNNAGNNIRNQAPRPVAAPTQQPPAKREQGSKPVVCFNYGDPGHYADKCPKPRRVKVVPAXSNSTIPASKARVNHVAAAEAQDAPDVILGTFPVNSVHATVLFDSGATHSFLSMSFAGNHGMEVEDLRRPLMVSTPSNQALSLQRSPSVRIEIKGVPFLANLILLESKDLDVILGMDWLTRHKGVIDCANRKVTLTSSDGRVVTVHALSSESLRSRLNQITLEEIPIVREYPDVFPDDLPGMPPKRDIEFRIDLVPGTTPIHKRPYRMAANELAEVKRQVDDLLQKGYIRPSSSPWGAPVIFVEKKDHTQRMCVDYRALNDVTIKNKYPLPRIDDLFDQLKGATVFSKIDLRSGYHQLRIKEEDIPKTAFTTRYGLFECTVMSFGLTNAPAFFMNLMNKVFMEYLDKFVVVFIDDILIYSRTREEHEEHLRLALEKLREHQLYAKFSKCEFWLSEVKFLGHVISAGGVAVDPSNVESVTNCKQLKTVSEIRSFLGLAGYYRRFIENFSKITKPMTRLLQKDVKYKWSEECEQSFQELKNRLISAPILILPDPKKGFQVYCDASKLGLGCVLMQDGKVVTYASRQLRPHEKNYPTHDIELAAVVHALKIWRHYYLDTRSV

SEQ ID NO: 25983 - protein, 2246 aa, Oryza sativa
  unsure (1)..(2246): unsure at all Xaa locations
  Clone ID: TF_OsC359_7671.pep
MAAGSSAPVSISSGRPLSLPTLYNRSSCFAPPFPPLAAHSPRRIRARAVFLSLRRRRRAPVRRRRRSGPPPDSASPPSASPRSRRPRPPLRFARRLSERRRPRRSEPRRRLPPLRLSFPPSSSSRGEPWTASFASPFPPLSRPPLRRAVGRRRRPSGRGCAASRRPCRRGRLRARPAAARWXPAVSRPRPRVRLTRGTHGAGRRQPRAPGPPWTERLTXHLGHIRTGLRASVAKHYRXFHMSSGANEGYTSCGPVVEMSWHRAGVLLLGAQSCLPVPGVPAVGGIGSMAGSVTRRGLGMTGFVLELRGMCVALGYPHGVDYQARPLPEQEGDDAEPRAAWEVTAVILAGSSERTSLTVTAGGDSFPAACQSAALLAIGTLHQRYPDELQHSPYRYHPRRGGARDYATFRDASSEDDATIVHLARMVEAYDAARIDFHQMVRRGMVENNMKILELRQENLQLKKDLDAVEAQLHQLKIAQGEVCRPKRRRVCRSQKITARKSTSRPELVRQSLAWTCFVETPRAEPAPVVPQEGEASGVGSTEALSVAGSVWGFQMVTTRRNAVTGDGNQPEGSNHNHQGNPPPPPPPPPPPPPDTNAILTQILAQQANMMTAFLHHLQNPPQHNAPPPPPQHSKLAEFLRIRPPTFSSSNNPVDALDWLHAVGKKLDTVQCSDEEKVIFAAHQLQGPASLWWDHFQATQPEGQPITWARFTAAFRRTHVPAGVVALKKREFRELKQGNRSVMEYLHEFNNLARYAPEDVREDEEKQEKFLAGMDPELSVRLVSGDYPDFQRLVDKSIRLEAKHKELESHKRRLANFRNQQGANQRVRYTNPYPGGSSSQQQQQQQQPRSAPRPQFVVRVPQPQQQQGQQGTRAPRPPTPTVQPGQGRRDAQGQQRLCFNCFEPGHYADKCPKPRRQQGQAPPRSNNGGKDVIRGRVNHVTAKDVLTTPDVIVGTFLVHSIPATILFDSGASHSFISVPFVGRNQLGVERLRNPLLITTPGGVMTAKYYSPAVPIEIQGIPFPSDLILLDTKNLDIGLSEIPIVREFGDVFPEELPEKKDKTKRMCVDYRALNEVTIKNKYPLPRIDDLFDQLKGATVFSKIDLHSGYHQLRIREEDIPKTAFTTRYGLYEFTVMSFGLTNAPAFFMNLMNKVFMEYLDKFVVVFIDDILIYSQSEEDHQHHLRLVLGKLREHQLYAKLSKREFWLSEVKFLGHVISAKGVAVDPETVTAVTDWKQPKTVTQVRSFLGLAGYYRRFIENFSKIARPMTQLLKKEEKFVWSPQCEKAFQTLKEKLVSSPVLILPDTRKDFMVYCDASRQGLGCVLMQDGHVVAYASRQLRPHEGNYPTHDLELAAVIHDLKIWRHYLIGNRCEIYTDHKSLKYIFTQSDLNLRQRRWLELIKDYDVGIHYHPGKANVVADALSRKSHCNTLNVRGIPPELNQQMEALNLSIVSRGFLAALEAKPTLLDQIREAQKNDPDMHGLLKNMKQGKAAGFTEEEHGTLWNGNREKYWWRVKAEHQRPAGLLQPLQVPEWKWDEIGMDFITGLPKTQGGYDSIWVVVDRLTKVARFIPVKTTYGGNKLAELYFARIVSLHGVPKKIVSDRGSQFTSHFWKKLQEELGTRLNFSTAYHPQTDGQTERLNQILEDMLRACVLDFGKTWDKSLPYAEFSYNNSYQASIQMAPYEALYGRKCRTPLLWDQVGESQVFGTDILREAEAKVRIIRENLKVAQSRQKSYADNRRRDLEFAVDDFVYLRVTPLRGVHRFQTKGKLAPRYVGPFRIIARRGEVAYQLELPASLGNVHDVFHVSQLKKCLRVPSEQADSEQIEVREDLTYVERPVKILDTMERRTRNRAGPPATLADGWGPPVIAYLAPRPPPARALAPPPPPPNPPHPAVPVRHKEGEITPRDSLSLFPRFSLSLSLGFVWNLSRNPRRRNQWRPDPPRRFPSPPAALSHSRRYIIAPRASLLRFRHSPHTLPVGFVPAPSSSLSAVAAELRFAAVVAPDLLPTRRHLLRLRRVPVDLVHPFVSPADCRSAAVLVDPNRAAAFLRSGCRFRRPRRPGVSHGPPPSLPPSLPSLGRRSAAPLVAGGDHRGAGAPPPVGRAGEAAFGRAPRLPGGPGRQPPAPAGAADAWDPRRRSASAACTRSTVDREADAWAPLPWTRLGSGCMVLMVAPRPYKDRSSGLCCKALPYFHMSSGANEGYTSCGPVVEMSWHRAGVLLLGAQSCLPVPGVPAVGGIGLAQFFPSP

SEQ ID NO: 25984 - protein, 1651 aa, Oryza sativa
  Clone ID: TF_OsC359_7991.pep
MPRYKPEYLFGVEGFVQELRTMSFVIGFGTAPFYAQIPHDRHEEKCRVKVTLNSNSEDVPSVMFEAGGRNYIHACQEVARIAIGELRDRYSDRLADTEYRYHPRQPQGSDRGSYLETEGIENDATTRHLVEMLWAMDESRAETVLAAQDREDWNRGKICKLEDKVDRLEKELAALKGEAPPQKARIRLTARKRALFVPRYQLAPKVRVVEKEVAPADPPVIIISDDEEEESKRTHSKIEWVATQDDEDEPNEPTIDLRCSEELDNGNGPNSNNNNNNGENPTLAQVLAQQTQLMNMMMQQLQNQQNQGNNHAPPQNKLAEFLRVRPPIFSSTTNPVEAGDWLHAIEKKMDLLQCTDQEKVSFASHQLLGPASEWWDHFRLNRITAEPITWLEFTAAFRKTHIPSGVVSLKKKEFRSLTQGSRSVTEYLHEFNRLARYAPEDLRNDEERQEKFLGGLNDELSYPLMVGDYPDFQKLVDKAIRQEDKYNRMEQKKRRIAHFKAQQGSNQKPRLTLGPQSVPQGGSSSIVRPQRQFFNNNAGNNIRNQVPRPVAASTQQQPAKRKQGSKPVVCFNYGDPGHYADKCPKPRRVKVVPAQNNSAVPASKARVNHVAAAEAQDAPDVILGTFPVNSVPATVLFDSSATHSFLSMSFAGNHGMEVEDLRRPLMVSTPSNQALSLQRSPSVRIEIQGVPFLANLILLESKDLDVILGMDWLAKHKGVIDCANRKVTLISNDGRVVTVHALSSEFLRSRLNQITLGEIPIVREYPDVFPDDLPGMPPKRDIEFRIDLVPGTTPIHKRPYRMAANELAEVKRQVDDLLQKGYIRPSSSPWGAPVIFVEKKDHTQRMCVDYRALNDVTIKNKYPLPRIDDLFNQLKGATVFSKIDLRSGYHQLRIKEYGLFECTVMSFGLTNAPAFFMNLMNKVFMEYLDKFVVVFIDDILIYSRTKEEHEEHLRLALEKLREHQLYAKFSKCEFWLSEVKFLGHVISAGGVAVDPSNVESVTNWKQPKTVSEIHSFLGLAGYYRRFIENFSKIAKPMTRLLQKYVKYKWSEECEQSFQELKSRLISAPILILPDPKKGFQVYCDASKLGLGCVLMQDGKVVAYASRQLRPHEKNYPTHDLELAAVVHALKIWHHYLFGTRTEEFERLNLGIVSRGFVAALEAKPTLIDQVREAQISDPDIQEIKKNMRRGKAIGFLEDEQGTVWLGERICVPDNKDLKDAILKEAHDTLYSIHPGSTKMYQDLKERFWWASMKREIAEYVAVCDICQRVKAEHQKPAGLLQPLKIPEWKWEEIGMDFITGLPRTSSGHDSIWVIVDRLTKVAHFIPVKTTYSGSRLAELYMARIVCLHGVPKKIVSDRGSQFTSNFWKKLQEEMGSKLNFSTAYHPQTDGQTERVNQILEDMLRACALDFGGSWDKNLPYAEFSYNNSYQASLQMAPYEALYGRKCRTPLLWDQTGERQVFGTDILREAEEKVKIIQERLRVAQSRHKSYADNRRRDLSFEEGDYVYLRVTPLRGVHRFHTKGKLAPRFVGPYKIVSRRGEVAYQLELPQSLAGVYNVFHVSQLKKCLRVPTEEANIEQIEVQEDLTYVEKPIRILETNERRTRNRVIRFCKVQWSNHSEEESTWEREDELKSAHPHLFASSSESRGRDSV

SEQ ID NO: 25985 - protein, 1693 aa, Oryza sativa; identical to SEQ ID NO: 19316
  Clone ID: TF_OsC1713_4447.pep

SEQ ID NO: 25986 - protein, 983 aa, Oryza sativa
  unsure (1)..(983): unsure at all Xaa locations
  Clone ID: TF_OsC91_2190.pep
MAGPEDKDEEGASHSPRTKGIIQYFTRQVKQHTEGLDTDLQVTNEKIGQLESTQISTNTKLTGLETAVARIDTSLAALVRHFDALNAGGNGGGNDDDIDGEYVEDNLEDEYIADTEQDDRDARDRRRLHNNRRGMGGRRRREVRNNDDAFSKIKFKIPPFDGKYDPDAYLSWEIAVDQKFACHEFPESTRVRAATSEFTDFASVWWIEHGKKNPNNMPQTWDALKRVMRARFVPSYYARDLLNRLQQLRQGAKSVEEYYQELQMGLLRCNLEETEDAAMARFLGGLNREIYDIVDYKDYTNMTRLFHLACKAEREVQGRRASAKANFSAGKTSSWQTRTTPPAGRTASPSSTPTTSRAAPPPSSDKSATKAAQPAPSASSMASTGRMRDVQCHRCKGFGHVQRDCPSKRVLVVKNDGEYSSASDFDDDTLALLAADHADNEPPEEHIGAAFADHYESLIVQRVLSAQMEKAEQNQRHTLFQTKCVVKERCCRMIMDGGSCNNLASSEMVEKLALSTKPHPHPYYIQWLNNSGKAKVTKLVHINFAIGNYHDVVECDVVPMQACNILLGRPWQFDRDSMHHGRSNQYSFLYHDKKIVLHSMSPEDILRDDVAKAAKSKCESDKKAQSDGKKPETINLKPKCLLATKSDINELIASPSVAYALEYSDVFPKEVPPGLPPVRGIEHQIDLIPGASLPNRAPYRTNPEETKEIQRQXHELLDKGYVRESLSPCAVPXINNITIRYRHPIPRLDDMLDELSGSIVFSKVDLRSGYHQIRMKLGDEWKTAFKTKFGLYEWLVMPFGLTNAPSTFMRLMNEVLRPFIGKFVVVYFDDILIYSKSMGEHFNHLRAVFNALRDARLFGNLEKCTFCTDRVSFLGYVVTPQGIEVDQAKVEAIQSWPTPKTVSQVRSFLGLAGFYRRFVQDFSTIAAPLNVLTKKGVPFTWGTSQENAFHMLKDKLTHAPLLQLPDFNKTFELECDASGIGLG

SEQ ID NO: 25987 - protein, 2447 aa, Oryza sativa
  Clone ID: TF_OsC91_2385.pep
MAGPEDKDEEGASHSPRTKGIIQYFTRQVKQHTEGLDTDLQVTNEKIGQLESTQISTNTKLTGLETAVARIDTSLAALVRHFDALNAGGNGGGNDDDIDGEYVEDNLEDEYIADTEQDDRDARDRRRLHNNRRGMGGRRRREVRNNDDAFSKIKFKIPPFDGKYDPDAYLSWEIAVDQKFACHEFPESTRVRAATSEFTDFASVWWIEHGKKNPNNMPQTWDALKRVMRARFVPSYYARDLLNRLQQLRQGAKSVEEYYQELQMGLLRCNLEETEDAAMARFLGGLNREIYDIVDYKDYTNMTRLFHLACKAEREVQGRRASAKANFSAGKTSSWQTRTTPPAGRTASPSSTPTTSRAAPPPSSDKSATKAAQPAPSASSMASTGRMRDVQCHRCKGFGHVQRDCPSKRVLVVKNDGEYSSASDFDDDTLALLAADHADNEPPEEHIGAAFADHYESLIVQRVLSAQMEKAEQNQRHTLFQTKCVVKERCCRMIIDGGSCNNLASSEMVEKLALSTKPHPHPYYIQWLNNSGKAKVTKLVHINFAIGNYHDVVECDVVPMQACNILLGRPWQFDRDSMHHGRSNQYSFLYHDKKIVLHSMSPEDILRDDVAKAAKSKCESDKKAQSDGKKPETINLKPKCLLATKSDINELIASPSVAYALVCKDALISLHDMQHSLPPAVANILQEYSDVFPKEVPPGLPPVRGIEHQIDLIPGASLPNRAPYRTNPEETKEIQRQVHELLDKGYVRESLSPCAVPVILVPKKDGSWRMCVDCRAINNITIRYRHPIPRLDDMLDELSGSIVFSKVDLRSGYHQIRMKLGDEWKTAFKTKFGLYEWLVMPFGLTNAPSTFMRLMNEVLRPFIGKFVVVYFDDILIYSKSMGEHFNHLRAVFNALRDARLFGNLEKCTFCTDRVSFLGYVVTPQGIEVDQAKVEAIQSWPTPKTVSQVRSFLGLAGFYRRFVQDFSTIAAPLNVLTKKGVPFTWGTSQENAFHMLKDKLTHAPLLQLPDFNKTFELECDASGIGLGGVLLQEGKPVAYFSEKLSGPVLNYSTYDKELYALVRTLETWQHYLWPKEFVIHSDHESLKHIRSQGKLNRRHAKWVEFIESFPYVIKHKKGKENIIADALSRRYTLLTQLDYKIFGLETIKDQYAHDADFNDVLLHCKDGRTWNKFVINDGFVFRANKLCIPASSVRLLLLQEAHGGGLMGHFGAKKTHDILASHFFWPQMRRDVGRFVARCATCQKAKSRLHPHGLYMPLPVPTVPWEDISMDFVLGLPRTKRGRDSIFVVVDRFSKMAHFIPCHKTDDASHIADLFFREIVRLHGVPNTIVSDRDTKFLSHFWRTLWAKLGTKLLFSTTCHPQTDGQTEVVNRTLSTMLRAVLKKNIKMWEECLPHIEFAYNRSLHSTTKMCPFQIVYGLLPRAPIDLMPLPSSEKLNFDAKQRAELMLKLHETTKENIERMNAKYKFAGDKGRRELNFEPGDLVWLHLRKERFPDLRKSKLMPRADGPFKVLAKINENAYKIDLPADFRVSPTFNVADLKPYLGEEDELESRTTQMQEGEDDEDINTIDTSTSPHIQHDGPITRARARQLNYQDECPRGRVDAHHKFAATIGDDRATNPSGFASYGLYEFTVMSFGLTNAPAFFMNLMNKVFMEYLDKFVVVFIDDILVYSQSEEDHQHHLRLVLGKLREHQLYAKLSKCEFWLSEVKFLGHVISAKGVAVDPETVTAVTDWKQPKTVTQIRSFLGLAGYYRRFIENFSKIARPMTQLLKKEEKFVWSPQCEKAFQTLKEKLVSSPVLILPDTRKDFMVYCDASPQGLGCVLMQEGHVVAYASRQLWPHEGNYPTHDLELAAVVHALKIWRHYLIGNRCEIYTDHKSLKYIFTQSDLNLRQRRWLELIKDYDVGIHYHPGKANVVADALSRKSHCNTLGVRGIPPELNQQMEALNLSIVSRGFLATLEAKPTLLDQIREAQKNDPDMRGLLKNMKQGKAAGFIEDEHGTLWNRNRVCVPDVRELKQLILQEAHESPYSIHPGSTKMYLDLKEKYWWVSMKREIAEFVALCDVCQRVKAEHQRPAGLLQPLQVPEWKWDEIGMDFITGLPKTQGGYDSIWVVVDRLTKVARFIPVKTTYGGNKLAELYFARIVSLHGVPKKIVSDRESQFTSHFWKKLQEELGTRLNFSTAYHPQTDGQTERLNQILEDMLHACVLDFGKTWDKSLPYAEFSYNNSYQASIQMAPYEALYGRKCRTPLLWDQVGESQVFGTDILREAEAKVRTIWDNLKVAQSRQKSYADNRRRNLEFAVDDFVYLRVTPLRGVHRFQTKGKLAPRFVGPFRIIARRGEVAYQLELPASLGNVHDVFHVSQLKKCLRVPSEQADSEQIEVREDLTYVERPVKILDTMERRTRNRVIRFCKVQWSNHAEEEATWERENELKAAHPDLFASSSESRGRDSV

SEQ ID NO: 25988 - protein, 1391 aa, Oryza sativa
  unsure (1)..(1391): unsure at all Xaa locations
  Clone ID: TF_OsC91_2423.pep
MGNLRGHEFKDWNGVVQYRGIHASKFVSFEGGIHASSGFKVWALQQLLAWKTQSLKGAISILGPTTNNSNGTHISPIVSKVLMWLKNTVGAGFSYFNTYSAVLCASFCRSEASSTVAAPLQCRSTRLQIFPGSYSLQAFGRMMRSLIELLRLFILYTCDLMPQDSIAGDGSGVDLVDECPCGQVDAHHKFAVTIGDGVSVAKAQRLWTVTNEKIGQLKSTQISTNTKLTVLETAVARIDTCLAALVRHFDALNAGGNGGGNDDDIDGKYVEDNLEDEYIADTEQDDRDARDRRRLHNNRREHGKKNPNNMPQTWDALKRVMRARFVPSYYTRDLLNRLQQLRQGAKSVEEYYQELQMGLLRCNLEETEDAAMARFLGGLNREIFDIVDYKDYTNMTRLFHLTCKAEREVQGRRASAKANFSAGKTSSWQTRTTPPAGRTASPSSTPTISRAAPPPSSDKSATKAAQPALSASSMASTGRTRDVQCHRCKGFGHVQRDCPSKRVLVVKKDGEYSSASDFDDDTLALLAADHADNEPPEEHIGAAFADHYESLIVQRVLGAQMEKAEQNQQHTLFQTKCVVKERCCRMIIDGGSCNNLASSEMVEKLALSTKPYPHPYYIQWLNNSGRPWQFDRDSMHHGRSNQYFFLYHDKKIVLHPMSPEDILRDDVAKATKSKCESDKKAQSDGKKPETINLKPKCLIATKSDINELIASPSVAYALEYSDVFPKEVPPGLPPXASLPNRAPYRTNPEETKEIQRXVHELLDKGYVRESLSPCAVPVXDDMLDELSGSIVFSKVDLRSGYHQIRMKLGDEWKIAFKTKFRLYEWLVMPFGLTNAPSTFMRLMNEVLRPFIGKFVVVYFDDILIYSKSMGEHFNHLRAVFNALRDARLFGNLEKCSFCTDRVSFLGYVVTPQGIEDFSTIAALLNALTKKGVPFTWGTSQENAFHMLKDKLTHTPLLQLPDFNKTFELECDASGIGLGGVLLQEGKPVAYFSEKLSGPVLNYSTYDKELYALVRTLETWQHYLWPKEFVIHSDHESLKHIRSQGKLNSRHAKWVEFIESFPYVIKHKKGKENIIADALSRRYTLLTQLDYKIFGLETIKDQYAHDADFNEAHGGGLMGHFGAKKTHDILASHFFWPQMRRDVGRAVLKKNIKMWEECLPHIEFAYNRSLHSTTKMCPFQIVYGLLPRAPIDLMPLPSSEKLNFDAKQCAELMLKLHETTKENIERMNAKYKFAGDKGRRELNFEPRDLVWLHLRKERFPDLRKSKLMPRADGPFKVLAKINENAYKLDLPADFGVSPTFNVADLKPYLGEEDEHESRTTQMQEGEDDEDINTIDTSTSPHVQHDGSITRARARQLNYQDECPRGRVDAHHKFASXLETVYRLLRRSVFGRL

SEQ ID NO: 25989 - protein, 1748 aa, Oryza sativa; identical to SEQ ID NO: 19295
  Clone ID: TF_OsC91_2584.pep

SEQ ID NO: 25990 - protein, 1567 aa, Oryza sativa
  Clone ID: TF_OsC91_2593.pep
MAGLEDKDEEGASHSPRTKGIIQYFTRQVKQHTEGLDTDLQVTNEKIGQLESTQISTNTKLTGLETAVARIDTSLAALVRHFDALNAGGNGGGNDDDIDGEYVEDNLEDEYIADTEQDDRDARDRRRLHNNRRGMGGRRRREVRNNDDAFSKIKFKIPPFDGKYDPDAYLSWEIAVDQKFACHEFPENTRVRAATSEFTDFASVWWIEHGKKNPNNMPQTWDALKRVMRARFVPSYYARDLLNRLQQLRQGAKSVEEYYQELQMGLLRCNLEETEDAAMARFLGGLNREIYDIVDYKDYTNMTRLFHLACKAKREVQGRRASAKANFSAGKTSSWQTRTTPPAGRTTSPSSTPTTSRAAPPPSGDKSAIKAAQPAPSASSMASTGRMRDVQCHRCKGFGHVQRDCPSKRVLVVKNDGEYSSASDFDDDTLALLAADHADNEPPEEHIGAAFADHYESLIVQRVLSAQMEKAEQNQRHTLFQTKCVVKERCCRMIIDGGSCNNLANSEMVEKLALSTKPHPHPYYIQWLNNSGKAKVTKLVHINFAIGNYHDVVECDVVPMQACNILLGRPWQFDRDSMHYGRSNQYSFLYHDKKIVLHPMSPEDILRDDVAKAAKSKCESDKKAQSDGKKPETINLKPRCLLATKSDINELIASPSVAYALVCKDALISLHDMQHSLAPAVANILQEYSDVFPKEVPPGLPPVRGIQHQIDLIPGASLPNRAPYRTNPEETKEIQRQVHELLDKGYVRESLSPCAVPVILVPKKDGSWRMCVDCRAINNITIRYRHPIPRLDDMLDELSGSIVFSKVDLRSGYHQIRMKLGDEWKTAFKTKFGLYEWLVMPFGLTNAPSTFMRLMNEVLRPFIGKFVVVYFDDILIYSKSMGEHFNHLRAVFNALRDARLFGFQHHCCTIECASKKGVPFTWGTSQENAFHMLKDKLTHAPLLQLPDFNKTFELECDASGIGLGGVLLQEGKPVAYFSEKLSGPVLNYSTYDKELYALVRTLETWQHYLWPKEFVIHSDHESLKHIRSQGKLNRRHAKWVEFIESFPYVIKHKKGKENIIADALSRRYTLLTQLDYKIFGLETIKDQYAHDADFNDVLLHCKDGRTWNKFVINDGFVFRANKLCIPASSVRLLLLQEAHGGGLMGHFGAKKTHDILASHFFWPQMRRDVGRFVARCATCQKAKSRLHPHGLYMPLPVPTVPWEDISMDFVLGLPRTKRGRDSIFVVVDRFSKMAHFIPCHKTDDASHIADLFFREIVRLHGVPNTIVSDRDTKFLSHFWRTLWAKLGTKLLFSTTCHPQTDGQTEVVNRTLSTMLRAVLKKNIKMWEECLPHIEFAYNRSLHSTTKMCPFQIVYGLLPRAPIDLMPLPSSEKLNFDAKQRAELMLKLHETTKENIERMNAKYKFAGDKGRRELNFEPGDLVWLHLRKERFPDLRKSKLMPRADGPFKVLAKINENAYKIDLPADFGVSPTFNVADLKPYLGEEDELESRTTQMQEGEDDEDINTIDTSTSPHIQHDGPITRARARQLNYQDECPRGRVDAHHKFAATIGDGVSVAKAQRLWTVVVGP

SEQ ID NO: 25991 - protein, 986 aa, Oryza sativa
  Clone ID: TF_OsC91_2616.pep
MAAGWMGKVVTRVKCDSQVLRPSVYDHCRTGHPTATNKPEDPTNEDDENEHKNVQAANAILSALSGSEFNRVDDIESAKVIWDTLRNLHEGTDSVRESKVEILKGQFERFVILDGESPSDMYDRLNKIVNEIKGFGSKDMIDEVVVKKMIRAITPRNSILVTIIRERPDYKTLTPYDLLGHTLAHDMLKQESKEVIQFINQSSTTSIKKEDLALKGSSSKHYSNKSSGRHSARVCYMCKEPEHFIADCPHINEEKKKIEKKVEKKEKHKHSKHDHYGQSHLGMIFGSDSESSSSNEEGVATFAVKPSSAPRLFNYSSDEDAPICLMAKKPKVPSSLKSFNVDLVSDEEDDVQDEVMDEELFKSITKESLPHLSEFLGRIEDQYATLERQEALLIREKERSHELKGPQIGTTATFTELGKREKVASVNALCKLFDQPTAIQQWSTVTALISSYATARRRGHGSFPSAASHGCRSGGSRLSACGGAARRRRLWQRHLLPLLRRRQHPGGGPFYLVRQTTASEAVKAATAATADRSSSVVSDGEYYALAQCRADVPAGDCSRCLAACLGVIGGSGDDLCEKAAVRYDDRCLLRFAKGDDFTGFDVDEHTATVFDGGRSGLTVAEEVPTRLLATVAAAAPASRSRTAAGIASYGGGGSLYGLAQCTTQIPAPDCARCLRGALSRLSEDFNSTAAGMQLLRSSCMLRYGSSLFFNQSSPLLPVAHLAIAPAGGGAGPPAAAPPSPGHRPARARTIAISAGQPGYQTLVNSTGKFAERNKLGSGGCGTVYKGILHNNEEIAVKKLTRKDLREVEREVSLVAQLQHENIVKFLGHCFRHDKMFLVYEYLSNGTLSRYFKSDCQKLDWPKWLNIIRGIARGLSYLHRDSGKDIVHRDLKPSNVLLIPTSMQRLLTLILQDHTTGTKAMRALKREQAPRKNTTRIYWFHCFSLKWIHSSRTVCGRGILYQIGCVQFRRDDSGDHSWSEHQQVRQR

SEQ ID NO: 25992 - protein, 1619 aa, Oryza sativa
  Clone ID: TF_OsC91_2677.pep
MAGPEDKDEEGASHSPRTKGIIQYFTRQVKQHTEGLDTDLQVTNEKIGQLESTQISTNTKLTGLETAVARIDTSLAALVRHFDALNAGGNGGVNDDDIDGEYVEDNLEDEYIADTEQDDRDARDRRRLHNNRRGMGGRRRREVCNNDDAFSKIKFKIPPFDGKYDPDAYLSWEIAVDQKFACHEFPESTRVRAATSEFTDFASVWWIEHGKKNPNNMPQTWDALKRVMRARFVPSYYARDLLNRLQQLRQEETEDAAMARFLGGLNREIYDIVDYKDYTNMTRLFHLACKAEREVQGRRASAKANFSAGKTSSWQTRTTPLAGRTASPSSTPTTSRAAPPPSSDKSATKAAQPAPSASSMASTGRMRDVQCHRCKGFGHVQRDCPSKRVLVVKNDGEYSSASDFDDDTLALLAADHADNEPPEEHIGAAFADHYESLIVQRVLSAQMEKAEQNQRHTLFQTKCVVKERCCRMIIDGGSCNNLASSEMVEKLALSTKPHPHSYYIQWLNNSGKAKVTKLVHINFAIGNYHDVVECDVVPMQACNILLGRPWQFDRDSMHHGRSNQYSFLYHDKKIVLHPMSPEDILRDDVAKAAKSKCESDKKAQSDGKKPETINLKPKCLLATKSDINELIASPSVAYALVCKDALISLHDMQHSLPPAVANILQEYSDVFPKEVPPGLPPVRGIEHQIDLIPGASLPNRAPYRTNPEETKEIQRQVHELLDKGYVRESLSPCAVPVILVPKKDGSWRMCVDCRAINNITIRYRHPIPRLDDMLDELSGSIVFSKVELRSGYHQIHMKLGDEWKTAFKTKFGLYEWLVMPFGLTNAPSTFMRLMNEVLRPFIGKFVVVYFDDILIYSKSMGEHFNHLRAVFNALRDARLFGNLEKCTFCTDRVSFLGYVVTPQGIEVDQAKVEAIQSWPTPKTVSQVRSFLGLAGFYCRFVQDFSTIAAPLNALTKKGVPFTWGTSQENAFHMLKHKLTHAPLLQLPDFNKTFELECDASGIGLGGVLLQEGKLVAYFSEKLSGPVLNYSTYDKELYALVRTLETWQHYLWPKEFVIHSDHESLKHIRSQGKLNRRHAKWVEFIESFPYVIKHKKGKENIIANALSRRYTLLTQLDYKIFGLETIKDQYAHDADFNDVLLHCKDGRTWNKFVINDGFVFRANKLCIPASSVRLLLLQEAHGGGLMGHFGAKKTHDILASHFFWPQMRRDVGRFVARCATCQKAKSRLHPHGLYMPLPVPTVPWEDISMDFVLGLPRTKRGRDSIFVVVDRFSKMVHFIPCHKTDDASHIADLFFREIVRLHGVPNTIVSDRDTKFLSHFWRTLWAKLGTKLLFSTTCHPQTDGQIEVVNRTLSTMLRAVLKKNIKMWEECLPHIEFACNRSLHSTTKMCPFQIVYSLLPRAPIDLMPLPSSEKLNFDAKQRAELMLKLHETTKENIERMNAKYKFAGDKGRRELNFEPGDLVWLHLRKERFPDLRKSKLMPRADGPFKVLAKINENAYKIDLPADFGVSPTFNVADLKPYLGEEDELESRTTQMQEGEDDENINTIDTSTSPHVQHDGPITRARARQLNYQVSSFLSSYSSSLYPGDACTRVLLRNDGEDPKGRGFARGGFGLQGSANF

SEQ ID NO: 25993 - protein, 804 aa, Oryza sativa
  unsure (1)..(804): unsure at all Xaa locations
  Clone ID: TF_OsC1528_2042.pep
NPRPGPAGDATVRAYRTAPAAPPVPPAVPAAPVPAPAFTLSFAPASAARGPASGTGXVYTRTGSRATGEGSNGEERADGVHPNSDSGNGPPPLPENPTLAQVMAHQTQMMAAMMQQMQQQHQQMHQRMMQHAEQQHQQFGPPPPQSKLPEFLRVRPPTFSSTTNPMEANDWLHAIEKKLNLLQCNDQEKVAFATHQLQGPASAWTVTEYLHEFNRLARYAPEDVRTDAEKQEKFMAGLDDELTNQLISGDYADFERLVDKAIRQEDQRNKMDRKRKAAQFRAHQGSHQRPRFTPGQQGGPTTMIVRQHRPFNPSNFHQGTSGSQNHHGGQPNRGAAPRPSVAPAQSGQPAQAKKETGAKPGSCFNCDELGHFADKCPKPRRAGPRFIQARVNHASAEEAQAAPEVVLGTFPVNSIPATVLFDSSATHSFISKKFVGMHGLIREELSTPMRVHTPGNSSTSVQFSPSITIEIQRSPFLANLILLESKDLNVILGMDWLTKFKGVIDCASRTVTLTNEKGETVIETEIPVDTVEKNLRKLEDIPIVCEYPEVFPEDLTTMPPKREIEFRIDLAPGTAPIYKRPYRMAANELAEVKKQVDEQLQKGYIRPSTSPWGAPVIFVEKKDKTKRMCVDYRALNEVTIKNKYPLPRIDDLFDQLNGAKVFSKIDLRSGYHQLRIREEDIPKTAFTTRYGLYECTVMSFGLTNAPAFFMNLMNKVFMEFLDKFVVVFIDDILIYSKSEEEHEQHLRLVLEKLKEHQLYAKFSKCDFWLTEVKFLGVTGAPVASLVFCKVNVQPSSHMSRPEIH

SEQ ID NO: 25994 - protein, 1244 aa, Oryza sativa; identical to SEQ ID NO: 19318
  Clone ID: TF_OsC359_5634.pep

SEQ ID NO: 25995 - protein, 713 aa, Oryza sativa
  unsure (1)..(713): unsure at all Xaa locations
  Clone ID: TF_OsC359_5743.pep
VKTGNDPRASNDARGSEEQTDGAHISGASDSSSSPPPENPTVTQMMTMMIQQMQQHYHQMLQQAQQNQQQAQQNQQSGPPSSHLSKLLDFHHIQPPTFSSTTNPMXANDWLRAIEKKLNLLQCNDQEKVAFATHQLQGPASAWWDNYVVTRPDSTEVTWAEFCQSFRKAQIPEGIMAQKKREFRALHQETRIVTEYLHEFNRLARYAPKDVRTDAEKQEKFLFGLDDKLTNQLISGVYDDFEKLVDKAIRQEEQRNKMDRNRKVAQISFPQGNNXKPRFMTGQLGEPSTLIIRQHHPYHPSNFNNDYNGGSHNNSKQHNHNSTSPPLMAPAQSDPPAMSAQSEQLKKESAGKPRPCFNCGKHGHFAGKCPKLKRVGPRFVQARVNHASAEKAQASPEVVLGTFPVNSYPATVLFDSGASHSFISKRFAGAHGLSVVELKILMQVHTPGNDMRTAHYCPSVTIEIKRSRFLSNLILLESKDLDVILGMDWLTRHKGVIDCASRTITLSNDKGEKITFRSPVSQKSVASLNQAVIEDQTEIAEKNPKKLEDIPIVQEYPEVFPEGLTTMPPKREIEFQIDLAPGTAPIYKRPYRMAANELAEVKKQVDEQLQKGYIRPSTSPWGAPVIFVEKKDKTKRMCVDYRALNEVTIKNKYPLPRIDDLFDQLKGAKVFSNIDLRSGYHQLRIREEDIPKTAFATRSCSLFPHTRGVFGHE

SEQ ID NO: 25996 - protein, 1867 aa, Oryza sativa; identical to SEQ ID NO: 19326
  Clone ID: TF_OsC359_5787.pep

SEQ ID NO: 25997 - protein, 407 aa, Oryza sativa
  Clone ID: TF_OsC359_6467.pep
AKWIKPKDIFFHPPLASRELTRVHPWSIPSMLLGSQLPLVGSQDQNQYVFDRAFATQVDKLPMPEEDVPFCHDCRERGHCALNCPWVYAKEAPSFGLAGQTSLNQPPHTKSSLQPSVQSREPNGENPWNPGKCFPPSLSYHVGSRTKQAKRKKSKNQKRKAPMRTEEEVCKMTITSTEWPPAGITIPRRQRGNTFRGARQLTQHLLSHGGRVSDSEGSDQVSSDDEDESPRHLGEEEMESKACTRCGEIGHIASMCLTLCSYCEEDHPPGECPTRKVTCFLCEGTNHVPKDCQLSVLLTKTAEIQRTTLRLSHQLVSSNSNIDDIIHSTNAPPAAPDSAINHSNNTFSTNHSLHRQPQQRFVIDRRSCVSPRPTPGRAKGNQPQEDDTKQKTVIRFNQQSEGSFPCE

SEQ ID NO: 25998 - protein, 2050 aa, Oryza sativa
  unsure (1)..(2050): unsure at all Xaa locations
  Clone ID: TF_OsC359_8130.pep
RPGPTWQPRGAPEGGLAGTADGRRRARAPMVAGGGHRHGGAAAERGEGRGKRNGRSMAHPGSMATTGTATGAERGGGAARVDGDGGVPAVGDRNGEVDEVGEDAAKPKEAVPKREMVRGNDGGEPELGGDGGERGRRRELDSDGERERRVAETVERGTGSVYIEPGARGMNLSGRDTHGVDYQGKPVPEQEGDDAEPVAAWEVTAVILSGSPERTSLAVTAGGDSFSAACQNAALLAIGTLHQRYPDELQHSPYRYHPRRGGARDYATFRDASSEDDATIMHLARMVEAYDAARIDFHQMVRRGMVDNNMKILELRQENLQLKKDLDVLEAQLCQLKVAQGEVCRPKRRRVCRSQKITARKSTSRPELVCQSLAWTCFVETPRAEPAPVVPQEGEASGVGSTEDALLLTFRPGPSQRRSANTGDGHQPEGSNLNNHGSPPPPPPPPPPPPPDTNAILTQILAQQANMMAAFLHHIQNPPQHNAPPPPPPPQHSKLAEFLRIRPPTFSSSNNPVDALDWLHAVGKKLDTVQCNDEEKVIFATHQLQGPASLWWDHFXATQPEGQPITWARFTAAFRRTHVPAGVMALKKRAFRELKQGNRSVMEYLHEFNNLARYAPEDVREDEEKQEKFLAGMDPELSVRLISGDYPDFQRLVDKSIRLEAKHKELESHKRRLANFRNQQGANQRVRYTNPYPGGSSSQQQQQQPPSAPRPQFVVRVPQPQQPQGQQGTRAPRPPAPAVQPGQGHRDVQGQQSLCFNCFEPGHFADKCPKPRRQQGQAPPRSNNGGKDVIRGRVNHVTAEDVLTTPDVIVGTFLIHSTPATILFDSGASHSFISVPFVGRNQLGVERLRNPMLITTPGGVMTAKYYSPAVPIEIQGIPFPSDLILLDTKNLDVILGMNWLAQFQGVVDCARRTVTLHRGPEQPVVLFAPPTSVSSSELHQIGLLEIPIVREFGDVFPEELPGMPPKREIEFRIDLAPGTTPLYKRPYRMAANELAEIKKQLEELKEKGYIRPSTSPWGAPVIFVEKKDKTKRMCVDYRALNEVTIKNKYPLPRIDDLFDQLKGATVFSKIDLRSGYHQLRIREEDIPKTAFTTRYGLYEFTVMSFGLTNAPAFFMNLMNKVFMEYLDKFVVVFIDDILVYSQSEEDHQQHLRLVLGKLREHQLYAKLSKCEFWLSEVKFLGHVISAKGVAVDPETVTAVTDWKQPKTVTQIRSFLGLAGYYRRFIENFSKIARPMTQLLKKEEKFVWSPQCEKAFKTLKEKLVSSPVLILPDTRKDFLVYCDASRQGLGCVLMQEGHVVAYASRQLRPHEGNYPTHDLELAAVVHALKIWRHYLIGNRCEIYTDHKSLKYIFTQSDLNLRQRRWLELIKDYDVGIHYHPGKANVVADALSRKSRCNTLGVRGIPLELNQQLEALNLSIVSHGFLATLEAKPTLLDQIREAQKNDLDMHGILKNMKQGKAAGFTEDEHGTLWNGNRRVKAEHQRPAGLLQPLQVPEWKWDEIGMDFITGLPKTQGGYDSIWVVVDRLTKVARFIPVKTTYGGNKLAELYFARIVSLHGVPKKIVSDRGSQFISHFWKKLQEELGTRLNFSTAYHPQTDGQTERLNQILEDMLRACVLDFGKTWDNSLPYAEFSYNNSYQASIQMAPYEALYGRKCRTPLLWDQVGESQVFGTDILREAEAKVRTIWENLKVAQSRQKSYADNRRRDLEFAVDDFVYLRVTPLRGVHRFQTKGKLAPRFVGPFRITARRGEVAYQLELPASLGNVHDVFHVSQLKKCLRVPSEQADSEQIEVREDLTYVERPVKILDTMERRTRNRVIRFCKVQWSNHAEEEATWEREDEHPRAPLHRFRHSPPFLPVGIEPAPSHSLSAVAAELRSAAVVAPDHLPPRRRLLRLRRILADLVHPSASLADRRNAVDPVDPSRAATFLRSGCRFRRRRRLRVSRGPPFRFPLSLPSLGRCSAMPVVAGGDHRGEGAASRRPRRRGCLRAHRAAAAWGPAVSRPRPRVRLTRGARGAGRSEPRAPGPPWTVRLPRGPHSRGPGPRAPPFGSAI

SEQ ID NO: 25999 - protein, 2742 aa, Oryza sativa
  unsure (1)..(2742): unsure at all Xaa locations
  Clone ID: TF_OsC415818_1.pep
MALWNGLGQVANIAQLAGVDAYGLIKMIVEAAQTAKRNRETCQKLARHVKMIGDLLQRLQSTELMQHQETRNPVEQLEETLRHTYMLILSCQDSSYLHSCFMGGKQAHQLREVQSDITFYLQLFPLVSFVDTTRTWERLLRRAQPSCTEDTADELQKVHHSDHRIRNHVQDYAHKYIKLIELHWQFIFRFNTEILNATEFGDQSVTQCPEVFEEKRSEQASIRSLNLDQLVVNDIGKGAVLTFSQILAATNNFSGRSLIGQGGFGPVYKGKLPNGLEIAVKRHDTSSHQGEEEFMAEIDVIPKLRRKNIIELIGFCVQGKEYETKRILLNWSKRLKIIEGISDGLLYLHNHSPKCIVHRDIKASNILLDYEMNAKISDFGLAIKLAPKATTEVLVRGTWGYADPEYVATGVISEKTDVYSFGIVLLEIISGKLETWRGGMRGRGERGDLAGDGPTTAAVTSGGRSSALTIDLPPLLPSPAGISKLRLPSPARALNLSQVRPGEAFQNLILHLFHCPVTPIATTLGPSKIIPTPIWLCAAPSKPLNSLYVKNALNFWFSSSFSSFSVSSLGFGLFLSHVANKDVATSLFLAGSSVLKSAGLSIHLTKDSAAKDIQENVTRFLVQFEGSSSVPSLVGEKVVPALQTVKPAFTATSRHIGCSQQSSKTSTPSVPTGPALKSVYCPVTNSFRDALLSQPKPKPPARSATSRLPSRGRKNLTMLNRCFRCLGSDHQVKDCRDPLICASCRRAGHRQDSCRSSMASNISPRRSSSSFHPSTANSTSRFTTRWVRRALNTPAPPPPRLPTAPYPRSNHSSPPPDNLAIVPYVPPLTHVDAQLEDVIAMLESSLCSSPVRSVTAGPLVPMEVSENAVTSSVASPLPDVRNALVCVQDSSISVAALVPVLACAVNDLETVSTEVVPATVSLVSVMPTRAAAVAEVAHATVESVVVPSSVSEDLSPAVNLSSMPPRLRCKNKGFLAWYGACPSSRQPSSVPPQEPRDIFVCSEQLSANPILSPPQDPDSTRSPPPTLSGPSAAEQIRRALAGLSPEGSIHSASLSPGRVPVITSNDTTAAQDFAFGEPDPVNISGDSDDDILDIFIPFVDMRVTAHYATAYVTPPCECPGRVIRKAMQDAHPRFQFTLISACRGAMTLRFIHSQDRDFAVDHQENLTAEGHLVRLERPEDSAARFIQHNTMLSELDCIDFPPEMLFPNKIRNAFENYGELMEVDDQCLYGDEQSSLRLVVLHYPGKRMSPRFRLRYNLGIVCTVYVRVLRTWELAMNVDEDGNYIKHYEQFLFPHQLDPPRSGPTVGPEAELDNLNQAPSNQISNNQGLQNRGRLLAILPAASTVFIEEISDTPEIFVPPSIHSAPSSIHDCLQDLVPSDTENEHELSARKRRRQKKRTIDSDVKRRYSERLAAKEGHLYISMESKAARAKKLKEQLAKCSSKLNDAVHKHNLLDLNFKTTPKALEDLAIACSLNDHDIAQLRKLFFSSLVSSLPSLCSLSVYLLHETKLQNIPPEKAKTILPPNLANYDFVGSYGSTAGLPTAWNADFTKTSFISRHFSLTISFTSTFTDLSFSLTNIYGPAELDQKQDFLHELLEIDPLIQGPRLLIGDFNLTRSPSDKNSQNFSTGLAAAFNQTINSLSLFELPLPDRLYTWSNKREVPVLARLDRAFFNNAXGTTPSQTPPXSSCTRTTSDHVPLLLTASTSIPKSKTFRFENHLLLDRDFLPSVMHRWPQQLNMNDPAACLAAKLKQTRSIIKVWMKEHRKRSSLNEDCKFTIDLLDYIEELRPLNDGERCLRNLVQEKLFQAIQSKVAYWKQRGKVKRLKIGIDNSAFFKAHASKNYRNSRIRSIKHNGSEIADHNGKALLLHSFFQHFLGSDCQPLWDFDLSTLYSEDERDYNLLASQGLQFSTEEIITSIKGMNSNSAPGPDGFGPSFYNSAWNSIKEDIIKLAASFCSNSVQLERINRAHIVLIPKPGKENTVDGYRPISLQNCSVKILSKVLANRLQKVLTRMIHLDQTGFLKGRCISENLIYATELIQACHARKCKTLIIKLDFAKAFDSVLWTSLFQILAVRGFPNNWISWIKSLLQTSKSAVLLNGIPGKWINCKKGLRQGDPLSPYLFILVADVLQRLLEKNFQIRHPIYQDRPCATIQYADDTLVICRAEEDDVLALRSTLLQFSKATGLQINFAKSTMISLHIDRSKESSLSELLQCKLESLPMSYLGLPLSLHKLTNNDLQPIVVKVDSFLTGWEASLLSQAERLILVNAVLSSVPVYAMSAFKLPPKVIEAIDKRRRAFFWTGDDTCSGAKCLVAWDEVCTAKEKGGLGIKSLKTQNEALLLKRLFNLFSDNSSWTNWIWKEFDGRSLLKSLPLGQHWSVFQKLLPELFKITTVHIGDGSRTSFWHDRWTGNMTLAAQFESLFSHSTDDLATVEQILSFGIYDILTPRLSSAAQNDLQELQTILQNFSLTNESDTRLNNRLGNLTTKTIYDLRSPPGFPSPNWKFIWDCRMPLKIKLFAWLLVRDRLSTKLNLLKKKIVQTATCDICSTTDETADHLSFNCPFAISFWQALHIQPIINETKYLAQLKAPATIPTRHFQSFFMLCSWVLWNHRHDVVFRGRPPSIASCLQRGISESSLWAETFTPDDRFVIDVWKDISSSINAMTIQVGNLSPPALKNRKKLHKLIDPSLGAKKHERAQIMQCLRVAMLCVRDRAEHRPTMSEVVTMLPSIKTPKDRKAVVNVRF

SEQ ID NO: 26000 - protein, 694 aa, Oryza sativa
  unsure (1)..(694): unsure at all Xaa locations
  Clone ID: TF_OsC91_2199.pep
MTGFNLPENFKENPEAFFRSIKPRVVAPQKTLPTKKPAILAPPTFKTMADKTLREFAAPSVGNVAIGPQLNLGDVDFDLKSSLITMAXASLFCGKPNEDANAYLQQFLEICSTYTMKGVSPDVVRLRLFPFSLLGKAKXWFYANRATINTWDKCSIAFLSKFFPIGKTNPLHGRISSFQQTRDKSIPETWERLQKYTPMSCDHLDTLAGVAFFSKTVQGAVDLIEKMASNMSWSKERLQTRQRGIHTIKEIEMLAAKLDLLMKRLDDHDKRPQGTIKALDSHVTCEICGSTGHSRNDCPETREEAMYMGNNNNGYRPQGETQLAQLALLVPANEYGRIPRQPDSSKTDSLVKFMQNFLEKETTMPRNRYWKTPVKSSIPAKKLEQPAQRKPSSTPKSKRGSGSSSSHHDESSAHSSADVSMEDADAPRHLLNDADLDLVDDREMQAYYLLSDRKYAHTREYSPELLKKIGMDVDFRAIWKAVGWQRFAVIDXPGSHLLTLQFLCTLKEIEDGISFRFFHKEYTPTWKGLSTLLGFHDSCKIDLLKGISGFEKNRFWEDISGAPICKKPRTNDIHNPTLMLMHKWIAMTLFTRGDLRPIRGXELIIMFAMVRKIKIAPVKCMIRQCYHELTIPLXTIVESRAGGAYRETHNMTRNEXEGSSSSTPVQMYEAGWEPTGDVPGWTXQAPCHSIGVSS

SEQ ID NO: 26001 - protein, 2420 aa, Oryza sativa
  Clone ID: TF_OsC280853_1.pep
MMPLRDAARAACASHIFLQSWRCRPNLIFTGETLGLIINGTGKDDAKRDFINIVQRILLNHSGIGVKTLKLELLHFSDLDLGCLEAWLQIAVAPGIEELTLMFPCVRYKFPCSLLFERGGNSVRYLHLMVCTFRPTIGLGCLIKLTQLHLSFVWITGDELELLSKCVALEWLKLSYCPEIICLKVPCMLRQLGSLEVAECRYLKVIEICAPNLSNFYLTGFLVRTSFENPLLVKKLRIMCLRQGNFVSYARTKLPSLVPNVETLTVASNEATGQAIPTDRRPLRPRRPPPCAGSHPGADAHHPRLSCPIALPLEPARPPLDVAGQMRLASLPPSWPALQPAHPTLLRHHKPVIPSQPLSGPPLSPRSSTPRRNPQFWLESPPPPPSRSAVPFSADDVSHVSESPDPRSSPTPAMPRSFADAVRLDFNPAKGDGLPVFKSPHGQPPPRPKLKSAITIPAWSTFQRRAYRATPGEEMGVRRIHGTARPGRFNGEWKEVKPRHWWRRSPHSPESQRPASRRQDAHSRRSLAPAASASLRLFRERTAGKCFNCLARDHRAARCRDPVRCFRCFRSGHKANSCSRREPRPRQPRQSPQKALRRQASTPPPPQNTSHRQASTPSPSLPRATRPRQPRQSPQNTSCRQASTPPLQLPLPPKPSCNTRMALLGDPATRPDEDHCFVPTPFATEAERKEWESSAVVSWAMRAPASTTAQDVEAAFREEFRLRRGEVTVTRHHPEAFLIKFEHSSHCYEAMRKGFVKRNGIELHFIKWRSLSAALGIALMFRRLIARTCGLEEIETNLIHPVDTRTVDVWAWTGNPSSIPKRMWLTFTGSTRGAKPEQILVSDRPPAHWQHGAKFCVYIHLEEIHDYTTVAVDLDGNEACAPSKRRLPEWHLGVADGDPVPTRAFENFPHHPPPPRTRQGREPERIDDRDDRRRRAKDDRDRSRPRRSYNDDHPDHDRDQAWRRRDDDDDRDGRGGRGREAWRGRESRKVSGLDGQRVRERSPRRRDWAEDDRRGDRRHHVQAAVALPATIPPLKLAPKQAPRENLRETGERLVNRVNNFAAAVDDASQPGGEEAWSDRRPSRVHDVPIRQVFDRLKHCLFPAGIHSTPSHSGQVMPHDERASIGARGNTAAATAVASKTVTPPQLITAAPTTEQDEHQDAGNKNTLQVLESLFSTPPRAVLPRPTSPALTTTQATPAPAPAPPGGHGMERRRSARLAAKPPMPTMQRCTRVLLKRLGMLHDDKTLDEVLSDYIAMFNGPLPQHVIAALTSIFDIDADAIMEANHVDNTLLEVVGEGVADLVEECTALNELIAETSCNLVCIQETKLRAVDDQLARFLGAYRLDSYAFKPSRGTRGGILLLWNSTAISVHSTRIGRYSLTANITVLRCGTSFMLTTVYGPTRHREKDSFLRHIRSLKPSPGNKWLILGDFNLVYRARDKNNNNLNLGRMNRFRAALNRCELKEIHLQNRKFTWSNERRRPTLMRLDRFFCNEEWDLSFDRHILHALSTGPSDHCPLLLTDPSCPRKPRPFKFENFWIKLPGFKEVVEQAWGKPSNHTEPMHRLAYKLRDMAKELKRWARTTCSQTKLKYHMALDVILRLDVAQEQRTLSPEEGNLRAALKRRVLGLAVIERARKRQASRITNIRAGDANTKFFHLKVNSTRRKNHIHRLRKQNGWAVTHEEKSQAIFDHFSLFMGRPQERQLDLNWQSLGLETTDLNSLNEPFTVDEIKRAICHMPTDKAPGPDGFTGCFFKACWETIKNDVTTAFNAIYNHRCNHLNLLNSASVVLIPKKDGAEQVSDFRPISLIHGFAKIFSKLLALRLQPLMHKLVSTSQSAFIRGRSIHDNFLYVRTLFATSSSKILLNGIPGTKIIHGQGLRQGDPLSPLLFILAIDPLQRLLSKATELKLLSKLRGKSVTLCTSLYADDAAVFIKPGKSEVQNFTAILHRFGLATGLRANIEKTQVVAIRCENVDLDEVLQNTPATRASLPMKYLGLPLTTGRLRKADLQLLFDKSAGKMAAWRGRNLGLAGRTTLVKSVLSSQPVYLLIALKVSKESMETLDKQRKSFLWAGSEKLTRGKCKVNWKRTCSPTVYGGLGILNLENFARALRIRWLWQEWKAPERTWIGRDNPCDNTEKTLFAAATTITVGDGETASFWNSAWMQGRRPRDVMPLVYAISKRKNRSLKEGVTDNVWVQDLNFSSPDAITVELLDQIVTLWSIIQSVQLSPDVTDEITWKFTNHGEYTTSSAYKMQFLGSINANYDAIIWKPWAPNKCKIFAWLAIQNRVWTAGRLTTRGWPNNTFCPLCRHTRETVFHLLVDCRYSRRIWENLACWTSQEHIKPGNWAQPASLQDWWTAIATHPGTPRKGNRTLLLLVTWEIWKERNQRIFQRNELSILSLCTKIKEEAKTWTLAGAKRLSEIIP

SEQ ID NO: 26002 - protein, 1718 aa, Oryza sativa; identical to SEQ ID NO: 19339
  Clone ID: TF_OsC359_7853.pep

SEQ ID NO: 26003 - protein, 1378 aa, Oryza sativa
  unsure (1)..(1378): unsure at all Xaa locations
  Clone ID: TF_OsC1713_4081.pep
MRAQVSTRMPSFTSSRSNMRHSPCCLMSVNDMYGRLNVIVDDLKGLGANYTDLEVAQKMLRALPEKYETLVTMLINSDMSRMTPASLLGKINTNDMYKLKKKEMEETSPSKKCIARQAEVEDKGNGKVNEANENLEEEIALLARRFNDLLGRRKERGRGSNSNRRRNRRPNKTLSNLRCFECGEKGHFALKCPSKDDDGDKSSKKKSGGYKLMKKLKNSASSGSEEEDGDDTSSKKKKMAVVAIKEAPSLFAPLCLMAKGSSKVTSLSDSESDDDCDDVSYDELVSMFEELYAYSEKEIVKFKALKKDHASLEVLYEELKTSHERLTISHEKLKEAQDNLISTTQHGALIDVGISCDLLGDSATCHIAHVASSSISTSCDDLVDMSSSSSTSCVSICDASLVVENNELKEQVAKLNKSLERCFKDKNTLDKILSEQRCILNKEGLGFIPKKGKKPSHCATRFVKSNGRLMMVALLLDMWVPLYSVVNYRTGGSHWVFDSGCTQHMTGDRAMFTTFEVGGNKQEKVTFGDNSKGKVIGLGKIAISNDLSIDNVSLVKSLNFNLLSVARICDLGLSCAFLPQEVIVSSLLDKSCVFKGFRYGNLYLVDFNSSEANLKTCLVAKTSLGWLWHRRLAHVGMNQLSKLSKRDLVVDLKDVKFEKDKLCSACQAGKQVACSHPTQSIMSTSRPLELLHMDLFGPTTYKSIGGNSHCLVIVDDYSRYTWVFFLHDKSIVAELFKKFAKRAQNEFSCTLVKIRSDNGSEFKNTNIEDYCDDLGYASNSKAYQVYNKNKGIVEETADVQFDETNGSQEGHENLDDVGDEGLMRAMKNMSIGDVKPIEVEDKPSTSTQDKSSTSATPSQAQVEVEEEKAQDPPIPPRIHTALSKDHPIDQVLGDISKGVQTRSRVASICEHYSFVSCLEPKHVDEALCDLDWMNAMHEELNNFARNKVWTLVERPRDHNVIGTKWVFRNKQDENGLVVRNKARLVAQGFTQVEGLDFGETFAPVARLKAILILLAFASCFDIKLFQMDVKSAFLNDFKIGKVDTTLFTKIIGDDFFVCQIYVDDIIFGSTNEVFCKEFGDMMSREFDMSMIGELSFFLGLQIKQLQDGTFVSQTKYIKDLLKRFGLEDAKPIKTHMATNGHLDLDEGGKPVDLKLYRSMIVSLLYLTASRPDIMFSVCMCARFQAAPKECHLVAVKRILRYLKHSSTIGLWYPKGAKFKLVGYSDSDYAGCKVDRKSTSCSFQMLGRSLVSWSSKKQNSVALSTAEAEYVSAGSCCAQLLWMKQILLDYGISFTKTPLLCDNDSAIKIANNPVQHSRSKHIDXIRHHFLRDHVAKCDIVISHIRTKDQLADIFTKPLDETRFCKLRNELIVIDFSNVA

SEQ ID NO: 26004 - protein, 1430 aa, Oryza sativa; identical to SEQ ID NO: 19343
  Clone ID: TF_OsC1713_4390.pep

SEQ ID NO: 26005 - protein, 1632 aa, Oryza sativa
  Clone ID: TF_OsC154683_1.pep
MGEDRGLTTDEDIEVLTTIERWQQCRVVDNKLMAMVDGLMEDGAGSGEDDRGGWHNSAAPFAARACDDSGNIGAHSIGLQHNRVYSMSRGRNLGRIIVSSNSSKTWNGGLQREKEGVLDLLIEEDRELSGQPEDAQGLWDAVDTGDVPYQEDCQALSAILRAVPAEMVRPLAEKDSAKDAWDALKSMRVGADRVKESRAQKLRQTFESMRFKNGEHLEDFSLRLQSLEMICLKRRLFENCFASFPGGAVPHDAGGGRKSPAQRRLAEEKTWMGATLKILEDNKNNARQEGKACRFTTHVDIMAECRRDEMANLSIFVLCPRPTSPDNILAKADKAAVINSFHLSMTDEVLFSEKEAPAHSNKEAGQNSAGGRASSSRQPHRSRRERDGNGSDGKSGSSQAANRNVSKDKCRYCGKLGHWAKDCCKAKRDREKLAQANLLITEPAQAADEGEPTLLMAQVCELAPATDPVITDGEVTLKEERAHVSLQDEGKPVDLDWILDTGASNHMTGSRDAFSELHTTVRGTVKFGDASRVRIEGRGTVLFACKNGDHCALTGVYYIPKLRSNMVSLGQLDEARCKTVIEDGVLTLRDSQRRLLCRVRRGTGCLYVLHVELAQPVSLLAKGNDQAWVWHARYGHLNFDALRSLASRGMARDIPTLERVTQVCDGCLIGKQRRAPFPTAALHRATGRLDLVHGDICGPITPSTHGGVEVETGCKLRVLRTDRGGEFTSVEFGLYCANEGVARQLMAPYSPQQNGVVERRNQTVVAMARCMMKAKNMPGEFWGEAVTTAVYILNQAPTKSVRDKTPFEAWHGRTPAVHYFRTFGCIVYVKEVKPHINKLDDRSKAMVFLGYEPGSKAYRIYDPVAKRIVVSHDAVFDKAASWPWASPGEEDGVASSQETFTVRYEVAAVEVPSRHSDSMSSPAHSGPPAPSISASPGVPAVEFVSPPAETPDVDDDNVGPRRFRTVANILDTTSPIELDSDELHLAAAEEPSNHTEAAQDTLWQRAMQEELKSIVENNTWTLADLPAGKRPIGLKWVFKLKKDETGVIVKHKARLVAKGYVQQQGIDFDEVFAPVARMESVRLLLAIAAHLGWFVHHMDVKSAFLNGELEEEVYVAQPPGFVDDKHPHQVLRLNRALYGLRQAPRAWNAKLDVSLHELGFTRGITEHAVYTRGTGNARLIVGVYVDDLIITGAHSETIQSFKGEMHSLFRMSDLGLLSYYLGIEVHQGNDGITINQSTYAQKLLKMGGLAGCNSACVPMEPRLKLTKNSDRPSVDSTFYRSLVGSLRYLVHSRPDIAFAVGYFSRFMESPRDDHLTAVKHILRYVAGTVNYGCKFAHSGEEGIHLLGFSDSDLGGDVDDRKSTSGALFFLGSSPVAWLSQSKLPLSSSITTSSSKLYTPSCSSSTASASRGPQAAVDRCTPRADLRPHAPSPRQFRSSDASALRPPSPLFARMRHCPTPPVAAPPASRASLLRPPSPRFALRPRWTVSFHRRGVKEERTILKGITDKVRPWEVLAVLGPSGRGKSTLVSILGGRLAGRHAGMVLAGGRAPCRAVQRRAGFVAQDDVLHPHLTVCETLLFCAMLRLPTSAPATAEAATAEAVISELGLASCADTIVGNAGICAYLSAKYMVIL

SEQ ID NO: 26006 - protein, 1616 aa, Oryza sativa; identical to SEQ ID NO: 19347
  Clone ID: TF_OsC91_2278.pep

SEQ ID NO: 26007 - protein, 733 aa, Oryza sativa
  unsure (1)..(733): unsure at all Xaa locations
  Clone ID: TF_OsC1713_4158.pep
PAIIMIIILFFGIKICXFMTKFPTFQKFDRSFLVVGFVALLKPHAFDGPNYKRWKACALLWLMAMQCFFASRGKMSEQPVSPEKEAKFEVTDCLFRVALINVLADNIVDMYMHMPSGKDMWDALEAKFGVSDAGSELYVMEQFYDYNMVDDXSVVEQAHEIQMLAKELENNKCVLSDKLVAGGIIAKLPHSWSDFATSLKHKRQEFSVTDFIGSLGVGEKARAKDNRGXKVEGGSSANLVQKKNPHASHNNKKVKPDVKPKTTINSKKKGKEKVKGDYFVCGKLGHWAKDCPDRKDKNSANMVVSNGRGTMGYGXFLPTILSIFHSPNWRVDNGANSHLCADIFLFSSYQIAGGSSLLMGNRSLAAIHGVGMVVLKFTSGKTLQLKNVQHVPSIKRNLVSGSXSCRDGFILVFKSNRCVVSKYGTFIGXGYDSGGLFRFSLDDRCNIVVNHVSNDDESNVWQXPLCHVNFGCMTRLANMSLISKFTLAKGSKCHTCVQSKQPRKPHKXSEARNLAPLELVHSDMCEMNVVLTKGGKKYFMTLIDDCTRFCXYLLKTNDEALHYFMICKAEVXNQLERKIKQLGSDQGGEYFSTEFTSFCEEFGIFHERMPLYSPQSNGVAERKNRTLTELVNAMLDTAGLSKEWWGEAILTACHVLNRIXLKKEVTSFEEWEKKKLNLSYLRTXGCLAKVNVPIVKKRKLRLKTVDCVFLGYVIHGVGYRFLIANSRVSQQPA

SEQ ID NO: 26008 - protein, 1524 aa, Oryza sativa; identical to SEQ ID NO: 19354
  unsure (1)..(1524): unsure at all Xaa locations
  Clone ID: TF_OsC359_6842.pep

SEQ ID NO: 26009 - protein, 383 aa, Oryza sativa
  unsure (1)..(383): unsure at all Xaa locations
  Clone ID: TF_OsC359_7631.pep
MSWHRAGVLLLGGSILPACPGGSGRRWGWMFNREKGKNVSGYASSNSSFQLNPPLASRELTRAHPWSIPSMRLSSQLPLVGSQDQNKYVFDRAFATQANELPMPEEHVPFCHDCREQGHYALNCPWVYAKEAPSFGLAGQTSLSQPPRTKSSLQPSVQSREPNEENPLNPGNCFLSSLSYHVGSHTKQAKGKKSKNQKRKAPMRTEEEVRKMTITSTEWPPAGITIPRRQRGNTFRGARQLTQHLLSHGGRVYDSEGSDQVSSDYEDESPRHLGEEEMESKACNRCGEIGHIASMCLTLCPHCGEDHPPGECPTRKVTCFLCEXTNHSLHRQPQQRIVIDGRSCVSPRPTPGRAKGNQSQEGDTKQKTVLCFEXQSEGSFSCE

SEQ ID NO: 26010 - protein, 1306 aa, Oryza sativa
  unsure (1)..(1306): unsure at all Xaa locations
  Clone ID: TF_OsC1528_1733.pep
MAGFADALRPDKFTGVHFKRWQIRVTLWLTAMKCFWVSTDKPMGVLNADQQKEFDEATTLFVGCILSVLGDRLVEVYMHMTDAKELXDALNTKFGATDASNDLYIMEQFHDYKMADNRSVVEQAHEIQTTAKELELLKCVLPDKFVAGCTIAKLTPSWRGFGTALKHKRQEYSVEGLIASLDVEEKAREKDAASKGDGGQSTANVVHKAQNKSKGKYKAQQTTNFKKKNNNNNPNQDERTCFVCGQPGYLARKCPQRKGMKAPAGQTSKSANVTIGNTGDGSGYGNLPTVFSVNQSTNWWVDTGANAHVCADISLFSSXVARGSTVLMGNRSHAFVHGVGTVDLKFTSGKIVQLKNVQHVPSIDRNLVSGSRLTRDRFKLVFESXKVVVSKHGYFIGKGYECGGLFCFSLSDFCNKSMNHICGSVDDEANVWHSRLCHINFGLMSRLSSMCLIPKFSIVKGSKCHSCVQSKQPRKPHKAAEERNLAPLELLHSDLCEMNRVLTKGEKRYFMTLIDDATRFCYVYLLKTKDEALDYFKIYKAEVENQLDRKXKRLRSDRDVEFFXNEFDLFCEEHDIIHERTPPYSPESNGFAESENRTLTDLVNAMLDTAGLPKAWWGEALLTSNHVLNRVPNRNKDKTPYKIWIGRKPSLSYLRTWGCLAKVNASITKKRKLGPKTVDCVFLGYAHHSIAYRFLIVKSEVPDMHLGTIMESRYATFFESFFPMKDTHSSSSQPSEIIPSSITLPEQTEHTHEHVTEEDDSEAPRRSKRQRTAKSFGDDFTVYLVDDTPKSILEAXASPDADYWKXAVRSEMDSIIANGTWEVTERPYGCKPMGCKWVFKKKLRPDGTIEKYKARLVAKGYTQKEGEDFFDTYSPVARLTTVRMLLSLAASHGLLVHQMDVKTAFLNGELDEEIYMDQPDGFVVEGQEGKVCKLLKSLYGLTQAPKQWHEKFDKTLTSAGFAVNEADKCVYYRHGGGEGVILXLYVDDILIFGTNLEVINEVKSFLSQNFDIKDLGVADVILNIKLIRGENGITLLQSHYVEKIFNRFGYIDSKPSPTPYDPSLLLRKNKRIARNQLEYSQIIGSLMYLASATRPDISFAVSKLSQFTSNPGDDHWRAVERVMRYLKGTMELGLHYSGYPAVLEGYSDSNWISDVDEIKATSGYVFTLGGGAVSWRSCKQTILTRSTMEAELTALDTATVEAEWLCDLLMDLPIVEKPTCEKTIEVCQEIEKLRSYNVGLHPNNXKPSRSLHEGTITKCDRXCIEGDGFETHSILERTHLCKLDCWSQSMKILSESSRKLTKDLGV

SEQ ID NO: 26011 - protein, 1003 aa, Oryza sativa
  unsure (1)..(1003): unsure at all Xaa locations
  Clone ID: TF_OsC783_2.pep
CRRNPSSSSSSSRQAAAISMAPANPRHRLIAPIHAAAAAGGGGGGAGATSPSGLPSVSRQSVKMHAAXVAISHDLPIELTCFLKQAFAAASIKFPSALFGMFCVFSVLVVLDAFAPALAKGFMDFFEPATLFIQRWLPLFYVPSLVVLPLAVRDVPAASGLKIFLIIFGGWFASLMVAGYTALTVRKIVQTQLIPAEPMSKPSPFATLEFWAWGAVFVASFAVAYVNPTALGTTARTCLPFLLASTVLGYMVGSGIPSGVKKVLHPIICCALSADLAAIAYGYLSRSGVDAVLGDYLTKAPSNPGAGDVLMGFLGSVIISFAFSMFKQRKLVKRHAAEIFTSIAIASTFSLYSTAILGRVIGLEPSLTISILPRCITVALALSIVSFFEGVNSSLTAAVVVLTGLIGANFVQAAMDKLGLNDPIARGIGTASSAHGLGTAALSAKEPEALPFCAIAYGLTGIFENMNTPRRENAKAIFTKSKTNYEVQGKSQARTARTSAGTGGRQEAAPRQQEAFGWEEASAAKVDSDEDDAAEECDDGAVVLGGVEREVAGEEVLQVLQPPDAIGAQHLDHAVHQLDEDILYYYPLAKTQKSSANLSVPKNCLSPGNLNLLGLGQPHLGRIVIILVEMRGILEYKEYNTVNRLFQFACKAEREVQGRNKHRSSFAGATSTRQSTPRQFTTAVRPPTSTPSHAQETSKNASVQTPAKSATSVASTGRTRDITCHRCHGIGHIARDYPNQRALFVNDDGEYTSTSDCDDEYALVATDHVGGQDNDDIEEVHLHPESLDQYPSLIVKLALSAKEKCEEQNQRHNLFQSKVLVKGHTVKVIIDSGSCNNLASEEMVKKLGLTTHPHPHPYHIQWFNTCGKMKEYEGAFHDEIPPRMTPGRQSEHDQEDGIESRTTPIQEGEDDEDITSSETHITSHVPMIIPSPSPVRPPETALTSNGPSAFMPTPIWVILDLMERLSRYLSNASGLMSKFISSQRESSKQDSDVAETELGPWAL

SEQ ID NO: 26012 - protein, 1395 aa, Oryza sativa; identical to SEQ ID NO: 19363
  Clone ID: TF_OsC1713_3518.pep

SEQ ID NO: 26013 - protein, 972 aa, Oryza sativa
  unsure (1)..(972): unsure at all Xaa locations
  Clone ID: TF_OsC1713_3822.pep
MPVPVYAAAAMLPPSPCPSLAAAVLVYKGWLQGADRACRGAPPAMGCPAISSRNHLIPGRYHPIPRKYHAIHGRNRLIPDKYHMIPRENHAIRGRNRLIHDRFHMIPREYHAIRGRNRMIPDKYHLKRGYSLMGCIKDIPTLKEDNYAQWKRKLNLAFILGEVDWVLTTPCPIEPAALVRGENKSDADWKKRQRDNAPLVMSYDIEQKTWSLANKKCLAVVKNTIEPTILGSILECDAVSEYLERTKSQFTGSSKTYATQLIKQLVTERYHGGGVRDHILRMSNMASKLKPMDLGITYDFLVHLVMASFPKQFDNFIVNYNISPEKWNFEKLIANCVQEEERIKESNGGSINYVKDKKKNYKSPTSKAKQSQHLPQQQQFAVEKDQCLHCKKTGHYKKDCPDFLKMIMARKGENIITFVNESHYVGYSRSTWWIDSGATIHACNCLKAFRSTRTTQRRESSIRVANGVEEKVEAVGDLPLEIANGFTLLLRDVFYVPSLQRNLISVSKLDFDGYDCRFGSGKCELCVDGYDSFITFTDDYSRYGYIYTIKERSEALDKFKIFKAEDENQHDIKIKVVRSDRGGEYYGRHTPYGQVPGPFARFLLENGIVAQYSTPGEPQQNGVAERRNRTLMYMVRSMMSYSTLPLGLWMEALKTAIHILNRVPSKSVTKTPYELWIGRVPSLAHLRVWGSPVQTPVVTSPVATINENEEPVIQDSIEMVATPEEELQQPQTDNVPVQETQQEPQDDPTSYEEAMRSARLSEWLEAMKDEMKSMKLNDVWDLEEIPKGAKIVGXDVKTTFLNGDLEEKVYMAQPKGFVMKGNENMGCRXKRSIYGLKQASRQWYLKFDGTIKKFGFQENVEDNCIYSKFKNGRFIFLILYVDDILLASSDVSLLQETKKFLSSNFDMKDLGEASYVLGIEIHRDKTKYALGLSQKTYXKVLKKFNMNRCSATPAPIVKGEKYGASQCPRNQY

SEQ ID NO: 26014 - protein, 1390 aa, Oryza sativa; identical to SEQ ID NO: 19367
  Clone ID: TF_OsC1713_4196.pep

SEQ ID NO: 26015 - protein, 1148 aa, Oryza sativa
  unsure (1)..(1148): unsure at all Xaa locations
  Clone ID: TF_OsC1713_4332.pep
MEKKLDLAFILGEVDWVLTTPCPIEPAELVRGENESDADWQKRQRDNAPLVMSYDIEQKKWSLANKKCLAVVKNTIEPTILGSIPECDVVSEYRERIKSQFTGSSKTYATQLIKQLVTERYHGGGVRDHILRMSNMASKLKPMDLGITDDFLVHLVMASLPKQFDNFIVNYNISPEKWNFEKLIANCVQEEERIKESNGGSINYVKDKKKNHKSPTSKGKQSQHLPQQQQFAVEKDQCLHCKKTGHYKKDCPDFLKMIMAKKGENIITFVNESHYVGYSRSTWWIDSGATIHACNCLKAFRSTRTTQGRESSIRVANGFEEKVEAVGDLPLELANGFTLLLRDVFYVPSLQRNLISVSKLDFDGYDCRFGSGKCELWHNNACIGLAVLRDELYLLSLSENVNVVSSLTKENKKRKRTSDVSSKLWHCRLGHISRGRIERLVKNEILSPLEFSDLEQCIECIKGKFVKSIKKGAKRSAGILEIIHTDICGPFPMKSMDGYDSFITFTDDYSRYGYIYPIKERSEALDKFKIFKAEVENQHDIKIKVVRSDRGGEYYGRHTPYGQVPGPFARFLLENGIVAQYSTPGEPQQNGVAERRNRTLMXWTGRVPSLTHLXYTKFVETRHAVFLEDGMIRGSSVVREIDLEERRVSVPAPSTQEPFFSLPADVVPAMPVIEVPAPVVTPPVATMNESEEPVIQDSTEMVATPEEELQQPQIDNVPVQETHQEPQVQDVPNVQAPRRSERVRRSAIRDDYKVYNIEESHMEDDPTSYEEAMRSARSSEWLEAMKDEMKSMKLNDVWDLEEIPKGAKTVGCKWVYKTKYDSRGNIEKFKARLVAKGFTQREGIDYNETFSPVSCKDSFRIIMALVAHYDLELHQMDVKMAFLNGDLEEKETKKFLSSNFDMKDLGEASYVLGIEIHRDRTKYALGLSQKTYIEKVLKKFNMYRCSATPAPIMKGEKYGASQCPRNKYELNEMKTKPYASAVGSLQRSESLQIVGYSDSDFAKDNTKSTSGYVFTLAGGAISWKSSKQTITGGSTMYAEFIACYEATGQVNWLKKFIPGLKVVDSIEKPLKLYCDNEPAVMYAHNNQSSGAAKHIDIKYYVVKDKVRDQTISLEHIKTERMLADPLTKGLPPNVFKEHVAGMGLREAL

SEQ ID NO: 26016 - protein, 1407 aa, Oryza sativa; identical to SEQ ID NO: 19379
  Clone ID: TF_OsC1713_4463.pep

SEQ ID NO: 26017 - protein, 1391 aa, Oryza sativa
  Clone ID: TF_OsC1713_4855.pep
MVAFPSLTPLCSLLGCRRRPFAPRHHQSSPPFSSFAPAAVFAGGYSLMGCIKDIPTLKGDNYAEWKRKLDLAFILGEVDWVLTTPCPIEPAELVRGENESDADWQKRQRDNAPLVMSYDIEQKKWSLANKKCLAVVKNTIEPTILGSIPECDAVSEYLERIKSQFTGSSKTYATQLIKQLVTERYHGGGVRDHILRMSNMASKLKPMDLGITDDFLVHLVMASLPKQFDNFIVNYNISPEKWNFEKLIANCVQEEERIKESNGGSINYVKDKKKNHKSPTSKGKQSQHLPQQQQFAVEKDQCLHCKKTGHYKKDCPDFLKMIMAKKGENIITFVNESHYVGYSRSTWWIDSGATIHACNCLKAFRSTRTTQGRESSIRVANGVEEKVEAVGDLPLELANGFTLLLRDVFYVPSLQRNLISVSKLDFDGYDCRFGSGKCELWHNNACIGLAVLRDELYLLSLSENVNVVSSLTKENKKRKRTSNVSSKLWHCRLGHISRGRIERLVKNEILSPLEFSDLEQCIECIKGKFVKSIKKGAKRSAGILEIIHTDICGPFPVKSMDGYDSFITFTDDYSRYGYIYPIKERSEALDKFKIFKAEVENQHDIKIKVNGVAERRNRTLMDMVRSMMSYSTLPLGLWMEALKTAIHILNRVPSKSVPKTPYELWTGRVPSLTHLRVWGSPTEAKVFNPNIGKLDPKTVSCHFIGYPERSKGYRFYCPNSYTKFVETRHAVFLEDEMIRGSSVVREIDLEERRVSVPAPSTQEPFFSLPADVVPAMPVIEVPAPVVTPPVATMNESEEPVIQDSTEMVATPEEELQQPQIDNVPVQETHQEPQVQDVANVQAPRRSERVRRSAIRDDYKVYNIEESHMEDDPTSYEEAMRSARSSEWLEAMKDEMKSMKLNDVWDLEEIPKGAKTVGCKWVYKTKYDSRGNIEKFKARLVAKGFTQREGIDYNETFSPVSCKDSFRIIMALVAHYDLELHQMDVKTAFLNGDLEEKVYMAQPKGFFMKGNENMGCRLKRSIYGLKQASRQWYLKFDGTIKKFGFQENVEDNCIYSKFKNGRFIFLILYVDDILLASSDVSLLQETKKFLSTNFDMKDLGEASYVLGIEIHRDRTKYALGLSQKTYIEKVLKKFNMYRCSATPAPIMKGEKYGASQCPINQYELNEMKTKPYVSAVGSLQYAQVCTRPDLAFVTGLLGRFQSNPGLEHWKLVKKVLRYLQGTKGLMLTYRRSESLQIVGYSDSDFAKDNTKSTSGYVFTLAGGAISWKSSKQTITAGSTMYAEFIACYEATGQVNWLKKFIPGLKVVDSIEKPLKLYCDNEPAVMYAHNNQSSGAAKHIDIKYYVVKDKVRDQTISLEHIKTERMLADPLTKGLPPNVFKEHVAGMGLREAL

SEQ ID NO: 26018 - protein, 1340 aa, Oryza sativa
  unsure (1)..(1340): unsure at all Xaa locations
  Clone ID: TF_OsC1713_5239.pep
GYSLMGCIKDIPTLKGDNYAEWKRKLDLAFILGEVDWVLTTPCPIEPADLVRGEKCDAVSEYLERIKSQFTGSSKTYATQLIKQLVTERYNGGGVRDHILRMSNMASKLKPMDLGITDDFLVHLVMASLPKQFDNFIVNYNISPEKWNFEKLIANCVQEEERIKESNGGSINYVKDKKKNHKSPTSKGKQSQHLPQQQQFAVEKDQCLHCKKTGHYKKDCPDFLKMIMAKKGENIITFVNESHYVGYSRSTWWIDSGATIHACNCLKAFRSTRTTQRRESTIRVANGVEEKVEAVGDLPLELANGFILLLRDVFYVPSLQRNLISVSKLDFDGYDCRFGSGKCELWHNNACIGLAVLRDELYLLSLSENVNVVFSLTKENKKRKRTPDVSSKLWHCRLGHISRGRIERLVKNEILPPLEFSDLEQCIECIKGKFVKSIKKGAKRSAGILEIIHTDICGPFPVKSVDGYDSFITFTDDYSRYGYIYPIKERLEALDKFKIFKAEVENQHDIKIKVVRSDRGGEYYGRHTPYGQVPGPFARFLLENGIVAQYSTPGEPQQNGVAERRNRTLMDMVRSMMSYSTLPLGLWMEALKTAIHILNRVPSKSVPKTPYELWTGRVPSLTHLRVWGSPTEAKVFNSNIGKLDPKTVSCHFISYPERSKGYRFYYPNSYTKFVETRHAVFLEDEMIRGSSVVREIDLEERRVSVPAPSTQEPFFSLPADVVPAMPVIEVPAPVVTPPVATLNESEEPVIQDSTEMVATPEEELQQPQINNVPVQETHQEPQVQDVPNVQAPRRSERVRRSAIRDDYKVYNIEESHMEDDPTSYEEAMRSARSSEWLESMKDEMKSMKLNDVWDLEEIPKGAKTVGCKWVYKTKYDSRGNIEKFKARLVAKGFTQREGIDYNETFSPVSCKDSFRIIMALVAHYDLELHQMDVKTAFLNGDLEEKVYMAQPKGFVMKGNENMGCRLKRSIYGLKQASRQWYLKFDGTIKKFGFQENVEDNCIYSKFKNGRFIFLILYVDDILLASSDVSLLQETKKFLSSNFDMKDLGEASYVLGIEIHRDRTKYALGLSQKTYIEKVLKKFNMYRCSTTPAPIMKGEKYGASQCPRNQYELNEMKTKPYASAVGSLQYAQVCTRPDLAFVTGLLGRFQSNPGLEHWKLIKKVLHYLQGTKGLMLSYRRSESLQIVGYSDSDFAKDNTKSTSGYVFTLAGGAISWKSSKXTITAGSTMYAEFIACYETTGQVNWLKKFIPGLKVVDSIEKPLKLYCDNEPAVMYAHNNQSSGAAKHIDIKYYIVKDKVRDQTISLEHIKTERMLADPLTKGLPPNVFKEHVAGMGLREAL

SEQ ID NO: 26019 - protein, 1479 aa, Oryza sativa
  Clone ID: TF_OsC1713_5492.pep
MAGAAKASWMVAMSVGAVEALKDQGGLCRWNYALRSIHKAAKANAAGVSQGKKLPASAAAVAERRRAEKAEEGLRTVMYLSCWGPNCGYSLMGCIKDIPTLKGDNYAEWKRKLDLAFILGEVDWVLTTPCPIEPADLVRGENESDADWQKRQRDNAPLVMSYDIEQKKWSLANKKCLAVVKNTIEPTILGSIPECDAVSEYLERIKSQFTGSSKTYATQLIKQLVTERYHGGGVRDHILRMSNMASKLKPMDLGITDDFLVHLVMASLPKQFDNFIVNYNISPEKWNFEKLIANCVQEEERIKESNGGSINYVKDKKKNHKSPTSKGKQSQHLPQQQQFAVEKDQCLHCKKTGHYKKDCPDFLKMIMAKKGENIITFVNESHYVGYSRSTWWIDSGATIHACNCLKAFRSTRTTQRRESTIRVANGVEEKVEAVGDLPLELANGFILLLRDVFYVPSLQRNLISVSKLDFDGYDCRFGSGKCELWHNNACIGLAVLRDELYLLSLSENVNVVSSLTKENKKRKRTPDVSSKLWHCRLGHISRGRIERLVKNEILPPLEFSDLEQCIECIKGKFVKSIKKGAKRSAGILEIIHTDICGPFPVKSVDGYDSFITFTDDYSRYGYIYPIKERSEALDKFKIFKAEVENQHDIKIKVVRSDRGGEYYGRHTPYGQVPGPFARFLLENGIVAQYSTPGEPQQNGVAERRNRTLMDMVRSMMSYSTLPLGLWMEALKTAIHILNRVPSKSVPKTPYELWTGRVPSLTHLRVWGSPAEAKVFNPNIGKLDPKTVSCHFIGYPERSKGYRFYCPNSYTKFVETRHAVFLEDEMIRGSSVVREIDLEERRVSVPAPSTQEPFFSLPADVVPAMPVIEVPAPVVTPPVATMNESEEPVIQDSTEMVATPEEELQQPQIDNVPVQETHQEPQVQDVPNVQAPRRSERVRRSAIRDDYKVYNIEESHMEDDPTSYEEAMRSARSSEWLEAMKDEMKSMKLNDVWDLEEIPKGAKTVGCKWVYKTKYDSRGNIEKFKARLVAKGFTQREGIDYNETFSPVSCKDSFRIIMALVAHYDLELHQMDVKTAFLNGDLEEKVYMAQPKGFVMKGNENMGCRLKRSIYGLKQASRQWYLKFDGTIKKFGFQENVEDNCIYSKFKNGRFIFLILYVDDILLASSDVSLLQETKKFLSSNFDMKDLGEASYVLGIEIHRDRTKYALGLSQKTYIEKVLKKFNMYRCSATPAPIMKGEKYGASQCPRNQYELNEMKTKPYASAVGSLQYAQVCTRPDLAFVTGLLGRFQSNPGLEHWKLVKKVLRYLQGTKGLMLSYRRSESLQIVGYSDSDFAKDNTKSTSGYVFTLAGGAISWKSSKQTITAGSTMYAEFIACYEATGQVNWLKKFIPGLKVVDSIEKPLKLYCDNEPAVMYAHNNQSSGAAKHIDIKYYVVKDKVRDQTISLEHIKTERMLADPLTKGLPPNVFKEHVAGMGLREAL

SEQ ID NO: 26020 - protein, 412 aa, Oryza sativa
  unsure (1)..(412): unsure at all Xaa locations
  Clone ID: TF_OsC1713_5587.pep
MLMLGGAIHYAQLMDLQEWSCQHINDKQIQGGYSLMGCIKDIPTLKGDNYAEWKRKLDLAFILGEVDWVLTTPCPIEPADLVRGENESDADWQKRQRDNAPLVMSYDIEQKKWSLANKKCLAVVKNTIEPTILGSIPECDAVSEYLERIKSQFTGSSKTYATQLIKQLVTERYNGGGVRDHILRMSNMASKLKPMDLGITDDFLVHLVMASLPKQFDNFIVNYNISPEKWNFEKLIANCVQEEERIKESNGGSINYVKDKKKNHKSPTSKGKQSQHLPQQQQFAVEKDQCLHCKKTGHYKKDCPDFLKMIMAKKGXTQRRESTIRVANGVEEKVEAXGDLPXELANGFILLLRDVFYVPSLQRNLISVSKLDFDGYDXRFGSGKCELWHNNACIXLAVLRDELYLXSSFLRM

SEQ ID NO: 26021 - protein, 1118 aa, Oryza sativa
  Clone ID: TF_OsC1713_5318.pep
MEHIKQWLSHQEEEGKNNFEEKKNEAPKLGQESISGNLTDGQLDQEKYEKPNGWYNVDAIGINSPNVVLKINDNIQEGKCCALLNSEGSSTARHGCAHERSEGAGPSEPHLRLRSAPGRRVIRFLGSASARLLSTSALFVVVSSSTMSAPGAAGAVSRVGAPGAGAAAGTAAAVSGDGAPGSRAAANFNINGGSSASQSSGGPFSGKDMWDALEAKFGVSDAGSELYVMEQFYDYKMVDDRSVVEQAHEIQMLAKELENNNCELPDKFVAGGIIAKLPPSWSDFATSLKHKRQEFSVSDLIGSLGVEEKARAKDNRGKKFEGGSSANMVQKKNPHASHNNKKVKPDVKSKATTNFKKKGKGKAKRDYFVCGKSGHRAKECPERKDRKSANMVGRGSSLLMGNGSLAAVHGVGSKCHTCVQSKQPRKPHKASEARNLAPLELVHSDLCEMNGVLTKGGKKYFMTLIDDCTRFLYVYLLKTKDEALHYFKTYKAEVENQLERKIKRLRSDRGGEYFSNEFASFCKEFGIIHERTPPYSPQSNGVAERKNRTLTEMVNAMLDTAGLSKEWWGEAVLTACHILNKIPTKHKEVTPFEESERKKLNLSYLRTWGCLAKSRDATFFENEFPMKHTPSTSSQETVMPHEHFAPIEHNDQMPEGNPEEHNIVDTHKSKQQRVAKSFGDDYIVYLVDDTPRTIEEAYSSPDADYWKEAVRSEMDSIMSNGTWEVIECPYGCKLVGCKWVFKKKLRPDGTIEKYKARLVVKGYTQKEDEDFFDTYSPVARLTTIRVLLALAASHGFLVHQMDVKTAFLNGELLNVIEEVKDFLSKSFEMKDLGEADVILNIKLLRGDEVGITLVQSHYVDKVLSRFGYSDCKPAPTPYDPSVLLRKNPRIARDQLRYSQIIGSLMYLASATRPDISFAVSKLSGFVSNSGDDHWQALERVMRYLKGTMSYGIHYTGYPKVLEGYSDSNWISDANEIKATSRYVFTLGGGAVSWKSCKQTILTRSTMEAELTALDTATVEAEWLLELLMDLPVVGKPVPAILMNCDNQTMIIKVNSSKDNMKSSRHIKRRLKSVRKQKNSGVIALDYVQTARNLADQFTKGLPRNVIDSASMEMGLIPT

SEQ ID NO: 26022 - protein, 128 aa, Oryza sativa
  unsure (1)..(128): unsure at all Xaa locations
  Clone ID: TF_OsC951_16.pep
HQEQAHVTTTEDEPAATTTVGTCDAVVLGGAPRDVHRRAAAVARAADVIEFVEQKVIAALDDATDHDNKRXILDTDASNHMTGSXTNVTGNXRXGDGXKEXXGPPPTILFACKNGERRMLHNAYVGIS

SEQ ID NO: 26023 - protein, 1397 aa, Oryza sativa
  Clone ID: TF_OsC91_2461.pep
MDISRTNEGYTSCGPVVEMSWHRAGVLLLGAQSCLPVPEVPAVGGVGSVLLSMARMGWKLCHVFRPYAVVVTKSRATTNSPRKYSKGHHGSRCKVCPDAFTKIGFLNHMERLDKRISTLTDRVAALETPSNEEVVKLKIPSFSGYYDAEKYLDWEMTVEQKYNAHLVPEQHRVRQASSEFKDFAIMWWAGLSDEGVLPTTWEELKVAMRDRFVPPSYHRDLRKKLMRLEQGDKSVQDYYGELQKGVRRCGIVEGVEDAICRFYSGLREEIHNIVDCKEFNSVNQLFRFAMPAEKELQGRDHQGKSKASTYTPRTTPSAGLPKAVSFRASSQPAGKRPAASGASAAPKPFPPPRPAESGKGSTQVPAKSASYVASTGRIQCHRCQGFGHVQKDCPSQRAYVATEDGYITTSDMEEEEEEEEVEDEDGEIFGRDDTTDYRTIIVQRVLSTQIFFVINNRRARVIIDGGSCNNLWLNDSGRAKVTQVCRVSFSIGSYADSVDCDVVPMQACSLLLGRPWEHDNDATHHGRSNKYTFVHNGKKITLLPLTPAEIVEADKERAASLKLDESENQQVAKSVFPPKKDKLSPSSKVEGIKLKGGVMIATKCEIAEISDDDMCYFLICKQALVSLDDIASSMPPVVTNLLQEYEDVFPAEIPLGLPPMRGIEHQIDLIPGASLPNRAAYRTNPEETKEIQRQVQDLLDRWYVRQSLSPCVVPVILVPKKDGSWRMCVDYRAINNITIRYRHPIPRSDDMLDELCGSIIFTKIDLRSGYHQIRMKLGDEWKTAFKTKFGLYEWLVMPFGLTNAPSTFMRLMNEVLRPFIGRFVVVYFDDILIYSKSFDEHMDHLRAVFNALHDARLFANLENCIFCTERVSFLGYVVTPQGIEVDESKIEAIKSWPVPQTITQLRSFLGLAGFYRRFVKDFSIFAAPLNELTKKGVVFHWGKTQEQSFDTLKDKLTHAPLLQLPNFGKTFELECDASGVGIGGVLMQDGKPVAYFSEKLHGPVLNYSTYDKELYALEAHGGGLIGHFGAKKTKDVLAMHFFWPRMRKDVERTKRGRDSIFVVVDRFSKMAHFIPYHKSDDAVHIADLFFHEIVRLHGMPFTIVSDRDAKFLSHFWRTLWNKLGTKLLFSTTCQPQTDGQTEVVNCTLGTMLRAILKKNLKMWEECLPHVEFAYNRTIHSTTKVSPFQVVYGFNPCASIDILPLPTSERVHNDDKAHAEFILSMHESTKFNIEKMTEKYRIAGSKVEKINDNAYKLELPPEFGVSPTFNISDLKPHLGEEDELESRTTSIQEGEDDADITTSDTHNNPPTVIQGPITRARARQLNLEVSSFLCSSLYEFENRLLPNDYIVLWNNGGDKETLGEGLTAMEDHRGCSSQGGGPNQVDVWCNSEFRTNLH

SEQ ID NO: 26024 - protein, 611 aa, Oryza sativa; identical to SEQ ID NO: 19402
  Clone ID: TF_OsC91_2524.pep

SEQ ID NO: 26025 - protein, 1641 aa, Oryza sativa
  unsure (1)..(1641): unsure at all Xaa locations
  Clone ID: TF_OsC91_2590.pep
MEDADAPQHILNDADLDLVDDRERQAYYKLSDREYAHTREYSPELLKKISIDVGFCAIWKAVGWQRFAVVDEPGSHLFTLQFLCTLKEIEDGISFRFFHKEYTLTWKGLSTLLGFHDFCKIDLQKGIYGFEKNRFWEDISGAPICKKSRTNDIHNPTLRLMHKWITMTLFPRSNEGEKSPQNFADYVSQEQLRTLQENTQKDITEAVAKSVQDAFIKIGFLNHMERLDKRISTLTDRVAALETRCMIPVASGDDDAHPEDTVYDSSGDAPATRQARLRRRLCTNHTGMGGTHHQQGNNNNRVPDDPCAKVKFKIPSFSGYYDAEKYLDWEMTVEQKFNAHLVPEQHRVRQASHEFKDFAIMWWAGLSDEGVLPTTGEELKVAMRDRFVPPSYHRDLRKKLMRLEQGDKSVQDYYGELKKGLFWFAMLAEKELQGRDHQGKSKASTYTPRKTPSVGLPKAVSFRVSSQPASKRPATSGASAAPKPSPPRPAESGKGSSQVPAKSASSIASTGRIQCHRCQGFGHVQKDCPSQRAYVATEDGYITTSDVEEEEGEXEVEDEDGEVFGRDDTMDYRTIIVQRVLSTQLXNLVSSDLVKKLXDYTYTSTPLPYSVVKRFRKSKDSVDCDVVPMQACSLLLGHPWXNMIMMLHTMKIILLPLTPAEIQVAKSVFPPKKDKLSPSSKVEGIKLKSAEIPPGLPPMRGIAHQIDLIPGASLSNRAAYRTNPEETKEIQRQVQDLLDRGKSLDEHMDHLRAVFNALRDARLFANLEKCIFCTERVSFLGYVVTPQGIEVDESKIEAIKSWPVPQTITQVRSFLGLAGFYRCFAKDFSTFAAPLNELTKKGVVFHWGKTQEKSFDTLKDKLTHAPLLQLPNFGKTFELECDASGVGIGGVLMQDGKPVAYFSEKLHGPVLNYSTYDKELYALEAHGGGLMGHFGAKKTEDVLAMHFFWPRMRKDVERTKRGRDSIFVVVDRFSKMAHFIPYHKSDDVVHIADLFFHEIVRLHGMPSTIVSDRDAKFLSHFWRTLWNKLGTKLLFSTICHPQTDGQTEVVNRTLGTMLRAILKKNLKMWEECLPHVEFAYNRATHSTTKMTEKYRIAGSKGRQEVKLEPGDLVWLHLRKDRFPELRKSKLMPRADGPFKIVEKIDNAYKLELPPEFRVSPTFNISDLKPYLGEEDELESRTTSIQDGEDDADITNSDTHNNPATVIQGPITRARARQLNLEATRRHLEKDLELWRIIEDVQVKEEAQTKSTLGAIRSPGPVCTKMGAQMDQQWMYADRRSKEFIECVHYFLRVAEANKRNGFICCPCNKWFMPSYNCWISHGEQGVEMEEDEAEDENIPDWAQYAGFEGNQTGEVDRDAGDNDAADDLGRMLQDAKEDYKKLEVQKIHACPNDCILYRGEEYENLEACPVCKALRYKIRREDPGEVDGQPTKKRIPAKQPFKAANKGYKTCTHCMDETESTYLKHCRKVVYMGHRRFLAANHPVRKKGKHFEHKMDHRTKPKHRSGKTVFAMVKDLKVVFGKRPGSQPIESEDGHATIWKKNSIFWELPYWEFLDVCHAIDVMHLTENLCINLPGFLGVYGKAKDTLEAQCHKDGSTNPENASCHNKFYLLLKIETDAAQPESKNSFSLSGDSSGAKAISK

SEQ ID NO: 26026 - protein, 1819 aa, Oryza sativa
  unsure (1)..(1819): unsure at all Xaa locations
  Clone ID: TF_OsC1713_5484.pep
CSSIVVVEVALDKSQVHLLPFVELVWHLIDHLHAGSLLVTLGGCRLLDGLWRSCPVTSPRRLWRRPGAGFAITGTPLTEIDHRNLQLNAQAMNVLFNSLSQEEFDRVSHLETAYEIWNKLASWXKIHEGTSEYKDAKLHFLKIQYETFSMLPHESVNDMYGRLNVIVNDLKGLGANYTDLEVAQKMLRALPGKYETLVTMLINSDMSRMTPASLLGKINTNDMYKLKKKEMEEASPSKKCIALQAEVEDKGKGKERGRGSNSSRRRNRRPNKTLSNLKCFECGEKGHFTSKCPSKDDGDKSSKKKSGGYKLMKKLKKEGKKIEAFIGEWDSNEESSASSGSEEEGGEDASSKKKKMAVVAIKEALSLFAPLCLMAKGSSKVTSLSDSESDDDCDDVSYDELVSMFEELHAYSEKEIVKFKALKKDHASLEVLYEELKTSHERLTISHEKLKEAHDNLLSTTQHGALIDVGISCDLLDDSATCHIAHVASSSISTSCDGLVDMPSSSSSSCISICDASLVVENNELKEQVAKLNKSLERCFKGRLMMVALLLDMWVPLYSVVNYRTGGSHWVLDSGCTQHMTGDRAMFTTFEVGGNEQEKVTFGDNSKGKVIGLVAKTSLGWLXHRRLAHVGMNQLSKLSKRDLVVGLKDVKFEKDKLCSACQAGKQVACSHPTKSIMSTSRPLELLHMDLFGPTTYKSIGVERKNRTLIEMARTMLDEYGVSDSFWAEAINTACHATNWLYLHRLLKKTSYELIVGRKPNVAYFRVFGCKCYIYRKGVRLTKFESRCDEGFLLGYASNSKAYRVYNKNKGIVEEIVDIQFDETNGSQEGHENLDDVGDEGLMRAMKNMSIGDVKPIEVEDKPSTSTQDKPSTSATPSQAQVEVEEEKAQDPPMPPRIHTALSKDHPIDQVLGDISKGVQTRSRVASICEHYSFVSCLEPKHVNEALCDPXWMNAMHEELNNFARNKVWTLVERPRDHNVIGTKWVFRNKQDENGLVVRNKARLVAQGFTQVEGLDFGETFAPVARLEAIRILLAFASCFDIKLFQMDVKSAFLNGEIAELVFVEQPPGFEDPKNPNHVYKLSKALYGLKQAPRAXYERLRDFLLSKDFKIGKVDTTLFTKIIGDDFFVCQIYVDDIIFGSTNEVFCKEFGDMMSREFEMSMIGELSFFLGLQINQLKDGTFVSQTKYIKDLLKRFGLEDAKPIKTPMATNGHLDLDEGGKLVDLKLYRSMIGSLLYLIASRPDSMFSVCMCARFQAAPKECHLVAVKRILRYLKHSSTIGLWYPKGAKFKLVGYSDSDYTGCKVDRKSTSGSCQMLSRSLVSWSSKKQNSVALSTAXGGICFGGIXILSFGQNEIYPQNKIEKEFEKSFKTKLRRSDRAACXGLTGCGRRSDRPSVRGLTAPDWPMMPPRTRHGRCAPTPDPVSEPEESSGEDYAQSDEEVEANIEGASEEASGDDDSGSGEDEDEGSDDMHVDPSIXFDVNMRNPSQYTILRHHDQFLRPRDTPDPRFHTAFQKLWVAGDYNEMKWMSDTLQCSISRRQFWRLLNIRLDFGYDLHEEHTHNPLSIDYLSQFYEDGVRYTHGKVAGLRTIPSVVNRIVRATILPRLGNNDDIRGVAWHIIDTIIQGRQFDIVSLMMQEIAISKGTFTQGIYYAPYIMRLIQDKLGAAGXNLKKHKQYKPRLQLGAPHAXRMVPSSHLGASSSSAPPPPHGYDPNAFFHPQYTYFGIQPNEYFNPVLGAINTLSKSIQRLSTGHEAXHEDVRGLRTDVGDLNASMGRLHTRVGTLDSQVQMLESSQAFVYHRRRDAPHPSTSARPPSPPQ

SEQ ID NO: 26027 - protein, 493 aa, Oryza sativa; identical to SEQ ID NO: 19408
  Clone ID: TF_OsC1528_1773.pep

SEQ ID NO: 26028 - protein, 1326 aa, Oryza sativa
  unsure (1)..(1326): unsure at all Xaa locations
  Clone ID: TF_OsC547_327.pep
MAAPAPSNFNLWSILEKEKLTRTNFMDWYRNLRIVLRXEHKKFVLTQPFPADFPNNAPAAQRREHERRCNEYLDISCLMLATMSPELQRQYEALDAHTIITGLRNMFEDQARAERFNTSKSLFACRLAEGNPVSPHVIKIIGYTESLDKLGFPLSQELATDLILQSLPPSFEPFIMNFNMNNLNRTLAELHGMLKTAEESIKKNSNHVMVMHKRKPNNRKSGQKRKLNSDEITSTSNSKTKVQKTVPAKDAECFFCKETGHWKRNCKKYLEQLKQKQQDGKSSTSGINVIEINLATSSTDSWVFDTGSVAHICKSLXGLKRSRSLARGEVDIRVGNGARVAAVAVDTMPLSLPLGLVLELNNCYCIPALCKNVISASCLQAEGYGFRSMDNGCSVYYNDIFYFHAPMMNGLYIVNLDGCSVYNINAKWQRPNDLNPTFIWHCRLGHINEKRMEKLHRDGLLHSFDFESFETCESCXLGKITKAPFTGQSERASELLGPVHTDVCGPMSSTARGGFGYFITFTDDFSRYGYVYLMRHKSESFEKFKEFQNEIQNHLGKTIKYLRSDRGGEYLSLEFGNHLKECGIVPQLTPPGTPQWNGVSERRNRTLLDMVRLMMSQTDLPLSFWGYALETAAFTLNRVPSKSVDKTTYEIWTGKRPILSFLKIWGCEVYVKRLQSDKLTPKSDKCFFVGYPKETKGYYFYHREEGKVFVARHSVFLEKKFISRKDSVSMVXLEEIQETPENAPTSTQPQAEQDVVQQVEQAVVEPVVEAPASRRSEKIRRTPARYALLTTVQCDILLLDNDEPTTYEKAMVGPDSEKWLGTMKSEIESMHVNQVXKLVDPPDDVKAIECKWVFKKKTDVDGNVHIYKARLVTKSFKQIQGVDYDETFSPVAMLKSIWIVLAIAGYFDYEIWQMDVKTAFLNGNLYEDVYMTQPKGFVDPQSAKKICKLHKSIYGLKQASRSWNIRFDEVVKALGFVKNEEEPCVYKKVSGSALVFLILYVDDILLIGNDIPMLESVKTSLKNSFSMKDLGEVVYILGIRIYRDKSKRLIGLSQSTYIDKVLKRFNMQDSKKGFLPMSHGINLGKNQCPQTTDEXNKMSVIPYASAIGSIMYAMLCTRPNVSYALSATSRYQSDPGESHXITVKNILKYLRRTKDMFLVYGGXEELVVNGYTDASFQTDKDDFRSQSGFVFCLNRGAVSWKSSKQDTVADSTTEAEYIAASEAAKEVVWIKKFVSQLGVMTSASSPMDLYCDNSGAIAQAKXPRSHQKSKHILRRYHLIREIVGRGDVKIHKIHTDLNVADPLTKPLPQPKHEAQTRAMGVIYIHD

SEQ ID NO: 26029 - protein, 1387 aa, Oryza sativa; identical to SEQ ID NO: 19417
  Clone ID: TF_OsC547_340.pep

SEQ ID NO: 26030 - protein, 1325 aa, Oryza sativa
  unsure (1)..(1325): unsure at all Xaa locations
  Clone ID: TF_OsC547_379.pep
MAAPAPSSFNLRSILEKEKLTGTNFMDWYRNLRIVXQEHKEFVLTQPFPTDLPNNAPAAQHREHEKRCNDYLDISCLMLATMTPELQRQYEALDAHTIITGLRNMFEEHARAERFNTSKSLFACRLTEGNPVSPYVIKMIGYTESLDKLGFPLSRELATDLILQLLPPSFEPFIMNFNMNNLNRTLAELHGMLKTAEESIKKNSNHVMVIHNASPTTRKVXQKIKLNSDEITSTSNSKTKVQKTGPTKDAECFFCKETGHWKRNCKKYLEQLKQKQQDGKSSISGINVIEINLATFSTDSXVFDTWSVAHICKSLQGLKRSRNLARGEVDIRVGNGARVAAVAVGSMLLSLPSGLVLELNNCYCIPALCKNVISASCLQAEGYGFRSVDNGCLVYYNDIFYSHAPIMNGLYIVNLDGCSVYNINAKRQRPNDLNPTFIWHCRLGHINEKHIEKLHRDGLLHWFDFESFXCESCLLSKMTKAPFTGQSERASELLGLVHTDVCGPMSSTARGGFGYFITFTDDFSRYGYVYLMRHKSESFEKFKEFQNEVQNHLGKTIKYIXSDRGGEYLSLEFGNHVKECGIVPQLTPPGTPQWNGVSERRNRTLLDMVRSMMSQTDLPLSFWGYALETAAFTLNRVPSKSVDKTPYEIWTDKRPSLSFLKIWGCEVYVKRLQSNKLTPKSDKCFFVGYPKETEGYYFYNWEEGKVFVAXHGVFLEKEFISRKVSGSMVXLEEIQETPENASTSTQPQQAEQDVVQQVEQVVVEPVVEAPASRRSERIRRTPTRYAVLTTGQRDILLLDNDEPTTYEEAMVGPDSEKWLGAMKSEIESMHVNQVWNLVDQPDGVKAIECKWVFKKKTDVDGNVHIYKARLVAKCFRQIQGVDYDETFSPVAMLKSIRIVLAIAAYFDXEIWQMDVKTAFLNGNLDEDVYMTQPKRFVDPQSAKRICKLQKSIYGLKQASRSWNIRFDEVVKVLGFVKNEEEPCVYKKISGXALVFIILYVDDILXIGNDIPMHESVKTSLKNSFSMNDLGEAAYILGIRIYRDRSKRLIGLSQSTYIDKVLKRFNMQYSKKGFLPMLHGINLGKNQCPQTTDEGNKMSAIPYASAIGSIIYAMLCTRPDVSYALSATNXYQSDPGESHWIALKNILKYLRRTKDIFLVYGGQEELVVNGYTYATFQTDKDDFRSQSGFVFCLNGGAVSWKSSKQDTVADSTTEAEYIATSEAAKEAVWIMKFVSQLGVMTSVSSPMDLYCDNSGAIAQAKEPRSHQKSKYILRRYHLIREIVGRGDVKICKIHTDLNVADPLTKPLPQPKHEAHTRAMGIRYVHD

SEQ ID NO: 26031 - protein, 1159 aa, Oryza sativa
  Clone ID: TF_OsC547_389.pep
MEIQYEHTSYRDPNRSLTGLGGPSDGSYIFVRGVTGGGIASPRRVVTIYDLILAWFLVYAIEMFDLCYRSLRLSQQWIDVGHLCAEIIGLLDKIMAAPASSNFNLRSILEKEKLTGINFMDWYRNLRTVLRQEHKEFVLTEPFPANLPNNAPAAQRREHEKRCNDYLDTSYLMLATMSPELQRKYDALDAHTIITRLRNMFEDQARAERFNTSKSLVACRLAEGNPMSPHVIKMIGYAESLDKLGFPLSRELVTDLILQSLPPSFEPFIMNFNMNNLNRTLAELHGMLKTAEESIKKNSNHVIVVHKRKPNNKKSCQKRKLNSDEITSTSNSKTKVQKTGPAKDAECFFCKETGHWKRNCKKYLEQFKQKQQDGKSSTSVYNINAKRQRPNDLNPTFIWHCRLGHINEKRMEKLHRDGLLHSFDFKSFETCESCLLGKMTKAPFTGQSERASELLGLVHTDVCGPMSSTAKGGFGYFITFTADFSRYGYVYLMRHKSEYFEKFKEFQNEVQNHLGKTIKYLRFDRGGKYLSLEFGNHLKECAIVPQLTPPGTPQWNGVSERRNRTLLDMVRSMMSQTDLPLSFWGYALETVAFTLNRVPSKSVDKTPYEIWTGKRPSLSFLKIWGCVVYVKRLQSDKLTPKSDKCFFVGYPKETKGYYFYNREEGKVFVARHGVFLEKEFISRQDSGSMVQLEEIQETPENASTSTQPQAEQDVVQQVEQVVVEPVVEAPASRRSDRIRRTPASLELLVDPPNGVKAIECKWVFKKKTDVDGNFNIYKARLVAKGFRQIQGVDYDETFSPVAMLKSIRIVLAIAAYFDYEIWQMDIKIAIHNGNLDEDVYMTQPKGFVDPQSAKKICKLQKSIYGLKQASRSWNIRLDKVVKALGFVKNEEEACVYKKISGSALVFLILYVDDILLIGNDILMLESVKTSLKNSFSMKDLGEATYILGIRIYRDRSKRLIGLSQSTYIERFIMYAMLCTRPDVSYSLSATSRYQSDPCESHWIAVKNILKYLRRTKDMFLVNGGQEELVVNGYTDASFQTDKDDFRSQSGFVFCLNGGAVSWKSSKQDTVSNYTTEAEYIASSEAAKEAVWIKKFISRLGVVTSASSPMDLYCDNSGAIAQAKEPRSHQKSKHILRRYHLIREGVSNRALAVVARFQSR

SEQ ID NO: 26032 - protein, 379 aa, Oryza sativa
  Clone ID: TF_OsC547_396.pep
MWLEQNHIHLPSKKKKRKISANLFLVPRMVKDGLPRMVEDGLASHYELFLCLQMDDTLTTGSIRSTEGEKRRLAEASLAYNCERIDVGHLYAEIIGLLDKIMAAPAPYNFILQSILEKEKLTGTNFMDWYCNLRIVLRQEHKEFMLTQPFPADLPNNAPVAQRREHERRCNEYLDISCLMLATMSPELQRQYEALDAHMIITGLRNMFEDQARAEWFNTSKSLFACRLVEELHGMLKTVEESIKKNSNHVMVMHKRKPNNKKSGQKRKLNSDEITSTSSSKTKVQKTGPAKDAECFFCKETGHWKRNCKKYLQQLKQKQQDGKSSTSGINVIEINLATSFTDSWVFDTGSVAHICKSLQGLKRSRSLVSHPEVPFPSLN

SEQ ID NO: 26033 - protein, 1310 aa, Oryza sativa; identical to SEQ ID NO: 19427
  Clone ID: TF_OsC91_1938.pep

SEQ ID NO: 26034 - protein, 1516 aa, Oryza sativa; identical to SEQ ID NO: 19451
  Clone ID: TF_OsC359_7913.pep

SEQ ID NO: 26035 - protein, 1547 aa, Oryza sativa
  unsure (1)..(1547): unsure at all Xaa locations
  Clone ID: TF_OsC1517_1429.pep
PPHRAARAPARFGFEEGRVEPEADHESANEQSHHSNRSHRTASRNAEVEQSHRSNRSHRIVSRNAEVEXSHRSHRSVGHNSGEERIPSPPHVENNMQHLMAVQTQILQGLATAIAGIQHNAHGNGHPHMGNNRSKLTDFLRSRPPEFSQTVKPVEAGDWLKDVERKLNLVQCIPIEKTVYASHQLRGPAADWWENYCNAHPEPTNIPWNEFAAAFRVAHVPKSTIDMKKEEFIRLKQGNSSVNEYLSQFNKLARYAPEEVDTDKKKIRKFLKGVTVGMRLQLLAHDFPTFQHMINKALPLEDARKEATEEYKKRKSTHQGNSSRGAPHPRFGQPKQYHQSVTQANRQPGYAPRPQMNRPAPPPQQRAPSGNIAPNSVTSFKSPPGLSTVQCFRWDKMGHSARQCPQNPTNTNSGHANGSTARTPTLAAAQSRPSSXASGQGSHASNNFGRGRVNHIQAETAQDAPDVVMGMFSVNSIPAIILFDSGASYSFISQAFVKRNGWKTXNLRVPMIVHSTGRDIRATKICPEVNLRIEEVDFLAKLIVLDSQSLDIILGMDWLAKHKGQIDCAERSITLQGPGGKQVHFTPNTLTASRSILTNLQATPLESVPIVCEYPDVFPEELSSMPPDREIEFAIELAPGTAPITKRPYRMAANELAEVKRQIEELESKGYVRPSSSPWGAPVLLVKKKDGYERMVIDYRALNEVTIKNKYPLPRIDDLFDQLKGARVFSKIDLRSGYHQLKIRSEDIPKTAFSTRYGLYEFTVMSFGLTNAPAFFMNLMNKIFMEFLDQFVVVFIDDILIYSKNKEEHVEHLRLIMEKLRDHQLFAKFSKCEFWLDRVAFLGHVISSNGVEVDPSKVEAVLAWNPPKNVSEIRSFLGLAGYYRRFIEGFSKLARPMTELLKKEKKFQWSVACEDSFQEMKKRLTTAPVLTLPDIRKDFEIFCDASRQGLGCVLMQERKVVAYASRQLRPHEVNYPTHDLELAAVVHALKIWRHYLIGNRCEVYTDHKSLKYIFTQIELNMRQRRWLELIKDYDLGIHYHPGKANVVADALSRKAYCNVAQIRPGQDRLCRELEKLRLTVVQSGVPASLTVQPTLESQIREAQKDDEGIKELIKRIQEKKDTNFSIDDQGTVWCGPRICVPAKKELRDLMLKEAHESAYSIHPGSTKMYQDIKAYFWWAGMKRDVAEYVALCDICQRVKAEHQRPAGLLQPLPIPEWKWEEIGMDFITGSPRTPSGYDSIWVIVDRLTKSAHFVPVKTTFDRKKLAELYMTHVVCRFGCPKKIVSDRGTQFTSRFWKQLHEALGTDLNFSTAYHPQTDGTWDRCLPYAEFSYNNSYQASIQMLPNEAMFGRKCRTPLCWNEVGEALVFGPDILKAAEEQVKLIRERLKTAQNRQKNYADNRRHDLEFEKGDHVYLRVSPLRGMRRFGMSGKLAPRYIGPYLITARRGEVAYQLELPEGLADVHNVFHVSQLKKCLRVPEEQVPLGNIELEKNLTYKERPIKVLEEAERQTRRKTIKFYKVQWSNHSEDEATWEREDLLRAEFPELLP

SEQ ID NO: 26036 - protein, 1513 aa, Oryza sativa
  Clone ID: TF_OsC1458_1.pep
NDRDMETQRLWEQAAAIEAQLDFDREQGGRDIGARSPRRQRASPSSDRHRGRRGRSGSPPVVQTIVKDVGGAWPMLTKTNYAEWAMVMKVKLQARHLQKWRQMESRYPTRPWTRCSQLNNLVETLRSNRHLQRRNLIGTRSPFVAIRIGSDRARRSTLQKLRQDWENLAFKPGEDIDDFVLRLNSLQQRLAQLGDTTIDEERAVEKLLRVVPEKYTQLALSIETLLDFTELTIEEVMGRLKAVDNRKQLPPSEPITIGGKLFFTKEQWLARQQEWKKGEATGSSASGSSSSRKRRPRKWEKARSGALGDANGEHKGSRDDTCHNCGKTGYWAKDCRQAKHGGQAHVAQAQEAAAHVFLSNGSCGDKIDGWCLDTGATHHMTGRREFFSELDSSVQGSVKFGDASTVVIKGVGSILFTAKTGEHRLLTGVYYIPALRNSIISLGQLDENGSRVEIEDGVLRVWDRHRRLLVKVAQPVCLAARRDDDAWRWHERFGHLNFGALKQLGNKEMVQGMPRVEHVEQFCDTCVLTKQRRLPFPRQASFRAEEKLELVHGDLCGPVTPATPGGRRFFLLLVDDVSRYMWVVLHDSKAAAADAIKHHQVAAEKECGRKLRVLRTNNGGEFTAAEFAAYCADEGIQRHFSAPYTPQQNGVVERRNQTVVATARALLKQRGMPAIYWEEAVMTAVHLLNRLPTKALDGKTPYEAWHGRKPVVSHLRVFGCLAFAKELNHVGKLDDRSSPGVFIGYAEGVKAYRILDPATQRVRISRDVVFDEGRGWAWDKAVDDGSTSTLRDFVVDYVHFGGAGGASSSSSPSSSTSAPGSPSAPASPPPPTPPATPPSPATPCSPTPAPTPPVEFATPLSNDEDRVDAYHDDEPLRYHTVDNIFGDQPVLGLATHDFEAELHLAHEDGEPCSFAEANGDVAWRTAMQHEMDAVERNRTWVLADLPVGHRAITLKWVYKLKKDEAGAVIKHKARLVARGFVQQEGVDFDDAFAPVARMESVRLLLALAAQEGWRVHHMDVKSAFLNGDLKKEVYAHQPPGFVIPSKENKVLRLRKALYGLWQAPRAWNAKLDSTLKQMGFQQSSHEAAVYRRGKDGNALLVGVYVDDLVITGTKEAEVEAFKEEMKATFQMSDLGLLSFYLGIEVHQDSSGISLRQTAYAKRIVELGGLTGCNLAYTPMEERLKLSRDSTAEEIWHSLLAVSRFMQRPTTEHQQAVKRILRYVEGTTNYGLHYPRCPGAQHFIGYSDSDLAGDSDTSKSTSGMLFFLSKCLISWQSVKQQVVALSSCEAEYIATTTASTQALWLVRLLGDLLGRDAEAVELRVDSKSALALAKNPVFHERSKHIRIKYHFIRSCLEERSIKASYINTQDQLVDLLTKSLGRVKFQEFRARIGMDESCGKVNDRKAELKSHGEKAVKRNDYLAASKIYSEALELDYFDATLYSNRSLCNLQIGEAQKALLDADRCVELRPKWVKGHYREGAALMVLKEHKKAFEAFLNALKLDPANAEIEKVMW

SEQ ID NO: 26037 - protein, 1726 aa, Oryza sativa
  Clone ID: TF_OsC1713_5622.pep
MDLSRSLFRRIASRDDKSLSCIDKQKGKNEDIDELEDIAEVDKQLERYQRDTLRAIRPQQIYCMGFFENKNGLYRISREVELSVLTKPVELKIVAKEFENGLKYSGYKYIHQGMYIIGIKGMTRKKLGAKVLITLLDKRWDTIDKAALGFLEGDMNENMLITYIAPDLMMPVKEFIDKMSFGFQTKGYEEFKGTNLLVSIEFIGRLTNRSASKYKINVNDVIENMHSKGITFMSPLKISSEERAGEEWKISDLIESKTLSQPENFISYQNSKGNTSIRFINYKPRTTDDLETEASDRNIIDNRRHSVSEFMEKLDQESEIKYYENKLKEINEEYNNSMKCEWPKIRDKELYFYRELARVKKVKKNEDMAVEIFKTQETKIEQIKRKEQDKYDKEEQNLGKILSEEEQWAENERLFLESYEEEINLINEMENIENEIDNTEQYNDFINTLDEVGLHNLDNAMEAMEVDLGTGKRKRYGEGTVKNEGERERPARAAGKWPPDREEFSYNYIPGQYRHMGTKRRDFEKPVKFQNQRSDGAILNLAAHDPIDWPNIISIWKGLIVQKYIQNQHNIGSKVEDMITYLETFLGESAKILWEQWVEKNPNNYEELKRAGSNPHNFANVISNIIIAEDPELGYTTLQNERLKEIEKLTLTSWKGIKEFSQHYLYNATTAKQGYNRGIVERYFNKLPDPLGSMIFEEYKKETEGAEINISQAITFVFKQLRKICTGIQAQRSMKHSDYNFCNKIVQIPLSYGEDKPRSKRIYKHQNRNHNNIRTKKRYFLRRSDNRAPFLHKRNVRRYNPKKTYDKTCRCFICNSPDHLSRTCPNKDQKRYSSKYEEQERVLIIDSVNENILVCDDEIKDDESIYSIIETDEVETINEEYESSDEELDLIDELAGLKVEMMDQLNCEHDWIRGKGDYNIKCAFCIYYPSQENRVTCSICLKQACAECIKANKQKWRKEIELESDEKTLSSRVRVLENRLNKLEVELENLKNNCDIKALPENKDIQNTEFKEQLITLKDSNTAKIIQLREAITNFGNKYIVRLPFKEILGIRIPVKVKLTPKVSYKILALVDTGCTKNIIHDKYFTRCPEIVHTIDDNKAEVSTDMSGIKKIHNQLAYNMEVYINATKYIIDEITIRDLSMINDDMIIGLRFLQQSVQTTVIHEQGITFIPYQNNVPYISEVYINATKYIIDEITIRDLSMINDDMIIGLRFLQQSVQTTVIHEQGITFIPYQNNVPYISEVRKRGGTSPSPKPDKLDNLEVPNLESEERINEYELSENIDNYSFSSYLPKSIELPGKTSWEDRYLLKATKDFEYICREMASQKSEWLTNMSSWRLPQLPRGHGERFNHNFRITELQHGLLNLLWQTKNKKEKAHALNSLAYYFKNFVPSDQKITEKRAKMQDIPHHEERLLDYREEKSRDGQDKLLMEVEQSMATDKNTKVFSDKILISADPASSMVAFHININNLLQSFPHNKPSSSTKRHDIIPQTPYILHNHPNLFLPQYILRTQPKAPCRSCAYKDSCKKKLKSQNPMSTTYENLQPRLSFKTEQTLSCFGQDILDLVWQKFKERQMKIFLGLQDYFFDLLEGRERNPAIRVIIYMLPLLRLDNQAISDPSYRFLVLKAEINLQRFRNLPTYNHEEISLQTIIDHGLVNSIYATLDQILQSDLGNAVKDVCRRLGHGRYRIIFSSIPPKFTPPGKSIDFGRYDGKESSCKYIVFTTCSLLV

SEQ ID NO: 26038 - protein, 410 aa, Oryza sativa
  unsure (1)..(410): unsure at all Xaa locations
  Clone ID: TF_OsC359_7376.pep
MAALGRAEWLPRGARPSAARALGMFNREKGKNVSGYASSNLSFQLNPPLASRELTRAHPWSIPSMLLSSQLPLVGSQDQNRYVFDRAFATQVNELPMPEEDVPFCHDCRERGHYALNCPWVYAKEAPSFGLAGQTSLNQPPRSKSSLQPSVQSREPNGENPLNPENCFPPSLSYHMGSRTKQAKGKKSKNQKRKAPMRTEEEVHKMTITSTEWPPAGITIPRRQRGNTFRGARQLTQHLVSHGGRVSDSEGSDQVSSDYEDESLRHLGEEEMESKACPRCGEIGHVASMCFTLCPHCEEDHPPGECPTRKVTCFLCEXVSSNSNIDDIIHSTNAPLAAPDSAINHSNNTFSTNHSLHRRPQQRIVIDGRSCVSPRPTPGRAKGNQPQEDDTKQKTVIRFNQQSEGSFSCE

SEQ ID NO: 26039 - protein, 1149 aa, Oryza sativa
  unsure (1)..(1149): unsure at all Xaa locations
  Clone ID: TF_OsC359_7371.pep
WWDHFQXTQPEGQPITWAHFTAAFRRTHVPAGVMALKKREFRELKQGNRSVMEYLHEFNNLARYAPEDVREDEEKQEKFLAGMDPELSVPLVDKSIRLEAKHKELESHKRRLANFRNQQGANQRIRYTNPYPGGSSSQPQQQPRSALRPQFVVRVPQPQQQQNQQGAHAPRPPAPAVQPGQGRRDAQGQQCLCFNCFKPGHFADKCPKPRRQQGQAPPRPNNGGKDVTRGRVNHVTAEDVLRTPDIIVGTFLIHSIPATILFDSGASHSFISVPFMGRNQLGVERLRNPLLITTPGGVMTAKYYSPAVPIEIQGIAFPSDLILLDTKNLDVILGMNWLAQFQGVVDCARRTVTVYRGPDQPVVFFAPPTSAGSSVLHQLGLPEIPIVSEFGDVFPEELPGMPPKREIEFQIDLAPGTAPLYKRPYRMAANELAEPSTSPWGAPVIFVEKKEKTKRMCVDYRALNEVTIKKKYPLPRIDDLFDQLKGATVFSKIDLRSGYHQLRIREEDIPKTAFTTQYGLYEFTVMLFGLTNAPAFFMNLMNKVFMEYLDKFVVVFIDDILVYSQSEEDHQQHLRLVLGKLREHQLYAKLSKCEFWLPEVKFLGHVISAKGVVVDPETLLKKEEKFVWSPQCEKAFQTLKEKLVSLLVLILPDTRKDFLVYCDASRQGLGCVLMQKGHVVAYASRQLRPYEGNYPTHDLELAAVVHALKIRRQYLIGNRCEIYTDHKSLKYIFTQSDLNLRQRRWLELIKDYDVGIHYHPGKANVVADTLSRKSHCNTLGIRGIPPELNQQMEALNLSIVGRGFLATLEAKPTLLDRIREAQKNDPDIHGILKNMKQRKAAGFTEDEHGTLWNGNRVCVPDDKELKRLILQEAHESPYSIHPGSTKMYLDLKEKYWWVSMKRXVKAEHQRPAGLLQPLQVPEWKWDEIGMDFITGLPKTQGGYDSIWVVVDRLTKVARFIPVKTTYGGNKLAELYFARIVSLHGVPKKIVSDRGSQFTSHFWKKLQEELGTRLNFSTAYHPQTDGQTERLNQILEDMLRACVLDFGKTWDKSLPYAEFSYNNSYQASIQMAPYEALYGRKCRTPLLWDQVGESQVFGTDILREAEAKVRIIRDNLKVAQSRQKSYADNRRRDLEFAVDDFVYLRVTPLR

SEQ ID NO: 26040 - protein, 1908 aa, Oryza sativa
  unsure (1)..(1908): unsure at all Xaa locations
  Clone ID: TF_OsC160495_1.pep
MGREALTYHPADHHSGARRPPSKPQFGSWRDVVKKGRGPAAAEEAAWTEVRRKGSTEHSLRAGDPTSNKHDRAFKPRKEFSNHDRAFNSEKEIPRWLLGRCFKCLGLGHRKLDCKGETRCFHCWYPGHLAWACPERKEVSGGNPGRQSQGRAATEKGAVIAMAGANLGGYQICAATPPQFVEKYRIGEPDSRPERGRVVLSWTSGMERHERYLQELSLMASVLKGRPPVSPAELAEAIELHTGVQQRYFRVEVTRPEDFLISFRNQREKEAVLRCSKALFCNEVPVSFKPWNICCWAEASAFQFFTKISLDGLPPHAWEEEAMHKLVNSLDGQLAELIPAADARCLGLFAWFKNPSDLSHHLDVEIPERPAAGRWREGTSATPPSPPREKPALTYPVIIHVEEVIDPTPLHTPPTSFDDNSDDEDVTRRNTFSCWAGRYDGAGPWPTEVGGGHVYAAAVVGVVDMAAADRVLDRADIVVQDMEAGEVLASQPHSPTLVLQAPGVWFSPQAVQAVEQPGADVGIATPLAAPVVATAKALIVLDDDCSWALVAGGVSPLSPPLQLSLDELTGGELSALGTEKDGDRAELSDEDTMAEVSLVEHGCERPALKATGDALSSAQESRSDRGFESAAKAGEFRVYVRKQAQKKPSHEQPGTEGIGLMGLAGQDLGQADLRRAVAGLGQEMSVGQVVCGEDEPPQAHQEEVAHSDDERPVQETEIESSREALSGEMMLPPPASPSTALARARPTSEGSPANTPLPPEADQILQGFLASVATEPPPSLLGRRPPESVPKSKPCWRNVIPEWFTPWRSPRLQQQGNGARRHSTSKAQKVTMKKMGIIEEEEEADQDTFQQNTTVIDQPLSTQHMKVLAELLDVDVALEEADVPPPDLASLVAAGSKLEVVDLLVIHELCGPDFDDFVALPASHTRGGVIVAWKGSVFRGSQVHLGQWSVTAKLEWIAGNHSCFLTSVYGPQDDNEKILFLEELAEIRGICGEVWLVAGDFNLIAAAADKNNSRVNRRLMNAFRNKINELELKELYLFGRRYTWSSEQQIPTLVKLDRVLVSTEWEDAFPDAHLQALSSSSSDHCALLLSCGETPQGRRRFRFETFCSMFLDFDQEEAHSRPPPVEDSDPFVILYVKRARLPMPFCSWGPKRISRFRLLLQIANELIYRFAAAPEITLLCAVEPSSKAFLKNRSLGFATLXRLRLRQQGRISPLREGKVNSAKDYFQGILGVADPDSAELQFNQIFPPAPNLQELEVPFSEEEVWKVIKEMPNEKAPGPDGFTGLFYQRCWQVIKGEVLAALTKFHSGNHQNLDNLNTAVITLLPKKDAPTLIKDYRPISLIHSFSKLATKILASRLAPRMGDLVAENQTAFIRGRSIHENFIFVRGLALQFHRRKKPMILLKLDITKAFDTISWCFLLNLLRNRGFGSRWRSWIAALLLTSETRILLNGHESDSFKPARGLRQGDPLSPLLFVLVMDALQGLLAKATSWGLLAKLDTRRSIPNTSIYADDTIVFLQPIEREATAVNAILQLFGKATGLKTNLSKSALTPIRCDDDVLVGVQQLLGCRVENFPITYLGLPLSLRRPTKAEVQPILDRLSKKVAGWKPKLLSPDGRLRLIKSVLTALPVHFMSVLVLPKWAIKEFNKKCRAFLWKGQEEVNGGHCLVAWDIVCSPKECGGLGVKNLELFGQAMRMKWLARRLEQRGRPWTLINSVPTNDITGLFQSVASFQVGDGKDTDFWRANWLPRGCISVSSPLLFTHLGRTKLTVAEALSQNRWVRDIRGSFSALALSEYFRLWDEIQEVQLQEDAQDSTSWKLTPNRVFCTASVYEMFFAAREFADWWIKVRLCFQTGYRGAFDSLCILICWFVWRERNLRIFEQKARTAAELFSDIKDEVAVWRETNILREVG

SEQ ID NO: 26041 - protein, 312 aa, Oryza sativa
  Clone ID: TF_OsC359_7998.pep
MFNREKGKNVSGYASSNSSFQFNPPLASRELTRAHPWSIPSMLLSSQLPLVGSQDQNQYVFDRAFATQVNELPMPEEDVPFCHDCREQGHYALNCPWVYVKEAPSFGLAGQTSLNQPPRTKSSLQPSVQSEEPNGDNPLNPRKCFPPSLSHHVGSRTKQAKGKKSKNQKRKAPMRTEEEVRKMTITSTEWPPAGITIPRRQRGNTFRGARQLTQHLLSHGGRVSDSEGSDQVSSDYEDESPRHLGEEEMESKACPRCGEIGHVASMCFTLCPHCEEDHPPGRAKGNQPQEGDTKQKTVICFKQQSEGSFSCE

SEQ ID NO: 26042 - protein, 300 aa, Oryza sativa
  Clone ID: TF_OsC359_5677.pep
HKALGSPKPRLANFHIHREANQRIRYPNPFPEGSSSQQQQQQQPRSAPRLHFVVRVPQPQHKQSQQGTRAPRPLTPAAQSGQGRRDVQGPQRLCFTCFEPGHFADKCPKQRRQQGQAPPRSNNGGKDVIRGRVNHVTAEDVLTTPDVIVGTFLIHSIPATILFDSGASHSFISVPFVGRNQLGVERLRNPLLITTPGGVMTAKYYSPAVPIEIQGIPFPSDLVRLITKNIAQPAHNRGHGYSNSFTLARGVPLYPQDTIPHMLLCPEIPPRHCKGGNRDNTLCTTQLKTVHRSWIIVTPL

SEQ ID NO: 26043 - protein, 1446 aa, Oryza sativa
  unsure (1)..(1446): unsure at all Xaa locations
  Clone ID: TF_OsC91_2068.pep
MTGGSGEHPQHSPRTRGIIQHFERQVREHAEGLDEDVRVANDRLGQLEAAQIDTNSKLSSLERSLVAVNTSLAGILNTLERMGQDGHDGSARRNHNGHDANSSIAAREELEYAADTEHDEEVLGRPQRQQRRQRHGMGAPPRREVRDNDDSLGKIKFTIPCFDGKYDPDAYLTWELAIDQKFACHDFPENKRVRAATRMLRCGLVENDDAGMARFMGGLNREIQDILAYKEYNSINRLFHLACKAEREVQGRRASFRTNISAGRASSWTSSNAAAPSTRAAAPSSSSNKLRPSTTNSTPCPSEPTRGVAATPSKSSSSVASSGRTRDIQCLRCKGYGHVRKDCPSTRVMIVRADGGYSSASDLDEETYALLATNNAGEGDAPHQDEEHIGAEAAEHYESLMVQRVLSAQMERAEQNQRHTLFQTKCVIKERSCRVIIDGGSCNNLASAEMVEKLALSTQPHPQPYYIQWLNSSGKERTRSEHLIAANELEKHKKKPTNSVQNNKNEIKLKGSCFIATKSDLDEVDTDTVVCYALVCKETLFPIEDTPISLPPPVTNLLQEYADIFPKEVLPGLPPIRGIEHQIDLIPGASLPNRAPYRTNPEETKEIQRQVQELLDKGFVVVYFDDILIYSRSIEDHHGHLRVVFDALRDARLFGNLEKCTFCTDRVSFLGYVVTPQGIEVVQAKVEAIHSWPVPTTITQVRSFLGLAGFYRRFVKDFSTIAAPLHELTKRNVTFTWAAAQRNAFDTLKDKLTHAPLLQLPDFNKTFELECDASGIGLGGVLLQEGKPVAYFSEKLSGPSLNYSTYDKELFALVRTLETWQHYLWPKEFVIHSDHESLKHIRSQAKLNRRHAKWVEFIESFPYVIKHKKGKENVIADALSRRYAMLSQLDFKIFGLETIKEQYAHDDDFKDVLLNCKEGRTWNKFVLTNGFVFRANKLCIPASSVRMLLLQEAHGGGLMGHFGVKKTEDILADHFFWPKMRRDVERFVARCTTCQKAKSRLNPHGLYMPLPLPSVPWEDISMDFVLGLPRTKKGRDSIFVVIDRFSKMAHFIPCHKSDDATHVADLFFREIVHLHGVPNTIVSDRDTKFLSHFWRTLWAKLGTKLLFSTTCHPQTDGQTEVVNRTLSTMLRAVLKKNIKMWEECLPHVEFAYNRSQHSTTKKCPFEIVYGLLPRAPIDLLPLPTSERVNFDAKYRAELMLKLHKTTKENIERMNIKYKLAGSKGKKHVAFEPGDLVWLHLRKDRFPNLRKSKLLPRADGPFKVLQKINDNAYKLELPADFGVSPTFNIADLKPYLGEEDELESRMTQMQEGEDDEDIPSNDTTTPIAQQGPMTRARAXVQGCSWHGKNSNNVESVYRLLRRSTPVVVVVGPPTSYPSPNRSLSSSHRKIGNPRCCIKTRMEMLEKHILGAVIRVTGKKARQNLSRNFSQLPFTHPTVEVYHCFALS

SEQ ID NO: 26044 - protein, 873 aa, Oryza sativa
  Clone ID: TF_OsC91_2397.pep
MSKNHVLAFFELFDSAKGCCWPDLSVSCDNYDLGETLTIRLQPYETLCCALAIDTPLRGLLILPVQINPIPASKSKKQDEQFARFVIQKIHIKVPLLDAMQVPTYARYLKDILNNKRPLPTTEVVKLTEQCSNLILHKLPEKKKDPGCPTITCSIGAQQFDQTWCDLGASVSVMPKDVFDKLNFTVLEPTPMRLQLADSSVRYPAGIAENVPVKIRDFFIPVDFVVLDMDMGKEMPLILGRPFLSTAGANIDVGTGSIRFHINGKEEKFEFQPRTEQCSMNFLEKETTMPRNRYWKTPVKSPVPAKKSDQPAQKKPPSAPKSKKGWENDHNDEDIPSNDTTTPIAQQGPMTRARARELNYQDILAYKEYNSINRLFHLACKAEREVQGRRASFRTNISAGCASSWTSPNAAAPSTRAAAPSSSSNKLRPSTTNSTPCPSEPTRGVAATPSKSSSSVASSGRTRDIQCLRCKGYGHVRKDCPSTRVMIVRADGGYSSASDLDEETYALLATNNAGEGDAPHQDEEHIRAEAAEHYESLVVQRVLSAQMERAEQNQRHTLFQTKCVIKERSCRVIIDGGSCNNLASAEMVEKLSLSTQPHPQPYYIQWLNSSGKEHTRSEHLIAANELEKHKKKPTNSVQNNKNEIKLKGSCFIATKSDLDEVDTDTVVCYALVCKETLFPIEDTPISLPPPVTNLLQEYADIFPKEVPPGLPPIRGIEHQIDLIPGASLPNRAPYRTNPEETKENQRQVDEDIPSNDTTTPIAQQGPMTRAQARELNYQVQGCSWHGKNSNNVESVYRLLRRNTPVVVVVGPPTSYPSPNRSLSSSHRKIGNPRCCITSARVTRQGSCSTRLGRTPHGPHLGRGPKRSYKPKGP

SEQ ID NO: 26045 - protein, 1402 aa, Oryza sativa
  Clone ID: TF_OsC91_2562.pep
MTGGSGEHPQHSPRTRGIIQHFERQVREHAEGLDEDVRVANDRLGQLEAAQIDTNSKLSSLERSLVAVNTSLAGILNTLERMGQDGHDGSARHNHNGHDTNSSIAAREELEYAADTEHDEELLGRPQRQQRRQRHGMGAPPRREVRDNDDSLGKIKFTIPCFDGKYDPDAYLTWELAIDQKFACHDFPENKRVRAATSEFTDFASIWWSEFVRSNPNNTPQTWDAMKRVMRARFVPSYHARDLLHKLQQLRQGNKSVEEYYQALQTGMLRCGLVENDDAGRASSWTPSNTAAPSTRAAAPSSSSNKLRPSTTNSTPCPSEPTRGVAATPSKSSSSVASLGRTRDIQCLRCKGYGHVRKDCPSTRVMIVRADGGYSSASDLDEETYALLATNNTGEGDAPHQDEEHIGAEAAEHYESLVVQRVLSAQMERAEQNQRHTLFQTKCVIKERSCRVIIYGGSCNNLASAEMVEKLALSTQPHPQPYYIQWLNSSGKEYADIFSKEVPPGLPPIRGIEHQIDLIPGASLPNRAPYRTNPEETKEIQRQVQELLDKGYVRESLSPCAVPVLLVPKKDGSWRMCVDCRAINNITIRYRHPIPRLDDMLDELSGSLVFSKIDLRSGYHQIRMKLGDEWKTAFKTKFSLYEWLVMPFGLTNAPSTFMRLMNEVLRAFIGRFVVVYFDGILIYSRSIEDHHGHLRAVFDALRDARLFGNLEKCTFCTDRVSFLGYVVTPQGIEVDQAKVEAIHSWPVPTTITQVRSFLGLAGFYRRFVKDFSTIAAPLHELTKRNVTFTWAAAQRNAFDTLKDKLTHAPLLQLPDFNKTFELECDASGIGLGGVLLQEDKPVAYFSEKLSGPSLNYSTYDKELFALVRTLETWQHYLWPKEFVIHSDHESLKHIRSQAKLNRRHAKWVEFIESFPYVIKHKKGKENVIANALSRRYTMLSQLDFKIFGLETIKEQYAHDDDFKDVLLNCKEGRTWNKFVLTNGFVFRANKLCIPASSVRMLLLQEAHGGGLMGHFGVKKTEDILANHFFWPKMRRDVERAVLKKNIKMWEECLPHVEFSYNRSQHSTTKKCPFEIVYGLLPRAPIDLLPLPTSERVNFDAKHRAELMLKLHETTKENIERMNIKYKLAGSKGKKHVAFEPGNLVWLHLRKDRFPNLRKSKLLPRADGPFKVLQKINDNAYKLELPADFGVSPTFNIADLKPYLGEEDELESRTTQMQEGEDDEDIPSNDTTTPIAQQGPMTRARARELNYQVQGYSWHGKNNNNVESVYRLLRRSTPVMRKPPYVGSPTVTELFPPHRTSLPLSSSRLTKPHNCHRQIWRGGLYSKPSRLALWFWFFPVQPPSRSGFFVLWMLVEEPEEIFVIWSGVDKEWWVVIFVMGNDFSMCVDFFKGGAFSTRQQKSS

SEQ ID NO: 26046 - protein, 3340 aa, Oryza sativa
  Clone ID: TF_OsC91_2597.pep
MTGGSGEHPQHSPRTRGIIQHFERQVREHAEGLDEDVRVANDRLGQLEAAQIDTNSKLSSLERSLVAVNTSLAGILNTLERMGQDGHDGSARRNHNGHDANSSIAAREELEYAADTEHDEEVLGRPQRQQRRQRHGMGAPPRQEVRDNDDSLGKIKFTIPCFDEKYDPDAYLTWELAIDQKFACHDFPENKRVRAATSEFTDFASIWWSEFVRSNPNNTPQTWDAMKRVMRARFVPSYHARDLLHKLQQLRQGNKSVEEYYQALQTGMLRCGLVENDDAGMARFMGGLNREIQDILAYKEYNSINRLFHLACKAEREVQGRRASFRTNISAGRASSWTSSNVAAPSTRAAAPSSSNNKLRPSTTNSTPCPSEPTRGVAATPSKSSSSVASSGRTRDIQCLRCKGYGHVRKDCPSTRVMIVRADGGYSSASDLDEETYALLATNNAGKGDAPHQDEEHIGAEAAEHYESLVVQRVLSAQMERAEQNQRHTLFQTKCVIKERSCRVIIDRGSCNNLASAEMVEKLALSTQPHPQPYYIQWLNSSGKVKVTRLVRVHFAIGSYHDSINCDVVPMQACSIFLGRPWQFDKDSLHFGKSNQYSFVHNGKKLVLHPMSPEVILKDELARASKQKNQEHTRSEHLIAANELEKHKKKPTNSVQNNKNEIKLKGSCFIATKSDLDEVDTDTVVCYALVCKETLFPIEDTPISLPPPVTNLLQEYADIFPKEVPPGLPPIRGIEHQIDLIPGASLPNRAPYRTNPEETKEIQRQVQELLDKGYVRESLSPCSIPVLLVPKKDGSWRMCVDCRAINNITIRYRHPIPRLDDMLDELSGSLVFSKIDLRSGYHQIRMKLGDEWKTAFKTKFGLYEWLVMPFGLTNAPSTFIRLMNEVLRAFIGRFVVVYFDDILIYSRSIEDHHGHLRAVFDALRDERLFGNLEKCTFCTDRVSFLGYVVTPQGIEVDQAKVEAIHSWPVPTTITQVRSFLGLAGFYRRFVKDFSTIAAPLHELTKRNVTFTWAAAQRNAFDTLKDKLTHAPLLQLPDFNKTFELECDASGIGLGGVLLQEGKPIEYFSEKLSGPSLNYSTYDKELFALVRTLETWQHYLWPKEFVIHSDHESLKHIRSQAKLNRRHAKWVEFIESFPYVIKHKKGKENVIADALSRRYAMLSQLDFKIFGLETIKEQYAHDDDFKDVLLNCKEGRTWNKFVLTNGFVFRANKLCIPASSVRMLLLQEAHGGGLMGHFGVKKTEDILADHFFWPKMRRDVERFVARCTTCQKAKLRLNPHGLYMPLPVPSVPWEDISMDFVLGLPRTKKGRDSIFVVVDRFSKMAHFIPCHKSDDATHVADLFFREIVRLHGVPNTIVSDRDTKFLSHFWRTLWAKLGTKLLFSTTCHPQTDGQTEVVNRTLSTMLRAVLKKNIKMWEECLPHVEFAYNRSQHSTTKKCPFEIVYGLLPRAPIDLLPLPTSERVNFDAKYHAELMLKLHETTKENIERMNIKYKLAGSKGKKHVAFEPGDLVWLHLRKDRFPNLRKSKLLPRADGPFKVLQKINDNTYKLELPADFGVSPTFNIADLKPYLGEEDELESRTTQMQEGEDDEDIPSNDTTTPIAQQGPMTRALARELNYQVQGCSWHGKNSNNVESVYRLLRRSTPVVADVTSGPSLSVEMLSLKHLGSTHNSIDQDSHWEMLTECDLTEFAIGLYLAQEVGHLPPEDLGEIRLRPRSNLAPGRLALYSNLLGQSRRKNWMVTSAPLASVHDQPRSSTTTTSATTTTTATSTTSTIAMRITTRPSFSAYSWLTTKRRNSAEPEKWRKSAHDKKLNVADWKKNDNDKSENDYNTKTMIAASVPANSASTRTPTGSRVPPLRSQDYHQPSLSIAGAGSSHRSRGHDERSVRSPPERHRERRVERLHSPHRRRPVDLRDTINQRRAARGHAPHYSLDRYDDDMDGVAAFTNDLRRVDWPASFKPTGIEKYDGTTNPESWLTVYGLAIRAAGGDSKAMANYLPVALADSARSWLYGLPRGTIGSWAELRDHFIANFEGTFERPDYIRRFSKQRNKISDITDDVIIAAFTKGIRHEDLVGKFGRKPPKTVKQMFEKANEYAKAEDTITASKQSGTTWKPKKDTPAAGGSGSNNHKDRKRKPEELVATTTPSSRQRSRVNTFDKIMNSQCPHHPNSNHAAKDCFVYKQFAEQYAKNARKPSDGDQGTSKKKDNEDDPPTGFQDHRKELNHIFSGPLAYESKRKQKLTEREINAVQPNTPQYLRCALNILFAKTLDDMQIPRTELKPSNAPFHGVIPGLSATPLGQITLPVTFGTWDNFRTENVCFKVADFETAYHAILGRPALAKFMAVPHYTYMMMKMPGPRGVISLRSNIKQAVTCDKESCEMAQTREITFAREEIRLAATVANEGEVPATKMSKTQESDAKTKKIPLDPSDPTKTANNKDIFAWKPSDMPGIAREVIEHSLHVKEDAKPIKQRLCRFAQDRKDAIKEELTKLLAAGFIKEVLHPDWLANPILVWKKTGQWRMCVDYTDLNKSCPQDPFGLPRIDQFFGAYCYITMPFGLKNAGATYQRMIQRCFSAQIGRDVEAYVDDVVVKTKQKDVLIADLEETFASIRAFRMKLNPEKCIFGVPSGKLLGFMVSHRGIQANPEKINAILNMKPPSSQKDVQKLTGCMAALSRFVSRLGERGMPFFKLLKKTDNFQWGPEAQKAFEDFKKLLTTPPVLASPHPQEPLLLYVSATSQVVSTVLVVEREEDGHVQKVQRPIYFVSEVLADSKTRYPQPRISIKFQALADFVAEWTECQEDMPEEKMEYWTMHFDGSKRLSGTGAGVVLISPTGERLSYVLWIHFSASHNVAEYEALLHGLRIAISLGIRRLIVRGDSQLVVNEVMKEWSCLDDNMTAYRQEVRKLEDKFDGLELTHVLRHNNEAADRLANFGSKREAAPSDVFVEHLHEPIVPRKETIEAMDTQGVSMIEADWREPFIRFLTKQELPQDKNEAEQISRRSRLYVIHETELYKKSPSGILQRCVSLEEERQLLKDIHSGICGNHAAARTIVGKAYRQGFFWPTAVSDADKIVRTCEGCQFFARQTHLPAQDLQTIPLSWPFAVWGLDMVSPFKKAVGGYTHLFVAVDKFSKWIEAKQVITITADKARDFFINIVHRFGVPNCIITDNGTQFTCGVFKDFCEDFGIKICYASVAHPMSNGQVERANGMVLQGIKARVFDRLRPYTGKWVEQLPSVLWSLRTTPSQATGQSPFFLVYGAEAMLPSELEFESLRFRNFHEERYEEDRVDDINRLEEAREAVLIQSARYLQGLHRYHNRNVRSRAFLVGDLVLRNIQTTRDRHKLSPLWE

SEQ ID NO: 26047 - protein, 1683 aa, Oryza sativa
  Clone ID: TF_OsC91_2633.pep
LSGSRLFLARQEQQQRGVGVPVAKAQHPCGSCSRTANVVSFPKSKFILLSSKDREPPLLHQVVSELKLLGGSGEHPQHSPRTRGIIQHFERQVREHAEGLDEDVRVANDRLGQLEAAQIDTNSKLSSLERSLVAVNTSLAGILNTLERMGQDGHDGSARRNHNGHDANSSIAAREELEYVADTEHDEEVLGRPQRQQRRQRHGLGAPPRREVRDNDDSLGKIKFTIPCFDGKYDPDAYLTWELAIDQKFACHDFPENKCVRAATSEFTDFASIWWSEFVRSNPNNTPQTWDAMKRVMRARFVPSYHARDLLHKLQQLRQGNKSVEEYYQALQTGMLRCGLVENDDAGMARFMGGLNREIQDILTYKEYNSINHLFHLACKAEREVQGRRASFRTNISAGRASSWTSSNAAAPSTRAAAPSSSSNKLRPSTTNSTPCPSEPTRGVAATPSKTSSSVASSGRTRDIQCLRCKGYGHVRKDCPSTRVMIVRADGGYSSASDLDGETYALLATNNAREGDAPHQDEEHIGAEAAEHYESLVVQRVLSAQMERAEQNQRHTLFQTKCVIKERSCRVIIDGGSCNNLASAEMVEKLALSTQPHPQPYYIQWLNSSGKVKVTRLVRVHFAIGSYHDSINCDVVPMQACSMLLGRPWQFDKDSLHFGKSNQYSFVHNGKKLVLHPMSPEVILKDELARASKQKNQEHTRSEHLIAANELEKHKKKPTNSVQNNKNEIKLKGSCFIATKSDLDEVDTDTVVCYALVCKETLFPIEDTPISLPPPVTNLLQEYADIFPKEVPPGLPPIRGIEHQIDLIPGASLPNRAPYRTNPEETKEIQRQVQELLDKGYVRESLSPCSVPVLLVPKKDGSWRMCVDCRAINNITIRYRHPIPRLDDMLDELSGSLVFSKIDLRSGYHQIRMKLGDEWKTAFKTKFGLYEWLVMPFGLTNAPSTFMRLMNEVLRAFIGRFVVVYFDDILIYSRSIEDHHGHLRAVFDALRDARLFGNLEKCTFCTDRVSFLSYVVTPQGIEVDQAKVEAIHNWPVPTTITQVRSFLGLAGFYRRFVKDFSTIAAPLHELTKRNVTFTWAAAQRNAFDTLKDKLTHAPLLQLPDFNKTFEHECDASGIGLGGVLLQEGKPVAYFSEKLSGPSLNYSTYDKELFALVRTLETWQHYLWPKEFVIHSDHESLKHIRSQAKLNRRHAKWVEFIESFPYVIKHKKGKENVIADALSRRYAMLSQLDFKIFGLETIKEQYAHDDDFKNVLLNCKEGRTWNKFVLTNGFVFRANKLCIPASSVRMLLLQEAHGGGLMGHFGVKKTEDILADHFFWPKMRRDVERFVARCTTCQKAKSRLNPHGLYMPLPVPSVPWEDISMDFVLGLPRTKKGRDSIFVVVDRFSKMAHFIPCHKSDDATHVADLFFREIVRLHGVPNTIVSDRDTKFLSHFWRTLWAKLGTKFLFSTTCHPQTDGQTEVVNRTLSTMLRAVLKKNIKMWEECLPHVEFAYNRSQHSTTKKCPFEIVYGLLPRAPIDLLPHPTSERVNFDAKYRAELMLKLHETTKENIERMNIKYKLAGSKGKKHVAFEPGDLVWLHLRKDRFPNLRKSKLLPRADGPFKVLQKINDNAYKLELPADFGVSPTFNIADLKPYLGEEDELESRTTQMQEGEDDEDILSNDTSTPIAQQGPMTRARAHELN

SEQ ID NO: 26048 - protein, 934 aa, Oryza sativa
  unsure (1)..(934): unsure at all Xaa locations
  Clone ID: TF_OsC359_8235.pep
MEPPALAARRMCCCSPSMVTTRRSAATGEGSHPEGSNHNNHGSPPPPPPPPPPPPPDTNSILTQILAXQANMMAAFLHHIQNPPQHNAPPPPPQHSKLAEFLRIRPPTFSSSNNPVDALDWLHAVGKKLDTVQCSDEEXVIFAAHQLQGPASLWWDHFQAMQPEGQPITWARFTAAFRRTHVPAGVMALKKREFRELKQGNRSVMEYLHEFNNLARYALEDVREDEEKQEKFLAGMDPELSVRLVSGDYLDFQRLVDKSIRLEAKHKELESHKRRLANFRNQQGANQKVRYTATXNPYPGRSSSQQQQQQQPRSAPRPQFVVRVPQPQQQQSQQGTRAPRPPTPAVQPGQGRRDVQGQQCLCFNCFEPGHFADKCPKPRCQQGQAPPRSNHGGKDVIRGRVNHVMAEDVLTTPDVIVGTFLIHSIPATILFDSGASHLFIFVPFVGRNQLGVERLRNPLLITTPGGVMTAKYYSPAVPIEIQGIPFSSDLILLDTKNLDVILGMNWLAQFQGVVDCARRTVTLYRGPEQPVVFFAPPTSVGSSELHQIRLSEIPIIREFGDVFPEELPGMPPKREIEFRIDLALGTTPLYKRPYRMAANELAEVKKQLEELKEKGYIRPSTSPWGAPVIFVEKKDKTKRMCVDYRALNEVTIKNKYPLPRIDDLFDQLKGATVFSKIDLRSGYHQLRIREEDIPKTAFTSRYGLYEFTVMSFGLTNAPAFFMNLMNKVFMEYLDMFVVVFIDDILVYSQSEEDHQHHLRLVLGKLREHQLYAKLSKCEFWLSEVKFLGHVISAKGVAVDPETVTAVTDWKQPKTVTQIRSFLGLAGYYRRFIENFSKIARPMTQLLKKEEKFVWSPQCEKAFQTLKERLVSSPVLILPDTRKDFMLYCDASRQGLGIFISHGHWNGWIIVELDSHRGNIPRDSLPLSPHFSLPL

SEQ ID NO: 26049 - protein, 1261 aa, Oryza sativa; identical to SEQ ID NO: 19489
  Clone ID: TF_OsC1713_4303.pep

SEQ ID NO: 26050 - protein, 839 aa, Oryza sativa
  unsure (1)..(839): unsure at all Xaa locations
  Clone ID: TF_OsC333328_1.pep
MILTIMGEMSQFGAIVIPKFVVGGIIAKLPPFWRDFATALKHKREDMMVDDLIAHLDVEEKARAKDTPTMAQEGTSNANLVQKSNAKNKGKQAVQNHKAKNTTNFKKKITCYVCGLEGHKANKCRDRKGKKNVQQGQKIANMVVSEAGSSGYDSTPVALSAYQSFDWWVDTGANIHAATGSSILMGNGSGAAVLGVGKVDLKLTSGKIISLKNVQHAEAENQLERKIKRLRSDRGGEYVSDEFSQFCADHGIIHEITPPYSPQSNGVAERKNRTLTDLVNAMLDSAGMSKAWWGEAVLTACHILNRVPTKNSEITPYEGWKGRKPSLSYLRTWGCLAKVNVPITKKRKLGPKTIDCVFLGYAHNSVAYRFLVVRSDVPDVPINMVTESRDATFFEDIFPMKANETWEITDRPFGCKPVGCKWIFKKKLRPDGTIEKYKVRLVAKGYTQKEGEDFFDTYSPVARLTTIRVLLSLAALYGFVVHQMDVKTAFLNGELDEEIYMEQPDGFVALGQEGKVVKLLKSLYGLKQAPKQWHEKFDRTLTSAGFIVNEADKCVYYRFGGGEGVILCLYVDDILIFGTNINVVSELKSFLSQKFDMKDLGEADVISNIKLIKGEDGIMLSQAHYVEKVLTRFGLMDCKIAPTPYDPSLKLRKNKGLGKDQLRYSQIIGSLMYLACATRPDISYAVSKLSRFTSNPXDDHWQALERILRYLRGTMSYGIHYTGYPAVLEGYSDSNWISDADEIKATSGYLFTLGGAAVSWRSCKQTVLTRSTMEAELVALDTATVEAEWLRELLMDLPVGEKPIPAILMYCDNQTVLIKVKSTKDNMKSSRHVKRPGIL

SEQ ID NO: 26051 - protein, 1851 aa, Oryza sativa
  unsure (1)..(1851): unsure at all Xaa locations
  Clone ID: TF_OsC359_7957.pep
MDISRTNEGYTSCGPVVEMSWHRAGVLLLGXSVLPTCPGGSGRRXGVGSMYTSDQSIIYSNSRALGYGQAEQCTQMAGSINRRGLDLTGFVLELRGMCVVLGYLHGVDYQGKQLPEQEGDDADPHAAWEVTAVILTGSPERTSLAVTAGGDSFSAACQNAALLAIGTLHQRYPDELQHXAYRYHPRRGGARDYATFRDASLEDDATIMHLARMVEAYDAARIDFHQMVRRGLVENNMKILELRQENLQLKKDLDAVEAQLRQLKIAQGEVCRPKRRRVCRSLKITARKSTSRPELVRQSLAWTCFVETPRAEPAPVVPQEEGASGVGSTEDALLLTFHPGPSQKRSAATGEGSHPEGSNHNNHGSPPPPPPPPPPPPPDTNAILTQILAQQANMMAAFLHHIQNPPQHNASPPPPQHSKLAEFLRIRPPTFSSSNNPVDALDWLHAVGKKLDIVQCNDEEKVIFAAHQLQGPASLWWDHFQAMQPEGQPITWARFTAAFRRTHVPAGVMTLKKREFQELKQGNRSVMEYLHEFNNLARYAPEDVREDEEKQEKFLAGMDPELSVRLVSGDYPDFQRLVDKSIHLEAKHKELESHKRRLANFRNQQGANQRVRYTNPYPGESSSQQQQQQQPRSAPRPQFVVRVPQPQQQQSXQGTRAPRPPTPAVQPGQGRRDAQGQQRLCFNCFEPGHFADKCXKPRRQQGQAPPRPNNGGKDIIRGRVNHVTAEDVLTTPDVIVGTFLIHSVPATILFDSGASHSFISVPFMGRNQLGVERLRNPLLITTPGGVMTAKYYSPAVPIEIQGIPFLSDLILLDTKNLDVILGMNWLAQFQGVVDCARRTVTLYRGPEXPVVFFAPPTSVGSSELHQIRLSEIPIVREFGDVFPEELPGMPPKREIEFRIDLALGTTPLYKRPYRMAANELAEVKKQLEELKEKGYIRPSTSSWGAPVIFVEKKDKTKRMCVDYRALNEVTIKNKYPLPQIDDLFDQLKGATVFSKIDLHSGYHQLRIREEDIPKTAFTTRYGLYEFTVMSFGLTNAPAFFMNLMNKVFMEYLDKFVVVFIDDILVYSQSEEDHQHYLRLVLGKLREHQLYAKLSKCEFWLSEVKFLGHVISAKGVAVDPETVTAVTDWKQPKTVTQIRXFLGLAGYYRRFIENFSKIARPMTQLLKKEEKFVWSPQCEKAFQTLKERLVSSPVLILPDTRKDFLVYYDASRQGLGCVLMQEGHVVAYASRQLRPHEGNYPTHDLELAAVVHALKIWRHYLIGNRCEIYTDHKSLKYIFTQSDLNLRQRRWLELIKDYDVGIHYHPGKANVVADALSRKSHCNTLNVRGIPPELNQQMEALNLSIVRRGFLATLEAKPTLLDQIREAQKNDPDMRGLLKNMKQGKAAGFTEDEHGTLWNGNRVCVPDDKELKQLILQEAHESPYSIHPGSTKMYLDLKEKYWWVSMKREIAEFVALCDVCQRVKAEHQRPAGLLQPLQVPEWKWDEIGMDFITGLPKTQGGYDSIWVVVDRLTKVARFIPVKTTYGGNKLAELYFARIVSLHGVPKKIVSDRGSQFTSHFWKKLQEELGTRLKFSTAYHPQTDGQTERLNQILEDMXRTCPRHTAVLPFSGTTWDKNLXPYAEFSYNNSYQTSIQMAPYEALYGRKCRTPLLWDQVGESQVFGTDILREAEAKVRTIRDNLKVAQSRQKSYADNRRCNLEFAVDDFVYLRVTPLRGVHRFQTKGKLAPRFVGPFRIIARRGEVAYQLELPASLGNVHDVFHVSQLKKCLRVPSEQADSEQIEIREDLTYVERPVKILDTMERRTRNRVIRFCKVQWSNHAEEEATWEREDELKAAHPNLFGSSSESRGRDSV

SEQ ID NO: 26052 - protein, 324 aa, Oryza sativa
  unsure (1)..(324): unsure at all Xaa locations
  Clone ID: TF_OsC359_8257.pep
MAPQPTCQTCVRNYLGSEEDPALSENPNQLAEQVTNQVAKTGNAVPGPKKEVATRNQHSSMDIYQILANQTQMLQEIAQNLASIQQQLLLPQPKVNPDKSKNEAAEIQGTQSVEGTDTHKEKNKEFLNVMITGMKTPLRANNCPNLQNSINESVSQENSMVKEGSCHKRKTLPSEVDMQDVPQCQTLQSCQNLSKTPTLKSKKIRHVPGFICFICHEIGHYMRHCPQKPYMDALLQANMSISRMPFYPQGSPNSPNVNAVRPTFPDDKRAKASCDMCQDIQEKKEMQEYKRRKVMSLEIQAKEDLCRKXTNSPAQYYQKASHST

SEQ ID NO: 26053 - protein, 404 aa, Oryza sativa
  Clone ID: TF_OsC91_2592.pep
MMKEILQVVVEPITWLEFTVAFKKIHVPSGVVALKKREFRALTLRSCSITEFLHEFNCLARYAPEDVCMDEKLVDKAIRQEDKYNRMEEKKHKIAHNQPIKEQGNMPVVCFNYDEPGHFADKCPKPRRVETAPIQNKSIAPAPKARVNHVAAAEAQGAPDVISMRDYPNVFPVDLRGIPPKRDIEFRIDLVMRTSPTITRWQRRNKGSSGGGNDEDILYYYPLAKTRDTNRSGFLNAHALELRNHSTTSSLVITRVETRMTSPRRLIPVCELKNTNKDKILDVKLFSQVPLTRKEFGRGTKTIGKFIFLAFHPYKECPNMSTKDPAAVREEEERRWSGLLHRGTWSSVTAGSTPPTPAVAATKEALADAAVGERWIRALSARVWGKKRNKIWTGGWSGLEFGIS

SEQ ID NO: 26054 - protein, 928 aa, Oryza sativa
  unsure (1)..(928): unsure at all Xaa locations
  Clone ID: TF_OsC91_2399.pep
CYNCRYSRACVPTDADITTSDTHNNPPTVIQGPITRARTMEGTRRHLEKDLEPWRIIWDVQVKVEAQTKSTSGAIRSPGPVCTKTGAQHYYLSLDCVPLIYIYLAFLAPHITSAQHRFLIPAIADYAFXVSFALLTQKDITEAVAKSVQDAFTKIGFLNHMERLDKRISTLSDQVAALETPSNEEVVSGDDDAHPEDTVYDSSGYIDALATRQAWLRHRLRTNRTGMGGTRHQQGNNNNHVPDDPYAKVKFKIPSFSGYYDAEKYLDWEMTVEQKFNAHLVPEQHRVRQASSEFKDFAIMWWAGLSDEGVLPTAWEELKVAMRDRFVPPSYHRDLRKKLMRLEQGDKSVQDYYGELQKGLFRFVMLAEKELQGCDHQGKSKASTYTPRTTPSAGLPKAISFRASFQPAGKRPAAFGASAAPKPSPPPRPAESGKGSSQVPAKSASYVASTGRIQCHRCXGFGHVQKDCPSQRAYVATEDGYITTSDVEEEEEEEEVEDEDGEXFGRDDTTDYRTIIVQRVLSTQIFFVINNRRARVIIDGGSCNNFVVKRFRKSKDSVDCDVVPMQACSLLLGRPWXNMIMMLHTMQVAKTVFPPKKDNLSPSSKAKGIKSKGGVMLATKCDIAENSDDDMCYFLICKQALVSLDDIASSIHLVVTNLLQEYEDVFPAEIPPGLPNRAAYRTNLEETKEIQRQVQDLLDHGYVRQRLSPCAVPVILVPKKDGSWRMCVNCRAINNITIXYRHPIPRLDDMLDELCGSIIFTKIDLRSGYHQIRMKLGDEWKTAFKTKFGLYEWLVMPFGLINAPSTFMRLMNEVLRPFIGRFVVVYFDDILIYSKSLNEHMDHLRAVFNALRDARLFATLEKCIFCTERVSFLGYVVTPQGXIEVDESKIEAIRSWPVPETITQVRSFLALCDPSRSAATHGCRSNTS

SEQ ID NO: 26055 - protein, 307 aa, Oryza sativa
  Clone ID: TF_OsC334495_1.pep
MAKSMAAVALNAGRASRQSDGRGTLETPDATGRLLAGGGVRKEMGLGSPKDGFARGMGIDTVVYMCSSASASSSRKDAAVVGLGRRSVLAASFRSASTSTPLIPVGVDKAPNIDPNLYFVAITGIKVASGEIVSDKAAAIMTTVSTLYTFLNPVLFDHLKKQLPPLADKGSSVLCYTKDTELPAITLVFAGKDAAMKLAPEHYSYKRSDGAVCLSILRSPLHGGVFVIGRRGGPRIFNLVRYRLRHLVVDGSGRSAPGGNSSPRRRTGGRRRLEHGGGRRGGMPDAPSARAAKAPTAPCAPAPRPKG

SEQ ID NO: 26056 - protein, 1497 aa, Oryza sativa; identical to SEQ ID NO: 19510
  Clone ID: TF_OsC359_5835.pep

SEQ ID NO: 26057 - protein, 1627 aa, Oryza sativa
  unsure (1)..(1627): unsure at all Xaa locations
  Clone ID: TF_OsC359_6886.pep
MSWHRAGVLLLGAQSCLPVPGVPAMAGSVTRRGLDMTGFVLELRGICVVLGYPHGVDYQARPLPEQEGDDAEPHAGWEVTAVILSGYPERTSLAVTAGGDSFPAACQNDALLAIVTLHQRYPDELQHSPYRYHPRRGGARDYATFRDASSEDDATIVHLARMVEAYDAARIDFHQMVHRGMVENNMKILELRQENLQLKKDLDVVEAQLHQLKIAQGEVCRPKRRRVCRSQKITARKSTSRPELVRQSLAWTCFVETPRAEPAPVVPQKGEASGVGSTEDALLLTFRPGPSQRRNAATGDGNQPEGSNHNHQGNPPPPPPPPPPPPPDTNAILTQILAQQANMMTAFLHHLQNPPQHNAPPPPPQHSKLAEFLRIRPPTFSSSNNPVDALDWLHAVGKKLDTVQCSDEEKVIFAAHQLQGPASLWWDHFQATQPEGQPITWARFTAAFRRTHVPAGVMALKKREFRELKQGNRFVMEYLHEFNNLARYAPEDVREDEEKQEKFLAGMDPELSVRLVSGDYPDFQRLVDKSIRLEAKHKELESHKRRLANFRNQQGANQRVRYTNPYPGGSSSQQQQQQQQPRSAPRPQFVVRVPQPQQQQNQQGTRAPRPPTPTVQPGQGRRDAQGQQRLCFNCFEPGHFVDKCPKPRRQQGQAPPRSNNGGKDVIRGRVNHVTAKDVLTTPDVIVGXFGDVFPEELPGMPPKREIEFRIDLAPGITPLHKRPYRMAANELAEVKKQLEELKEKGYIRPSTSPWGAPVIFVEKKDKTKRMCVDYRALNEVTIKNKYPLPRIDDLFDQLKGATVFSKIDLRSGYHQLRIREEDIPKTAFTTRYGLYEFTVMSFGLTNAPAFFMNLMNKVFMEYLDKFVVVFIDDILIYSQSEEDHQHHLRLVLGKLREHQLYAKLSKCEFWLSEVKFLGHMISAKGVAVDPETATAVTDWKQPKTVTQIRSFLGLAGYYRRFIENFSKIARPMTQLLKKEEKFVWSPQCEKAFQTLKEKLVSSPDGHVVAYASRQLRPHEGNYPTHDLELAAVVHALKIWRHYLIGNLCEIYTDHKSLKYIFTQSDLNLRQRRWLELIKDYDVGIHYHPGKANVVADALSRKSHCHTLNVRGIPPELNQQMEALNLSIVSRGFLATLEAKPTLLDQIREAQKNDPDMHGLLKIMKQGKAAGFTEDEHGTLWNENRVCVPDNRELKQLILQEAHESPYSIHSGSTKMYLNLKEKYWWVSMKREIAEFVALCDVCQRVKAEHQRPAGLLQPLQVPEWKWDEIGMDFITGLPKTQGGYDSIWVVVDRLTKVARFIPVKTTYGGNKLAELYFARIVSLHGVPKKIVSDRGSQFTSHFWKKLQEELGTRLNFSTAYHPQTDGQTERLYQILEDMLRACVLDFGKTWDKSLPYAEFSYNNSYQASIQMAPYEALYGRKCRTPLLWDQVGESQVFGTDILRETEAKVRTIRDNLKVAQSRQKSYADNRRRDMEFAVDDFVYLRVTPLRGVHRFQTKGKLAPRYVGPFRIIARRGEVAYQLELPASLGNVHDVFHVSQLKKCLRVPSEQADSEQIEVREDLTYVERPVKILDTMERRTRNRVIRFCKVQWSNHAEEEATWEREDELKAAHPDLFASSSESRGRDSV

SEQ ID NO: 26058 - protein, 662 aa, Oryza sativa
  unsure (1)..(662): unsure at all Xaa locations
  Clone ID: TF_OsC1713_5255.pep
MSAPGAAAAAGATVAIPEDGAPGAGAAANVNVNGGSSASQSSGGTFSGSFSVVGFAAALKPHAFDGSNYKRCKARALLWLTAMQCFYVSRGIRSEPPLSPEEEVKFEASDCLFRGALISVLADNIVDVYMHMPSGKDMWDALEAKFGVSDTGSELYVMEQFYDYKMVDDHSVVEQAHEIQMLAKELENNNCELPDKFVAGGIIAKLPPSSSDFATSLKHKRQEFSVSDLIGSLGVEEKARAKDNRGKKVERGSSANMVQKKNPHASHNNKKVKPDVKSKATINFKKKGKGKAKGDCFVCGKSGYWAKDCPECKDRKSANMVGRGSSLLMGNGSLAAVHGVGTVDLKFTSGKTVQLKNMQHVPSIKKNLVSGSLLCREGFRLAFESNKCVVSKYGTFVGKGYDRGGLFRSSLDDMCNNHNVVNHISKNDESXCGIRNSVMTPPYSPQSNWVAXRKSRTLTEMVNAMLDTAGLSMEWWGEAILTACHILNKIPMKHKEVTPFEEWKRKKLNLPYLRTWGCLAKVSVPIAKMRKLRPNTVDCVFLGYVIHSVGYRFLIVNSGVPNMRVGTIIESRDATFFENEFPMKHTPSTSSQETVIPHEHFAPIEHNDQTPEENPEEDNIVDTRKSKRQRVAKSFGDDYVVYLVDDTPRIIEEAYSSPNADY

SEQ ID NO: 26059 - protein, 209 aa, Oryza sativa
  Clone ID: TF_OsC369407_1.pep
MKSEYMTEEDPLVLWQSLKDRCDHQGSILLPWAQHGLITLCFQDYKFIVAYNSALYWISAWLCLCDQKITDTEMIEKKLSTYHPNNMHGRRDRRVREVSCSRGKGRVSPKAKAECKKVTCGTSGENMIIAIDVEALSIGLVTAMFPSIWLSSNEKMSQYESYFTTEPEAHIENYDDMFVNTKDGEDVHMDDDEDNLIEEVISYMSLISV

SEQ ID NO: 26060 - protein, 1107 aa, Oryza sativa
  unsure (1)..(1107): unsure at all Xaa locations
  Clone ID: TF_OsC1713_4313.pep
MSTTGDNNNTGDKEKEPLVNTNGGNTASNSSRGPFSGYNVSLLPFVLRFLQLSVAVLLRSLIYVDAYSILSMLMLYTSSTVTRSTQITNVMWKARALLWLTVMQCFFVSRGKPSEPPLSPEEEAKFEVADCLFRGALISVLADSIVDVYMHMPSRKDMWDALQAKFRVSDAGSELYVMEQFYDYNMVDDRSVVEQFVAGGIIAKLPPSWSDFATSLKHKRQEFSVTDLIGSLGVEEKARAKDNRGKKKNDGGSSANLVQKKNPHASHNNKKKVKPDVKPKATTNFKKKGQGKAKVDFFVCGKPGHWAKDCLDRKDKKSANMIISEGGGTSGRGSSLLMGNGSLAAVHDVGTVDLKFTSGKIVQLKNMQHVLSIKKNLVSGSLLCKGGFRLVFESNKCVVSKYGTFIGKGYDCGGLFRFSMDDMCNKVVNHVSDDDDESNVWHSRHCHVNFGCMTRLANMSLIPKFTLVKGSKCHTCVQSKQPRKPHRASEVRNLAPLELVHSDLCEMNGVLTKGGKKYFMRVIDNCTRFCYMYLLKTKDEALHYFKIDKAEVENHLERKIKRLRSDRGGEYFSNEFNSFCEEYEIIHERTPPYSPQSNGVAERKNRTLTEMVNAMLDTAGFSKEWWGEAILTVCHVLNRIPTKHKEVTPFKEWERKKLNLSHLHTWGCLVKVNVPIAKKCKLGQKTVDCVFLGYAIHSVGYRFLIVNSRVPNMRVGTITESRDATFFENEFPMKNALSTSSQEPILSPEHFVPIEHIDQMLEENPEEDNIVATRKSKRQRTAKSFGDDYIVYLVDDTPRTIEEAYSSLDADYWKEAVCSEMDSIMSNGTWEVAERPYGCKPVGCKWVFKKKLRSDGTIEKYKARLVAKGYTQKEGDDFFDTYSPVARLTTIRPLMVYSSIRWMLKTAFLNGELEDEIYMDQPDGXKQWHEKFDNTLTSAGFIVNEADKCVYYRYGGGEGVILCLYVDDILIFGTSLNVIGEVKDFLSKSFEMKDLEVADVILNIKLLRGDEGRITLVQSHYMDKVLSRFGYSDCKAAPTPYHPSVLLRKNQRIGKDQLRYSQIIGSLMYLASATRPDISFVVSKLSRFISNPGDDHWHALERVMRAI

SEQ ID NO: 26061 - protein, 1319 aa, Oryza sativa
  unsure (1)..(1319): unsure at all Xaa locations
  Clone ID: TF_OsC1528_1743.pep
MAGFADALRPDKFSGVHFKRWQIRVTLWLTAMKCFWVSTGKPEGILIADQQKQFEEATTLFVGCILSVLGDRLVEVYMHMTDAKELWDALNTKFGATDASNDLYIMEQFHDYKMTDNRSIVEQAHEIQTMAKELELLKCVLPDKFVAGCIIAKLPPSWRSFGTALKHKRXEYSVEGLIASLNVEGKAREKDAASKGDSGQSSANVVHKAQNKSKGKYKAQQTTNFKKKKKNNNNPNQDERTCFMCGQPGHLARKCPQRKGMKAPAGQTSKSANVTIGNTGDGGGYSNLPTVFLVNQSTNWWVDTRANVHVCADILLFSSYQVARGSIVLMGNGSHASFHGVGTVDLKFTSGKIVQLKNVQHVPSIDRNLVSGSRQTRDEFKLVFECNKVVVSKHGYFIGKGYECGGLFRFSLSDFCNKSVNHICGSVDDEANVWHSCLCHINFDLMSRLSSMCLIPKFFTVKGSKCHSCVQSKQPRKPHKAVEERNLAPLELLHSDLCEMNGVLTKCGKXYFMTLIDDATIFCYVYLLKTKDEALDYLKIYKAEVENQLDKKIKRLRFDRGGEFFSNEFDLFCEEHDIIHKRTPPYSPESNGIAERNNRTLTDLVNDMLDTTGLPKAWWGXALLTSNHLLNRVPNRNKDKTPYEIWIGRKPSLSPSTXGCLAKVNIPITKKRKLGPKTVDCVFLGYAHYSITYRFLIVKSEVPDMHVGTIMESRDATFFESFFPMKDTHSSSSQPSEVIPRSITQPEQTEHTHKHVIEEDVSEAPRRSKRQRTAKSFGDDFTVYLVDDTPKSISEAYASPDADYWKETVRSEMDSIIANGTWEVTNRPYGCKPVGCKWVFKKKLRPDGTIEKYKARLVAKGYNQKEGEDFIDTYSPVARLTTVHVLLSLAATHGLLVHQMDVKTAFLNGELDEEIYMDQPDGFVVEGQEGKVCKLLKSLYGLKQAPKQWHEKFDKTLTSSGFAVNEADKCVYYRYGGGEGVILCLYVDDILIFGTNLEVINEVKSLLSQNFDMKDLGVADVILNIKLIRGENVITFLQSHYVEKILNRFGYIDSKPSPTPYDPTPSLRKNKRIARNQLEYSQIIGSLMYLASATRPDISFVVSKLSRFTSNPGDDYWRALERVMRYLKDTMELGLHYSRYPAVLEGYSDSKWISDVDEIKATSGYVFTLGGGAVSWRSCKQTILTRSTMEAELTVLDTATVEAEXLRDLLMDLPIVEKPVPAVLMNYDNQTTCEKTIEVCQEIEKLRSYNVGLHPNSXKPGRSLHEGTITKCDRQCIVGDRFETHSILERTHLCKLDCWSQSIEILGESSRNLTKDLGV

SEQ ID NO: 26062 - protein, 1753 aa, Oryza sativa; identical to SEQ ID NO: 19850
  Clone ID: TF_OsC1713_5231.pep

SEQ ID NO: 26063 - protein, 1811 aa, Oryza sativa
  Clone ID: TF_OsC359_8337.pep
MDEVGGRWTFSRANEGYTSCGPMAGSVTRRGLDMTGFVLELRGMCVVLGYPHGEDYQARPLPDQEGDDAEPHAGWEVTAVILSGSPERTSLAVTAGGDSFPAACQNAALLAIGTLHQRYPDELQHSPYRYHPRRGGARDYATFWDASSEDDATIVHLARMVEAYDAARIDFHQMVRRGMVENNMKILELRQENLQLKKDLDAVEAQLHQLKVAQGEICRPKRRRVCRSQKITARKSTSRPELVRQSLAWTCFVETPRAEPAPVVPQEGEASGVGSSEAVDEQLVGLRVCSFSFVFFGVVWGMVMPMVTTRRNAVTGDGNQPEGSNPNHQGNPPPPPPPPPPPPPDTNAILTQILAQQANMMNAFLHHLQNPPQQNAPPPPPQHSKLAEFLRIRPPTFSSSNNPVDALDWLHAVGKKLDTVQCSDEEKVVFAAHQLQGPASLWWDHFQATQPEGQPITWARFTAAFRRTHVPAGVVALKKREFRELKQGNRSVMEYLHEFNNLARYAPEDVREDEEKQEKFLAGMDPELSVRLVSGDYPDFQRLVDKSIRLEAKHKELESHKRRLANFRNQQGANQRVRYTNPYPGGSSSQQQQQQQQPRPAPRPQFVVRVPQPQQQQNQQGTRAPRPPTPTVQPVQGRRDAQGQQRLCFNCFEPGHFADKCPKPRRQQGQAPPRSNNGGKDVIRGRVNHVTAEDVLTTPDVIVGTFLVHSIPATILFDSGASHSFISVPFVGKNQLGVERLRNPLLITTPGGVMTAKFYSPAVPIEIQGIPFPSDLILLDTKNLDVILGMNWLAQFQGVVDCARRTVTLYRGPEQPVVFFAPPTSVRSSELHQIELSEIPIVREFGDVFPEELPGMPPKREIEFRIDLAPGTTPLHKRPYRMAANELAEVKKQLEELKEKGYIRPSTSPWGAPVIFVEKKDKTKRMCVDYRALNEVTIKNKYPLPRIDDLFDQLKGATVFSKIDLRSGYHQLRIREEDIPKTAFTTRYGLYEFTVMSFGLTNAPAFFMNLMNKVFMEYLDKFVVVFIDDILIYSQSEEDHQHHLRLVLGKLREHQLYAKLSKCEFWLSEVKFLGHVISAKGVAVDPETVTAVTDWKQPKTVTQVRSFLGLAGYYRRFIENFSKIARPMTQLLKKEEKFVSSPQCEKAFQTLKEKLVSSPVLILPDTRKDFMVYCDASRQGLGCVLMQDGHVVAYASRQLRPHEGNYPTHDLELAAVVHALKIWRHYLIGNRCEIYTDHKSLKYIFTQSDLNLRQRRWLELIKDYDVGIHYHPGKANVVADALSRKGHCNTLNVRGIPPELSQQMEALNLNIVGRGFLAALEAKPTLLDQIREAQKNDPDMHGLLKNMKQGKAAGFTEDEHGTLWNGNRVCVPDNRELKQLILQEAHESPYSIHPGSTKMYLDLKEKYWWVSMKREIAEFVALCDVCQRVKAEHQRPAGLLQPLQVPEWKWDEIGMDFITGLPKTQGGYDSIWVVVDRLTKVARFIPVKTTYGGHKLAELYFARIVSLHGVPKKIVSDRGSQFTSHFWKKLQEELGTRLNFSTAYHPQTDGQTERLNQILEDMLRACVLDFGKTWDKSLPYAEFSYNNSYQASIQMAPYEALYGRKCRTPLLWDQVGESQVFGTDILREAEAKVRIIRDNLKVAQSRQKSYADNRRRDLEFAVDDFVYLRVTPLRGVHRFQTKGKLAPRYVGPFRITARRGEVAYQLELPASLGNVHDVFHVSQLKKCLRVPSEQADSEQIEVREDLTYVEKPVKILDTMERRTRNRVIRFCKVQWSNHAEEEATWEREDELKAAHPDLFASSSESRGRDSV

SEQ ID NO: 26064 - protein, 715 aa, Oryza sativa
  unsure (1)..(715): unsure at all Xaa locations
  Clone ID: TF_OsC359_7847.pep
LAPPPPRIPPLPSTPRAIKRXGINPRVPLPRFPLFPLSLSLGFVRIKPVIIAGAINGGRNLRGRFPSSPAAFSPFRRYKNVARAPLFRFRRSPLTLAVEIVLAPCSSLSAIAAELRSAAAAAPXLPPTRRPLRPLRRDAVDPVRRSASPVDRRSTVVIVIPSRAAVFLRSVRRFHRLRRLGVSRGPXVRFPLPSSLLGAAPPRRWSPAATIGARARSSRRPRRRGRPRARPRGCQVGPAVSRPRPRVRLTRGTHGADRRQPRAPGPPWTERLTRGPHFPWTRANEGYTSCGPMADNEKGNKVRSQDIGTSSSRVNEAPDTSCVAVVQHLINQNKLLIEILQQHRMPILNPSRMQPQVQLEAVQALTPQVSAPPTSQKAPHAMPHVDPKEASIICFMCDEQGHYARNCPQQKRKAPMRTEDEVRKMIITSTEWPPPGMTRRQRRNTFRGAPQLTEHLLANGGRVSDSEDSDQVSSDDEDEMERKACSRCGEIGHVASSCATICVHCEEDHPPDRCPTSRITCFFCEGTDHVPKDCQFSFLLTKKMANQPASSNGEKHQGNTNPRQDYSSSLTPVPGQRNRNEKRKCRVREDICCFNCQGMGHFADKCPKPRNIAAGTTVHATPCNQKLAPQRIVIHASRSSPIARVATAPIPMNALPQGVNAQFQPQQRIVVDGRSCVSPRPTPGRAKGNQPPEGDTQQKTVIRFNQQSEGSFSCE

SEQ ID NO: 26065 - protein, 859 aa, Oryza sativa
  unsure (1)..(859): unsure at all Xaa locations
  Clone ID: TF_OsC359_8062.pep
RVGPTCHPQPRAAPAAARALAPPPPRIPPHPAVPARIKERGITPRVSLSRFPLFSLSLSLGFVRIHPAKFAGVFNGARDLRARFPLSPAALSPSRCYKIVPRASLFRFRRSPLALAVGFVPAPCSSLSAVAAELRFAAVVAPVLLPTRRHLHRLRRVVADPVRRSASPADRRSTVDIGIPNRAAAFLHSGRRFRRPRCPGVSRGPSLXFPLLSALSGAAPPRRWSPAVTIGARARRSRRPCRRGRLRARPXGCQVGPAVSRPRPRVRLTRGTHGADRRQPRAPGPPWTERLTRGPHFPWTRANEGYTSCGPMADNEKGNKVRSQDIGTSSSRVNEAPDTSCVAVVQHLINQNKLLIEILQQHRMPILNPSQMQPQVQLEAVQALTPQVSAPPTSQKAPHAMPHVDPKEASIICFMCDEQGHYARNCPQQKRKAPMRTEDEVRKMIITSTEWPPPGMTKHQRRNSFRGAQQLTEHLLANGGRVSDSEDSDQVSSDDEDEKSPQGFNQNKMERKACSRCGEIGHVASSCATTCFHCEEDRPPGECPMSRITCFFCEGTDHVPKDCQFSFLLTKKMANQPTSSNGEKHQGNTNPRQDYRFSLTPVPGQRNRNEKRKCRVREDICCFNCQGMGHFADKCPKPRNIAASTSVHATPCNQKLAPQRIVIHASQSSPIARVATAPTPASALPQGVNAQFQPQPSVDKTEASIGIVPLDVPAQQPRNQVQDEEPKQKHEIMNELDKFIEGSMLGLQVLSGTEAPSSSAATQSKSAKGSTRDKSGEEKIPSIFLLASSNLGDEIPVRGVDLSRRVGPTSIGFAASSSTSSAPPFRPPTVGAPSSSSSRTAPPPSSASAAVPVVAVDPG

SEQ ID NO: 26066 - protein, 349 aa, Oryza sativa
  unsure (1)..(349): unsure at all Xaa locations
  Clone ID: TF_OsC359_7548.pep
QVPSDYLLRPRRSHLIIHLINIHYEQASLEKENXELKSQFEEITKKYMDLQETHDELLCXSHENLVDSHAMVEIAHEVIIATVKSYEPHVQVDFTCANTCCSNTNISPSTTCDLDCVGKREKHMDHGLVDKAQPSQDNRGNMVKKLEKGSTVACTKSCQENNKSNNKSKGQIQSWIKTLITCFMCKKVGHYALICSNKIDDQVTLPKRRTRRSNRKCYGCNEKSHEVASCPHMKNHFVSSRKKLNIKVASSKVAEKMQDVVKKAPCKDKNRLCYNCRAKGHIGNNCPMGNIPKPNSSFDYDLPRDAKKDICAIRVISSPHASIKSIWVPKSHVTYLYGPNVVEDQNVLK

SEQ ID NO: 26067 - protein, 1661 aa, Oryza sativa
  Clone ID: TF_OsC91_2609.pep
MAGLEDKDEEGASHSPRTKGIIQYFTRQVKQHTEGLDTDLQVTNEKIGQLESTQISTNTKLTGLETAVARIDTSLAALVRHFDALNAGGNGGGNDDDIDGEYVEDNLEDEYIADTEQDDRDARDRRRLHNNRRGMGGRRRREVRNNDDAFSKIKFKIPPFDGKYDPDAYLSWEIAVDQKFACHEFPENTRVRAATSEFTDFASVWWIEHGKKNPNNMPQTWDALKRVMRARFVPSYYARDLLNRLQQLRQDAKSVEEYYQELQMGLLRCNLEETEDAAMARFLGGLNREIYDIVDYKDYTNMTRLFHLACKAEREVQGRRASAKANFSASKTSSWQTRTTPPAGRTTSPSSTPTTSRAAPPPSGDKSAIKAAQPAPSASSMASTGRMRDVQCHRCKGFGHVQRDCPSKRVLVVKNDGEYSSASDFDDDTLALLAADHADNEPPEEHIGAAFADHYESLIVQRVLSAQMEKAEQNQRHTLFQTKCVVKERCCRMIIDGGSCNNLASSEMVEKLALSTKPHPHPYYIQWLNNSGKAKVTKLVHINFAIGNYHDVVECDVVPMQACNILLGRPWQFDRDSMHHGRSNQYSFLYHDKKIVLHPMSPEDILRDDVAKAAKSKCESDKKAQSDGKKPETINLKPRCLLATKSDINELIASPSVAYALVCKDALISLHDMQHSLPPAVANILQEYSDVFPKEVPPGLPPVRGIEHQIDLIPGASLPNRAPYRTNPEETKEIQRQVHELLDKGYVRESLSPCAVPVILVPKKDGSWRMCVDCRAINNITIRYRHPIPRLDDMLDELSGSIVFSKVDLRSGYHQIRMKLGDEWKTAFKTKFGLYEWLVMPFGLTNAPSTFMRLMNEVLRPFIGKFVVVYFDDILIYSKSMGEHFNHLRAVFNALRDARLFGNLEKCTFCTDRVSFLGYVVTPQGIEVDQAKVEAIQSWPTPKTVSQVRSFLGLAGFYRRFVQDFSTIAAPLNALTKKGVPFTWGTSQENAFHMLKDKLTHAPLLQLPDFNKTFELECDASGIGLGGVLLQEGKPVAYFSEKLSGPVQNYSTYDKELYALVRTLETWQHYLWPKEFVIHSDHESLKHIRSQGKLNRRHAKWVEFIESFPYVIKHKKGKENIIADALSRRYTLLTQLDYKIFGLETIKDQYAHDADFNDVLLHCKDGRTWNKFVINDGFVFRANKLCIPASSVRLLLLQEAHGGGLMGHFGAKKTHDILASHFFWPQMRRDVGRFVARCATCQKAKSRLHPHGLYMPLPVPTVPWEDISMDFVLGLPRTKRGRDSIFVVVDRFSKMAHFIPCHKTDDASHIADLFFREIVRLHGVPNTIVSDRDTKFLSHFWRTLWAKLGTKLLFSTTCHPQTDGQTEVVNRTLSTMLRAVLKKNIKMWEECLPHIEFAYNRSLHSTTKMCPFQIVYGLLPRAPIDLMPLPSSEKLNFDAKQRAELMLKLHETTKENIERVNAKYKFAGDKGRRELNFEPGDLVWLHLRKERFPDLRKSKLMPRADGPFKVLAKINENAYKIDLPADFGVSSTFNVADLKPYLGEEDELESRTTQMQEGEDDEDINTIDTSTSPHVQHDGPITRARARQLNYQERWRGSKGKRIRAGWIRIAGQRQLLTAATTSCELRFGTSALVAGLTRPTSSRRPLETPTNSSTTNPTTA

SEQ ID NO: 26068 - protein, 728 aa, Oryza sativa
  unsure (1)..(728): unsure at all Xaa locations
  Clone ID: TF_OsC359_5828.pep
RRRRRGFRRIPPSPRALKRGKITPVIPSPVSPSFPXLSPSDSFXIAPAILAGAINGXAEISAPVYSLFGRALPLSALYNRSPXPFFRFRRLPLALAFGFVLATFSSLSAVAADLRLAAVVAPVFLPTRRHLHRLRRVVADPVRPFASPADRRSSVAFVVPNRAAAFLRSGRRFRRPRCPGVSRGPSLSLPSPLRSLGRRSAAPVVAGXPSGRGRASPVGRAGEAAFGRLPRLPGGARPSAARARGMFNREKGKNVSGYASSNSSFQLNPPLASRELTRAHPWSIPSMPLSSQLPLVGSQDQNQYVFDRAFATQVNELPMPEEDVPFCHDCREQGHYALNCPWVYAKEAPSFGLAGQTSLNQPPHTKTSLQPSVQSREPNEENPLNPGNCSPPSLSYHVGSRTKHAKGKKSKNQKRKAPMRTEEEVRKMTITSTEWSTAGITIPRRQXGNTFRGARQLTQHLLSHGGRVSDSEGSDQVSSDYEDESPPHLGEEEMESKACPRCGEIGHIASMCLTLCPHCEEDHPPGECPTRKVTCFLCEGTNHVPKDCQLSVLLTKTAEIQRTTLRLSRQLVSSNSNIDDIIHSTNAPPAAPDSEKRKCRVREDICCFNCQGMGHFADKCPRPRNIAASTSVHATPCNQKLAPQRIVIHASRSSPIDRVATAPTPASALPQVVNAQFQPQPSVDKTEASXSALYLWMFQHSSQRNQVQDEEPERKKPPAALADGWVPP

SEQ ID NO: 26069 - protein, 620 aa, Oryza sativa; identical to SEQ ID NO: 19891
  Clone ID: TF_OsC359_6320.pep

SEQ ID NO: 26070 - protein, 3260 aa, Oryza sativa
  unsure (1)..(3260): unsure at all Xaa locations
  Clone ID: TF_OsC359_6170.pep
MAMRRRRAVAGDDNQRQAMPRYKPEYLFGVEGFVQELRTMSFVIGFGTVLFYAQIPHDRHEEKCRVKVTLNSNSEDIPSVMFEAGGRNYIHACQEVARIAIGELRDRYSDQLADTEYRYHPRQPQGSDRGSYLETEGIENDATTRHLVEMLWAMDETRAETVLAAQDREDRNRGKICKLEDKVDRLEKELAALKGEAPPQKARIRLTARKRALFVPRYQLALKMVNTRASGSGNNNNEGNPTLAQVLAQQAQLMNMMMQQLQNQQNQGNNHAPPQNKLAEFLRVRPPTFSSTTNPVEAGDWLHAIEKKLDLLQCTDQEKVSFASHQLHGPASEWWDHFRLNRTTAEPITWLEFTAAFRKTHIPSGVVSLKKKEFRSLTQGSRSVTEYLHEFNRLTRYAPEDVRTDEERQEKFLEGLNDELSYPLMTGDYPDFQKLVDKAIRQEDKYNRMEQKKRRIAQFKTQQGNNQKPRLTLGPQSMPQGGSSSVVRPQRQFFNNNAGNNIRNQAPRPVAVSTQQQPAKREQGSMPVVCFNCGDPGHYADKCPKPRRVKVVPAQSNSTAPASKARVNHVAAAEAQGAPDVILGTFLVNSVSATVLFDSGATHSFLSMSFAGNHGMEVEDLRRPLMVSTPSNQALSLQRSPSVRIEIKGVPFLANLILLESKDLDVILWMDWLARHKGVIDCANRKVTLTSNDGRVVTVHALSSESLRPSLNQITLEEIPIVREYPDVFPDDLPGMPPKRDIEFRIDLVPGTTPIHKRPYRMAANELAEVKRQVDDLLQKGYIRPSSSPWGAPIIFVEKKDHTQRMCVDYRALNDVTIKNKYPLPRIDDLFDQLKGATVFSKIDLRSGYHQLRIKEEDIPKTAFTTRYGLFECTVMSFGLTNAPAFFMNLMNKVFMEYLDKFVVVFIDDILIYSRTKEEHEEHLRLALEKLREHQLYAKFSKFEFWLSEVKFLGHVISAGGVAVDPSNVESVTNWKQPKTVSEIRSFLGLAGYYRRFIENFSKIAKPMTRLLQKDVKYKWSEECEQSFQELKNRLISAPILILPDPKKGFQVYCDASKLGVGCVLMQDGKVVAYASRQLRPHEKNYPTHDLELAAVVHALKIWHHYLFGTRTEVYTDHKSLKYIFTQPDLNMRQRRWLELIKDYDMGIHYHPGKANVVADALSRKGYCNATEGRQLPLELCKEFERLNLGIVSRGFVAALEAKPTLIDQVREAQINDPDIQEIKKNMRRGKAIGFLEDEQGTVWLGERICVPDNKDLKDAILKEAHDTLYSIHPGSTKMYQDLKERFWWASMKHEIAEYVAVCDVCQRVKAEHQKPAVDRLTKVAHFIPVKTTYSGSRLAELYMARIVCLHGVPKKIVSDRGSQFTSNFWKKLQEETDEQTERVNQILEDMLRACALDFGGSWDKNLPYAEFSYNNSYQASLQMAPYEALYGRKCRTPLLWDQTGERQVFGTDILREAEEKPCAAAVPVVAVAREGRHRGRQVVAVLVRPFAVAVDRRSTVAAVDPIFSAASTSTPSPSVDLPPLLWSPIPTFPESPFSQEKNLKSSKASKATPGLEWYIPGLEIELCSRDGCSEWLVLYNRMPRYKLEYLFGVEGFVQDLRTMSFAIGFGTAPFYAQIPHDRHEEKCRVKVTLNSNSEDIPSVMFEAGGRNYIHACQEVARIAIGEFRDRYSDQLADTEYRYHPRQPQGSDRGSYLETEGIENDATTRHLVEMLWAMDETRAETVLAAQDREDRNRGKICKLEDKVDRLEKELAALKGEAPPQKARIRLTARKRALFVPRYQLVPKMVLTRSNGNGPNNNNNNNGENPPLAQVLAQQAQLMNMMMQQLQNQQNQGNNHAPPQNKLAEFLRVRPPTFSSTTNPVEAGDWLHAIEKKLDLLQCTDQEKVSFASHQLHGPASEWWDHFRLNRTTAEPITWLEFTAAFRKTHIPSGVVSLKKREFRSLTQGSRSVTEYLHXFNRLARYAPEDVRTDEERQEKFLEGLNDELSYPLMTGDYPDFQKLVDKAIRQEDKYNRMEQKKRRIAQFKTQQGNNQRPRLTLGPQSMPQGGSSSVVHPQRQFFNNNAGNNIRNQAPRPVAVLTQQQPAKKEQGSKPVVCFNCGEPGHYADKCPKPRRMKVVPAQSNSTVPASKARVNHVAAAEAQDAPDVILGTFLVNLVPATVLFDSGATHSFLSMSFAGNHGMEVEDLRRPLMVSTPSNQALSMQRSPSVRIEIQGVPFLANLILLESKDLDVILGMDWLARHKGVIDCANRKVTLTSNDGRVVTVHALSSESLRSRLNQITLEEIPVVREYPDVFLDDLPGIPPKRDIEFRIDLVPGTTPIHKRPYRMAANELAEVKRQVDDLLQKGYIRPSSSPWGAPVIFVEKKDHTQRMCVDYRALNDVTIKNKYLLPRIDDLFDQLKGATVFSKIDLRSGYHQLRIKEEDIPKTAFTTRYGLFECTVMSFGLTNAPAFFMNLMNKVFMEYLDKFVVVFIDDILIYSRTKEEHEEHLRLALEKLREHQLYAKFSKCEFWLSEVKFLGHVISAGGVAVDPSNVESVTNWKQPKTVSEIRSFLGLAGYYQRFIENFSKIAKPMTRLLQKDVKYKWSEACEQSFQELKNHLISAPILILPDPKKGFQVYCDASKLGLGCVLMQDGKVVAYASRQLRPHEKNYPTHDLELAAVVHALKIWRHYLFGTRTEVYTDHKSLKYIFTQPDLNMRQRRWLELIKDYDMGIHYHPGKANVVADALSRKGYCNATEGRQLPLELYKEFERLNLGIVSRGFVAALEAKPTLIDQVREAQINDPDIQEIKKNMRRGKAIGFLEDEQGTVWLGERICVPDNKDLKDAILKEAHDTLYSIHPGSTKMYQDLKERFWWASMKREIAEYVAVCDVCQRVKAEHQKLAGLLQPLKIPEWKWEEIGMDFITGLPRTSSGHDSIWVIVDRLTKVAHFIPVKTTYSGSRLAELYMARIVCLHGVPKKIVSDRGSQFTSNFWKKLQEEMGSKLNFSTAYHPQTDGQTERVNQILEDMLRACALDFSGSWDKNLPYAEFSYNNSYQASVQMAPYKALYGRKCRTPLLWDQTGERQVFGTDILREAEEKVKIIQERLRVAQSRHKSYADNRRRDLSFDEGDYVYLRVTPFRGVHRFHTKGKLAPRFXVGPYKIISRRGEVAYQLELPQSLAGVHNVFHVSQLKKXLRVPTEEANLEQIEVQEDLTYVEKPIRILEIDERRTRNRVIRFCKVQWSNHSEEESTGEREDELKSAHPHLFAGSSESRGRDSV

SEQ ID NO: 26071 - protein, 666 aa, Oryza sativa
  unsure (1)..(666): unsure at all Xaa locations
  Clone ID: TF_OsC359_7815.pep
MDEVVATMDISEANEGYASCGSVIEMSRQMKATRVGARAQSWPACPGIPAVGRVGSVLLFTARMGKGLCHVFYDGFQXAMECRVKACLVGWPGLAWDELGPRSGCQFGPNHRRPWVKAVLGGQLCEEEDVVNCLPKLRKTVGSASEAREAVKPDVKQEKKCSSVKVLSLVSDLSLPFVFPLSLSKXLQQMADNEKGNKVRSQEMGTSSSRVNEAPDTNCVAVVQHLINQNKLLIEILQQHRMPILNPSQMQPQAQLEAIQALTPQVSAPPTSQKAPHAMSHVDSKEASIIGFMCDEQGHYARNCPQQKRKAPMRTEDEVRKMIITSTEWPPPGMTKRQRRNSFRGAPXLTEHLLANGGRVSDSEDSDQVSSDDEDEKSPQGFNQNKMEHKACSHCGEIGHVASSCATTCFHCKEDHPPGECPMSRITCFLCEGTDHVPKDCQLSFLLTKKMANQHARSNGEKHQGNTNPRQDYSFSLTPVPGQRNQNEKRKYXVRKDICCFNCQEMCHFTDKCPKPRNIATSTSVHATPHNQKLAPQRIVIHASRSIPIARVATAPTPVIALPQGVNAQFQPQPPVDKTEASICVVPLDVPAQQPRNQVQDEEPERKKVIVYFNCREEGHYSRDCPLPRQNQPPHFRQFTGSRHTNRQVVTGANAVPVKPSASQKQ

SEQ ID NO: 26072 - protein, 828 aa, Oryza sativa
  unsure (1)..(828): unsure at all Xaa locations
  Clone ID: TF_OsC359_8038.pep
GRSRGSMDISRTNEGYTSCGPVVEMSWHRAGVLLLGAQSCLPVPEVPAVGGVGSVLLSMARMGWKLCHVFRPYTVVVFCSITKMSNGXPGLAWDELGPRXSGCQFGLDHRRPWVKAVLDGQVSEEEDIVSCLPKLRKTAGSASEVEEAVKPAVKQDKRLRSVKVLSLVSNLSLPFVFPLFLSKPLQQMADNEKGNKVRSQDIGTSSSRVNEAPDTSCVTLVQHLINQNRLLIEILQQHQTPILNLSQIQPQVQLEAVQALTPQVSMPPASRRTHGDVPHVDSKEASIICFMCDEQGHYARECPQQKRKTPMRTEDEVRMTKRQRRNTFRGAPQLTEHLLANGGRVSDSEDSDQVSSDDEDEMERKACSRCGEIGHVASSCATTCVHCEEDHPPDRCPTSRITCFFCEGTDHVPKDCQFSLLLTKKMANQPASSNGEKHQGNTNPRQDYSFSLTPVPGQRNQNEKRKCRVREDICCFNCQGMGHFADKYPKPRDIAASTSVHATPCNQKLAPQRIVIHASRSSPIARVATAPTPASALPQGVNAQFQPQPPVDKTEASIGILPLDVPAQQPRNQVQDEEPKPMGMITVQLLLEEYEDFEKLVDKAIQLESEHNRMKNCKRRIVSIPVFPCGNQRQRTEPLQITGSSVAHQEFPPQEDGHNADNNISNTNDDDTTNNHASCPISDHSNQACNVNIIHQGVDDSINDGTQNDNPSNCDSEKDSNGDSNYGTTDANVSKDFQPPIPTPSQNDRPQTDSSAKKTLICYNCKGPGHYSRDCLQPRQSRSPHYRQFTRSRHPNRIVVTGANAVPVSLKGSKPKDLIVPRSVRNPH

SEQ ID NO: 26073 - protein, 1609 aa, Oryza sativa
  unsure (1)..(1609): unsure at all Xaa locations
  Clone ID: TF_OsC1458_2.pep
MALRLAAVPESAAADLSAAANTLPCISYRDSIRSVAAVVSGGRGPLFQSEDSASTWSSSSYASDCSGHSSGVSAAAAAGFRALTAHELREVARRMVADGYAQRMVQAFDDAATVEVLEGEMLADCRLDDDIAKDYEARAAVREARAAREEAEARLQVATRAARLVAAEAEAARTAEAARQAAAAAATLRAEEEEERRDLELTDAARVRRDADRDRHIGRRDRDFSPHRRGSDLHRGEEERRDPWRDPRINRALETQRLREQAAAIEAQLDFDREQGGRDVGARSPRRQRASPSPDRRRGRRGRSGSPPVVQIVVKDVGGAWPMLTKTNYAEWAMVMKVKLQARHMWDAVRYGDVDYGEDRRALERLAQLGDTTIDEERAVEKLLCVVPEKYTQLALSIETLLDFTELTNEEVTGRLKAVDNRKQLPPSEPITIGGKLFFTKEKWLARQQERKKGEATSSSASGSSSSRKRRPRKWEKARSGALGGADGERKGSRNDTCHNCGKTGHWAKDCRQAKHGGQAHVAQAQEGDEVALFFVHGSIEPHFTPTPDATAPLHLDELWAHVFLSNGSCDDKIDGWCLDTGATHHMTGRREFFSKLDSSVQGSVKFEDASAVEIKGVGSILFTTKTGEHRLLTGVYYIPALRNSIISLGQLDENGLLVEIEDGVLRVWDRHRRLLVKVNRGANRLYVLHVQVAQPVCLAARRDDDAWRWHERFGHLNFEALKQLSNKEMVQGMPRVEHVEQFCDTCVLTKQRRLPFPRQASFCAKEKLELVHGDLCGPVTPATPGGRRFFLLLVDDVSCYMWVVLLDSKAVAADAIKHHQVAAEKECGRKLRVLHTDNGGEFTTAEFAAYCADERIQRHFSAPYTPQQNGVVERRNQTVVATARALLKQRGMPAIYWGEAVMTAVHLLNRSPTKALDGKTSYEAWHGRKPVVSHLRVFGCLAFAKELNHVGKLNDRSSPGVFIGYAEGVKAYRILDPSTQHVRISRDVVFDEGRGWASYKAVDDGSTSTLRDFVVDYVHFRAAGGASSSSSPSSSTSAPGSPSAPASPLPPTPPATPPSPATPRSPTPAPTPPVEFATPLSNDEDRVDAYHDDEPLRYRTMDNIFGDQPVPGLETRDFEAELHLAHEDGEPCSFAEANGDVAWRTAMQHEMDAVERNWTWVLADLPASHRAITLKWVYKLKKDEAGAVIKHKARLVARGFVQQEGVDFDDAFAPVARMESVRLLLALAAQEGWRVHHMDVKSAFLNGDLKEEVYVHQPPGFVIPGKENKVLRLRKALYGLRQALYAKLDSTLKQMGFQQNSHEAAVYQRGKDGNALLVGVYVDDLVITGTKEAEVEAFKEEMKATFQMSDLGLLSFYLGIEVHQDSSGISLRQTAYAKCIVELGGLTGCNPAYTPMEERLKLSRDSTAEXEVDATQYRHIVGSLRYLVHTRPDLAFAVGYVSRFMQRPTTEHQQAVXVEGTTDYGFHYPRCPXCLISWQSVKQQVVALSSCEAEYIATTTASTQALWLARLLGDLLGRNTEAVELRMDSKSALALAKNPVFHERSKHIRIKYHFIRSCLEEGSIKASYINTQDQLADLLTKSLGRVKFQEFRARIGMVQIPQKAPHMT

SEQ ID NO: 26074 - protein, 557 aa, Oryza sativa
  unsure (1)..(557): unsure at all Xaa locations
  Clone ID: TF_OsC1528_1632.pep
MLLLSAVIRGGRCIIAGDCDADRAGSEIDVHDPDAEIWVTRDVQRSSEADVQRRGCAVLRISDRRQSRGGPTAGGGVRRAGGWGGAIWMGRTERWCSRTGTGTATEDRDEEAEAEAEGERRRRRPPIPSPSSYRCGFSHKGYPFYCPWAEPHSEHSVQPIEKEASSRIKLTSRSHLRRTWALPASTVRWPPLPSWRQAPGLPRFIKFDFNIAQTYPEADYSISLAGVHRRSGEQVSGTSAFDVLHREKAAIRVTLWLTAMKCFWVSTGKPEGVLTAEQQKQFEEATTLFVGCILSVLGDRLVEVYMHMTDAKELWDALNTKFGATDASNDLYIMEQFHDYKMADNRSVVEQAHEIQTMAKELELLKCVLLDKFVAGCIIAKLPPSWRSFGTALKHKRQEYSVEGLIASLDVEEKAREKDAASKGDGGQSSSNVVHKAQNKSKGKYKAQQTTNFKKQKKNNNNPNQDERTCFVCGQVGHLARKCPQRKGMKAPAGQTSKSANVTIGNTGDGSGYGNLPTXRTGFHRPNGEWVTCFCSWCWHGRSEVYFGKDRAAEERV

SEQ ID NO: 26075 - protein, 1935 aa, Oryza sativa; identical to SEQ ID NO: 19962
  Clone ID: TF_OsC1528_1674.pep

SEQ ID NO: 26076 - protein, 1218 aa, Oryza sativa; identical to SEQ ID NO: 19973
  Clone ID: TF_OsC1528_1689.pep

SEQ ID NO: 26077 - protein, 1441 aa, Oryza sativa; identical to SEQ ID NO: 19894
  Clone ID: TF_OsC1528_1718.pep

SEQ ID NO: 26078 - protein, 1409 aa, Oryza sativa; identical to SEQ ID NO: 19958
  Clone ID: TF_OsC1528_1730.pep

SEQ ID NO: 26079 - protein, 1308 aa, Oryza sativa
  unsure (1)..(1308): unsure at all Xaa locations
  Clone ID: TF_OsC1528_1831.pep
MAGFADALRPDKLTGVHFKRWQIRVTLWLTAMKCFWVSTGKPEGVLTAEQQKQFEEATTLFVGCILSVLGDRLVEVYMHMTDAKELWDALNTKFGATDASNDLYIMEQFHDYKMADNRSVVEQAHEIQTMARELELLKCVLPDKFVAGCIIAKLPPSWRSFGTALKHKRQEYSVEGLIASLDVEEKAREKDAASKGDGGQSSANVVHKAQNKSKGKYKAQQTTNFKKQKKNNNNPNQNERTCFVCGQVGHLARKCPQRKGMKAPAGQTSKSANVTIGNTGHGSGYGNLPTVFSVNQSTNWWVDTGANVHVCADISLFSSYQVARGSTVLIGNGSHASVHGVGTVDLKFTSGKIVQLKNMQHVPSIDRNLVSGSRLTRDGFKLVFESNKVVVSKHVYFIGKGYECGGLFRFSLSDFCNKSVNHICGSVDDEANVWHSRLCHINFGLMSRLSSMCLIPKFSIVKGSKCHSCVQSKQPRKPHKAAEERNLAPLELLHSDLCEMNGVLTKGGKRYFMTLIDDATRFCYVYLLKTKDEALDYFKIYKAEVENQLDRKIKRLRSDRGGEFFSNEFDLFCEEHGIIHERTPPYSPESNGIAERKNRTLTDLVNAMLDTAGLPKAWWGEALLTSNHVLNIVPNRNKDKTPYEIWIGKKPPLSYLRTWGCLAKVNVPITKKRKLGPKTVDCVFLGYAHHSIAYRFLIVKSEVPDMHVGTIMESRDSIFFESFFPMKDTHSGSNQPSEIIPSPITPPEQTEHTHELVSEEDVSEAPRRSKRQRTAKSFDDDFTVYLVDDTPKSISEAYASPDADYWKEAVRSEMDSIIANGTWEVTERPYGCKPVGCKWVFKKKLRPDGTIEKYKARLVAKGYTQKEGEYFFDTYSPVARLTTIRVLLSLAASHGLLVHQMDVKTAFLNGELDEEIYMDQPDGFVVEGQEGKVCKLLKSLYGLKQAPKQWHEKFDKTLTSAGFAVNEADKCVYYRHGGGEGVILCLYVDDILIFGTNLEVINEVKSFLSQNFDMKDLGVADVILNIKLIRGENGITLLQSHYVEKILNRFGYIDSKPSPTPYDPSLLLRKNKRIARNQLEYSQIIGSLMYLASATRPDISFAVSKLSRFTSNPGDDHWRALERVMRYLKGTVELGLHYTGYPAVLEGYSDSNWISDVDEIKATSGYVFTLGGGAVSWRSSKQTILTRSTMEAELTALDTATVEAEWMRDLLMDLPIVEKPTCEKTIEVCQEIEKLRSYNVGLHPNSXKPGRSLHEGTITKCDRQCIEGDGFETHSILERTHLCELDCWSQSMEILGESSRKLTKDLGV

SEQ ID NO: 26080 - protein, 1443 aa, Oryza sativa
  unsure (1)..(1443): unsure at all Xaa locations
  Clone ID: TF_OsC1528_1835.pep
MDGRGRGRREVDLAAATGGEELGVSSGSGVSKAGPQAMRNRQRELREDGSRCGRPRMEERWEPESASSSSSATPPASMLDLTLLAALELRLIFLSRSGQSSTKPTRPSWPSSRHSSMRRWCSSIGELEPAARCRAEEDAEHVLRQVRPAAGCVRCSVFMCAPPWGKPPRSNDAFMLVFICNVMIYLWNKLNPYMPIISTIQKPYYRHCDFTMAGFADALRPDKFTGVHFKRWQIRVTLWLTAMKCFWVSTGKPEGVLTAEQQKQFEEATTLFVGCILSVLGDRLVEVYMHMTDAKELWDALNTKFGATDASNDLYIMEQFHDYKMADNRSVVEQAHEIQTMAKELELLKCVLPNKFVAGCIIAKLPPSWRSFGTALKHKRQEYSVEGLIASLDVEEKAREKDAASKGDGGQSSANVVHKAQNKSKGKYKAQQTTNFKKQKKNNNNPNQDERTCFVCGQVGHLARKCPQRKGMKAPAGQTSKSANVTIGNTGDGSGYGNLPTVFSVNQSTNWWVDTGANVARGSTVLMGNGSHASVHGVGTVDLKFTSGKIVQLKNVQHVPSIDRNLVSGSRLTRDGFKLVFESNKVVVSKHGYFIGKGYECGGLFRFSLSDFCNKSVNHICGSVDDEANVWHSRLCHINFGLMSRLSSMCLIPKFSIVKGSKCHSCVQSKQPRKPHKAAEERNLAPLELLHSDLCEMNGVLTKGGKRYFMTLIDDATRFCYVYLLKTKDEALDYFKIYKAEVENQLDRKIKRLRSDRGGEFFSNEFDLFCEEHGIIHERTPPYSPESNGIAERKNRTLTDLVNAMLDTAGLPKAWWGEALLTSNHVLNRVPNRNKDKTPYEIWIGRKPSLSYLRTWGCLAKVNVPITKKRKLGPKTVDCVFLGYAHHSIAYRFLIVKSEDVSEAPRRSKRQRTAKSFGDDFTVYLVDDTPKSISEAYASPDADYWKEAVRSEMDSIIANGTWEVTERPYGCKPVGCKWVFKKKLRPDGTIEKYKARLVAKGYTQKEDEDFFDTYSPVARLTTIRVLLSLAASHGLLVHQMDVKTVFLNGELDEEIYMDQPDGFVVEGQEGKVCKLLKSLYGLKQAPKQWHEKFDKTLTSAGFAVNEADKCVYYRHGGGEGVILCLYVDDILIFGTNLEVINEVKSFLSQNFDMKDLGVADVILNIKLIRGENGITLLQSHYVEKILNRFGYIDSKPSPTPYDPSLLLRKNKRIARNQLEYSQIIGSLMYLASATRPDISFAVSKLSRFTSNPGDDHWRALERVMRYLKGTVELGLHYTGYPAVLEGYSDSNWISDVDEIKATSGYVFTLGGGAVSWRSCKQTILTRSTMEAELTALDTATVEAEWLRDLLMDLPVVEKPVPAILMNCDNQXRHVKRRLKSVRKLRNSGVITLDYIQTARNLADPFTKGLSRNVIDNASKEMGLRPIAFLKELTFVSLTVGRSL

SEQ ID NO: 26081 - protein, 1810 aa, Oryza sativa; identical to SEQ ID NO: 19928
  Clone ID: TF_OsC1528_1869.pep

SEQ ID NO: 26082 - protein, 1468 aa, Oryza sativa
  Clone ID: TF_OsC1528_2006.pep
MGDPNDLKTSVEALTTAMKEMQASIAANAKAIAALSSGRTSSSGATTDSGEPRTVRPPRFQKMDFPRYDGKSDPLTFLNWCESYFHQQRIMDEEKVWMASYNLEDGAQLWYMQVQADEGKPSWRRFRELLVLRYGPPLRSAPLFELADCRRTTTVEDYQDHFQALLPRAGRLTKAQRVQLFTGGLLPPLSLKVQMQNPQSLVTAMSLARQFELMEQCTATLAKAPGHGILPTLGPRQAPPQPPAPRAASPPVLIDGRPVKRLSQAEQDERRRLGLCFNYYSIPLAGVHQRSGEQVSGTSAFDVLHREKAAIRHCDFTMAGFADALRPDKFTGVHFKRWQIRVTLWLTAMKCFWVSTGKPEGILTAEQQKQFEEATTLFVGCILSVLGDRLVEVYMHMTDAKELWDALNTKFGATDASNDLYIMEQFHDYKMADNRSVVEQAQEIQTMAKELELLKCVLPDKFVAGCIIAKLPPSWRSFGTALKHKRQEYSVEGLIASLDVEEKAREKDAASKGDGGQSSANVVHKAQNKSKGKYKAQQTTNFKKQKKNNNNPNQDERTCFVCGQVGHLARKCPQRKGMKAPAGQTSKSANVTIGNTGDGSGYGNLPTVARGSTVLMGNGSHASVHGVGTVDLKFTSGKIVQLKNVQHVPSIDRNLVSGSRLTRDGFKLVFESNKVVVSKHGYFIGKGYECGGLFRFSLSDFCNNMCLIPKFSIVKGSKCHSCVQSKQPRKPHKAAEERNLAPLELLHSDLCEMNGVLTKEVENQLDRKIKRLRSDRGGEFFSNEFDLFCEEHGIIHERTPPYSPESNGIAERKNRTLTDLVNAMLDTAGLPKACEAPRRSKRQRTAKSFGDDFTVYLVDDTPKSISEAYASPDADYWKEAVHSEMDSIIANGTWEVTERPYGCKPVGCKWVFKKKLRPDASHGLLVHQMDVKTAFLNGELDEEIYMDQPDGFVVEVNEADKCVYYRHGGGEGVILCLYVDDILIFGTNLEVINESHYVEKILNRFGYIDSKPSPTPYDPSLLLRKNKRIARNQLEYSQIIGSLMYLASATRPDISFAVSKLSRFTSNPGDDHWRALERVMRYLKGTVELWLHYTGYPAVLEGYSDSNWISDVDEIKATSGYVFTLGGGAVSWSKDVVLQSILEGTHLCELDCWSQSMKILDYSIPLAGVHQRSGEQVSGTSAFDVLHREKAAISRGHNKICKHLFLLDCAMDDDDDTDAAEEPQDLESPVFSLHAIAGVPVADTMQVQVTVGATTLTALLDSGSTHSFIAEEAACRTGLPVQPRPRMTATVANGEKVACPGVIRQAVLSIDGSLFTVDLFVIPLAGYDMVLGTQWMASLGPIVWDFTERTMSFQYHGRTICWAGVPSSPAPRIRVTTAASESLLDELLADFGDVFAEPKGLPLQHARDHTIVLKPDAPPVAVRPYRYPAAHKDELERQCAAMIEQGIVRRSDSAFSSPVLLIKKADGS

SEQ ID NO: 26083 - protein, 1432 aa, Oryza sativa; identical to SEQ ID NO: 19970
  Clone ID: TF_OsC1528_2011.pep

SEQ ID NO: 26084 - protein, 1356 aa, Oryza sativa
  Clone ID: TF_OsC1528_2060.pep
MAGFADALRPDKFTGVHFKRWQIRVTLWLTAMKCFWVSTGKPEGVLTAEQQKQFEEATTLFVGCILSVLGDRLVEVYMHMTDAKELWDALNTKFGATDASNDLYIMEQFHDYKMADNRSVVEQAHEIQTMAKELELLKCVLPDKFVAGCIIAKLPPSWRSFGTALKHKRQEYSVEGLIASLDVEEKAREKDAASKGDGGQSSANVVHKAQNKSKGKYKAQQTTNFKKQKKNNNNPNQDERTCFVCGQVGHLARKCPQRKGMKAPAGQTSKSANVTIGNTGDGSGYGNLPTVFSVNQSTNWWVDTGANVHVCADISLFSSYQVARGSTVLMGNGSHASVHGVGTVDLKFTSGKIVQLKNVQHVPSIDRNLVSGSRLTRDGFKLVFESNKVVVSKHGYFIGKGYECGGLFRFSLSDFCNKSVNHICGSVDDEANVWHSRLCHINFGLMSRLSSMCLIPKFSIVKGSKCHSCVQSKQPRKPHKAAEERNLAPLELLHSDLCEMNGVLTKGGKRYFMTFIDDATRFCYVYLLKTKDEALDYFKIYKAEVENQLDRKIKRLRSDRGGEFFSNEFDLFCEEHGIIHERTPPYSPESNGIAERKNRTLTDLVNAMLDTAGLPKAWWGEALLTSNHVLNRVPNRNKDKTPYEIWIGRKPSLSYLRTWGCLAKVNVPITKKRKLGPKTVDCVFLGYAHHSIAYRFLIVKSEVLDMHVGTIMESRDATFFESFFPMKDTHSGSNQPSEIIPSSITPPEQTEHTHELVSEEDVSEAPRRSKRQRTAKSFGDDFTVYLVDDTPKSISEAYASPDADYWKEAVRSEMDSIIANGTWEVTERPYGCKPVGCKWVFKKKLRPDGTIEKYKARLVAKGYTQKEGEDFFDTYSPVARLTTIRVLLSLAASHGLLVHQMDVKTAFLNGELDEEIYMDQPDGFVVEGQEGKVCKLLKSLYGLKQAPKQWHEKFDKTLTSAGFAVNEADKCVYYRHGGGEGVILCLYVDDILIFGTNLEVINEVKSFLSQNFDMKDLGVADVILNIKLIRGENGITLLQSHYVEKILNRFGYIDSKPSPTPYDPSLLLRKNKRIARNQLEYSQIIGSLMYLASATRPDISFAVSKLSRFTSNPGDDHWRALERVMRYLKGTVELGLHYTGYPAVLEGYSDSNWISDVDEIKATSGYVFTLGGGAVSWRSCKQTILTRSTMEAELTALDTATVEAEWLRDLLMDLPVVEKPVPAILMNCDNQTTCEKTIEVCQEIKKLRSYNVGLHPNSEKPGRSLHEGTITKCDRQCIEGDGFETHIQNGYYSISLVETTIEPNKVGYDLCVGITSLGYTQKDMYSQKVTTCVVFTFGSTTSPIAKIPPPFVESRQ

SEQ ID NO: 26085 - protein, 1281 aa, Oryza sativa
  Clone ID: TF_OsC1528_2066.pep
MAGFADALRPDKFTGVHFKRWQIRVTLWLTAMKCFWVSTGKPEGVLTAEQQKQFEEATTLFVGCILSVLGDRLVEVYMHMTDAKELWDALNTKFGATDASNDLYIMEQFHDYKMADNRSVVEQAHEIQTMAKELELLKCVLPDKFVAGCIIAKLPPSWRSFGTALKHKRQEYSVEGLIASLDVEEKAREKDAASKGDGGQSSANIVHKAQNKSKGKYKAQQTTNFKKQKKNNNNPNQDERTCFVCGQVGHLARKCPQRKGMKAPAGQTSKSANVTIGNTGDGSGYGNLPTVFSVNQSTNWWVDTGANVHVCADISLFSSYQVARGSTVLMGNGSHASVHGVGTVDLKFTSGKIVQLKNVQHVPSINRNLVSGSRLTRDGFKLVFESNKVVVSKHGYFIGKGYECGGLFRFSLSDFCNKSVNHICGSVDDEANVWHSRLCHINFGLMSRLSSMCLIPKFSIVKGSKCHSCVQSKQPRKPHKAAEERNLAPLELLHSDLCEMNGVLTKGGKRYFMTLIDDATRFCYVYLLKTKDEALDYFKIYKAEVENQLDRKIKRLRSDRGGEFFSNEFDLFCEEHGIIHERTPPYSPESNGIAERKNRTLTDLVNAMLDTAGLPKAWWGEALLTSNHVLNRVPNRNKDKTPYEIWIGRKPSLSYLRTWGCLAKVNVPITKKRKLGPKTVDCVFLGYAHHSIAYRFLIVKSEVPDMHVGTIMESRDATFFESFFPMKDTHSGSNQPSEIIPSSITPPEQTEHTHELVSEEDVSEAPRRSKRQRTAKSFGDDFTVYLVDDTPKSISEAYASPDADYWKEAVRSEMDSIIANGTWEVTEQPYGCKPVGCKWVFKKKLRPDGTIEKYKARLVAKGYTQKEGEDFFDTYSPVARLTTIRVLLSLAASHGLLVHQMDVKTAFLNGELDEEIYMDQPDGFAVNEADKCMYYRHGGGEGVILCLYVDDILIFGTNLEVINEVKSFLSQNFDMKDLGVADVILNIKLIRGENGITLLQSHYVEKILNRFGYIDSKPSPTPYDPSLLLRKNKRIARNQLEYSQIIGSLMYLASATRPDISFAVSKLSRFTSNPGDDHWRALERVMRYLKGTVELGLHYTGYPVVLEGYSDSNWISDVDEIKATSGYVFTLVGGAVSWRSCKQTILTRSTMEAELTALDTATVEAEWLRDLLMDLPVVEKPVPAILMNCDNQTTCEKTIEVYQEIKKLRSYNVGLHPNSEKPGRSLHEGTITKCDRQCIEGDGFETHSILEGTHLCELDCWSQSMKILGESSRKLTKDLGV

SEQ ID NO: 26086 - protein, 1000 aa, Oryza sativa
  unsure (1)..(1000): unsure at all Xaa locations
  Clone ID: TF_OsC1528_2076.pep
MMSNENISAKAGMAGIGWSSIWWLPLADGVCLLDSCWIGVGDRIRYPLFLSSSSSSAMSTAAASETSSASAWWAALDSVPCAERRIGQRRHGQQPPPSTRVSCCWAEAAAVAEQAGLRWSSAHEAGSGSGSARGGGERERQAATGNKQIHDERVSDKADTRLTTRMTRWRRAAGNWQLPNSTVYALAKLAPLVASLFLSFSSCTINQSIDGSAHRSNYSIPLAGVHQRSGEQVSGTSAFNVLHREKAAIRHCDFTMAGFADALRPDKFTGVHFKRWQIRVTLWLTAMKCFWVSTGKPEGVLTAEQQKQFEEATTLFVGCILSVLGDRLVEVYMHMTDAKELWDALNTKFGATDASNDLYIIEQFHDYKMADNRSVIEQAHEIQTMAKELELRKCVLPDKFVAGCIIAKLPSSWRSFGTALKHKRQEYSVEGLIASLDVEEKAREKDAASKGDGGQSSANVVHKAQNKSKGKYKAQQTTNFKKQKKNNNNPNQDERTCFVCGQVGHLARKCPQRKGMKAPAGQTSKSANVTIGNTGDGSGYGNLPTVARGSTVLMGNGSQASVHGVGTVDLKFTSGKIVQLKNVQHVPSIDRNLVSGSRLTRDGFKLVFESNKVVVSKHGYFIGKGYECGGLFRFSLSDFCNKSVNHICGSVDDEANVWHSHYWKEAVRSEMDSIIANGTWEVTERPYGCKPVGCKWVFKKKLRPDGFAVNEADKCVYYRHGGGEGVILCLYVDDILIFGTNLEVINESHYVEKILNRFGYIDSKPSPTPYDPSLLLRKNKRIARNQLEYSQIIGSLMYLASATRPDISFAVSKLSRFTSNPGDDHWRALERVMRYLKGTVELGLHYTGYPAVLEGYSDSNWISDVDEIKATSGYVFTLGGGAVSWRSCKQTILTRSTMEAELTALDTATVEAEWLRDLLMDLPVVEKPVPAILMNCDNQTXLRNSGVITLDYIQTARNLADPFTKGLSRNVINNASKEMGLRPMSPEPLPLTSCTGRRRQ

SEQ ID NO: 26087 - protein, 1017 aa, Oryza sativa
  unsure (1)..(1017): unsure at all Xaa locations
  Clone ID: TF_OsC1528_2095.pep
MAGFADALRPDKFTGVHFKRWQIRVTLWLTAIKCFWVYMHMTDAKELWDALNTKFGATDGSNDLYIMEQFHDYKMADNRSVVEQAHEIQTMAKELELLKCVLPDKFVAGCIIAKLPPSWRSFGTALKHKRQEYSVEGLIASLDVEEKAREKDAASKGDGGQSSANVVHKAQNKSKGKYKAQQTTNFKKQKKNNNNPNQDERTCFVCGQVGHLARKCPQRKGMKAPAGQTSKSANVTIGNTGDGSGYGNLPTVFSVNQSTNWWVDTGANVARGSTVLMGNGSHASVHGVGTVDLKFTSGKIVQLKNVQHVPSIDRNLVSGSRLTRDGFKLVFESNKVVVSKHGYFIGKGYECGGLFRFSLSDFCNKSVNHICGSVDDEANVWHSRLCHINFGLMSRLSSMCLIPKFSIVKGSKCHSCVQSKQPRKPHKAAEERNLAPLELLHSDLCEMNGVLTKGGKRYFMTLIDDATRFCYVYLLKTKDEALDYFKIYKAEVENQLDRKIKRLRSDRGGEFFSNEFDLFCEEHGIIHERTPPYSPESNGIAERKNRTLTDLWVFKKKLRPDGTIEKYKARLVAKGYTQKEGEDFFDTYSPVARLTTIRVLLSLAASHGLLVHQMDVKTAFLNGELDEEIYMDQPDGFVVEGQEGKVCKLLKSLYGLKQAPKQWHEKFDKTLTSAGFAVNEADKCVYYRHGGGEGVILCLYVDDILIFGTNLEVINEVKSFLSQNFDMKDLGVADVILNIKLIRGENEITLLQSHYVEKILNRFGYIDSKPSPTPYDPSLLLRKNKRIARNHLEYSQIIGSLMYLASATRPDISFAVSKLSRFTSNPGDDHWRALERVMRYLKGTVELGLHYTGYLAVLEGYSDSNWISDVDEIKATSGYVFTLGGGAVSWRFCKQTILTRSTMEAELTALDTATVEAERLRDLLMDLPVVEKPVPAILMNCDNQTTCEKTIEVCXEIKKLRSYNVGLHPNSEKPGRSLHEGTITKCDRQCIEGDGFETHSILERTHLCELDCWSQSM

SEQ ID NO: 26088 - protein, 884 aa, Oryza sativa; identical to SEQ ID NO: 19906
  Clone ID: TF_OsC1528_2104.pep

SEQ ID NO: 26089 - protein, 1137 aa, Oryza sativa
  Clone ID: TF_OsC1528_2131.pep
MISTKKRIPRTPPARERAPLAGGAPTAKGRAPPLGGKAPLAWWRMPRLRHRAPSAGRSPWLRGRKSGAADYSIPLAGVHRRLGEQVSGTSAFDVLHREKAAIRHCDFTMAGFADALRPDKFTGVHFKRWQIRVTLWLTAMKCFWVSTGKPEGVLTAEQQKQFEEATTLFVGCILSVLGDRLVEVYMHMTDAKELWDALNTKFGATDASNDLYIMEQFHDYKMADNRSVVEQAHEIQTMAKELELLKCVLPDKFVAGCIIAKLPPSWRSFGTALKHKRQEYSVEGLIASLDVEEKAREKDAASKGDGGQSSANVVHKAQNKSKGKYKAQQTTNFKKQKKNNNNPNQDERTCFVCGQVGHLARKCPQRKGMKAPAGQTSKSANVTIGNTGDGSGYGNLPTVARGSTVLMGNGSHASVHGVGTVDLKFTSGKIVQLKNVQHVPSIDRNLVSGSRLTRDGFKLVFESNKVVVSKHGYFIGKGYECGGLFRFSLSDFCNNMCLIPKFSIVKGSKCHSCVQSKQPRKPHKAAEERNLAPLELLHSDLCEMNGVLTKEVENQLDRKIKRLRSNRGGEFFSNEFDLFCEEHGIIHERTPPYSPESNGIAERKNRTLTDLVNAMLDTAGLPKACEAPRRSKRQRTAKSFGDDFTVYLVDDTPKSISEAYASPDADYWKEAVRSEMDSIIANGTWEVTERPYGCKPVGCKWVFKKKLRPDASHGLLVHQMDVKTAFLNGELDEEIYMDQPDGFVVEGFAVNEADKCVYYRHGGGEGVILCLYVDDILIFGTNLEVINESHYVEKILNRFGYIDSKPSPTPYDPSLLLRKNKRIARNQLEYSQIIGSLMYLASATRPDISFAVSKLSRFTSNPGDDHWRALERVMRYLKGTVELGLHYTGYPAVLEGYSDSNWISDVDEIKATSGYVFTLGGGAVSWSKDVVLQSILERTHLCELDCWSQSMKILDYSIPLAGVHRRSGEQVSGTSAFDVLHREKAAIRVLTWNDGFYNGEIKTRKIENNLVTELTAEQLLLQRSEQLRELYNSLLSGESADQQRRRPVTALSPEDLGNVEWYYVVCMTYAFRPGQCVPGKSFASNGCAWLCNAQSADSKAFPRKLLAKNASIQTIVCVPFMTGVLELGTTDPKTDTF

SEQ ID NO: 26090 - protein, 1394 aa, Oryza sativa
  Clone ID: TF_OsC1528_2144.pep
MQPPFAVLFCCKFGFVFVLETFRKIRSNDAFMLVFICNVMIYLWNRLNHYMSIISTIQKPYYRHCDFTLAGFADALRPDKFTGVHFKRWQIRVTLWLTAMKCFWVSTGKPEGVLTAEQQKQFEEATTLFVGCILSVLGNRLVEVYMHMTDAKELWDALNTKFGATDGSNDLYIMEQFHDYKMADNRSVVEQAHEIQTMAKELELLKCVLPDKFVAGCIIAKLPPSWRSFGTALKHKRQEYSVEGLIASLDVEEKAREKDAASKGDGGQSSANVVHKAQNKSKGKYKAQQTTNFKKQKKNNNNPNQDERTCFVCGQVGHLARKCPQRKGMKAPAGQTSKSANVTIGNTGDGSGYGNLPTVFSVNQSTNWWVDTGANVHVCADISLFSSYQVARGSTVLMGNGSHASVHGVGTVDLKFTSGKIVQLKNVQHVPSIDRNLVSGSRLTRDGFKLVFESNKVVVSKHGYFIGKGYECGGLFRFSLSDFCNKSVNHICGSVDDEANVWHSRLCHINFGLMSRLSSMCLIPKFSIVKGSKCHSCVQSKQPRKPHKAAEERNLAPLELLHSDLCEMNGVLTKGGKRYFMTFIDDATRFCYVYLLKTKDEALDYFKIYKAEVENQLDRKIKRLRSDRGGEFFSNEFDLFCEEHGIIYEMTPPYSPESNGIAERKNRTLTDLVNAMLDTAGLPKAWWGEALLTSNHVLNRVPNRNKDKTPYEIWIGRKPSLSYLRTWGCLAKVNVPITKKRKLGPKTVDCVFLGYAHHSIAYRFLIVKSEVPDMHVGTIMESRDAIFFESFFPMKDTHSGSNQPFEIIPSSITPPEQTEHTHELVSEEDVSEAPRRSKRQRTAKSFGDDFTVYLVDDTPKSISEAYASPDADYWKEAVRSEMDSIIANGTWEVIERPYGCKPVGCKWVFKKKLRPDGTIEKYKARLVAKGYTQKEGEDFFDTYSPVARLTTIRVLLSLAASHGLLVHQMDVKTAFLNGELDEEIYMDQPDGFVVEGQERKVCKLLKSLYGLKQAPKQWHEKFDKTLTSAGFAVNEADKCVYYRHGGGEGVILCLYVDDILIFGTNLEVINEVKSFLSQNFDMKDLGVADVILNIKLIRGENGITLLQSHYVEKILNRFGYIDSKPSPTPYDPSLLLRKNKRIARNQLEYSQIIGSLMYLASATRPDISFAVSKLSRFTSNPGDDHWRALERVMRYLKGTVELGLHYTGYPAVLEGYSDSNWISDVDEIKATSGYVFTLGGGAVSWRSCKQTILTRSTMEAELTALDTATVEAEWLRDLLMDLPVVEKPVPAILMNCDNQTTCEKTIEVCQEIKKLRSYNVGLHPNSEKPGRSLHEGTITKCDRQCIEGDGFETHMSYTMVSILERTHLCELDCWSQSMKILGESSRKLTKDLGV

SEQ ID NO: 26091 - protein, 1028 aa, Oryza sativa; identical to SEQ ID NO: 19977
  Clone ID: TF_OsC1528_2147.pep

SEQ ID NO: 26092 - protein, 1440 aa, Oryza sativa
  Clone ID: TF_OsC1528_2189.pep
MAAAAACTKLPLLLLLVAVAVAASSASSLTPQHAACRRRDLAPAAAALPCTSTTARYWDVVWNFPGSNNPRGMIDMLDSTEFKVVSSSEDQVELSFRSTYNPSRPNSVRLNIDKRHCDFTMAGFADALRPDKFTGVHFKRWQIRVTLWLTAMKCFWVSTGKPEGVLTAEQQKQFEEATTLFVGCILSVLGDRLVEVYMHMTDAKELWDALNTKFGATDASNDLYIMEQFHDYKMADNRSVVEQAHEIQTMAKELELLKCVLPDKFVAGCIIAKLPPSWRSFGTALKHKRQEYSVEGLIASLDVEEKAREKDAASKGDGGQSSANVVHKAQNKSKEKYKAQQTTNFKKQKKNNNNPNQDERTCFVCGQVGHLARKCPQHKGMKAPAGQTSKSANVTIGNTGDGSGYGNLPTVFSVNQSTNWWVDTGANVHVCADISLFSSYQVARGSTVLMGNGSHASVHGVGTVDLKFTSGKIVQLKNVQHVPSIDRNLVSGSRLTRDGFKLVFESNKVVVSKHGYFIGKGYECGGLFRFSLSDFCNKSVNHICGSVDDEANVWHSRLCHINFGLMSRLSSMCLISKFSIVKGSKCHSCVQSKQPRKPHKAAEERNLAPLELLHSDLCEMNGVLTKGGKRYFMTLIDDVTRFCYVYLLKTKDEALDYFKIYKAEVENQLDRKIKRLRSDRGGEFFSNEFDLFCEEHGIIHERTPPYSPESNGIAERKNRTLTDLVNAMLDTAGLPKAWWGEALLTLNHVLNRVPNRNKNKTPYEIWIGRKPSLSYLRTWGCLAKVNVPITKKRKLGPKTVDCVFLGYAHHSIAYRFLIVKSEVPDMHVGTIMESRDGTFFESFCPMKDTHSGSNQPSEIIPSSITPPEQTEHTHELVSEEDVSEAPRRSKRQRTAKSFGDDFTVYLVDDTPKSISEAYASPDADYWKEAVRSEMDSIIANGTWEVTERPYGCKPVGCKWVFKKKLRPDGTIEKYKARLVAKGYTQKEGEDFFDTYSPVARLTTIRVLLSLVASHGLLVHQMNVKTAFLNGELDEEIYMDQPDGFVVEGQEGKVCKLLKSLYGLKQAPKQWHEKFDKTLTSAGFAVNEADKCVYYRHGGGEGVILCLYVDDILIFGTNLEVINEVKSFLSQNFDMKDLGVADVILNIKLIRGENGITLLQSHYVEKILNRFGYIDSKPSPTPYDPSLLLHKNKRIARSQLEYSQIIGSLMYLASATRPDISFAVSKLSRFTSNPGDDHWRALERVMRYLKGTVELGLHYTGYPAVLEGYSDSNWISDVDEIKATSGYVFTLGGGAVSWRSCKQTILTRSTMEAELTALDTATVEAEWLRDLLMDLPVVEKPVPAILMNCDNQTTCEKTIEVCQEIKKLRSYNVGLHSNSEKSGRSLHEGTITKCDRQCIEGDGFETHSILERTHLCELDCWSQSMKILGESSRKLTKDLGV

SEQ ID NO: 26093 - protein, 1561 aa, Oryza sativa
  Clone ID: TF_OsC1528_2233.pep
TPAKSFDQAAGLSVTSVSTGKPEGVLTAEQQKQFEEATTLFVGCILSVLGDRLVEVYMHMTDAKELWDALNTKFGATDASNDLYIMEQFHDYKMADNRSVVEQAHEIQTMAKELELLKCVLPDKFVAGCIIAKLPSSWRSFGTALKHKRQEYFVEGLIASLDVEEKAREKDAASKGDGGQSSANVVHKAQNKSKGKYKAQQTTNFKKQKNNNNNPNQDERTCFVCGQVGHLARKCPQRKGMKAPAGQTSKSANVTIGNTGDGSGYGNLPTVFLVNQSTNWWVDTGANVHVCADISLFSSYQVARGSTDLMGNGSHASVHGVGTVDLKFTSGKIVQLKNVQHVPSIDRNLVSGSRLTRDGFKLVFESNKVVVSKHGYFIGKGYECGGLFCFSLSDFCNKSVNHICGSVDDEANVWHSRLCHINFGLMSRLSSMCLIPKFSIVKGSKCHSCVQSKQPRKPHKAAKERNLAPLELLHSDLCEMNGVLTNGGKRYFMTLIDDATRFCYVYLLKTKDEALDYFKIYKAEVENQLDRKIKRLRSDRGGEFFSNEFDLFCEEHGIIHERTPPYSPESNGIAERKNRTLTDLVNAMLDTAGLPKAWWGEALLTSNHVLNRVPNRNKDKTPYEIWIGRKPSLSYLRTWGCLAKVNVPITKKRKLGPKTVDCVFLGYAHHSIAYRFLIVKSEVPDMHVGTIMESRDSIFFESFFPMKDTHSGSNQPFEIIPSSITPPKQTEHTHELVSEEDVSEAPRRSKRQRTAKSFGDDFTVFLVDDTPKSISEAYASPDADYWKEAVRSEMDSIIANGTWEVIELPYGCKPMGCKWVFKKKLRPDGTIEKYKARLVAKGYTQKEGEDFFDTYSPVARLTTIRVLLSLAASHGLLVHQMDVKTAFLNGELDEEIYMDQPDGFVVEGQEGKVCKLLKSLYGLKQAPKQWHEKFDKTLTSAGFAVNEADKCVYYRHGGGEGVILCLYVDDILIFGTNLEVINEVKSFLSQNFDMKDLGVADVILNIKLIRGENGITLLQSHYVEKILNRFGYIDSKPSPTPYDPSLLLRKNKRIARNQLEYSQIIGSLMYLASATRPDISFAVSKLSRFTSNPGDDHWRALERVMRYLKGTVELGLHYTGYPAVLEGYSDSNWISDVDEIKATSGYVFTLGGGAVSWRSCKQTILTRSTMEAELTALDTATVEAEWLRDLLMDLPVVEKPVPAILMNCDNQTTCEKTIEVCQEIKKLRSYNVGLHPNSEKPGRSLHEGTITKCDRQCIEGDGFETHKEEANKRLQGVQITTTAPIISHLLFADDSLLLFKATSVCADAVSRVLTNYCAASGQLVNFSKSCIFFSKKCDMAIREDIKRKVGMTNESITDRYLGLPTDVGRAKEGKFKYLKDRVWKRVQGWMEKTLSVGGKEVLIKSIVQAIPTYSMSCFRLPMGLCNHINSLIRKFWWASKQGSRKTNWVAWDKMTVPKFLGGMGFRDINIFNLVLLAKQGWRILQYPNSLAARVLKAVYFSNGDFLNAGLGSRPSHTWRAIIEGREILKLGIIRRIGSGKDTFIWDDNWIPRDWMLRPIRA

SEQ ID NO: 26094 - protein, 1210 aa, Oryza sativa; identical to SEQ ID NO: 19935
  Clone ID: TF_OsC1528_2246.pep

SEQ ID NO: 26095 - protein, 1509 aa, Oryza sativa
  unsure (1)..(1509): unsure at all Xaa locations
  Clone ID: TF_OsC1528_2253.pep
MAAICGETISVDELWREILLRAPTKDVARSCCVSTQWRGIVRDPSFRKLHHDRHAVPSKDDVPDALLVITVNADGQSVSTVVPAMVSPVSTSQRAPMYRVIKNGISYSLANVCNGFLCFASWSRAKVVVCNPITGEKLAIPRAPPIGPDYKSSRARIDVYTLPTSGGKICVMTATGTPSWHPPEIPTLGPVLVVDVASEKHRMYSPPDNGCPAADETSFTAFELHGRLCLAIRISMTNTVQFWTLSVEEDDDDDDDLPWQLLYTIKINMKDGYNNGFQELEPMNDWFNGGNNGFIQVPEPMDAWLDGETHTLATERAAHCTLDYSIPLAGVHQRSGEQVSGTSAFDVLHREKAAIRSNDAFMLVFICDVMIYLWNKLNPYMPIISTIQKPYYRHCDFTMAGFADALRPDKFTGVHFKRWQIRVTLWLTAMKCFWVSTGKPEGVLTAEQQKQFEEATTLFVGCILSVLGDRLVEVYMHMTDAKELWDALNTKFGATDASNDLYIMEQFHDYKMADNRSVVEQAHEIQTMAKELELLKCVLPDKFVAGCIIAKLPPSWRSFGTALKHKRQEYSVEGLIASLDVEEKAREKDAASKGDGGQSSANVVHKAQNKSKGKYKAQQTTNFKKQKKNNNNPNQDERTCFVCGQVGHLARKCPQRKGMKAPAGQTSKSANVTIGNTGDGSGYGNLPTVFSVNQSTNWWVDTGANVHVCADISLFSSYQVARGSTVLMGNGSHASVHGVGTVDLKFTSGKIVQLKNVQHVPSIDRNLVSGSRLTRDGFKLVFESNKVVVSKHGYFIGKGYECGGLFRFSLSDFCNKSVNHICGSVDDEANVWHSRLCHINFGLMSRLSSMCLIPKFSIVKGSKCHSCVQSKQPRKPHKAAEERNLAPLELLHSDLCEMNGVLTKGGKRYFMTLIDDATRFCYVYLLKTKDEALDYFKIYKAEVENQLDRKIKRLRSDRGGEFFSNEFDLFCEEHGIIHERTPPYSPESNGIAERKNRTLTDLVNAMLDTAGLPKACIAYRFLIVKSEVPDMHVGTIMESRDATFFESFFPMKDTHSGLNQPSEIIPSSITPPEQTEHTHELVSEEDVSEAPRRSKRQRTAKSFGDDFTVYLVDDTPKSISEAYASPDADYWKEAVRSEMDSIIANGTWEVTERPYGCKPVGCKWVFKKKLRPDGTIEKYKARLVAKGYTQKEGEDFFDTYSPVARLTTIRVLLSLAASHGLLIHQMDVKTAFLNGELDEEIYMDQPDGFVLEGQEGKVCKLLKSLYGLKQAPKQWHEKFDKTLTSAGFAVNEADKCVYYRHGGGEGVILCLYVDDILIFGTNLEVINEVKSFLFQNFDMKDLGVADVILNIKLIRGENGITLLQSHYVEKILNRFGYIDSKPSPTPYDPSLLLRKNKRIARNQLEYSQIIGSLMYLASATRPDISFAVSKLSRFTSNPGDDHWRALERVMRYLKGTVELGLHYXGILRYWRVIVILTGSLMWMRSKPLVDMFSHWVVVLFHGGLANRQF

SEQ ID NO: 26096 - protein, 947 aa, Oryza sativa
  Clone ID: TF_OsC1528_2265.pep
MAGFADALRPDKFTGVHFKRWQIRVTLWLTAMKCFWVSTGKPEGVLTAEQQKQFEEATTLFVGCILSVLGDRLVEVYMHMTDAKELWDALNTKFGATDASNDLYIMEQFHDYKMADNRSVVEQAHEIQTMAKELELLKCVLPDKFMAGCIIAKLPPSWRSFGTALKHKRQEYSVEGLIASLDVEEKAREKDAASKGDGGQSSANVVHKAQNKSKGKYKAQQTTNFKKQKKNNNNPNQDERTCFVCGQVGHLARKCPQRKGMKAPAGQTSKSANVTIGNTGDGSGYGNLPTVARGSTVLMGNGSHASVHVVGTVDLKFTSGKIVQLKNVQHVPSIDRNLVSDSRLIRDGFKLVFESNKVVVSKHGYFIGKGYECGGLFRFSLSDFCNKSVNHICGSVDDEANVWHSQVENQLDRKIKRLRSDRGGEFFSNEFDLFFEEHGIIHERTPPYSPESNGIAERKNRTLTDLVNAMLDTAGLPKACEAPRRSKRQRTAKSFGDDFTVYLVDDTPKSISEAYASPDADYWKEAVRSEMDSIIANGTWEVTERPYGCKPVGCKWVFKKKLRPDASHGLLVHQMDVKTAFLNGELDEEIYMDQPDGFVVEGFAVNEADKCVYYRHGGGEGVILCLYVDDILIFGTNLEVINESHYVEKILNRFGYIDSKPSPTPYDPSLLLRKNKRIARNQLEYSQIIGSLMYLASATRPDISFASILERTHLCELDCWSQSMKILDYSIPLAGVHQRSGEQVSGTSAFDVLHREKAAIRGWKQQQQQQQMPWQRRDLRPIHAEGTSMVHVHEQKPADSCGNSGDIFHDIRRVRRRGGEPEHRRRGDVPGDLRRVGARRHGASLHCQPHLRCPLQPRRHRRLRHVRTLPVEAGAIVRGGPGAGIHHGKPDAARGVRRRRRRRARGALVLRDDAGGVDGAGGGAGVRHLLLPHVRRLRRRHGQQSNR

SEQ ID NO: 26097 - protein, 3330 aa, Oryza sativa
  Clone ID: TF_OsC1528_2274.pep
MEYGFTANYKVWTYHGEFANPEDDDEELSFEMNEAENFIIEDMSRERMVVDVSTDSDDFDGGFDLEDMLRHVEPEVLAGRSRGLENWQALEKASKDLLYDETKGCDKDFTVLRSVLELLRLKAKHGWSDTKCTDPDSDKGKRGKIPSMVMWYLPIKDRLKRLYSNPTDAELMRWHQESWKIDGMIRHPADARQWKTFDAKHPEFAKDPRNVRFALSTDGMNPFVENDTAPVARGGTYVYEITKKIKVVYGKGKKKTVKRKKADGDNGTASPFKKHSIFFKYLDYWKDLEIRHAIDVMHLEKNVFDSTVGTLLDIPSPLQTFAVETVCQLEMYFPPSFLDMMEHLIVHIVPQIIELGPLYLHQMWAYERYMSILKGYVRNRAHPEGSMIEGYTTEEAVECCMDYIKDANAIGIPVHRHEGRLSRRGTVGRKQFFDNDYKKVSAAYNSVLQQLAIVEPFIERHLEEIKACFPGRSNDWISREHKRRFPLWLKDLNLPVGDSVEELTLQRLACGPSSIVNSWQGYDINGFTLSTTTKDMKSTTQNSGIRVEAIDTSGEKRSYYGTIQEIWELDYGLNIQIPVLRCEWVKDTIGVSVDDYGLTIVDHSKTGHKDDPWVLAERVAQVFYVKDPSDERKTIVISGKQQIVGIDNIEDPNDYNQFDDVPLFTDLPMRIKKVERTIDEANMSYVRADGVAKDLSPLAVAVAAARTSPPSPSPSPPPGRRRHRTELSPLAVAIAAARSSPPPSRPRYRQAPPRSRPAPRRRRRHCQDLSPLAVAVAAARSPSPPHGPLPPRRCHRCRQVVAAARSSPPSLGGSGKKRRGERSKNKLTKETYNVIALDQDGKPIEPPIVRSKFSNACGTLVRTRCPINVKLWETVDDNIKTLLWNELQKYFVFPPGSEVRGRDYALKKMGDRWRQWKSDLNRDYVQKNLPPFTDYGHISQADWDTFVADRTTAEALALRKKMSELAKKNKYPHRLGSSGYAGHVDQWREIEQRFAAAGKPLLVDPMVERSKNWVWARSTGQVSDEGDILFETPDIEEVTTNLQQIVEKERSGQFVPRRERDQLTAALGTAEHSGRVRGLSSKTSWKVGFPQDAPSYKKRDKYKEQLSDKIYAQVKEHFYSLAAENPTAFPRLFPDSQQPTQSAQQTTNVPSSVGSVQTSTFPVDSITGPTPCSLVVPIGRAGKTKEVATGLAIPGRQFHNTAIPEDYARVQVAKVHSDHVSLELDIPAPEGIELLGDAVNQFILWHRRDIILSAAVLAAGSSTPSSSQAMTAAAPAPPSPPKPPSPRHPPSPPPLRSPPRQPTPPPSPSQQPPLPTPQPVQASPTSPTKQHAPPAPPSVQTSPPTPQSALVEEVHIPDGTTSEPKSNTLEPRRIIPKLISTYDPKEIDKDKEKFMFSAFRNSEKRKELAHVLSDSQKSVLAAQDEVQSWLSADVPETYEYGKPFLPTYLMNKLPWEMRVMHEWYMKASRKGLGFISVAVPEGAFMSGPNGIFFISFQDLYALYKLDKMDVNLVAAFCLMQFHEADRTGAKVGYVDPTRICKTQHTVELRQDCEQLVGKTPEEKEEYVKTLHKRKKLEVATYLAIAMLAHADKDVLMVPYQFTDHYILFLVYPKDQLIISLDPAHYDKETFMEFLTILNLAHKYYRKRGGPVHIPSQKKLSVRTGWPCYKQPPGTNLCGYYVCEMLRVNGRYKTTSNRIPEIPYIAQRFNHTTILNVAADLCRFIRRDVCNARGVTPESASFADTGYDPPPKKWKGICQVGPSFEAISCNRKFIGARWYIDDEILSSISDNEVLSPRDVEGHGTHTASTAGGNIIHNVSFLGLAAGTVRGGAPRARLAIYKACWSGYGCSGATVLKAMDDAVYDGVDVLSLSIGGTKEDVGTLHVVANGISVVYAGGNDGPIAQTVENQSPWLVTVAATTIDRSLPVVITLGNGEKLVAQSFVLLETASQFSEIQKYTDEECNANNIMNSTVKGKIAFCFMGEMLNNKQQTSYPDVTTAVAAKGGRAPDIAAPGVSILAAAQIPYYKGVSYHFDSGTSMACPHVAGIIAVLKSIHPKWSPAALKSAIMTTDYSIPLAGVHQRSGEQVSGTSAFDVLHREKAAIRHCDFTMADFADALRPDKFTGVHFKRWQIRVTLWLTAMKCFWVSTGKPEGVLTAEQQKQFEEATTLFVGCILSVLGDRLVEVYMHMTDAKELWDALNTKFGATDASNDLYIMEQFHDYKMADNRSVVEQAHEIQTMAKSFGTALKHKRQEYSVEGLIASLDVEEKAREKDAASKGDGGQSSANVVHKAQNKSKGKYKAQQTTNFKKQKKNNNNPNQDERTCFVCGQVGHLARKCPQRKGMKAPAGQTSKSANVTIGNTGDGSGYGNLPTVFSVNQSTNWWVDTGANVARGSTVLMGNGSHASVHGVGTVDLKFTSGKIVQLKNVQHVPSIDRNLVSGSRLTRDGFKLVFESNKVVVSKHGYFIGKGYECGGLFRFSLSDFCNKSVNHICGSVDDEANVWHSRLCHINFGLMSRLSSMCLIPKFSIVKGSKCHSCVQSKQPRKPHKAAEERNLAPLELLHSDLCEMNGVLTKGGKRYFMTFIDDATRFCYVYLLKKKDEALDYFKIYKAEVENQLDRKIKRLRSDRGGEFFSNEFDLFCEEHGIIHERTPPYSPESNGIAERKNCTLTDLVNAMLDTAGLPKAWWGEVLLTSNHVLNRVPNRNKDKTPYEIWIGRKPSLSYLRTWGCLAKVNVPITKKRKLGPKTVDCVFLGYAHHSIAYRFLIVKSEVLDMHVGIIMESRDATFFESFFPMKDTHSGSNQPSEIIPSSIIPPEQTEHTHELVSEEDVSEAPRRSKRQRTAKSFGDDFTVYLVDDTPKSISEAYASPDADYWKEAVRSEMDSIIANGTWEVTEQPYGCKPVGCKWVFKKKLRPDGTIEKYKARLVAKGYTQKEGEDFFDTYSPVARLTTIRVLLSLAASHGLLVHQMDVKTAFLNGELDEEIYMDQPDGFVVEGFGVNYAYPCVYYRHGGGQGVILCLYVDDILIFGTNLEVINEVKSFLSQNFDMKDLGVADVILNIKLIRGENGITLLQSHYVEKILNRFGYIDSKPFPTPYDPSLLLRKNKRIARNQLEYSQIIGSLMYLASATRPDISFAVSKLSRFTSNPGDDHWRALERVMRYLKGTVELGLHYTGYPAVLEGYSDSNWISDVDEIKATSGYVFTLGGGAVSWRSCKQTILTRSTMEAELTALDTATVEAEWLRDLLMDLPVVEKPVPAILMNCDNQTTCEKTIEVCQEIKKLRSYNVGLHPNSEKPGRSLHEGTITKCDRQCIEGDGFETHVSYTMVVTQSM

SEQ ID NO: 26098 - protein, 1322 aa, Oryza sativa
  Clone ID: TF_OsC1528_2320.pep
MGGSGRFGRMQPPERSGEQGRTTCGSRHPSHHEASSAARQGDAMEASSTAAARVTRARRLGQAGDERGDELGDGRGDELGDEKGDEPATTGSGRAPARASDGGRGERIRGGEGGPEGNIPPRCRMGGSGRFGRMQPPERSGEQGRTTCGSRHPSHHEASSAARQGDAMEASSTAAARVTRARRLGQAGDERGDELGDGRGDELGDEKGDEPATTGSGRAPARASDGGRGERIRGGESTSYAVRRVAGSHYSIPLAGVHRRSGEQVSGTSAFDVLHREKAAIRVTLWLTAMKCFWVSTGKPEGVLTAEQQKQFEEATTLFVGCILSVLGDRLVEVYMHMTDAKELWDALNTKFGATDASNDLYIMEQFHDYKMADNRSVVEQAHEIQTMAKELELLKCVLPDKFVAGCIIAKLPPSWRSFGTALKHKRQEYSVEGLIASLDVEEKAREKDAASKGDGGQSSANVVHKAQNKSKGKYKAQQTTNFKKQKKNNNNPNQDERTCFVCGQVGHLARKCPQRKGMKAPAGQTSKSANVTIGNTGDGSGYGNLPTVFSVNQSTNWWVDTGANVHVCADISLFSSYQVARGSTVLMGNGSHASVHGVGMVDLKFTSGKIVQLKNVQHVPSIDRNLVSGSRLTRDGFKLVFESNKVVVSKHGYFIGKGYECGGLFRFSLSDFCNKSVNHICGKVENQLDRKIKRLRSDRGGEFFSNEFDLFCEEHGIIHERTPPYSPESNGIAERKNRTLTDLVNAMLDTAGLPKACEAPRRSKRQRTAKSFGDDFTVYLVDDTPKSISEAYASPDADYWKEAVRSEMDSIIANGTWEVTERPYGCKPVGCKWVFKKKLRPDGTIEKYKARLVAKGYTQKEGEDFFDTYSPVARLTTIRVLLSLAASHGLLVHQMDVKTAFLNRELDEEIYMDQPDGFVVEGQEGKVCKLLKSLYGLKQAPKQCHEKFDKTLTSAGFAVNEADKCVYYRHGGDEGVILCLYVDDILIFGTNLEVINEAKSFLSQNFDMKDLGVADVILNIKLIRGENGITLLQSHYVEKILNRFGYIDSKPSPTPYDPSLLLRKNKRIARNQLEYSQIIGSLMYLASATRPDISFAVSKLSRFTSNPGDDHWRALERVMRYLKGTVELGLHYTGYPAVLEGYSDSNWISDVDEIKATSGYVFTLGGGAVSWRSCKQTILTRSIMEAELTALDTATVEAEWLRDLLMDLPVVEKPVPAILMNCDNQTTCEKTIEVCQEIKKLRSYNVGLHPNSEKPGRSLHEGTITKCDRQCIEGDGFETHIKSLYVYNLNRSSLVTLRSCRLLDGLEELPSDLSEKIVEKA

SEQ ID NO: 26099 - protein, 1377 aa, Oryza sativa; identical to SEQ ID NO: 19959
  Clone ID: TF_OsC1528_2345.pep

SEQ ID NO: 26100 - protein, 2127 aa, Oryza sativa
  Clone ID: TF_OsC1528_2357.pep
MADSTARTVKDVNPHEFVKAYSAHLKRSGKMELPEWVDIVKTARFKELPPYDPDWYYTRAASIARKIYLRQGIGVGGFQKIYGGRQRNGSRPPHFCKSSGAISRNILQQLQKMGIIDVDPKGGRLITSQGRRDLDQVAGRVDESIRDRKVEATGQQSQTLDSTWTAKMHPNALPSNDAFMLVFICNVMIYLWNKLNHYMPIISTIQKPYYRHCDFTMAGFADALRPDKFTGVHFKRWQIRVTLWLTAMKCFWVSTGKPEGVLTAEQQKQFEEATTLFVGCILSVLGDRLVEVYMHMTDAKELWDALNTKFGATDASNDLYIMEQFHDYKMADNRSVVEQAHEIQTMAKELELLKCVLPDKFVAGCIIAKLPPSWRSFGTALKHKRQEYSVEGLIASLDVEEKAREKDAASKGDGGQSSANVVHKAQNKSKGKYKAQQTTNFKKQKKNNNNPNQDERTCFVCGQVGHLARKCPQRKGMKAPAGQTSKSANVTIGNTGDGSGYGNLPTVFSVNQSTNWWVDTGANVHVCADISLFSSYQVARGSTVLMGNGSHASVHGVGTVDLKFTSGKIVQLKNVQHVPSIDRNLVSGSRLTRDGFKLVFESNKVVVSKHGYFIGKGYECGGLFRFSLSDFCNKSVNHICGSVDDEANVWHSRLCHINFGLMSRLSSMCLIPKFSIVKGSKCHSCVQSKQPRKPHKAAEERNLAPLELLHSDLCEMNGVLTKGGKRYFMTLIDDATRFCYVYLLKTKDEALDYFKIYKAEVENQLDRKIKRLRSDRGGEFFSNEFDLFCEEHGIIHERTPPYSPESNGIAERKNRTLTDLVNAMLDTAGLPKAWWGEALLTSNHVLNRVPNRNKDKTPYEIWIGRKPSLSYLRTWGCLAKVNVPITKKRKLGPKTVDCVFLGYAHHSIAYRFLIVKSEVPDMHVGTIMESRDATFFESFFPMKDTHSGSNQPSEIIPSSITPPEQTEHTHELVSEEDVSEAPRRSKRQRTAKSFGDDFTVYLVDDTPKSISEAYASPDADYWKEAVRSEMDSIIANGTWEVTERPYGCKPVGCKWVFKKKLRPDGTIEKYKARLVAKGYTQKEGEDFFDTYSPVARLTTIRVLLSLAASHGLLVHQMDVKTAFLNGELDEEIYMDQPDGFVVEGQEGKVCKLLKSLYGLKQAPKQWHEKFDKTLTSAGFAVNEADKCVYYRHGGGEGVILCLYVDDILIFGTNLEVINEVKSFLSQNFDMKDLGVADVILNIKLIRGENGITLLQSHYVEKILNRFGYIDSKPSPTPYDPSLLLRKNKRIARNQLEYSQIIGSLMYLASATRPDISFAVSKLSRFTSNPGDDHWRALERVMRYLKGTVELGLHYTGYPAVLEGYSDSNWISDVDEIKATSGYVFTLGGGAVSWRSCKQTILTRSTMEAELTALDTATVEAEWLRDLLMDLPVVEKPVPAILMNCDNQTVIVKVNSSKDNMKSSRHVKRRLKSVRKLRNSGVITLDYIQTARNLADPFTKGLSRNVIDNASKEMGLRPISNDAFMLVFICNVMTYLWNKLNHYMPIISTVLSHDKTCGYQSSGHLQKNKESGDTETDPLMPIPADIDLPILENMPKTKRGGDDLARSLHKNRKTCNGGRTDSLASGCLHGDPNEDVWTELNDVVKSNLSKSVASLSLRNGVAVDRQGRLTKFLTSASLVELLVRALNDTNKNHGDLELEVYHEGNEVCQGYLTDFDLDHNLAIVEIWTDFDVHVGLLQHAVEFLPHCKVIAIGREITGKLMARRVQLMDDLSVSEDSEDLDCKIKEAWEGAPLFSFDGNFVGMNLFLAMGRAFFLPWGTIQKHWASLQNKTGLPESNSLKVYRFGTSSTAEKSNSHPEVNNDILDPEQIHIDSMGYPKFPTHMFAAFCTTNNYAIMYLSPDGMILVNTFEETFGDLRGEGVWSKLSKKSCSNIDRSVVALASFSGERRFFACTGFFVEWNGSTVILTSASLVRSSGDENKIVDNLRIEVLLPNKQRVEGMLQHCNLHYNVALVSVGYRALRPAHGQLDWWGKSSKVVAVGRCFKSGALMAASGTVTPWTGTLDCDFLERSSCKITKAGIGGPVVTLDGDCIGMNFYDTRIGTPFLSWEVIVDIVASFEEKRWPVPMPY

SEQ ID NO: 26101 - protein, 1843 aa, Oryza sativa
  Clone ID: TF_OsC1528_2368.pep
MRLLVLMCLVIAAAMQMQAASGAPPTAAKLAHCLKSCGGANISYPYGVGAGCFRPGFELTCDHSTKPPKLLLLGVATNTNTTTTKIVDQYRDGYVQAYVSFNIATTPGVLGTYNRTWESPGRILSIGPDYYALVAVGCGIEVYLVDPDTEDMLGYCFSMCTDMAMMHKEAEGKACSGMGCCVVTFRRPVRAFRVSITQREATQPFQVANASTIKVFLSEESTTYHYNFTIGDLLSDEINETTVASTSAYLSTFIADQPNCTIAQKDPERYACGDNKCLDADDENGGYRCACIKYTNSNPYLDGDCDQDYSIPLAGVHQRSGEQVSGTSAFDVLHREKAAIRSNDAFMLVFICNVMTYLWNKLNHYMPIISTIQKPYYRHCDFTMAGFADALRPDKFTGVHFKRWQIRVTLWLTAMKCFWVSTGKPEGVLTAEQQKQFEEATTLFVGCILSVLGDRLVEVYMHMTDAKELWDALNTKFGATDASNDLYIMEQFHDYKMADNRSVVEQAHEIQTMAKELELLKCVLPDKFVAGCIIAKLPPSWRSFGTALKHKRQEYSVEGLIASLDVEEKAREKDAASKGDGGQSSANVVHKAQNKSKGKYKAQQTTNFKKQKKNNNNPNQDERTCFVCGQVGHLARKCPQRKGMKAPAGQTSKSANVTIGNTGDGSGYGNLPTVFSVNQSTNWWVDTGANVHVCADISLFSSYQVARGSTVLMGNGSHASVHGVGTVDLKFTSEKIVQLKNVQHVPSIDRNLVSGSRLTRDGFKLVFESNKVVVSKHGYFIGKGYECGGLFRFSLSDFCNKSVNHICGSVDDEANVWHSRLCHINFGLMSRLSSMCLIPKFSIVKGSKCHSCVQSKQPRKPHKAAEERNLAPLELLHSDLCEMNGVLTKGGKRYFMTLIDDATRFCYVYLLKTKDEALDYFKIYKAEVENQLDRKIKRLRSDRGGEFFSNEFDLFCEEHGIIHERTPPYSPESNGIAERKNRTLTDLVNAMLDTAGLPKAWWGEALLTSNHVLNRVPNRNKDKTPYEIWIGRKPSLSYLRTWGCLAKVNVPITKKRKLGPKTVDCVFLGYAHHSIAYRFLIVKSEVPDMHVGTIMESRDATFFESFFPMKDTHSGSNQPSEIIPSSITPPEQTEHTHELVSEEDVSEAPRRSKRQRTAKSFGDDFTVYLVDDTPKSISEAYASPDADYWKEAVRSEMDSIIANGTWEVTERPYGCKPVGCKWVFKKKLRPDGTIEKYKARLVAKGYTQKEGEDFFDTYSPVARLTTIRVLLSLAASHGLLVHQMDVKTAFLNGELDEEIYMDQPDGFVVEGQEGKVCKLLKSLYGLKQAPKQWHEKFDKTLTSAGFAVNEADKCVYYRHGGGEGVILCLYVDDILIFGTNIEVINEVKSFLSQNFDMKDLGVADVILNIKLIRGENGITLLQSHYVEKILNRFGYIDSKPSPTPYDPSLSLRKNKRIARNQLEYSQIIGSLMYLASATRPDISFAVSKLSRFTSNPGDDHWRALERVMRYLKGTVELGLHYTGYPAVLEGYSDSNWISDVDEIKATSGYVFTLGGGAVSWRSCKQTILTRSTMEAELTALDTATVEAEWLRDLLMDLPVVEKPVPAILMNCDNQTTCEKTIEVCQEIKKLRSYNVGLHPNSEKPGRSLHEGTITKCDRQCIEGDGFETHSILEGTHLCELDCWSQSMKILGESSRKLTKDLGRQHQPRIEQQQSNQQRSKQQWWWRPAGGDGFGGGSSKSAAGGRFGCGSARNSARTPGGGEDSKTAVRSIPILLEDDDGGGTDSVVAQANPPPVVVWQSREHIQWWRRGRGELIAAVDGGSGCGSARSSARMPSGGEDSKTR

SEQ ID NO: 26102 - protein, 1157 aa, Oryza sativa; identical to SEQ ID NO: 19991
  Clone ID: TF_OsC1528_2073.pep

SEQ ID NO: 26103 - protein, 606 aa, Oryza sativa
  unsure (1)..(606): unsure at all Xaa locations
  Clone ID: TF_OsC359_7340.pep
MDEVGGRWTFSRANEGYTSCGPVVEMSWHRVGALLLGGSVPPACPGGSGRRGIGSVLLSMARMGWKLCHVFRLYTVVMFNREKGKNVSGYASSNSSFQLNPPLASRELTRAHPWSIPSMLLSPQLPLVGSQDQNQYVFDRAFATQVDELPIPEEDVPFCHDCREQGHYALNCPWVYAKEAPSLGLTVQTSLNQPLRTKSSLQPSVQSREPNEENPLNPGNCFPPSPSYHVGSRTKQAKGKKSKNQRRKAPMRTEEEVRKMTITSTEWPPPGMTKRQRRNTFRGAPQLTEHLLANGGRVSDSEDSDQVSSDDEDQKSPQGFNQNKMERKACSRCGEIGHVASSCATTCVHCEEDHPPDRCPMSRITCFFCQGTDHVPKDCQFSFLLTKRMASQPASSNGEQHQGNTNPRQDYSFSLTSVPGQRNQNEERKCRVREDICCFNCQGMGHFADKWPKPRNIAAGTSVHATPCNQKLAPQRIVIHASRSSPIAPVATAPTPASTLPQGVNAQFQPQPPVDKTAALYLWMFQHSSQKKNQVQDEEPEXNNTFSTNHSLRRQPQQRIVVDGRSCFSPRPTPGRAKGNQPPEGDTKQKTVLRFKQQSDGSFSCE

SEQ ID NO: 26104 - protein, 584 aa, Oryza sativa
  unsure (1)..(584): unsure at all Xaa locations
  Clone ID: TF_OsC1713_4956.pep
MDISRTNEGYTSCGPVVEMSWHRVGALLLGAQSYRPVPEVPAVGLKCLCNNVNIIDIIKMCLLYHVCVVYPGFSWDXINTLAFGKRQFSRSRQAVLDGQVSEEEDIVSCLPKLRKTAGSASEVEEAVKPAVKQDKRLRSVKVLSLVSNLSLPFVFPLSLSKPLQQMADNEKGNKVRSQDIGTSSSRVNEAPDTSCVTLVQHLINQNRLLIEILQQHQTPILNLSQIQPQVQLEAVQALTPQVSMPPASRRTQGDVPHVDSKEASIICFMCDEQGHYARECPQQKRKTSMRTEDEVRKMIITSTEWPPPGMTKRQRRNTFRGAPQLTEHLLANGGRVSDSEDSDQVSSDDEDEMDXKACSRCGEIGHVASSCATTCIHCEEDHPPDRCPTSRITCFFCEGTDHVPKDCQFSFLLTKKMANQPASSNGEKHQGNTNPRQDFSFSLTPVPGQRNQNEKRKCRVREDICCFNCQGMGHFADKCPKPRNIAASTSVHATPCNQKLAPQRIVIHASRSNPIARVATAPTPASALPQGVNAQFQPXPSVDKTEASIGIVPLDVPAQQPRNQVQDEEPERKKVIVCYNCSTC

SEQ ID NO: 26105 - protein, 739 aa, Oryza sativa
  unsure (1)..(739): unsure at all Xaa locations
  Clone ID: TF_OsC359_6495.pep
RNTIPEITDASVIRAFKSVAPPPPRIPPHPVVSARIKERGITPRDSLSRFPRFPLSLSLGFVRIVPAFVAGAINGGRNPRGRFPSSSAAFSPFRRYKIVARAPLFRFRRSPLALAVGSVLAPCSALSAIAAELRSAAAAAPDFLLTRRPLRPLRRVAVDPVRRSASPVDRRSAAVIVIPNRAAVFFRSGRRSRRRRCPGVSRRPPFAFPLPSSLSGAAPPRRWSPAVTIGARARRSRRPCRRGRPWARPRGCQVGPAVSRPRPRVRLTRGTHGADRRQPRAPGPPWTERLTRGPXPPWTRANEGYTSCGPMADNEKGNKVRSQDIGTSSSRVNEAPDTSCVTLVQHLINQNRLLIEILQQHQTPILNLSQIQPQVQLEAVQALTPQVSAPPTSQKAPHAMPHVDPKEASIICFMCDEQGHYARNCPQQKRKAPMRTEDEVRKMVITSTEWPPPGMTKRQRRNSFRGAQQLTEHLLANGGRVSGSEDSDQVSSDEEDEKELKACSRCGEIGHVASSCASTCVHCEEDHPPNRCPTSRITCFFCEGTDHVPKDCRFSFLLTKKMANQHARSNGEKHQGNTNPRQDYSFSLTPVPGQRKQNEKRKCRVREDICCFNCQGMGHFADKCPKPRNIAAGTSVHATPCNQKLAPQRIVIHTSRSSPIARVATAPTPMSALPQGVNAQFQPQQRIVVDGRSCVSPRPTPGRAKGNQHPEGDTKQKTVIRFNQQSEGSFSCGPARRPR

SEQ ID NO: 26106 - protein, 679 aa, Oryza sativa
  Clone ID: TF_OsC359_8282.pep
MDEVVATMDISEANEGYASCGSVIEMSRQMKTTRVGARAQPWPACPGIPAVGRVGSVLLFTARMGEWLCHIFTTGSKAMECGVKMCLVGWPGLAWDELGPRSGCQFGPNHRRPWVKAVLDGQVSEEEDIVSCSPKLRKTAGSASEVEEAVKPAVKQDKRLRSVKVLSLVSNLSLPFVFPLSLSKPLQQMADNEKGNKVRSQDIGTSSSRVNEAPDTSCVAVVQHLINQNKLLIEILQQHRMPILNPSQIQPQVQLEAVQALTPQVSAPPTSQKAPHAMPHVDPKEASIICFMCDEQGHYARNCPQQKRKAPMRTEDEVRKMIITSTEWPPPGMTKCQRRNSSRGAQQLTEHLLANGGRVSGSEDSDQVSSDDEDEKSPQGFNQNKIELKACSRCGEIGHVASSCASTCVHCEEDHPPDRCPTSRITCFFCEGTDHVPKDCRFSFLLTKKMANQPVSSNGEKHQGNTNPRQDYSFSLTPVPGQRKQNEKRKCRVREDICCFNCQGMGHFADKCPKPRNVAASTSVHANPRNQKLAPQRIVIHASRSSPIARVATAPIPMSALPQGVNAQFQPQPPADKTEASICVVPLEVPIQQLRNQVQDEEPECKKVIVCYNCTEEGHYSKNCPQPRQNRPPHYRQFTRSRHSNRIVVTGANAVPKSEIFNSVSDATRSEKCKHRLPG

SEQ ID NO: 26107 - protein, 750 aa, Oryza sativa
  unsure (1)..(750): unsure at all Xaa locations
  Clone ID: TF_OsC359_7790.pep
IERVVDVSISPPNDKELSFEEEEKCMHINAQATIVLFGVLSEDVFKTVMPFEDAHLIWTTLKERYDKSKCDDSKCDDVLFLEEPFEKCSTSSPNCEEPQVTTFDDQDNHPTTTLSSTHDYIEGNELVSKVDDHPILPLDSNNTDNEIVILHCVVDSCISPSPKYMCEDDMDKCSTSYSTCGTNLLKEEVNERXWTSEESTSPRCSSSISEDYACFMGVDGDSEFDHLSKKDVTMVIKFMEAIQKQQACTIKKNEEIMSLTEEHKKLKDFHSSLTMRYEKLENEFACATNSIACVASLKKQNQELKFQLDEITNKYVDLQERHDELLCSHVNLVDSHAMLEVSHEVIIATVKSYEPHVQVNLTCANPCFPQANMSLSTICDLDCVGKREKQMDHGLVCIAQXPSQENREGLVNKLEKGXSTVACTKIHQRDIKSINDHTRERNQKMIKSSITCFKCKKVGHHVRDCPWKKGNKLSKKKDIPHIKCFKCTEAGHFASRSPCTLDEQCKTSSERQTGNKQTEKQYRSKSRLXXNCRAKGHIGKNCPMGNIPKPSLSFDHNLLRNAKNDICATRVICSPHTSTKAISVSKSLVTNLYGPNVVGDQNVLKFYCGIKGFDKTARFVIKLIYHHAIEPEGSGWIPRRLQEDSLVTRRIXAEGSKLTRTCILKGYPSVQESRVRPQEAHDDQGGLLDQPQSTQFNLPQLTMKNILSVQVKEDGANAKPDRVMALQEEHKHYQDADCDQGVKHVRDGKA

SEQ ID NO: 26108 - protein, 265 aa, Oryza sativa
  unsure (1)..(265): unsure at all Xaa locations
  Clone ID: TF_OsC12782_3.pep
SCQKPVDSQHEKGKTIEKPANPKVSRGQKGKLKKXKEKYGEQDEEEREIRMALLAFSGRASQKDKPSXRCRWSHCSLXKPSTGEDDRSKICYKCKKSGHLSRDCPESTSEVDPADVNVGRAKDGMDRSSAPAGSSVTMDEDDIHELGDEEKEKLIDLDYLTGNPLPSDILLYAVPVCAPYNALQAYKYRVKITPGTAKKGKAAKTAMSLFLHTADATNREKELMKACTDPELVAAIVGNAKITAPGLTQLKQKQKQKGKKSAKEN

SEQ ID NO: 26109 - protein, 458 aa, Oryza sativa
  Clone ID: TF_OsC1713_5550.pep
SRVPNIGTEDPCQNAVKIPEDNDSQVNVRPKESHYVRNCPWKVFARSPEKDEKQCPGSNQAPSQSTDKKDGTLQRNSGANRTVIWKMDNGRTIIITSSEFTPEDAARIPKRERFSADDDDDNDDDNDDNDDATLDSFRERELKFKACARCGIVGHTASLCLPTCRCDHVPKDCQLNAVIAKTKKEQGTTVQPIRQPMTIDNSGHNPSALSLTPAPVEANHGRSNVTKDVHKPLLVPVSAAKVHNQKPAPQDQASRLCRNCRKPGHRFSDCPLPRAAKAVRRDSQVTSTAHDTKRHLNVQPPPQRIIVKGTVKGRIVPPAIVSSLQHQRQQGKQCQENNSSLQLQRGGTLLRQHPQQVLSAPGRPTVVSSSNAPGIAPIWRPIDKSPLGNPTGKKILPVTADKIVAPPPSKINKQSNVPETLGNSLTLEAVTGWTRSSGRRINELQMPDASLRNNFTLL

SEQ ID NO: 26110 - protein, 1541 aa, Oryza sativa
  Clone ID: TF_OsC359_8424.pep
MAGDYPDFQKLVDKAIRQEDKYNRMEQKKRRIAQFKTQPGNNQRPRLTLGPQSMPHGGSSSVVRPRRQFFNNNAGNNIRNLAPRPVAVSTQQQPAKREQGSKPVVCFNCGDPGHYADKCPKPRRVKVVPAQSNSTAPASKARINHVAAAEAQDAPDVILVREYPDVFPDDLPERIHQTEFITMGSSGYYRRFIENFSKIAKPMTRLLQKDVKYKWSEECEQSFQELKSRLISAPILILPDPKKGFQVYCDASKLGLGCLLMQDGKVVAYASRQLRPHEKNYPTHDLELAVVVHALKIWRHYLFGTRTEVYTDHKSLKYIFTQPDLNMRQRRWLELIKDYDIGIHYHPGKANVVADALSRKGYCNATEGRQLPLELCKEFERLNLGIVSRGFVAALEAKPTLIDQVREAQINDPDIQEIKKNMRRGKAIGFLEDEHGTVWLGERICVPDNKDLKDAILKEAHDTLYSIHPGSTKMYQDLKERFWWASMKREIAEYVAVCDVCQRVKAEHQKPAGLLQPLKIPEWKWEEIGMDFITGLPRTSSETTYSGSRLAELYMARIVCLHGVPKKIVSDRGSQFTSNFWKKLQEEMGSKLNFSTAYHPQTDGQTERVNQILEDMLRACALDFDGSWDKNLPYAEFSYNNSYQASLQMAPYEALYGRKCRTPLLWDQTGERQVFGTDILREAEEKVKIIQERLRVAQSRHKSYADNRRRDLSFEGDYVYLRVTPLRGVHRFHTKGKLAPRFVGPYKIVSKRGEVAYQLELPQSLAGVHNVFHVSQLKKCLRVPTEEANLEQIEVQEDLTYVEKPILAPAVRRRRSRRRRRSGRPPSWSPSMPRYKPEYLFGVEGFVQELRTMSFVIGFGTAPFYAQIPHDRHEEKCRVKVTLNSNSEDIPSVMFKAGGRNYIHACQEVARIAIGELRDRYSDQLADTEYRYHPRQPQGSDRGSYLETEGIENDATTRHLVEMLWAMDESRAEIVLAAQDREDRNRGKICKLEDKVDRLEKELAVLKGEAPPQKARIRLTARKRALFVPRYQLAPKVRVVEKEVAPTLADPPVIIMVNTRSNGNGPSNNNNGENPTLAQVLAQQTQLMNMMMQQLQNQQNQGNNHAPPQNKLAEFLRVRPPVFSSTTNPVEAGDWLHAIEKKLDLLQCTDQEKVSFASHQLHGPASEWWDHFRLNRTTAEPITWLEFTAAFRKTHIPSGVVSLKKKEFRSLTQGSRSVTEYLHEFNRLARYAPEDVRNDEERQEKFLEGLNDELSYPLMTGDYHDFQKLVDKAIRQEENAGNNIRNQAPHPVAAPAQQQPAKREQGSKPVVCFNCGDPGHYANKCPKPRRVKVVPVQSNSTVPASKARVNHVAAAEAQDAPDVILGTFLVNLVPATVLFDSGATHSFLSMSFAGNHGMEVEDLRRPLMVSTPSNQALSLQRSPSVRIEIQGVPFLANLILLESKDLDVILGMDWLARHKGVIDCANRKVTLTSNDGRVVTVHALSSESLRSRLNQITLEEISIVREYPDVFPYDLPGDPLESTCRHASLDDCQYGLHRGTA

SEQ ID NO: 26111 - protein, 175 aa, Oryza sativa
  Clone ID: TF_OsC1713_4880.pep
MPRYDDRDRYDDRYGGNTRLYVGRLSSRTRTRDLEDLFGRYGRVRYVDMKHEFAFVEFSDARDADEARYNLDGRDFDGSRMIVEFAKGVPRGPGGSREYMGRGPPPGSGRCFNCGIDGHWARDCKAGDWKNRCYRCGDRGHIERDCRETALKKSPKRWERSLLKNPPSPLRSRWG

SEQ ID NO: 26112 - protein, 543 aa, Oryza sativa; identical to SEQ ID NO: 19837
  Clone ID: TF_OsC359_7855.pep

SEQ ID NO: 26113 - protein, 156 aa, Oryza sativa
  Clone ID: TF_uC-osflcyp173f05b1.pep
RVIHGFHRRPQGPPARHPPQAAPRRRRAARRHREARRRRSRRLREARDRPRRRDRHQRRLPPPVQHRGRAAPPLRRRRRVRHRQRRRVRRHRYGGDRGYGGGGGGYGGGDRGYGGGGGYGGGGGGSRACYMCGEEGHMARDCSQGGGGGGGYRGGG

SEQ ID NO: 26114 - protein, 1563 aa, Oryza sativa; identical to SEQ ID NO: 20159
  Clone ID: TF_OsC359_6303.pep

SEQ ID NO: 26115 - protein, 1061 aa, Oryza sativa
  unsure (1)..(1061): unsure at all Xaa locations
  Clone ID: TF_OsC359_6670.pep
MGKNQGLEQVMGKLVDMLAKKLSEAPTTSNAVVPHTETMQKIELMQNDIKLEGVKNYLSWSKRALLILKTKGLEEYVTREIKEPESTSNVEWKTWSTTNSSVVAWLLTSLIPAIATTVETISSASEMWKTLTNLYSGEGNVMLMVEAQEKISAMRQGERSVAEYVAELKHLWSDLDHYDPLGRVIEFLKGLNSEFEGRRDAMFHQTTLPTLDEAIAAMAQEELKKKVLPSVTPSSPSATYVVAQSKETRECFNCGEMGHLMRDCRAPRKPSYGRGRFGDRGGARGGRSYAGRGNRGRGYEYRGDHRANVVTLEEGSSGPTNVDVANLVHSTSXSHSNWILDSGASRHVTXSLDRENCLIQERQIGKKLGIGVRRDGLWYLDQKETSEDVCLALMASTSEEEAKFIRTDNGGEYMNNEFSSFLSSEGILHQTSCPDTPPQNGVAERKNRHLLETARSLMYTMNVPKFLWSEAVMTATYLINRTPSRILGMKTPCEMIFGKNKFGVPPKVFGCTCFVRDHRPSIGKLDPRAVKCIFVGYSSCQKGYKCWSPLERRTFVSMDVTFREYVPFYGEKTDLSSLFIDLDDSTSGYDGQQMEGEILGPKGDEQSKKEKLVIGSIPCPIGGPVAQEQEWRKPHEEENLQVYTRRARCPVIQQVEEDNQVEEDVSHEQGSLESGGEDEEVREKGSDMPIAVRKGVRSNAGKKVVNCKWVYTIKQNPDGKVERYKARLVVKGYSQTYGIDYDETFAPVAKMSTLDVKNAFLHGDLQEEGCHTTILAVYVDDMIITWDDSIEIARLKENLSKEFEVKDLGMLSCRPASTPIEQNLKLCAESGDPVNKERYQRLVGRLIYLCHTRPDITYAVSVVSRYMHDPRSGHMDAVYRILRYLKGSPGKGLWFKRSGHLSLEGYCDADWASSLDDRRSTSGYCVFVGGNLVSWRSKKQPVVSRSTAEAEYRAMSVGLSEMLWLRNLLCELKLLKNTCMKLWCDNKSAINIANNPVQHDRTKHIEIDRFFIKEKLDEGMLKLDFVISGEQIADCLTKALGVAECLSMCNKMGMIDIYRPS

SEQ ID NO: 26116 - protein, 746 aa, Oryza sativa; identical to SEQ ID NO: 20163
  Clone ID: TF_OsC359_6534.pep

SEQ ID NO: 26117 - protein, 656 aa, Oryza sativa
  unsure (1)..(656): unsure at all Xaa locations
  Clone ID: TF_OsC359_7816.pep
MDEVGRRWTFSRANEGYTSCGPVVEMSYGGGLVPNARGSFLPACPGXIPAVGRIGSVLLFTARMGEGLCHMFTMGFKAMECGVKMCFVGWPGLAWDELGPRSGCQFGPNHRRPWVKAVLGGQLCEEEDVVSCLPKLRKTAGSASEAKEAVKPAVKQDKRLRSVKVLSLVSNLALPFVFPLSLSKPLQQMADNEKGNKVRSQDIGTSSSRVNEAPDTSRVTLVQHLINQNRLLIEILQQHQTPMLNLNQIQPQVQLEAVQALTPQVSMPPASRRTHDDVPPVDPKEASNICFTCDEQVHYARERPQQKRKTPMRTEDEVRKMIITSTEWPPPGMTRRQRRNTFRGAPQLTEHLLANGGRVSDSEDSDQVSSDDEDEMERKACSRCGEIGHVASSCATICVHCEEDHPPDRCPTSRITCFFCEGTDHVPKDCQFSFLLTKKMANQPASSNGEKHQGNTNPRQDYSFSLTPVPGQRNRNEKRKCRVREDICCFNCQGMGHFADKCPKPRNIAAGTSVHATPCNQKLAPQRIVIHASXRSSPIARVATAPIPMNALPQGVNAQFQPQPPADKTEASICVVPLEIPIQQLRNQVQDEEPECKKVIVCYNCSEEGHYSENCPQPRQNRPPHYRQFTRSRHSNRIVVTGANAVPVRPRDNQNP

SEQ ID NO: 26118 - protein, 1016 aa, Oryza sativa; identical to SEQ ID NO: 20168
  Clone ID: TF_OsC30033_1.pep

SEQ ID NO: 26119 - protein, 275 aa, Oryza sativa
  unsure (1)..(275): unsure at all Xaa locations
  Clone ID: TF_OsC1528_1764.pep
MSIEEALGRLKVVDGDEPRPLSGPITIGGKLHLTREQWEASXGDGRKGESSSPTGGHKPRKARGGVQLRGAQGVATGNHKPARDDTCRNCGKLGHWAKDCRQPRRGQAHVARVEEEEPALLLAHASIELPPAAPAAAAFLHLDEPKVLVSLCDGSSNDKADGWYLDTGATHHMTGRREFFTEFDSSVRGTVKFGDASGVEIKGVGSVTFTAKSGEHRLLTGVYYIPALRNSIISVGQLDENGSRVLVEDGLMRIWDRRRRLLAKVTRGTNRLYIC

SEQ ID NO: 26120 - protein, 1587 aa, Oryza sativa
  unsure (1)..(1587): unsure at all Xaa locations
  Clone ID: TF_OsC1528_2096.pep
MSDARSQRSVASSTRRQQDAKLAAAEERRRATAQTAAAAAKAARLAAAELAAARAEAEAEAAEDAARAAEVEVETLRSSINGSIAGDITADRELEELARGRARERAERWAAAHLHGGGGGPRDRAPADGNPDGRGRAGGSPEPARGPRRRHGSLSPDRRHGHHGVQTVVRDFGPGGGWXPTLTKTNYIEWAAVMRVRLQVRHMWEAVRYGDVDYDEDRRALDALIAAVPPEMQFSLSQKRTAKEAWDAIAAARIGSDRARKSTLQALRKEWENLAFKPGEDVDDFALRLNTLLQKMVQYGDDTYDEERAVEKLFRCVPEKYRQIARSIESLLDLSTMSIEEALGRLKVVDGDEPRPLSGPITIGGKLHLTREQWEASQGDGRKGESSSPTGGRKPRKARGGVQLRWARRRAEGGARRGAQGVATGNHKPARDDTCRNCGKLGHWAKDCRQPRRGQAHVARVEEEEPALLLAHASIELPPAAPAAAAFLHLDEPKVLVSLCDGSSNDKADGWYLDTGATHHMTGRREFFTEFDSSVRGTVKFGDASGVEIKGVGSVTFTAKSGEHRLLTGVYYIPALRNSIISVGQLDENGSRVLVEDGLMRIWDRRRRLLAKVTRGTNRLYILSAQVAHPVCLAARRDDEAWQWHERFGHLHFEALKQLSAKEMVRGMPCLDHVEQLCDVCVVTKQRRLPFPQQTSFRAKERLGLVHGDLCGPVTPATPGGRRYFLLLVDDLSRYMWVMVLGSKGEAADAIRHAQAAAEAECGRKLRVLRTDNGGEFTAAEFASYCADEGIQRHYTAPYSPQQNGVVERRNQTVVGMARALLKQRGMPAIFWGEAVVTAAYILNRSPTKALDGRTPYEAWHGRKPAVSHLRVFGCLAFAKELGHIGKLDDRSTPGVFIGYAEGSKAYRILDPETQRVRITRDVVFDEGRGWVWDKAVDDGSTPTYDDFTIEYVHFEGAGGVGSSSSPSVSTPVPEPPPTPTPTHPRATTSTTTSSSSTPPQPVSPHAPAPTATPPGTSTPTPARVERSPVEFVTPLSHDGERIDAYHDGEQLRYRTMEDLLGDQPVPGLVPRNLEAQLHLACDDGEPRSFAEAEKHAAWRAAMQSEMDAVQENRTWELADLPRGHRAITLKWVFKLKRDEAGAIVKHKARLVARGFVQQEGIDYDDAFAPVARMESVRLLALAAQEGWGVHHMDVKSAFLNGDLKEEVYVHQPPGFVIPGKEGKVLRLHKALYGLRQAPRAWNAKLDSTLKGMGFEQSPHEAAIYRRGNGGNALLVGVYVDDLVITGTKDAEVAAFKEEMKATFQMSDLGPLSFYLGIEVHQDNSGITLRQTAYAKRVVELAGLTDCNPALTPMEERLKLSRDSTAEEVDATQYRRLVGSLRYLTHTRPDLAFSVGYAVKRIIRYVAGTLDHGLYYPRCPGKAHFVGYSDSDHAGDIDTSKSTSGILFFLGECLVSWQSIKQQVVALSSCEAEYMAASAASTQALWLARLLSDLLGRDTGAVELRVDSKSALALAKNPVFHERSKHIRVRYHFIRSYLEEGSIKASYINTKDQLADLLTKPLRRIKFLELCSRIGMAQLSHKTAHKT

SEQ ID NO: 26121 - protein, 1573 aa, Oryza sativa
  Clone ID: TF_OsC1528_2299.pep
ALSQQQQQQHRLPLLPLSLPPLHTAAPRRCAMSDARSRRSVASSTRRQQDAELAAAEERRRATAQTAAAAARAARLAAAELAAARAEAEAEAAEDAARAAEVEVETLRSSINGSIAGDITADRELEELARGRARERAERWAAAHLHGGGGGPRDRAPADGNPDGRGRAGGSPEPARGPRRRHGSLSPDRRYGHHGVQTVVRDFGPGGGWPTLTKTNYIEWAAVMRVRLQVRHMWEAVRYGDVDYDEDRRALDALIVAVPPEMQFSLSQKRTAKEAWDAIAAARIGSDRARKSTLQALRKEWENLAFKPGEDVDDFALRLNTLLQKMVQYGDDTYDEERAVEKLFRCVPEKYRRIARSIESLLDLSTMSIEEALGRLKVVDGDEPQPLSGPITIGGKLHLTREQWEASQGDGRKGESSSPTGGRKPRKARGGVQLRWARRRAEGGARRGAQGVATGNHKPARDDTCRNCGKLGHWAKDCRQPRRGQAHVARVEEEEPALLLAHASIELPPAAPAAAAFLHLDEPKVLVSLCDGSSNDKADGWYLDTGATHHMTGRREFFTEFDSSVRGSVKFGDTSGVEIKGVGSVTFTAKSGEHRLLTRVYYIPALRNSIISVGQLDENGSRVLVEDGLMRIWDRRRRLLAKVTRGTNRLYILSAQVAQPVCLAARRDDEAWQWHERFGHLHFEALKQLSAKEMVRGMPCLDHVEQLCDVCVVTKQRRLPFPQQTSFRAKERLELVHGDLCGPVTPATPGGRRYFLLLVDDLSRYMWVMVLGSKGEAADAIRHAQAAAEAECGRKLRVLRTDNGGEFTAAEFVSYCADEGIQRHYTAPYSPQQNGVVERRNQTVVGMARALLKQRGMLAIFWGEAVDTVRGLAWRKPAVSHLRVFGCLAFAKELGHIGKLDDRSTPGVFIGYAEGSKTYRILDPETQRVRIARDVVFDEGRGWVWDKAVDDGSTPTYDDFTIEYVHFEGAGGPVSPHAPAPTATPPGTSTPTPARVERSPVGFVTPLSHDEERIDAYHDGEQLRYRTMEDLLGDQPVPGLVPRNLEAQLHLACDDGEPRSFAKAEKHAAWRATMQSEMDAVQENRTWELADLPRGHRAITLKWVFKLKRDEAGAIVKHKARLVARGFVQQEGIDYDDAFAPVARMESVRLLLALAAQEGWGVHHMDVKSAFLNGDLKEEVYVHQPPGFVILGKEGKVLRLHKALYGLRQAPRAWNAKLDSTLKGMGFEQSPHEAAIYRRGNGGNALLVGVYVDDLVITGTKDAEVAAFKEEMKATFQMSDLGPLSFYLGIEVHQDNSGITLRQTAYAKRVVELAGLTDCNPALTPMEERLKLSRDSTAEEVDATQYRRLVGSLRYLTHTRPDLAFSVGYVSRFMQRPTTEHQQAVKRIIRYVAGTLDHGLYYPRCPDKAHFVGYSDSDHAGDIDTSKSTSGILFFLGECLVSWQSIKQQVVALSSCEAEYMAASAASTQALWLARLLSDLLGRDTGAVELRVDNKSALALAKNPVFHERSKHIRVRYHFIRSYLEEGSIKASYINTKDQLADLLTKPLGRIKFLELCSRIGMAQLSHKTAHKT

SEQ ID NO: 26122 - protein, 1756 aa, Oryza sativa
  Clone ID: TF_OsC1528_2355.pep
MDNLSEPLLAEIIKRIAKTSDRNSLSLVSKQLYTIDAEQRDAIHVGCGLHPATEALASLCSRFPNLWKVVIDYSGWISIHGKQLDNQGLLVLSSHCSSLTDLTLNFCSYIDDSGIGYLAYCKKLRSFRLNFAPAISSRGLLSVAVGCKSLCTFHLVDCMKVGSVEWLEYLGRAGSLEELVVKDSAPRRCAMSDARSRRSVASSTRRQQDAELAAAEERRRATAQTAAAAARAARLAAAELAAARAEAEAEAAEDAARAAEVEVETLRSSINGSIAGDITADRELEELARGRARERAERWAAAHLHGGGGGPRDRAPADGNPDGRGRAGGSPEPARGPRRRHGSLSPDRRHGHHGVQTVVRDFGPGGGWPTLTKTNYIEWAAVMRVRLQVRHMWEAVRYGDVDYDEDRRALDALIAAVPPEMQFSLSQKRTAKEAWDAIAAARIGSDRARKSTLQALRKEWENLAFKPGEDVDDFALRLNTLLQKMVQYGDDTYDEERAVEKLFRCVPEKYRQIARSIESLLDLSTMSIEEALGRLKVVDGDEPRPLSGPITIGGKLHLTREQWEASQGDRRKGESSSPTGGHKPRKARGGVQLRWARRRAEGGARRGAQGVATGNHKPARDDTCRNCGKLGHWAKDCRQPRRGQAHVARVEEEEPALLLAHASIELPPAAPAAAAFLHLDEPKVLVSLCDGSSNDKADGWYLDTGATHHMTGRREFFTEFDSSVRGTVKFGDASGVEIKGVGSVTFTAKSGEHRLLTGVYYIPALRNSIISVGQLDENGSRVLVEDGLMRIWDRRRRLLAKVTRGTNRLYILSAQVAHPVCLAARRDDEAWQWHERFGHLHFEALKQLSAKEMVRGMPCLDHVEQLCDVCVVTKQRRLPFPQQTSFRAKERLGLVHGDLCGPVTPATPGGRRYFLLLVDDLSRYMWVMVLGSKGEAADAIRHAQAAAEAECGRKLRVLRTDNGGEFTAAEFASYCADEGIQRHYTAPYSPQQNGVVERRNQTVVGMARALLKQRGMPAIFWGEAVVTAAYILNRSPTKALDGRTPYEAWHGRKPAVSHLRVFGCLAFAKELGHIGKLDDRSTPGVFIGYAEGSKAYRILDPETQRVRITRDVVFDEGRGWVWDKAVDDGSTPTYDDFTIEYVHFEGAGGVGSSSSPSVSTPVPEPPPTPTPTHPRATTSTTTSSSSTPPQPVSPHAPAPTATPPGTSTPTPARVERSPVEFVTPLSHDGERIDAYHDGEQLRYRTMEDLLGDQPVPGLVPRNLEAQLHLACDDGEPRSFAEAEKHAAWRAAMQSEMDAVQENRTWELADLPRGHRAITLKWVFKLKRDEAGAIVKHKARLVARGFVQQEGIDYDDAFAPVARMESVRLLLALAAQEGWGVHHMDVKSAFLNGDLKEEVYVHQPPGFVIPGKEGKVLRLHKALYGLRQAPRAWNAKLDSTLKGMGFEQSPHEAAIYRRGNGGNALLVGVYVDDLVITGTKDAEVAAFKEEMKATFQMSDLGPLSFYLGIEVHQDNSGITLRQTAYAKRVVELAGLTDCNPALTPMEERLKLSRDSTAEEVDATQYRRLVGSLRYLTHTRPDLAFSVGYVSRFMQRPTTEHQQAVKRIIRYVAGTLDHGLYYPRCPGKAHFVGYSDSDHAGDIDTSKSTSGILFFLGECLVSWQSIKQQVVALSSCEAEYMAASAASTQALWLARLLSDLLGRDTGAVELRVDSKSALALAKNPVFHERSKHIRVRLMSLHTVHSSMDIAWQVRWMKQ

SEQ ID NO: 26123 - protein, 1485 aa, Oryza sativa
  Clone ID: TF_OsC359_8265.pep
MAGERKEKVGFGGYASNSKAYRVYNKNKGIVEETADVQFDETNGSQEGHENLDDVGDEGLMRAMKNMSIGDVKPIEVEDKPSTSTQDEPSTSATPSQAQVEVEEEKAQNPPMPPRIHTALSKDHPIDQVLGDISKGVQTRSRVASICEHYSFVSCLEQKQVDEALCDPDWMNAMHEELNNFARNKVWTLVERPRDHNVIGTKWVFRNKQDENGLVVRNKARLVAQGFTQVEGLDFGETFAPVARLEAIRILLAFASCFDIKLFQMDVKSAFLNGEIAELVFVEQLPGFEDPKNPNHVYKLSKALYGLKQAPRAWYERLRDFLLSKVFKIGKVDTTLFTKIIGDDFFVCQIYVDDIIFGFTNEVFCKKFGDMMSRKFEMSMIGELSFFLGLQIKQLKDGTFVSQTKYIKDLLKRFSLEDAKPIKTPMTTNGHLDLHEGAMPPRTRRDRREPTPDPVSENEESSGDEYVQSEDENMENVEGDEVEEQQQFKRKKATLSLPDRRERNRLCRLDRAPAGRAVASSSVAATPSTPACPPFPAETPGATFPPSPFPFLRTGRLQPPLSPCLSAGQRRHHLPRLRDAALIPGITSSSPEARRSGLLAGVQWRRHHFSVSGRLLFVAGTPTDVAVSSVDVAASPSTPACPRFHRNVAANISVRLAGVVWPPVPPRPCTGRPHLHHLRHRSGKVVLGIVSPPSKPLRGPSSSSPIVLVVDVPSVARLVVSRRRLRRRHRSGVVLAVLVPVQPLPAVLVASSPVPVVVVVVVLSSFPVVVAPIIVFVLGSASSSLVPAVSRLRSRIAAEVVPSPSVSAAPFVVVVPTPRRVVLSSFRRFPKRGLRSSPKVRKAVLSEQGKANEGYTSCGPVVEMSWQRVGALLLGAQSCLPVPEVPAVGGIGSVLLFMARMGWELCHVFRPYTVVNKPNIHHNSKRLRSVKVLSLVSNLSLPFAFPLSLSKPLQQMADNEKDNKVRSQDIGTSSPRVNEAPDTSCVTLVQHLINQNRLLIEILQQHQTPILNLSQIQPQVQLEAVQALTPQVSMPPASRRTHGDVPHVDSKEASIICFRCDEQGHYARECPQQKRKTPMRTEDEVRKMIITSTEWPPLGMTKRQRRNTFRGAPQLTEHLLANGGRVSDSEDSDQVSSDDEDEMERKACSRCGEIGHVASSCATTCVHCEEDHPPDRCPTSRITCFFCEGTDHVPKDCQFSFLLTKKMANQPASSNGEKHQGNTNPRQDYSFSLTPVPGQRNQNEKRKCRVREDICCFNCQGMGHFADKCPKPRNIAAGTSVHATPCNQKLAPQRIVIHVSRSSPIARVATAPTPASALPQGVNAQFQPQPSVDKTEASIGIVPLDAPAQQPRNQVQDEEPEREKVIVCYNALTLLCTDGLSKELSSMEEVVSLPDLLQAKRRAINLRRAIPSRRPLFASNSTQKEASPVNNSNMQSYHIITEPIKDDAVTRTMPAISLQNQNEQPRLWFSVRYLSLCSRKFAAIM

SEQ ID NO: 26124 - protein, 952 aa, Oryza sativa
  Clone ID: TF_OsC359_7197.pep
MSWQRVGALLLGAQSCLPVPEVPAVGGIGSVLLSMARMGWKLCHVVRLYTVVNKPNIHHNSKRLRSVKVLSLVPNLSLPFVFPLSLSKPLQQMADNEKGNKVRSQDIGTSSSRVNEAPDTSCVTLVQHLINQNRLLIEILQQHQTPILNLSQIQPQVQLEAVQALTPQVSMPPASRRTHGDVPHVDSKEASIICFMCDEQGHYARECPQQKRKTPMRTEDEVRKMIITSTEWPPPGMTKRQRRNTFRGAPQLTEHLLANGGRVSDSEDSDQVSSDDEDEKSPQGFNQNKMERKACSRCGEIGTDHVPKDCQFSFLLTKKMANQPASSNGEKHQGNTNPRQDYSFSLTPVPGQRNQNEKRKCRVREDICCFNCQGMGHFADKCPKPRNIAASTSVHATPCNQKLAPQRIVIHASRSSPIARVAIAQTPASALPQGVNAQFQPQPPVDKIEANIGIVPLDVPAQQPRNQNWNHPAGATNVQVPTVQQQCKLSEFLKTEPPTFAIAVDPMEASDWLRIVEKKLGLIQCTDQERVVFATHQLVALASEWWDSYEASRPEGHTITWDEFSSVFKRSHVPAGMITLRKREFRYLKQEDLTVTEYLHEFHRLAHYAPEDVENDEDQQEKFLQGLKDEIAVQLLLEEYEDFEKLVDKAIQLESEHNRMKNCKRRIVSIPVFPCGNQRQRTEPLQITGSSIAHQEFPPQEDGPNADNNISNTNDDDDTTNNHASCPISDHSNRACNVNIIHQDVDDSINDGTQNDNPSSCDSEKDSDGDSNYGTTDANVSKDFQPPIPTPSQNDRPQTDSSAKKTLICYNCKELGHYSRDCLQPRQSRPPHYRQFTRSRHPNRIVVTGANAVPVRPRATTVSLAFDEPLEGSLKGSRLKYHIVTRSIHNSWSEEYLVDKVQKVIDRRYQQSDHRGAGAPPPIGCAGVAAFGRALRLPCGARPSAARALGCG

SEQ ID NO: 26125 - protein, 665 aa, Oryza sativa
  Clone ID: TF_OsC359_8051.pep
MDEVVATMDISEANEGYASCGSVIEMSRQMKTTRVGARAQPWPACPGIPAVGRVGSVLLFTARMGEGLCHIFTTGSKAMECGVKMCLVGWPGLAWDELEPRSGCQFGPNYRRPWVKAVLDGQLCEEEDVVSRLPKLRKTAGSASEAKEAVKPAVKQDKRLRSVKVLSLVSNLSLPFVFPLSLSKPLQQMADNEKGNKVRSQDIGTSSSRVNEAPDTSCVTLVQHLINQNRLLIEILQQHQTPILNLSQIQPQVQLEAVQALTPQVSAPPTSQKAPHAMPHVDPKEASIICFMCDEQGHYARNCPQQKRKAPMRTEDEVRKMIITSTEWPPPGMTKHQRRNSFRGAQQLTEHLLANGGRVSDSEDSDQVSSDDEDAKSPQDFNQNKIELKACSRCGEIGHVASSCAFTCVRCEEDHPPDRCPMSRITCFLCEGTDHVPKDCQLSFLLTKKMADQHAHSNGEKHQGSTNPRQDYSFSLTPVPGQRKQNEKRKCRVREDIRCFNCQGMGHFADKCPKPRNIAAGTSVHATPCNQQLAPQRIVIHASRSSPLARVATTPIPMSALPQGVNAQFQPQPPADKTEASICVVPLEVPIQQLRNQVQDEEPECKKVIVCYNCSEEGHYSKNCPQPRQNRPPHYRQFTRSRHSNRIVVTGANAVPVRPRVNQNP

SEQ ID NO: 26126 - protein, 1991 aa, Oryza sativa; identical to SEQ ID NO: 20200
  Clone ID: TF_OsC359_5604.pep

SEQ ID NO: 26127 - protein, 220 aa, Oryza sativa
  Clone ID: TF_OsC46300_1.pep
SPWLPEYDEWPFDIVNNDVVCSGFLPTAEPTLRDGIVAGESPSTQHLSNATTEAKTPTKSPIMPPPHGSGSPFTPRSNPCYRCGEDGHWSRNCPKPASSPLNSPCYNCGKLGHWRARGGLLRCLSIICFVNHFLHECKVQTCYCYNCYFAPFFFSMMNWKAIGCRSLNLSLKFFLESFFQRWSSPLPFIRSETETWDDDRCRDLTRTYEDKKKNTNRWMD

SEQ ID NO: 26128 - protein, 1793 aa, Oryza sativa
  Clone ID: TF_OsC1528_1763.pep
MKTLQGLIPHYSIPLAGVHRRSGEQVSGTSAFDVLHWEKAAIRFLGSASRDCSLFVRDGSPSSPLACFAPSSTLATASSSCRATGLSATSKQFEEATTLFVRCILSVLGDRLVEVYMHMIDVKELWDALNTKFGATDASNDLYIIEQFHDYKMADNRSVVEQAHEIQTMAKKLELLKCVLPDKFVAGCIIAKLPPSWRSFGTALKHKRHEYSVEGLIASLDVEEKAREKDAASKGDGGQSSANVVHKAQNKSKEKYKTQQTTNFKKQKKNNNNPNQDERTCFVCGQPGYLARKFPRRKGMKAPAGQTSKSANVTIGNTGDGSGYGNLPTVARGSTVLMGNGSHASAHGVGTVDLKFTSGKIVQLKNVQHVPSIDRNLISGSRLTRDGFKLVFESNKLVVSKHGYFIGKGYECGGMFRFSLSDFCNKSVNHICGSVDDEANDWHSHYWKEAVRSEMDSIIANGTWEVTERPYGCKPVGCKWVFKKKLRPDASYGLLVHQMYVKTTFLNGELDEEIYMDQPDGFVVEGFAVNEANKCVYYRHGGGEGVILYLDVDDILIFGTNLEVINESHYVEKILNRFGYIDNYSIPLAGVHRRSGEQVSGTSAFDVLHREKAAIRVTLWLTAMKCFWVSTGKPEGVLTAEQQKQFEEATTLFVGCILSVLGDRLVEVYMHMTDAKELWDALNTKFGTTDASNDLYIMEQFHDYKMADNRSVVEQAHEIQTMAKELELLKCVLPDKFVAGCIIAKLPPSWRSFGTALKHKRQEYSVEGLIASLDVEEKAREKDAASKGDGGQSSANVVHKAQNKSKGKYKAQQTTNFKKQKKNNNNPNQDERTCFVCGQVGHLARKCPQRKGMKAPAGQTSKSANVTIGNTGDGSGYGNLPTVARGSTVLMGNGSHASVHGVGTVDLKFTSEKIVQLKNMQHVPSIDRNLVSGSRLTRDGFKLVFESNKVVVSKHGYFIGKGYECGGLFRFSLSDFCNKSVNHICGSVDDEANVWHSQVENQLDRKIKRLRSDRGGEFFSNEFDLFCEEHGIIHERTPPYSPKSNGIAERKNRTLTDLVNAMLDTAGLPKACEAPRRSKRQRTAKSFGDDFTVYLVDDTPKSISEAYASPDADYWKEAVRSEMDSIIANGTWEVTERPYGCKPVGCKWVFKKKLRPDASHGLLVHQMDVKTAFLNGELDEEIYMYQPDGFVVEGFAVNEADKCVYYRHGGGEGVILCLYVDDILIFGTNLEVINESHYVEKILNRFGYIDNKPSPTPYDPSLLLRKNKRIARNQLEYSQIIGLLMYLASATRPDISFAVSKLSRFTSNPGDDHWRALERVMRYLKGTVELGLHYTGYPAVLEGYSDSNWISDVDEIKATSGYVFTLGGGAVSWSSQRRQRLVLASRRHRACTCFLPLRLPAPTRSSRLAAINKPTPTPAFPRLPAVMAPVLERPHGVAVLTAFLPPRRHRQADVGFVLGRSSPASPRLCHASPLRRRRPPPPPLSRRRPPPLPSRVGYLADKRIYHGGYRVSSLHFRYSPPTSSSWICQAVTWSPRRWMAEQTMNKALLGGDSLRTASRMSKGRMDNGGDDSASTGKLSPRRLHPHLPPVAAVSVFRSSLALDGSFVEAAPSSSTSPPPFPSSSPFALPLWSCHRRPSPLACADLVDRGDFNRAHHVAACRARRRRPLGRGYKEGHSGDEGMTKTKEAMAAPDRDSDMCDTCGSHAESAVTSDNTGVKTTEWPKVNGAAAAAHFARGRSEEAHGRAFGEWAYRCRVQELKAPLGSLVVALKSSNESTSVLFPAIVVQRMLPVP

SEQ ID NO: 26129 - protein, 1255 aa, Oryza sativa
  Clone ID: TF_OsC1713_5306.pep
MSGVAAAAAGGDGGGGAPPTGAGAGAPGGAVNDNNNGGNSASPSSGEPFSGTFSVVGFAAALKPHAFDGSNYKRWKARALLWLTAMQCFYVSRGKRSEPPLSPEEEAKFEASDCLFRGALISVLADNIVDVYMHMPSGKDMWDALEAKFGVSDAGSELYVMEQFYDYKMVDDRSVVEQAHEIQMLAKELENNNCELPDKFVAGGIIAKLPPSWSDFATSLKHKRQEFSVSDLIGSLGVEEKARAKDVRGKKVEGGSSANMVQKKNPHASHNNKKVKLDVKPKAATNFKKKGKGKAKGDCFVCGKSEHWAKDCPERKDRKSANMVISEGGGTSGYGKILPTVLSVFHSPDWWVDTGANIHVGRGSSLLMGNGSLAAVHGVGTVDLKFTSGKTVQLKNVQHVPSIKKNLVSGSLLCREGFRLVFESNKCVVSKYGTFVGKGYDSGGLFRFSLNDMCNNHNAVNHISENDESNVWHSRLCHMNFGCMTRLANMSLIPKFTLVKGSKCHTCVQSKQPRKPHKASEARNLAPLELVHSDLCEMNGVLTKGGKKYFMTLIDDCTRFCYVYLLKTKDEALHYFKIYKAEVENQLERKIKRLRSDRGGEYFSNEFASFCKEFGIIHERTPPYSPQSNGVAERKNRTLTEMVNAMLDTAGLSKEWWGEAVLTACHVLNKIPMKYKEVTPFEEWERKKLNLSYLRTWGCLAKVNIPIAKKRKLGPNTVDCVSLGYAIHSVGYRFLIVNSGVPDMHVGTILESRDATFFENEFPMKHTPSTSSKETVMPHEHFAPIEHNDQTPEENPEEDNIVDTRKSKRQRVAKSFGDDYIVYLVDDTPRTIEEAYSSPDADYWKEAVRSEMDSIMSNGTWEVVERPYGCKPVGCKWVFKKKLRPDGTIEKYKARLVAKGYTQKEGEDFFDTYSPIARLTTIRVLLALAASHGLLVHQMDVKTAFLNGELEEEIYMDQPDGYVLECQEGMVCKLLKSLYGLKQAPKQWHEKFDTTLTSAGFVVNEADKCVYYRYGGGEGVILCLYVDDILIFGTSLNVIEEVKDYLSKSFEMKDLGEADVILNIKLQRGDEGGITLVQSHYVDKVLSRFGYSDCKPAPTPYDPSVLLRKTRRIARDQLRYSQIIGSLMYLASTTRPDISFVVSKLSRFVSNLGDDHWQALERVMRYLKGTMSYGIHYTGYPKVLEGYSDSNWISDADEIKATSGYVFTLGGGAVSALDTATVEAEWLRELLMDLPVVEKPVPAILMKAVQYQSRF

SEQ ID NO: 26130 - protein, 350 aa, Oryza sativa
  Clone ID: TF_OsC10527_1.pep
MSFPDEEEDEAFLLAVAATEEAALASSDSSKRRRLSMTSSTSSSPTSATPPPAAVPEGPYLAALKGSHSSAWKQQQETLSQARKRPGGSQTLATPGGAFGGSGGGGGGYGDAGGAVEEKACPCGAGSCLVLTSNTPRNPGRKFYRCPMRDNGGCNYFEWCDNPSPGPANVSGNTVFQSDTSVAHMLCPCGAGACLILTTKTGKNVGRQFYRCPANQGISYLFLNGGSSCGYFKWCDEQQLRTAAPLQASTQYHTDVASSGQIPSKRSSSACFKCGQENHWAKDCPNQSSDPYPDKGGRTFTSASSPDACFKCGKSGHWSRDCPTANCGSSTVSSHVKSSSTLGSWNSHRY

SEQ ID NO: 26131 - protein, 384 aa, Oryza sativa
  Clone ID: TF_OsC1713_3594.pep
MNYTHQISGNLVKMVNTRASGSGNNNNEENPTFAQVLAQQTQLINLLVQQMQNQQGNNNVNPPPPQNKLVDFLRVKPPTFSSTTNPVEAGDWLHAVEKKLELLQCTDQEKVVFASHQLQGSASEWWDHFRMNRAEGQPITWAEFTEAFKKTHIPAGVVALKKREFRALKQKDRTVTEYLHEFNRLARYAPEDVRTDEERQEKFLEGLKDELSVMLISHDYEDFQELVDKAIRLEDKKNRMDNRKRKMTVFQEAQGSRQRQRIEPLQIGESFSAGQGQSQQLNIGGEIESETNESNEVNIEQANQPVPVQQDQSQENNSSGREQQVCFNCYKPGHFARECPKSKHQQPQGQVNNIVVTGANAVPVASSRVAFSRDTAQPPVSKQQ

SEQ ID NO: 26132 - protein, 371 aa, Oryza sativa; identical to SEQ ID NO: 20235
  Clone ID: TF_OsC1713_4029.pep

SEQ ID NO: 26133 - protein, 511 aa, Oryza sativa
  Clone ID: TF_OsC1713_4126.pep
MDSSSNRIGFPLSKPSFPSPSPPPWAFAAASLHLFKDPRALLYPSPPSPSPLVVGRALAPCALASPSPPPLQPCAAVVSAVAVAREDRRRVRKVVAVLVRPFAVAGDRRSFIAVVNPKVSAASSSSPSPSVASPPLLWSPMVNTRANGSGNNNNEGNPTLAQVLAQQTQLMNMMIQQMQNQLNQGNNNAPPPQNKLTDFLRVRPPTFSSTTNPVEAGDWLHTIEKKLELLQCTDQEKVVFASHQLQGPASEWWDHFRMNKAEGQPITWAEFTEAFKKTHIPAGVVALKKREFRALKQKDRTVTEYLHEFNRLARYAPEDVRTDEERQEKFLEGLKDELSVMLISHDYEDFQELVDKAIRLEDKKNRMDNRKRRMTVFQEAQGSSQRQCIKPLQIGESSSAGQGQSQQLNIGGEIKSETNESNEVNIEQANQPVPVQQDQSQENNSSGRKQQVCFNCYKPGHFARECPKPKHQQPQGQVNNIVVTGANAVPVASSRVVSSSVTTQPPVSRQQ

SEQ ID NO: 26134 - protein, 343 aa, Oryza sativa; identical to SEQ ID NO: 20242
  Clone ID: TF_OsC1713_4695.pep

SEQ ID NO: 26135 - protein, 371 aa, Oryza sativa; identical to SEQ ID NO: 20248
  Clone ID: TF_OsC1713_4813.pep

SEQ ID NO: 26136 - protein, 493 aa, Oryza sativa
  Clone ID: TF_OsC1713_5276.pep
MGGGGGSVGAGFCGTSGENGGGRGGDRAHVVGCELGCGRAPDFAATWAAMAVGVGRREMVNTRASGSGNNNNEENPTLAQVLAQQTQLINMLVQQMQNQQGNNNVNPPPPQNKLADFLRVRPPTFSSTTNPVEAGDWLHAVEKKLELLQCTDQKKVVFASHQLQGSASEWWDHIRMNRAEGQPITWAEFTEAFKKTHIPAGVVALKKREFRALKQKDHTVAEYLHEFNRLARYAPEDVRTDEERQEKFLEGLKDELSVMLISHDYEDFQELVDKAIRLEDKKNRMDNRKRGRIVFQEAQDSSQRQRIKPLQIGESFSTGQGQSQQLNIGGEIKSETNESNEVNIEQANQPVPVQQDQSQENNSSGREQQVCFNCYKPGHFARECPKPKRQQPQGQLRAAVAAVAPAVRRRRSGRRCRSGRPPSGSPSRRRPRPPLRHRRRSPEHHRRRRPDLRRRFNLVAVAVRCSSAAPLVTAPPFASERAPSEPPSRRRRW

SEQ ID NO: 26137 - protein, 814 aa, Oryza sativa
  Clone ID: TF_OsC1713_5360.pep
MVATATDDGGCNGGAARLNRRQRRRRLGLRGGGARRDGRLRQRRRRINYLDFKDFGFRNIPIGPPPRISVWKGGMIKEYSKMDECKTGDFGKRPLIDDISTVCKWFTRELSDTTYGKNAQLAAKVLDCVYMSKASLFTQKDSTITREEKSREEKIKEGRKQGGSNVAHNGNAPPLEQNHPNNTDVCSQLPKTPQTKSTVEHETKSNINNTSTSKGAPPTENVICSQLQTTPPSKQTEQENSKSNSNKDNACKETQYADKKASSKDFVCSQQSNNSVASRTRAKILHSASPLSVVSISPSKKNSSDQKIRKAVRKQPLKATQPISTQPDKEESNKDGLFVEPICTIPAKKEEKQIDIVLENTSNFRKQMKLEHTGTNIMDIEHSSIQVTQGERYMNTPKTCINNKVGVQHLSANFTANMGNRRLEGQHCDENEYQDDFAEFLYEEEPSDNIDMVEQRAQPQINNEQSSPQTPLHINITSARTPATKKSSQSSPNIEERQYSMTRIIDSLNASGNCSGTRHNLYRPKRIVHPSKYKSSPYDNYTRHQTISAAELNHYNNILSIGETQQYKNKFAVLMDNVKVTWSSLSKYLSPRGVVDTYVLNAYAKKIANDQNNKENEYMNFYFFHRSSVYFLKNWEGAGKEEDYENCARQAFTLARNKKPLHYYDLLIFPCLYDNHWFVFTVDIKGHHFVFLDSIYDENSKYHKKIQGLLIPGFIAMWEEFSDVEKDFSKFDIQYPQITRQNNGHDCGIYAMKCMEWWNPRMHLKDMIRPEYIPNMRKQIANDLLFSEYNSQEEAKILARSFNPTKHGKYARQQ

SEQ ID NO: 26138 - protein, 212 aa, Oryza sativa; identical to SEQ ID NO: 20213
  Clone ID: TF_OsC359_7027.pep

SEQ ID NO: 26139 - protein, 324 aa, Oryza sativa; identical to SEQ ID NO: 20214
  Clone ID: TF_OsC8494_1.pep

SEQ ID NO: 26140 - protein, 355 aa, Oryza sativa; identical to SEQ ID NO: 20215
  Clone ID: TF_OsC359_5800.pep

SEQ ID NO: 26141 - protein, 337 aa, Oryza sativa
  unsure (1)..(337): unsure at all Xaa locations
  Clone ID: TF_OsC338397_1.pep
WTNRHRXNKNSSNLQDPQNMGINQPMLLFEDPPQASRNKGRVQASLKPEDYTINLNHLKQYSSNERCHLTPAKRRINVTCYRCGEEGHCALDCPKKKLGNGQVRNIPRHPKRKMRAGIPPKPMPHSLYPKPMYQQFRRQGTTPHWWKGKRKRKASSRITYAELDLSKMGIEIGDLPEDVEELQLWQRKRDGCCFSCGQFGHYAIGCTQDTNEEQETLPSQIGPEEHRVPDPSKEVSKIKACSRCGEIGHYGSNCITQCPYCDEDHPNGECPTTKITCFLCEKTDHVPQDCQLSPLLTKTAEVQRVSLRFAHRLMTSRSHEDPGFPTFDLHVCLSNNI

SEQ ID NO: 26142 - protein, 55 aa, Oryza sativa
  Clone ID: TF_LIB3432-017-P1-K1-C3.pep
MVETQGICTGHTLMDQGLKKWNSENPWSGYKPISVAWTVDVPNVLAFVKELLMAP

SEQ ID NO: 26143 - protein, 757 aa, Oryza sativa
  unsure (1)..(757): unsure at all Xaa locations
  Clone ID: TF_OsC11468_1.pep
MASLLTLPSLSLSNPSASAAAAGAGAAPSLRLRAAFRCWALRRAGGGRWAAAGAIASPNSVLSEHAFKRLQLSDEEEEEEEGAYGSDEEGVEAVGGGEGDEDELAIARLGLPEQLVSTLEKRGITHLFPIXVRAVLIPALDGRDLIARAKTGTGKTLAFGIPMIKQLMEEDDGRSVRRGRIPRVLVLAPTRELAKQVEKEIKESAPKLSTVCVYGGVSYNVQQNALSRGVDVVVGTPGRIIDLINGGSLQLGEVKYLVLDEADQMLAVGFEEDVETILQQLPAERQSMLFSATMPGWVKKLSRRYLNNPLTIDLVGDQDEKLAEGIKLYAIPLTSTSKRTVLSDLITVYAKGGKTIVFTKTKRDADEVSLALTNSIASEALHGDISQHQRERTLNGFRQGKFTVLVATDVAARGLDIPNVDLIIHYELPNDPETFVHRSGRTGRAGKAGTAILMFTNSQRRTVRSLERDVGCRFDFISPPAIEDVLESSAEHVIATLRGVHTESIQYFIPAAERLQEELGPNALASALAHLSGFSQPPSSRSLISHEQGWVTLQLTRDPGYGRGFFSPRSVTGFLSDVSSAGXSADEVGKIFLTADEKVXFDLPEERDICATDIHFKFGNKIKKKKLPALQDDGPATDSYGRFSNSDRGFRNRRSRGGGSRGGRGGWDSDGEDRFRRGGRSFRSDNDSWSDDDFGGGRRSNRSSSFGGRGSSYGSRSSSSFGGRSSSFGSRDSSRSFSGACFNCGESGHRASDCPNK

SEQ ID NO: 26144 - protein, 609 aa, Oryza sativa
  Clone ID: TF_OsC1713_4507.pep
RHHRRRRLGGSTARTAQAHRRTAVLRHERSPFRLLRSFSPLPGRPLARWADAAITVVVVVLPASGFNTQNSLEIWVKFLGVTKWYQSQLDFVKPWRINRQLRVCSEVKSSIKLHAAKSGKQMVSVRGNFNGSGSRQFHGSTQLNSISFPRQPLKDQPQSQVMANQTQTVEELLQQMRRRYQIYLMQQMQRQCQEPRQVHQPQMQVQVPARNLNQSQEFPISAPKTPVKMMSRSPKITSANSPSDQRKISATCYDCGEQGHYVRNCPWKVFARSPEKDEKQCPGSNQAPSQSTDKKDGTLQRNSGANRTVIWKMDNGRTMIITGSEFTPEDAARIPKRRRGRNTFRGARQLTRHLIKYGPPRPEDDESGERFSADDNDDNDDDNDDNDDATLDSFRERELKCKACARCGIVGHTASLCLPTCRCGEYTHYSDACPLRKVTCFLCEGTDHVPKDCQLNAVLAMTKKEQGATVQPIRQPMVVDNNSLNPSTLSPTTAPVEANLGRSNVARDVHESLCVPVSAAKVHNQKPAPRDPASRFCRNCRKPGHRFSDCPLPRAAKAVRRDSQVTSTAHDTNRHLNVQPPPQRIIVKGTVKGHIVPPAIVSSLQHQHQ

SEQ ID NO: 26145 - protein, 1539 aa, Oryza sativa
  unsure (1)..(1539): unsure at all Xaa locations
  Clone ID: TF_OsC1517_1418.pep
VPLVPSRQPIDVSSTEEPTTGARFGFEEGRVEPEANHESANQQSHHSNRSHRTASRNAEVEQPHRSNRSHHTASRNAEVEQSHCSHRAASHNSGEERIPSLPHVENNMQHLMAVQTQILQGLAAAIAGFQHNAHGNDHPHMGNNRSKLTDFLRSRPPEFSXTVEPVEADDWLKDVDRKLNLVQCTPVEKTLYASHQLRGPAADWWENYCNAHPKPTNIAWDEFATAFRAAHVPESTIDMKKEEFNRLKQGNNSVNEYLSQFNKLARYAPEEVDTDKKKIRKFLKGIAALLLEDARKETTEEYKKRRSNHQGNSSRGAPRPRFGQPMQYHQSVTQANCQPGYAPRPQMNRPAPRPQQRAPSGTTAPNSVTSFKSPQGPSAVQCFRCNQMGHYARECPQNPTNTNSGHANGSTARTPTPAAAQSRPSSQASGQGSRASNSFGRGRVNHIQAETAQDAPDIVMGMFSVNSIPAIVLFDSGASHSFISQAFVKRNGWKTQNLRVPMIVHSPGRNIRATQICPEVNLRTEEVDFLAKPIVLDSQNLDIILRMDWLAKHKGQIDCAEKSITLQGPGGKQVRFTSNTPTASRSILTCLQVTSLESVPVVCEYPDVFPEELTSMPPDREIEFAIELAPGTAPIAKRPYQMAANELAEVKRQIEELESKGYVRPSSSPWGAPVLLVKKKDGSERMVIDCRALNEVTINNKYPLPRIDDLFDQLKGARVFSKIDLRLGYHQLEIRSEDIPKTTFSTRYGLYEFTVMSFGLTNAPAFFMNLMNKIFMEYLDQFVVVFIDDILIYSKNEEEHAEHLRLIMEKLRDHQLLAKFSKCEFWLDRVAFLGHMISSNGVEVDPSKVKAVLAWNPPKNVSEIRSFLGLAGYYRRFIEGFSKLARPMTELLKKEKKFQWSAACEGSFQEMKKRLTTAPVLTLPDIRKDFEIFCDASRQGLGCVLMQERKVVAYASRQLRPHEVNYPTHDLELAAVVHALKIWRHYLIGNRCEVYTDHKSLKYIFTQTELNMRQRRWLELIKDYDLGIHYHPGKANVVADALSRKAYCNVAQIRPDQDRLCRELEKLRLTVVQSGVPASLTVQPTLESQIREAQKDDEGIKELIKRIQEKKDTNFSIDDQGTVWCGPRICVPAKKELRDLILKEAHESAYSIHPGSTKMYQDIKAYFWWAGMKRDVTEYVALCDICQRVKAEHQRPAGLLQPLPIPEWKWEEIGMDLITGLPRTPSGYDSIWVIVDRLTKSAHFVAVKTTFDGKKLAELYMTHVVCRFGCPKKIVSDRGTQFTSRFWKQLHEALGTDLNFSTAYHPQTDGQTERVNQILEDMLRACALDFEGTWDRCLPYAEFSYNNSYQASIQMSPNEAMFGRKCHTPLCWNEVGEALVFGPDILKAAKEQVKLIRERLKTAQNRQKNYADNRRRDLEFGKGDHVYLRVSPLRGMRRFGMSGKLAPRYIGPYLITARRGEVAYQLELPEEEQVSLGNIELEKNLTYKERLIKVLEEAERQTRRKTIKFYKVQWSNHSEDEATWEREDLLRAEFPELLP

SEQ ID NO: 26146 - protein, 338 aa, Oryza sativa; identical to SEQ ID NO: 20268
  Clone ID: TF_OsC82075_1.pep

SEQ ID NO: 26147 - protein, 599 aa, Oryza sativa
  unsure (1)..(599): unsure at all Xaa locations
  Clone ID: TF_OsC359_7473.pep
MFNREKGKNVSGYASSNSSFQLNPPLASRELTRAHPRSIPSMLLSSQLPLVGSQDQNQYVFDRAFATQVNELPMLEEDVPFCHDCREQGHYALNCPWVYVKEAPSFGSAGQTSLNQPPRTKSSLQPSVQSEEPNGDNPLNPRKCFPPSLSYHVGSRTKQAKGKKSKNQKRKAPMRTEEEVRKMTITSTEWPPPGMTRRQRRNTFRGAPQLTEHLLANGGRVSDSEDSDQVSSDDEDEMERKACSRCGEIGHVASSCATICVHCEEDHPPDRCPTSRITCFFCEGTDHVPKNCQFSFLLTKKMANQPASSNGEKPQGNTNPRQDYSLSLKPVPGQRNQNEKRKCRVREDICCFNCQGMGHFADKCPKLRNIAASTSVHTTPCNQKLAPQRIVIHASRSSPIARVATAPTPAGALPQGVNAQFQPQPAVDKTEAXSASYLWMFQHSSQXNQVQDEEPEQDHPPGECPTRKVTCFLCEGTNHVPKDCQLSVLLTKTAEIQRTTLRLSRQLVSSNNNIDDIIHSTNAPLAPPNSAINHGNNTYSTNHSLHRQPQQRIVVDGRSCVSPRPTPGQAKGNRPPEGDTKQKTVIRFNQQSEGSFSCE

SEQ ID NO: 26148 - protein, 665 aa, Oryza sativa; identical to SEQ ID NO: 20273
  Clone ID: TF_OsC359_7487.pep

SEQ ID NO: 26149 - protein, 2025 aa, Oryza sativa
  unsure (1)..(2025): unsure at all Xaa locations
  Clone ID: TF_OsC359_7990.pep
MEMDEVGGRWTFSRADEGYTSCGPVVEMSWHRAGVLLLGXSVLPACPGGSGRRXIGSVLLSMARMGWKLCHVFCLYTMVMAGSVTRRGLDMTGFVLELRGMCVVLGYPHGVDYQARPLPEQEGDDAEPHAGWEVTAVILSGSPERTSLAVTAGGDSFPAACQSAALLAIGTLHQRYPDELQHSPYRYHPRRGGARDYATFRDASSEDDATIVHLARMVEAYDAARIDFHQMVRRGMVENNLKILELRQENLQLQKDLDAVEAQLHQLKIAQGEVCRPKRRRVCRSQKITARKSTSRPELVRQSLAWTCFIETPRAEPAPVVPQEGETSGVGSTEDALLLTFRPGPSQRRSANTGDGNQLEGSNHNHQGNPPPPPPPPPPPPPDTNAILTQILAQQANMMTAFLHHLQNPPQHNAPPPPPQHSKLAEFLRIRPPTFSSSNNPVDALDWLHAVGKKLDIVQCSDEEKVIFAAHQLQGPASLWWDHFQATQPEGQPITWARFTAAFRRTHVPAGVVALKKREFRELKQGNRSVMEYLHEFNNLARYAPEDVREDEEKQENFLAGMDPELSVRLVSGDYPDFQRLVDKSICLEAKHKELESHKRRLANFRNQQGANQRVRYTNPYPGGSSSQQQQQQPRPAPRPQFVVRVPQPQQQQNQQGTRAPRPPTPTVQPGQGRRDAQGPQRLCFNCFEPGHFADKCPKPRRQQGQAPPRSNNGGKDVIRGRVNHVTAEDVLTTPDVIVGTFLIHSIPATILFDSGASHSFISVPFVGRNQLGVERLRNPLLITTPGGVMTAKYYSPAVPIEIQGIPFPSDLILLDTKNLDVILGMNWLAQFQGVVDCARRTVTLYRGPEQPVVFFASPTSVRSSELHQIGLSEIPIVREFRDVFPEELPGMLPKREIEFRIDLAPGTTPLYKRPYRMAANELAEVKKQLEELKEKGYIRPSTSPWGAPVIFVEKKDKTKRMCVDYRALNEVTIKNKYPLPRIDDLFDQLKGATVFSKIDLRSGYHQLRIREEDIPKTAFTTRYGLYEFTVMSFGLTNAPAFFMNLMNKVFMEYLDKFVVVFIDDILIYSQSEEDHQHHLRLVLGKLREHQLYAKLSKCEFWLSEVKFLGHVISAKGVAVDPETVTAVTDWKQPKTVTQVRSFLGLAGYYRRFIENFSKIARPMTQLLKKEEKFVWSPQCEKAFQTLKEKLVSSPVLILPDTRKDFVVYYDASRQGLGCVLMQDGHVVAYASRQLRPHEGNYPTHDLELAAVVHALKIWRHYLIGNRYEIYTDHKSLKYIFTQSDLNLRQRRWLELIKDYDVGSHYHPGKANVVADALSRKSHCNTLNIRGVPPELNQQMEALNLSIVGRGFLAALEAKPTLLDQIREAQKNDLDMHGLLRNMKQGKAAGFTEDEHGTLWNGNRVCVPDNRELKQLILQEAHESPYSIHPGSTKMYLDLKEKYWWVSMKREIAEFVALCDVCQRVKEEHQRPAGLLQPLQVPEWKWDEIGMDFITGLPKTQGGYDSIWVVVDRLTKVARFIPVKTTYGGNKLAELYFARIVSLHGVPKKIVSDRGSQFTSHFWKKLQEELGTRLNFSTAYHPQTDGQTERLNQILEDMLRACVLDFGKTWDKSLPYAEFSYNNSYQASIQMAPYEALYGRKCRTPLLWDQAGESQVFGTDILREAEAKVRTIRDNLKVAQSRQKSYADNRRRDLEFAVDDFVYLRVTPLRGVHRFQTKRKLAPRYVGPFRIIARRGEVAYRLELPASLGNVHDVFHVSQLKKCLRVPSEQADSEQIEVREDLTYVERPVKILDTMERGTRNRVIRFCKVQWSNHAEEEATWEREDELVPLRHRLLRLRRVLADLVHSSVSPADRRNTAVLVDPSRAAAFLHSGRRSRRPRRPGVSRGPPLSLPPSLPSLGRRSAACVMPGGDHRGAGAPPPVGRAARPPSGAPRGCQVGPGRQPPAPSGAAGPRAPPLGRSESQNPGLHLRSGAAAAAVDALLLLLRLSLLLVLAAAGLARSHLLLALHAAALALPPRPRPPPRH

SEQ ID NO: 26150 - protein, 1666 aa, Oryza sativa
  Clone ID: TF_OsC359_8313.pep
MPLVFEGVIMIQEAPGLEWLIPGLEVELCSRDGCSEWLGLYNRMPRYKHEYLFGVEGFVQELRTMSFVIGFGTAPFYAQIPHDRHEEKCRVKVTLNSNSEDVPSVMFEAGGRNYIHACQEVARIAIGELRDRYSDQLADTEYRYHPRQPQGSDRGSYLEIEGIENDATTRHLVEMLWAMDESRAETVLAAQDREDRNRGKICKLEDKVDRLEKELAALKGEAPPQKARIRLTARKRALFVPRYQLAPKMVNTRSNGNGPNHPNNNNNGENPTLAQVLAQQTQLMNMMMQQFQNQQNQGNNHVPPQNKLAEFLRVRPPVFSSTTNPVEAGDWLHAIEKKLDLLQCTDQEKVSFASHQLHGPASEWWDHFRLNRINAEPITWLEFAAAFRKTHIPSGVVSLKKKEFRSLTQGSRSVTEYLHEFNRLARYAPEDVRNDEERQEKFLGGLNDELSYPLMGGSSSVVRPQRQFFNNNAGNNIRNQAPRPVAAPTQQQPTKREQGSKPVVCFNCGDPGHYADKCPKPRRVKVVPAQNNSAVPASKARVNHVAAAEAQDAPDVILGTFPVNSVPATVLFDSGATHSFLSMSFAGNNGMEVEDLRRPLMVSTPSNQALSLQCSPSVRIEIQGIPFLANLILLESKDLDVILGMDWLARHRGVIDCANRKVTLTSNDGRVVTVHALSSESLRSRLNQITLEEIPIVREYPDVFPDDLPGMPPKRDIEFRIDLVPGTTPIHKRPYRMAANELAEVKRQVDDLLQKGYIRPSSSPWGAPVIFVEKKDHTQRMCVDYRALNDVTIKNKYPLPRIDDLFDQLKGATVFSKIDLRSGYHQLRIKEEDIPKTAFTTRYGLFECTVMSFGLTNAPAFFMNLMNKVFMEYLDKFVVVFIDDILIYSRTKEEHEEHLRLALEKLREHQLYAKFSKCEFWLSEVKFLGHVISAGGVAVDPSNVESVTNWKQPKTVSEIRSFLGLAGYYRRFIENFSKIAKPMTRLLQKDVKYKWSEECEQSFQELKSRLISAPILILPDPKKGFQVYCDASKFGLGCVLMQDGKVVAYASRQLRPHEKNYPTHDLELAAVVHAFKIWRHYLFGTRTEVYTDHKSLKYIFTQPDLNMRQRRWLELIKDYDMGIHYHPGKANVVADALSRKSYCNATEGRQLPLELCKEFERLNLGIVSRGFVTALEAKPTLIDQVREAQINDPDIQEIKKNMRRGKAIGFLEDEQGTIWLGERICVPDNKDLKDAILKEAHDTLYSIHPGSTKMYQDLKERFWWASMKREIAEYVAVCDVCQRVKAEHQKPAGLLQPLKIPEWKWEEIGMDFITGLPRTSSGHDSIWVIVDRLTKVAHFIPVKTTYSESRLAELYMARIVCSHGVPKKIVSDRGSQFTSNFWKKLQEEMGSKLNFSTAYHPQTDGQTERVNQILEDMLRACALDFGGNWDKNLPYAEFSYNNSYQASIQMAPYEALYGRKCRTPLLWDQTGERQVFGTDILREAEEKVKIIQERLRVAQSRHKSYADNRRRDLSFEEGDYVYLRVTPFRGVHRFHTKGKLAPRFVGPYKNVSRRGEVAYQLELPQSLAGVHNVFHVSQLKKCLRVPTEEANLEQIEVQEDLTYVEKPIRILETNERRTRNRVIRFCKVQWSNHSEEESTWEREDELKSAHPHLFASSSESRGRDSV

SEQ ID NO: 26151 - protein, 910 aa, Oryza sativa; identical to SEQ ID NO: 20285
  Clone ID: TF_OsC1528_1709.pep

SEQ ID NO: 26152 - protein, 605 aa, Oryza sativa; identical to SEQ ID NO: 20278
  Clone ID: TF_OsC359_5999.pep

SEQ ID NO: 26153 - protein, 1048 aa, Oryza sativa
  unsure (1)..(1048): unsure at all Xaa locations
  Clone ID: TF_OsC359_8126.pep
TPPNSKLSIEAPRGPALSVPHSPGGADMDLADIAQSLAPIKTTIAPPPPRIPPHPAVPARIKEGEIIPRVSLPRFPRFPLSLSLGSVRIHPVILAGDIYGARDPRAXFPSSPAAFSPSRCYIIAPRAPLFRFXRRSPLALAVGSVLAPCSSLSAVAADLRFAADVAPVLRPTRRHLHPLRRIAVDLVRASVSLADRRSAAVIVIPSRAAAFLHSVRRLRRXSCLGVSRGPXPFRFPLLSALSGAAPPRRWSPAVTIGARARRSRRPCRRGRLRARPRGCQVGPAVSRPRPRVRLTRGTHGADRRQPRAPGPPWTERLTRGPHFPWTRANEGYTSCGPMADNEKGNKVRSQDIGTSSSRVDEAPDTSCVTLVQHLINQNRLLIEILQQHQTPILNLSQTQPQVQLEAVQALTPQVSMPPASRRTHGDVPHVDPKGASNICFMCDEQGHYARERPQQKRKTPMRTEDEVRKMIITSTEWPPPGMTRRQRRNTFRGAPQLTEHLLANGGRVSDSEDSDQVSSDDEDEMERKACSRCGEIGHVASSCATICVHCEEDHPPDRCPTSRITCFFCEGTDHVPKDCQFSFLLTKKMANQPASSNGEKHQGNTNPRQDYSFSLTPVPGQRNQNEKRKCRVREDICCFNCQGMGHFADKCPKPRNIAAGTSVHAAPCNQKLAPQRIVIHASQSSPMARVATAPTPASALPQGVNAHFQPQQRIVVDGRSCVSPRPTPGQAKGDTKQKTVIRFNQQSEGSFSCEEKIPSATGGQAKQFRKVKICWKFVKTQRKKRARPPLSLTGGAHLSSPSSRRARRRARALAPPPPRIAPHPAVPARIKERGITPRVSLSRFPLFSLSLSLGFVRIHPAKFAGVFNGARDLRARFPLSPAALSPSRCYIFDPRASLFRFRRSPLALAVGFVLAPCSSLSAVAVDLRFAADVAPVLRPTRRHPHRLRRVVADPVRRSASPADCRSTVALGIPNRAVAFLRSGSPPPSLRSSSRLGATSLGIAASPSTSSAPPFRSPTVGAPPSSSSRAAPPSFSAPSAVSAAFAASG

SEQ ID NO: 26154 - protein, 847 aa, Oryza sativa
  unsure (1)..(847): unsure at all Xaa locations
  Clone ID: TF_OsC359_7561.pep
NLSCLFVRRRRRRFRRIPPSPRAIKWGESFPVIPSPFSPAFPSLSPSDSFGFNPASFTGVIDGAEISAADSSLSGRSLPLPTLYNCSPXSLLRFRHSPLALPVGFVLAPSSSLSAVAAELRFAAAVAPDFLPTRRHLHRLRRVVVDLVRSSVSPADRRSTVVLAVPNRAAAFLHSGRRFRRPRRPGVSRGPPLSLPSLLRSLGRRSAAPVVAGGDHRGAGAPPPVGRAGEAAFGRAPRLPSGARPSAARARGMFNREKGKNVSGYASSNSSFQLNPPLASRELTRAHPWSIPSMLLSSQLPLVGSQDQNQYVFDRAFATQVNELPMPEEDVPFCHDCREQGHYALNCPWVYVKEAPSFGLAGQTSLNQPPRTKSSLQPSVQSEEPNGDNPLNPRKCFPPSLSHHVGSRTKQAKGRKSKNQKRKAPMRTEEEVRKMTITSTEWPPPGMTKRQRRNTFRGAPQLTEQLLANGGRVSDSEDSDQVSSDDEDEKSPQGFNQNKMEHKACSRCREIGHVASSCATTCVHCEEDHPPDRCPTSRITCFFCEGTDHVPKDCQFSFLLTKKMANQPASSNGEKHQGNTNPRQDYSFSLTPVPGQRNQNEKRKCRVREDICCFNCQGMGHFADKCPKPRNIAAGTSVHVTPCTQKLAPQRIVIHASRSSPIARVATAPTPARALPQGVNAQFQPQPSVDKTEAXSALYLWMFQHSSQXNQVQDEEPEQDHPPGECLTRXVTCFLCEGTNHVPKDCQLSVLLTKTAEIQRTTLRLSHQLVSSNNNIDDIIHRTNAPLAPPNFAINHGNNTFSTNHSLHRQPQQRIVVDGRSCVSPRREMGNLYEVDSKDMNYTKFWN

SEQ ID NO: 26155 - protein, 590 aa, Oryza sativa
  Clone ID: TF_OsC1713_3496.pep
MEEKPSTSCLFGSQVKSSLKLHARSEKISSKSSFREDQESRQCHPPQVPDQMPARNPNQSQSQEFPISAPKTPVKMLSRSPKITTAKSSSDQRKVSATCYDCGEQGHYVRNCPWKVFARSPEKDEKQCPGSNQAPSQSTDKKDGTLQPNSGANRKVTWKMDNGRTMIITSSEFTPEDAARIPKRQRGRNTFRGARQLTRHLIKYGSPRPEDDESGEQFSADDDDDDTDDDDDTTLNSFMERGLEFKAYHVPKDCQLNAVIAKTKKEQGTTVQPIRQPMTIDNSGHNPSALPPTLVPVEANHGRSNVTKDVHKSLLVPVSAAKVHNQKPAPRDQASRFCHNCRKPGHRFSDCPLPRAAKAVRRDSQVTSTAHDTNRHLNVQPPPQRIIVKGTVKGHIVPPAIVSSLQHQRQQRKQCQENNSSLQLQRGGTPLRQHPRQVLSAPGRPTVVSSSNAPRIAPIWRPIDKSPFGNPTGKKILPVTADKTVAPPPSKINKQSNVPGHTYPHSARDRGDVGARPPVQSDVTGNRPVTDWSPPIDVAWVPSPFAPPATWQLGEGLGARQCEGPRGTTWHPEALRPLLRLARCGSRARL

SEQ ID NO: 26156 - protein, 1346 aa, Oryza sativa
  unsure (1)..(1346): unsure at all Xaa locations
  Clone ID: TF_OsC1713_4665.pep
MLVAILLRSWYVHDAYYTLSMLLVMLHFITRSPHIVHAMIIILTFWIKICRYMTIFPTIQKPDGSFSVVGFAATLKPHAFDGSNYKRWKARALLWLTAMQCFYVSWGKRSEPPLSPKEDVKFEASNCLFRGALISVLADNIVDVYIHMPSGKDMWDALEAKFGVSDAGSELYVMEQFYDYKMVDDRSVVEQAHEIQMLAKELENNNCELPDKFVAGGIIAKLPPSWSDFATSLKHKQEFSVSDLIGSLGVEEKARAKDNRGKKVEGGSSANMVQKKNPHASHNNKKVKLDGKPKATTNFKKKGKGKAKEDCFVCGKSGHWAKDCPERKERKSANMVISEGGETSGXGKILPTVLSVFHSPDWWVDTGANIHVCDDGRGSSLLMGNGSLAAVHGVGTVDLKFTSGKTVQLKNVQHVASTKKNLVSGSLLCREGFRVVXFESYKCVVSKYGTFIGKGYDSRGLFHFSLDDMCNNHNVVNHISENDESNVWHSRLCHVNFGCTTRLANMSLIPKFTLVKVSKCHTCVQSKQPRKPHKAFEARNLALLELVHSDLCEMNGVLTKGGKKYFMTLIDDCTRFCYVYLLKTKDEALHYFKTYKAEVENQLERKXKRLRSDRGGEYFSNEFASFCEEFGIIHERTPPYPPQSNGVAERKNCTLTEMVNAMLDTAELSKEWWGEAVLTACYILNKIPMKYKEVTPFEEWERKKLNLSYLRTWGCLAKVSVPIAKKRKLRPNTVDCMFLGYAIYSVGYRFLIVNSGVPDMRVGTIIESRDAIFFDNEFPMKHTPSTSSQETVIPHEHFAPIEHNDQTPEGNPEDNIVDTLKSKRQRVAKSFGDDYIVYLVDNTPRTIEEAYLSPDADYWKEAVRSEMDSIMSNDTWEVVEYPYGCKPVGCKWVFKKKLRPDGTIEKYKVRLVAKDYTQKEGEDFFDTYSLVARLTTIRLLLALAASHGLLVHQMDVKTAFLNGELEEEIYMDQPDGYVLEGQEGMVCKLFKSLYGLKQAPKQWHEKFDTTLTSAGFVDNEADKCVYYRHGGGEGVILCLYVDDILIFWTSLNVIEEVKDYLSKSFEMKDLGEADVILNIKLPRGYEGGITLVQSHYVDKVLTPTPYDPSVLLRKNRRIARDQLRYSQIIGSLMYLASATRPNISFAVSKLSRFVSNPGDDHWQALERVMRYLKGTMSYGIHYTGYPKVLEGYSDSNWISDADEIKATSGYVFTLGGGAVSXKSYKQTILTRSTMEAELTALDTATVEAEWLRELLMDLPVVEKPVSAILMNCDNQIVIITVNSSKDNMKSSRHIKRRLKSVRKXKNSGVIALDYVQTANNLADQFTKGLPRNVIDSASRKMGLIPT

SEQ ID NO: 26157 - protein, 1569 aa, Oryza sativa
  unsure (1)..(1569): unsure at all Xaa locations
  Clone ID: TF_OsC22235_2.pep
MDTTSLPCHELIEGTPSHPLHMCSYLLDATGWGEGQQGRRRSSASQNMTGERLTHRVESVMRVSEFSSLPASCAGSSDHVVWLWGWTQLEHGVRSGLGGLATRSLGKFLTIGIRARFRKWTRDRALEGVFMPRRRSSSPIVRTPHDSGGRATGSGGGDRGLVIHRVVKEGGGSVNYPLLTKTNYNDWALLMKIKLQARCLWAAIEPDGVDVPLHEDRMALDAICSAVPPEMIGTLATKASAREAWECIKTMRVGNDRIRKASAQKVRAEYESLAFRGDETVEDFALRLTTIVNQLATLGDPEPADKVVEKYLRVARPRFNQLILSIETLLDISTLSMEEVTGRLKAAEDSGQSSSHTAGGKLYLTEEEWAERQKKKDQEAKRGDSGGSGGRGKRRGGRGRTGGGGTASPESTNSGSARKGDKCRNCGKLGHWAKDCRSKSKREEQAHVAQEDEEEHTLMLLTGGRVDTVDAAAPEGDTPTPPHQAVVELVEMKVFAALDDAADHDPGRWIMDSGASNHMTGSRMAFADLDTNITGNVRLGDGSVVRIAGRGTILFACKNGEHRTLSNTYYLPRLAANIISIGQLDETGFKVLAEDGIMRVWDEQRRLLARIPRTPGRLYMLDINLARPVCLAAHADEDAWRWHARLGHINFRALCKMGKEELVRGLPCLSQVDQVCEACLAGKHRRSPFPRQALCRSDEPLALLHGDLCGPITPATPSGNRYFLLLVDDYSRYMWVALLSTKDAAPAAIKRIQAAAERKSGRKLRALRTDRGGEFTSTQFAEYCAELGMRRELTAPYSPQQNGVVERRNQSVVGTARSMLKAKGLPGMFWGEAINTAVYLLNRSSSKGIGGKTPYALWNGVPPAVHHLRTFGCVAHVKTTTPNLKKLDDRSRPMIFVGYEPGSKAYRAYDPATRRVHISRDIVFDEAAQWDWDAEAAADLDTDFVVEYTTVYHPGSLSGTRQDAGEPPARSSSSPRTPSDSPTAGRTPSVHGDAPAVDFVSPPTGAAANLDADHDDAPLRFRTMDNVLGPAMLPGLANREVQEELMMVSGEEPATFAQAERDEDWRRAMLDEISSIEENKTWRLVDLPSGHRPIGLKWVYKLKKDAQGVVVKHKARLVAKGYVQRAGIDFDEVFAPVARLDSVRLLLALAAQEGWMVHHMDVKSAFLNGELIEEVYVVQPPGFEIDGQENKVYRLDKALYGLRQAPRAWNTKLDCTLKKLGFKQSPLEHGLYARGDGSGRLLVGVYVDDLVIVGGDSGMIKGFKEQMKAEFKMSDLGPLSFYLGIEVHQEAGIITLKQAAYASRIVEKAGLTGCNPCATPMEPRLKLSKESAGSLVDATEYRSLVGSLRYLVNTRPDLAYSVGYVSRFMEKPTDEHLAAVKRIIRYVAGTIHLGCRYVKEGEGGLQGYSDSDMAGDIDTRKSTTGVIFFLGKNPVSWQSQKQRVVALSSCESEYIAAATAACQGIWLARLLGDLRNAATEVVDLRVDNQSALALMKNPVFHDRSKHIQTKFHFIREAVENGEITPSYIGTEGQLADILTKPLSRIKFQELREQIGLATVRMRCXRLVSC

SEQ ID NO: 26158 - protein, 1533 aa, Oryza sativa
  Clone ID: TF_OsC22235_3.pep
MFPFFFRINAWEKNFWARHHGTPEHAPSAAAADIVVVPTTVDQTKPSRRANVFSVSSNLVCHGLATRSLGKFLTIGIRARFRKWTRDRALEGVFMPRRRSSSPIVRTPHDSGGRATGSGGGDRGLVIHRVVKEGGGSVNYPLLTKTNYNDWALLMKIKLQARCLWAAIEPDGVDVPLHEDRMALDAICSAVPPEMIGTLATKASAREAWECIKTMRVGNDRIRKASAQKVRAEYESLAFRGDETVEDFALRLTTIVNQLATLGDPEPADKVVEKYLRVARPRFNQLILSIETLLDISTLSMEEVTGRLKAAEDSGQSSSHTAGGKLYLTEEEWAERQKKKDQEAKRGDSGGSGGRGKRRGGRGRTGGGGIASPESTNSGSARKGDKCRNCGKLGHWAKDCRSKSKREEQAHVAQEDEEEHTLMLLTGGCVDTVDAAAPEGDTPTPPHQAVVELVEMKVFAALDDAADHDPGRWIMDSGASNHMTGSRMAFADLDTNITGNVRLGDGSVVRIAGRGTILFACKNGEHRTLSNTYYLPRLAANIISIGQLDETGFKVLAEDGIMRVWDEQRRLLARIPRTPGRLYMLDINLARPVCLAAHADEDAWRWHARLGHINFRALCKMGKEELVRGLPCLSQVDQVCEACLAGKHRRSPFPRQALCRSDVPLALLHGDLCGPITPATPSGNRYFLLLVDDYSRYMWVALLSTKDAAPAAIKRTQAAAERKSGRKLRALRTDRGGEFTSTQFAEYCAELGMRRELTAPYSPQQNGVVERRNQSVVGTARSMLKAKGLPGMFWGEAINTAVYLLNRSSSKGIGGKTPYALWNGVPPAVHHLRTFGCVAHVKTTTPNLKKLDDRSRPMIFVGYEPGSKAYRAYDPATRRVHISRDIVFDEAAQWDWDAEAAADLDTDFVVEYTTVYHPGSLSGTRQDAWEPPARSSSSPRTPSDSPTAGRTPSVHGDAPAVEFVSPPTGAAANLDADHDDAPLRFRTMDNVLGPAMLPGLANREVQEELMMVSGEEPATFAQAERDEDWRRAMLDEISSIEENKTWRLVDLPSGHRPIGLKWVYKLKKDAQGVVVKHKARLVAKGYVQRAGIDFDEVFAPVARLDSVRLLLALAAQEGWMVHHMDVKSAFLNGELIEEVYVVQPPGFEIDGQENKVYRLDKALYGLRQAPRAWNTKLDCTLKKLGFKQSPLEHGLYARGDGSGRLLVGVYVDDLVIVGGDSGMIKGFKEQMKAEFKMSDLGPLSFYLGIEVHQEAGIITLKQAAYASRIVEKAGLTGCNPCATPMEPRLKLSKESAGSLVDATEYRSLVGSLHYLVNTRPDLAYSVGYVSRFMEKPTDEHLAAVKRIIRYVAGTIHLGCRYVKEGEGGLQGYSDSDMAGDIDTRKSTTGVIFFLGKNPVSWQSQKQRVVALSSCESEYIAAATAACQGIWLARLLGDLRNAATEVVDLRVDNQSALALMKNPVFHDRSKHIQTKFHFIREAVENGEITPSYIGTEGQLADILTKPLSRIKFQELREQIGLATVRVRCVRLVSC

SEQ ID NO: 26159 - protein, 81 aa, Oryza sativa
  unsure (1)..(81): unsure at all Xaa locations
  Clone ID: TF_rsicem_14574.y1.abd.pep
VEGGSSANLVXKKNPHASHNNNNNVKPDIKPKATTNFKKKGKRKAKGNCFVCGKPGHXAKDCPERKDKKSANMVIIEGGGT

SEQ ID NO: 26160 - protein, 1824 aa, Oryza sativa
  Clone ID: TF_OsC1517_1130.pep
MKRILQMRSSSRSKPATMAVNASFSSHGFGEGHHIAQLRDLARFLGFSCPEYTGYSVDRVPPRCELSVYLYPRGGIHGAGLRPHHFTVARPPLQIEYQDLSWTALRRLAHDYSHRLGGSAFRQLPRLPSGHVVARYPCPYSESQPVLTRMVELSEAQATQHDLLLEAYRSLARRYAALEARLAEEGVTSVDTVSWDSGRLCHAIHLSSHSSRGSARTPSGPLSPSSRAPYSPVYSPYPNPVSPSYTPGHTPVASSRRGPRFIRTARKRVVGSSTVFRFDYPAPPPPVALAAVGPRQMASRPRRAARAPARFVFEEGRVEPEENHESANERSHHSNRSHRTASRNAEVEQPRRINRSHRTASRNAEMEQSHRSHRTASHNSGEERLPSPPHVENNMQHLMAVQTQILQGLAAAVAGFQHNAHGNGHPHMSNNRSKLTDFLRSRPPEFSQTIEPVEADDWLKDVDRKLNLVQCTPVEKTLYTSHQLRGPAADWWENYCNAHPEPTNIAWDEFATAFRAAHVPESTIDMKKEEFNRLKQGNSSVNEYLSMFNKLARYAPEEVDTDKKKIRKFLKGIAVGMRLQLLAHDFPTFQHMINKALLLEDARKEATEEYKKRKSNHQGNSSRGAPRPRYGQPMQYHQSVTQANRQPGYAPRPQMNRPAPQPQQRAPSGNTAPNSVTSFKSPQGPSAVQCFRCNQMGHYARQCPQNPTNTSSGHANGSTARTPTPAAAQSRPSSQASGQGSRASNNFGRGRMNHIQAETAQDAPDVVMGMFSVNSVPAIVLFDSGASHSFISQAFVKRNGWKTQNLRVPMIVHSPRSNIRATQICPEVNLRIEEVDFLAKPIVLDSQSLDIILGMDWLAKHKGQIDCAEKSITLQGPGGKQARFTSNTPTASRSILTCLQVTSLESVPIVCEYPDVEFAIELAPSTAPIAKRPYRMAANELAEVKRQIEELESKGYVRPSSSPWGAPVLLVKKKDGSERMVIDYRALNEVTIKNKYPLPRIDDLFDQLKGARVFSKIDLRSGYHQLKIRSEDIPKTAFSTRYGLYEFTVMSFGLTNAPAFFMNLMNKIFMEYLDQFVVVFIDDILIYSKNEEEHAEHMRLIMEKLRDHRLFAKFSKCEFWLDRVAFLGHVISSNGVEVDPSKVEAVLAWNPPKNVSEIRSFLGLAGYYRRFIEGFSKLARPMTELLKKEKKFQWSAACEDSFQEMKKRLTTAPVLTLPDIRKHFEIFCDASRQGLGCVLMQERKVVAYASRQLRPHEVNYPTHDLELAAVVHALKIWRHYLIGNRCEDYDLGIHYHPSKANVVADALSRKVYCNVAQIWPDQDRLCRELEKLRLTVVQSGVPASLTVQPTLESQIREAQKDDEGIKELIKRIQEKKDTDFSIDDQGTVWCGPCICVPAKKELRDLILKEAHESAYSIHPGSTKMYQDIKAYFWWAGMKRDVAEYVALCDICQRVKAEHQRPAGLLQPLPIPEWKWEEIGMDFITGLPRTPGGYDSIWVIVDRLTKSAHFVPVKTTFDGKKLAELYMTHVVCRFGCPKKIVSDRGTQFTSRFWKQLHEALGTDLNFSTAYHPQTDGQTERVNQILEDMLRACALDFEGTWDHCLPYAEFSYNNSYQASIQMSPNEAMFGRKCRTPLCWNEVGEALVFGPDILKSAEEQVKLIRERLKTAQNRQKNYADNRRRDLEFEKGDHVYLRVSPLRGMRFGMSGKLAPRYIGPYLVTARRGEVAYQLELPEGLADVHNVFHVSQLKKCLRVLEEQVPLGNIELEKNLTYKERPIKVLEEAERQTRRKTVKFYKVQWSNHSEDEATWEREDLLRAEFPELLP

SEQ ID NO: 26161 - protein, 1199 aa, Oryza sativa
  unsure (1)..(1199): unsure at all Xaa locations
  Clone ID: TF_OsC1517_1149.pep
MGNNRSKLTDFLRSRPPEFSQTVEPVEADDWLKDVDRKLNLVQCTPVEKTLYASHQLSGPAADWWENYCNAHPEPTNIAWDEFATAFRAAHVPEITIDMKKEEFNRLKQGNSSVNEYLSQFNKLARYAPEEVDTDKKKIRKFLKGIAVGMRLQLLAHDFPTFQHMINKALLLEDARKEATEEYKKRKSNHQGNSSRGAPRPRYGQPMQYHQSVTQANRQPGYAPRPQINRPAPQPQQRAPSSDTAPNSVTSFKSPQGPSAVQCFRCNQMGHYARQCPQNPTNTNSGHANGSTARTPTPAAAQSRPSSQASGQGSRASNNFGRGRVNHIQAETAQDAPDVVMGPGGKQVRFTPNTPTASRSILTCLQVTSLESVPIVCEYPDVFPEELTRMPPDREIEFAIELAPGTAPIAKRPYQMAANELAEVKRQIEELESKGYVRPSSSPWGAPVLLVKKKDGSERMVIDYRALNEVTIKNKYPLPRIDDLFDQLKGARVFSKIDLRSGYHQLKIRSEDIPKTTFSTRYGLYEFTVMSFGLTNAPAFFMNLMNKIFMEYLDQFVVVFIDDILIYSKNEEEHAEHLRLIMEKLRDHQLFAKFSKCEFWLDRVAFLGHVISSNACEDSFQELKKKLTTAPVLTLPDIRKYFEIFCDASRQGLGCVLMQEQKVVAYASRQLRPHEANYPTHDLELAAVVHALKIWRHYLIGNRCEVYTDHKSLKYIFTQTELNMRQRRWLELIKDYDLGIHYHPGKANVVADALSRKAYCNVAQIRPDQDHLCRELEKLRLTVIQSGVPASLTVQPTLESQIREAQKDDEGIKELIKRIQEKKDTNFSIDDQGTVWCGPRICVPAKKELRDLILKEAHESAYSIHPGSTKMYQDIKAYFWWAGMKRDVAEYVALCDICQRVKAEHQRPAGLLQPLPIPEWKWEEIGMDFITGLPRTPNGYDSIWXGCPKKIVSDRGTQFTSRFXNFSTAYHPQTDGQTERVNQILEDMLRACALDFEGTWDRCLPYAEFSYNNSYQASIQMSPNEAMFGRKCRTPLCWNEVGKALVFGPDILKSAEEQVKLIRERLKTAQNRQKNYADNRRRDLEFEKGDHVYLRVSPLRGMRRFGMSGKLAPRYIGPYLITARRCEVAYQLELPEGLANVHNVFHVSQLKKCLRVPEEQVPLGNIELEKNLTYKERPIKVLEEAERQTRRKTIKLYKV

SEQ ID NO: 26162 - protein, 1504 aa, Oryza sativa; identical to SEQ ID NO: 20394
  Clone ID: TF_OsC1517_1275.pep

SEQ ID NO: 26163 - protein, 1848 aa, Oryza sativa; identical to SEQ ID NO: 20417
  Clone ID: TF_OsC1517_1307.pep

SEQ ID NO: 26164 - protein, 1736 aa, Oryza sativa
  unsure (1)..(1736): unsure at all Xaa locations
  Clone ID: TF_OsC1517_1333.pep
MAVNSSFSSHGFGEGHHVAQLRDLARFLGFSCPEYTGYSVDRVPPHCELSVYLYPRGGIHGAGLRPHHFTVARPTLQIAYQDLSWTALRRLAHDYSHRLGGSAFRQLPRLPSGHSDARYPCPYSESQPVLTRMVELSEAQATQHDLLLEAYRSLARRYAALEARLAEEGVTSVDTISWDSGRLCHASHLSSHSSRGSARTPSGPRSPSSRAPYSPVYSPYPHPVSPSYTPGHTPVASSRRGPRFIRTARKRVVGSSTVFRFHYPAPPPPAARAAAGPRQTQILQGLAAAIAGFQHNTHGNGHPHMSNNRSKLTDFLRSRPPEFSQTVEPVEADDWLKDVDRKLNLVQCTPVEKTLYASHQLRGPAADWWENYCNAHPEPTNIAWDEFATAFRAAHMPESTIDMKKEEFNRLKQGNSSVNEYLSMFNKLARYAPEEVDTDKKKIRKFLKGIAVGMRLQLLAHDFPTFQHMINKALLLEDARKEAIEEYKKRKSNHQGNSSRGAPRPRYGQPMQYHQSVTQANRQPGYAPRPQMNHPAPQPQQRAPSGNTAPNSVTSFKSPQGPSAVQCFRCNQMGHYARQCPQNPTNTNSVHANGSTARTPTPATAQSRPSSQASGQGSRASNHFGRGRVNHIQAETAQDAPDVVMGMFSVNSVPAIVLFDSGASHSFISQAFVKRNGWKTQNLRVPMIVHSPGRNIRATQICPEVNLKIEEVDFLAKPIVLDSQSLDIILGMDWLAKHKGQIDCAEKSITLQGPGGKQVRFTPNTPTASRSILTCLQVTSLESVPIVCEYPDVFPEELTSMPPDREIEFAIELAPGTAPIAKRPYRMAANELAEVKRQIEELESKGYVRPSSSPWGAPVLLVKKKDGSERMVIDYRALNEVTIKNKYPLPRIDDLFDQLKGARVFSKIDLRSGYHQLKIRSEDIPKTAFSTRYGLYEFTVMSFGLTNAPAFFMNLMNKIFMEYLDQFVVVFIDDILIYSKNEEEHAEHLRLIMEKLRDHQLFAKFSKCKFWLDRVAFLGHVISSHGVEVDPSKVEAVLAWNPPKNVSEIRSFLGLAGYYRRFIEVFSKLARPMTELLKKENKFHWSASCEDSFQEMKKRLTTAPVLTLPDIRKDFEIFCDASRQGLGCVLMQERKVVAYASRQLRPHEVNYPTHDLELAAVVHALKIWRHYLIGNRCEVYTDHKSLKYIFTQTELNMRQRRWLELIKDYDLGIHYHPGKANVVADALSRKAYCNVAQIRPDHDHLCRELEKLRLTVVQSGVPASLTVQPTLESQIREAQKDNEGIKELIKRXIQEKKDTNFSIDDQGTVXKELRDLILKEAHESAYSIHPGSTKMYQDIKAYFWWAGMKRDVAEYVALCDICQRVKAEHQRPAGLLQPLPIPEWKWEEIGMDFITDLPRTPSGYDSIWVIVDRLTKSAHFVPVKTTFDGKKLAELYMTHVVCRFGCPKKIVSDRGTQFTSRFWKQLHEALGTDLNFSTAYHPHTDGQTERVNQILEDMLRACALDFEGTWDRCLPYAEFSYNNSYQASIKMSPNEAMFGRKCRTPLCWNEVGEALVFGPDILKSAEEQVKLIRERLKTAQSRQKNYADNRRRDLEFEKGDHVYLRVSPLRGMRRFGMSSKLAPRYIGPYLITARRGEVAYQLELPEGLADVHNVFHVSQLKKCLRVPEEQVPLGNIELERNLTYKERPIKVLEETERQTRRKTIKFYKVQWSNHSEDEATWEREDLLRAEFPELLP

SEQ ID NO: 26165 - protein, 1822 aa, Oryza sativa
  Clone ID: TF_OsC1517_1376.pep
MAVNASFSSHGFGEGHHVAQLRDLARFLGFSCPEYTGYSVDRVPPHCELSVYLYPRGGIHGAGLRPHHFTVARPTLQIAHRLGGSAFRQLPRLPSGHSDARYPCPYSESQPVLTRMVELSEAQATQHDLLLEAYRSLARRYAALEARLAEEGVTSVDTVSWDSGRLCHASHLSSHSSRGSARTPSGPRSPSSRAPYSPVYSPYPHPVSPSYTPGHTPVASSRRGPRFIRTARKRVVGSSTVFRFHYPAPPPPAARAAAGPRQVPPVPSRQPIDVSSTEEPTTGARFGFENGRVEPEENHESANEQSHHSNRSHRTASRNAEVEQPRRSSRSHRTVSRNAEMEQSHRSHRTASHNSGEERLPSPPHVENNMQHLMAVQTQILQGLAAAVAGFQHNAHGNGHPHMSNNRSKLTDFLRSRPPEFSQTVEPVEADDWLKDVDRKLNLVQCTPVEKTLYASHQLRGPAADWWENYCNAHPEPTNIAWDEFATAFRAAHVPESTIDMKKEEFNRLKQGNSSVNEYLSMFNKLARYAPEEVGTDKKKIRKFLKGIAALLLEDARKEATEEYKKRKSNHQGNSSRGAPCPRYGQPMQYHQSVTQANRQPGYAPRPQMNRPAPQPQQRAPSGNTAPNSVTSFKSPQGPSAVQCFRCNQMGHYARQCPQNPTNTNSGHANGSTARTPTPAAAQSRPSSQASGQGSRASNNFGRGRVNHIQAETAQDAPDVVMGMFSVNSVPAIVLFDSGASHSFISQAFVKRNGWKTQNLRVPMIVHSPGRNIRATQICPEVNLRIEEVDFLAKPIVLDSQSLDIILGMDWLAKHKGQIDCAEKSITLQGPGGKQVRFTSNTPTASRSILTCLQVTSLESVPIVCEYPDVFPEELTSIPPDREIEFAIELAPGTAPIAKRPYRMAANELAEVKRQIKELESKSYVRPSSSPWGAPVLLVKKKDGSERMVIDYRALNEVTIKNKYPLPRIDDLLDQLKGARVFSKIDLRSGYHQLKIRSEDIPKTAFSTRYGLYEFTVMSFGLTNAPAFFMNLMNKIFMEYLDQFVMVFIDDILIYSKNEEEHAEHLRLIMEKLRDHQLFAKFLKCEFWLDRVAFLGHVISSNGVEVDPSKVRAVLAWNPPKNVSEIRSFLGLARYYRRFIEGFSKLARPMTELLKKEKKFQWSAACEESFQEMKKRLTTAPVLTLPDIRKDFEIFCDASRQGLGCVLMQERKVVAYASRQLRPHEVNYPTHDLELAAMVHALKIWRHYLIGNRCEVYTDHKSLKYIFTQTELNMRQRRWLELIKDYDLGIHYHPGKANVVADALSRKAYCNVAQIRPDQDRLCRELEKLRLTVVQSGVPASLTVQPTLESQIREAQKDDEGIKELIKRIQEKKDINFSIDDQGTVWCGPRICVPAKKELRDLILKEAHESAYSIHPGSTKMYQDIKAYFWWAGMKRDVAEYVALCDICQRVKAEHQRPAGLLQPLPIPEWKWEEIGMDFITGLPRTPSGYDSIWVIVDRLTKSAHFVPVKTTFDGKKLAELYMTHVVCRFGCPNKIVSDRGTQFTSRFWKQLHEALGTDLNFSTAYHPQTDGQTERVNQILEDMLRACALDFEGTWDRCLPYEEFSYNNSYQASIQMSPNEAMFGRKCRTPLCWNEVGEALVFGPDILKAVEEQVKLIRERLKTAQNRQKSYADNRRRDLEFEKGDHVYLRVSPLHGMRRFGMSGKLAPRYIGPYLITARRGEVAYQLELPEGLADVHNVFHVSQLKKCLRVPEEQVPLGNIELEKNLTYKERPIKVLEEAERQTRRKTVKFYKVQWSNHSEDEATWEREDLLRAEFPELLP

SEQ ID NO: 26166 - protein, 1694 aa, Oryza sativa; identical to SEQ ID NO: 20402
  Clone ID: TF_OsC1517_1403.pep

SEQ ID NO: 26167 - protein, 1851 aa, Oryza sativa
  unsure (1)..(1851): unsure at all Xaa locations
  Clone ID: TF_OsC1517_1411.pep
MAVNASFSSHGFGEGHHVAQLRDLSRFLGFSCPEYTGYSVDRVPPHCELSVYLYPRGGIHGAGLRPHHFTVARPTLQIAYQDLSWTALRRLAHDYSHRLGGSAFRQLPRLPSGHSDARYPCPYSESQPVLTRMVELSEAQATQHDLLLEAYRSLARRYAALEARLAEEGVTSVDTISWDSGRLCHASHLSSHSSRGSARTPSGPRSPSSRAPYSPVYSPYPHPVSPSYTPGHTPVASSRRGPRFIRTARKRVVGSATVFRFHYPAPPPPAARAAAGPRQMASRPRRAARAPARFGVEDGRVEPEENHESANEQSHHSNRSHRTVSRNAEVEQPRRSSRSHRTVSRDAEMEQSHRSHRTASHNSGEERLPSPPHVETNMQHLMAVQTQILQGLTTAIASFQHNAHGNGHPHMGNNRSKLTDFLRSRPPEFSQTVEPVEADDWLKDVDRKLNLVQCTPVEKTLYASHQLRGPAADWWENYCNAHPEPTNIAWDEFATAFRAAHVPESTIDMKKEEFNRLKQGNSSINEYLSQFNKLARYAPEEVDTDKKKIRKFLKGIAVGMRLQLLAHDFPTFQHMINNALLLEDARKEATEEYKKRKSNHQGNSSRGAPRPRYGQPMQYHQSVTQANRQPGYAPRPQINRPAPQPQQRAPSGNTAPNSVTSFKSPXGPSAVQCFRCNQMGHYARQCPQNPTNTNSGHANGSTARTPTPAATQSRPSSQASGQGSRASNNFGRGRVNHIQAETAQDAPDVVMGMFSVNSVPAIVLFDSGASHSFISQAFVKRNGWKTQNLRVPMIVHSPGRNIRATQICPEVNLRIEEVDFLAKPIVLDSQSLDIILGMDWLAKHKGQIECAEKSITLQGPRGKQVRFTPNTPTASRSILTCLQVTSLESVPIVCEYPDVFPEELTRMPPDREIEFAIELAPGTAPIAKRPYRMAANELAEVKRQIEELESKGYVRPSSSPWGAPVLLVKKKDGSERMVIDYRALNEVTIKNKYPLPRIDDLFDQLKGARVFSKIDLRSGYHQLKIRSEDIPKTAFSTRYGLYEFTVMSFGLTNAPAFFMNLMNKIFMEYLDQFVVVFIDDILIYSKNEEEHAEHLRLIMEKLRDHQLFAKFSKCEFWLDRVAFLGHVISSNGVEVDPSKVEAVLAWNPPKNVSEIRSFLGLAGYYRRFIEGFSKLARPMTELLKKEKKFQWSAACEDSFQELKKRLTTAPVLTLLDIQKDFEIFCDASRQGLGCVLMQEQKVVAYASRQLRPHEANYPTHDLELAAVVHALKIWRHYLIGNRCEVYTDHKSLKYIFTQTELNMRQRRWLELIKDYDLGIHYHPGKANVVADALSRKAYCNVAQIRPDQDHLCGELEKLRLTVVQSGVPASLTVQPTLESRIREAQKDDEGIKELIKRIQEKKDTNFSIDDQGTVWCGPRICVPAKKELRDLILKEAHESAYSIHPGSTKMYQDIKAYFWWAGMKRDVAEYVALSDICQRVKAEHQRPAGLLQPLPIPEWKWEEIGMDFITGLPRTPNGYDSIWVIVDRLTKSAHFVPVKTTYDGKKLAELYMTHVVCRFGCPKKIVSDRGTQFTSRFWKQLHEALGTDLNFSTAYHPQTDGQTERVNQILEDMLRAYALDFEGTWDRCLPYAEFSYNNSYQASIQMSPNEAMFGRKCRTPLCWNEVGKALVFGPDILKSAEEQVKLIRERLKTAQNRQKNYADNRRRDLEFEKGDHVYLRVSPLRGMRRFGMSGKLAPRYIGPYLITARRGEVAYQLELPEGLADVHNVFHVSQLKKCLRVPEEQVPLGNIELEKNLTYKERPIKVLEEAERQTRRKTIKFYKVQWSNHSEDEATWEREDLLRAEFPDLLP

SEQ ID NO: 26168 - protein, 1851 aa, Oryza sativa; identical to SEQ ID NO: 20390
  Clone ID: TF_OsC1517_1425.pep

SEQ ID NO: 26169 - protein, 1487 aa, Oryza sativa
  unsure (1)..(1487): unsure at all Xaa locations
  Clone ID: TF_OsC1517_1433.pep
VLGFRPHVENNMQHIMAVQTQILQGITTAIAGFQHNAHGNGHPHVGNNRSKLTDFLRSRPPEFSQTVEPVEADDWLKDVDRKLNLVQCTPVEKTLYASHQLRGPAADWWENYCNAHPEPTNIAWDEFAMAFHAAHVPESTIDMKKEEFNRLKQGNSSVNEYLSQFNKLARYAPEEVDTDKKKIRKFLKGIAVGMRLQLLAHDFPTFQHMINKALLLEDARKEATEEYKKRKSQXNHQGNSSRGAPRPRYGQPMQYHQSVTQANRQPGYAPRPQMNRPAPPPQQRAPSGNTAPNSVTSFKSPQGPSAVQCFRCNQMGHYARQCPQNPTNTNSGHANGSTARTPTPAAAQSRPSSQASGXGSRASNHFGRGRVNHIQAETAQDAPDVVMGMFSVNSVPAIVLFDSGASHSFISQAFVKRNGWKTQNLRVPMIVHSPGRNIRATQICPEVNLRIEEVDFLAKPIILDSQSLDIILGMDWLAKHKGQIDCAEKSITLQGPGGKQVRFTPNTPTASRSILTCLQVTSLESVPIVCEYPDVFPEELTSMPPDREIEFAIELAPGTAPIAKRPYRMAANELAEVKRQIEELESKGYVRPSSSPWGALVLLVKKKDGSERMVIDYRALNEVTIKNKYPLPRIDDLFDQLKGARVFSKIDLRSGYHQLKIRSEDIPKTAFSTRYGLYEFTVMSFGLTNAPAFFMNLMNQIFLEYLDQFVVVFIDDILIYSKNEEEHTEHLRLIMEKLRDHQLFAKFSKCEFWLDRVAFLGHVISSNGVEVDPSKVEAVLAWNPPKNVSEIRSFLGLAGYYRRFIEGFSKLARPMTELLKKEKKFQWSAACEDSFQEMKKRLTTAPVLTLPDIRKDFEIFCDASRQGLGCVLMQERKVVAYASRQLRPHEVNYPTHDLELAAVVHALKIWRHYLIGNRCEVYTDHKSLKYIFTQTELNMRQRRWLELIKDYDLGIHYHPGKANVVADALSRKAYCNVAQIRPDQEHLCRELEKLRLTVVQSGVPASLTVQPTLESQIREAQKDDEGIKELIKRIQEKKDTNFSIDDQGTVWCGPRICVPAKKELRDLILKEAHESAYSIHPGSTKMYQDIKAYFWWAGMKRDVAEYVALCDICQRVKAEHQRPAGMLQPLPIPEWKWEEIGMDFITGLPRTPNGYDSIWVIVDRLTKSAHFVPVKTTYDGKKLAELYMTHVXCRFGCPKKIVSDRGTQFTSRFWKQLHEALGTDLNFSTAYHPXTDGQTERVNQILEDMLRACALDFEGTWDRCLPYAEFSYNNSYQASIQMSPNEAMFGRKCRTPLCWNEVGEALVFGPDILKSAEEQVKLIRERLKTAQNRXKNYADNRRRDLEFEKGDHVYLRVSPLRGMRRFGMSGKLAPRYIGPYLITARRGEVAYQLELPEGLADVHNVFHVSQLKKCLRVPEEQVPLGNIELEKNLTYKERPIKVLEEAEHQTRRKTIKFYKVQWSNHSEDEATWEREDLLRAEFPELFP

SEQ ID NO: 26170 - protein, 1851 aa, Oryza sativa; identical to SEQ ID NO: 20419
  Clone ID: TF_OsC1517_1463.pep

SEQ ID NO: 26171 - protein, 1363 aa, Oryza sativa; identical to SEQ ID NO: 20431
  Clone ID: TF_OsC1517_1473.pep

SEQ ID NO: 26172 - protein, 1658 aa, Oryza sativa
  unsure (1)..(1658): unsure at all Xaa locations
  Clone ID: TF_OsC1517_1474.pep
MAVNASFSSHGFGEGHHVAQLRDLAHFLGFSCPEYTGYSVDRVPPHCELSVYLYPRGGIHGAGLRPHHFTVARPTLQIAYQDLSWTALRRLAHDYSHRLGGSAFRQLPRLPSGHSDARYPCPYSEPQPVLTRMVELSEAQATQHDLLLEAYRSLARRYAALEARLAEEGVTSVDTISWDSGRLCHASHLSSHSSRGSTRTPSGPRSPSSRAPYSPVYSPYPHPVSPSYTPGHTPVASSRRGPRFIRTARKRVVGSATVFRFHYPAPLPPAARAAAGPRQMASRPRRAARAPAHFGFEDGRVEPEENHESANEQSHRSNRSHRTASRNAEMEQSHRSHHTVSHNSGEERLPSPPHVENNMQHLMAVQTQILQGLAAAVAGFQHNAHGNGHPHMSNNRSKLTNFLRSRPPEFSQTVEPVEADDWLKDVDRKLNLVQCTPVEKTLYASHQLRGPAADWWENYCNAHPEPTNIAWDEFATAFRAAHVPESTIDMKKEEFNRLKQGNSSVNEYLSMFNKLARYAPEEVDTDKKKIRKFLKGIAVGMRLQLLAHDFPTFQHMINKALLLEDARKEATEEYKKRKSNHQGNSFRGAPRPRYGQPMQYHQSVTQANRQPGYAPRPQMNHPAPQPQQRAPSGNTAPNSVTSFKSPQGPSAVQCFRCNQMGHYARQCPQNPTNNNSGHANGSTARTPTPAAAQSRPSSQASGQGSRASNNFGRGRVNHIQAETAQDALDVVMGPGGKQVRFTPNTPTASRSILTCLQVTSLESVPIVCEYPDVFPEELTRMPPDREIEFAIELAPGTAPIAKRPYRMAANELAEVKXQIEELESKGYVRPSSSPWGAPVLLVKKKDGSERMVXGYHQLKIRSEDIPKTAFSTRYGLYEFTVMSFGLTNAPAFFMNLMNKIFMEYLDQFVVVFIDDILIYSKNKEEHAEHLRLIMEKLRDHQLFAKFSKCEFWLDRVAFLGHVISSNGVEVDPSKVEAVLAWNPPKNVSEIRSFLGLAGYYRRFIEGFSKLARPMTELLKKEKKFQWSAACEDSFQEMKKRLTTAPVLTLPDIRKDFEIFCNASRQGLGCVLMQERKVVAYASRQLRPHEVNYPTHDLELAAVVHALKIWRHYLIGNRCEVYTDHKSLKYIFTQTELNMRQRRWLELIKDYDLGIHYHPGKANVVADALSRKAYCNVAQIRPDQDHLYRELDKLRLTVVQSGVPASLTVQPTLESQIREAQKDDEGIKELIKRIQEKKDANFSIDDQGTVWCGPRICVPAKKELRDLILKEAHESAYSIHPGSTKMYQDIKAYFWWAGMKRDVAEYIALCDICQRVKAEHQRPAGLLQPLPIPGWKWEEIGMDFITGLPRTPSGYDSIWVIVDRLTKSAHFVPVKTTYDGRKLAELYITHVVCRFGCPKKIVSDRGTQFTSRFWKQLHEALGTDLNFSTAYHPQTDGQTERVNQILEDMLRACALDFEGTWDRCLPYAEFSYNNSYQASIQMSPNEAMFGRKCRTPLCWNEVGEALVFGPDILKRDLEFEKGDHVYLRVSPLRGMKRFGMSGKLAPRYIGPYLITARRGEVAYQLELPEGLADVHNVFHVSQLKKCLRVPEEQVPLGNIELEKNLTYKERPIKVLEEAERQTRRKTIKFYKVQWSNHSEDEATWEREDLLRAEFPELLP

SEQ ID NO: 26173 - protein, 1347 aa, Oryza sativa; identical to SEQ ID NO: 20427
  Clone ID: TF_OsC1517_1486.pep

SEQ ID NO: 26174 - protein, 637 aa, Oryza sativa
  unsure (1)..(637): unsure at all Xaa locations
  Clone ID: TF_OsC1517_1505.pep
MASRPRRAARAPARFGVEDGRVEPEENHESANEQSHHSNRSHRTVSRNAEVEQPRRSSRSHRTVSRDAEMEQSHRSHRTASHNSGEERLPSPPHVETNMQHLMAVQTQILQGLTTAIASFQHNAHGNGHPHMGNNRSKLTDFLRSRPPEFSQTVEPVEADDWLKDVDRKLNLVQCTPVEKTLYASHQLRGPAADWWENYCNAHPEPTNIAWDEFATAFRAAHVPESTIDMKKEEFNRLKQGNSSXNEYLXSQFNKLARYAPEEVDTDKKKIRKFLKGIAVGMRLQXLAHDFPTFQHMINNALLLEDARKEATEEYKKRKSNHQGNSSRGAPXPRYGQPMQYHQSVTQANRKPGYAPRPQINRXAPQPQQRAPSGNTAPNSVTSFKSPXGPSAVQCFRCNQMGHYARQCPQNPTNTNSGHANGSTARTPTPAATQSRPSSQASGQGSRASNNFGRGRVNHIQAETAQDAPDVVMGMFSVNSVPAIVLFDSGASHSFISQAFVKRNGWKTQNLRVPMIVHSPGRNIRATQICPEVNLRIEEVDFLAKPIVLDSQSLDIILGMDWLAKHKGQIECAEKSITLQGPRGKQVRFTPNTPTASRSILTCLQNPPDREIEFAIELAPGTAPIAKRPYRMAANEL

SEQ ID NO: 26175 - protein, 1629 aa, Oryza sativa
  unsure (1)..(1629): unsure at all Xaa locations
  Clone ID: TF_OsC1517_1525.pep
MVELSEAQATQHDLLLEAYRSLARRYAALEACLAEEGVTSVDTISWDSGRLCHASHLSSHSSRGSALTPSGPRSPSSRAPYSPVYSPYPHPVSPSYTPGHTPVASSRRGPRFIRTARKRVVGSSNVFRFHYPAPPPPAARAAAGPRQMASRPRRAARAPARFGFEDGRVEPEENHESANEQSHHSNRSHRTVSRNAEVEQPRHSSRSHRTVSRDAEMEQSHRSHRTASHNSGEERLPSPPHVETNMQHLMAVQTQILQGLTTAIASFQHNAHGNGHPHMGNNRSKLTDFLRSRPPEFSQTVEPVEADDWLKDVDRKLNLVQCTPVEKTLYASHQLRGPAADWWENYCNAHPEPTNIAWDEFATAFRAAHVPESTIDMKKEEFNRLKQGNSSVNEYLSQFNKLARYAPEEVDTDKKKIRKFLKGIAVGMRLQLLAHDFPTFQHMINKALLLEDARKEATEEYKKRKSNHQGNSSRGAPRPRYGQPMQYHQSVTQANRQPGYAPRPQINRPAPQPQQRAPSSDTAPNSVTSFKSPQGPSAVQCFRCNQMGHYARQCPQNPTNTNSGHANGSTARTPTLAAAQSRPSSQASGQGSRASNNFGRGRVNHIQAETTQDAPDVVMGMFSVNSVPAIVLFDSGASHSFISQAFVKRNGWKTQNLRVPMIVHSPGRNIRATQICPEVNLRIEEVDFLAKPIVLDSQSLDIILGMDWLAKHKGQIDCAEKSITLQGPGGKQVRFTPNTPTASRSILTCLQVTSLESVPIVYEYPDKKDGSERMVIDYRALNEVTIKNKYPLPRIDDLFDQLKGARVFSKIDLRSGYHQLKIRSEDIPKTAFSTRYGLYEFTVMSFGLTNAPAFFMNLMNKIFMEYLDQFVMVFIDDILIYSKNKEEHAEHLRLIMEKLRDHQLFAKFSKCEFWLDRVAFLGHVISSNGVEVDPNKVEAVLAWNPPKNVSEIRSFLGLAGYYRRFIEGFSKLARPMTELLKKEKKFQWSAACEDSFQELKKRLTTAPVLTLPDIRKDFEIFCDASRQGLGCVLMQEQKVVAYASRQLRPHEANYPTHDLELAAVVHALKIWRHYLIGNRCEVYTDHKSLKYIFTQTELNMRQRRWLELIKDYDLGIHYHPGKANVVADALSRKAYCNVAQIRPDQDHLCRELEKLRLTVVQSGVPASLTIQPTLESQIREAQKDDEGIKELIKRIQEKKDTNFSIDDQGTVWCGPRICVPAKKELRDLILKEAHESAYSIHPGSTKMYQDIKAYFWWAGMKRDVAEYVALCDICQRVKAEHQRPAGLLQPLPIPEWKWEEIGMDFITGLPRTPNGYDSIWVIVDRLTKSAHFVPVKTSYDGKKLAELYMTHVVCRFGCPKKIVSDRGTQFTSRFWKQLHEALGTDLNFSTAYHPQTDGQTERVNQILEDMLRACALDFEGTWDRCLPYAEFSYNNSYQASIQMSPNEAMFGRKCRTPLCWNEVGKXTAQNRQKNYADNRRRDLEFEKGDHVWRSXYLRVSPLRGMRRFGMSGKLAPRYIGPYLITARRGEVAYQLELPEGLADVHNVFHVSQLKKCLRVPEEQVPLGNIELEKNLTYKERPIKVLEEAERQTRRKTIKFYKVQWSNHSEDEATWEREDLLRAEFPDLLP

SEQ ID NO: 26176 - protein, 1382 aa, Oryza sativa; identical to SEQ ID NO: 20389
  Clone ID: TF_OsC1517_1552.pep

SEQ ID NO: 26177 - protein, 1680 aa, Oryza sativa
  unsure (1)..(1680): unsure at all Xaa locations
  Clone ID: TF_OsC1517_1556.pep
MTVLLLYNKETSVAVIFYLPVIPALFPGTGIDXQMAVNASFSSHGFGEGHHVAQLRDLARFLGFSCPEYTGYSVDRVPPHCELSVYLYPRGGIHGAGLRPHHFTVARPTLQIAHRLGGSAFRQLPRLPSGHSDARYPCPYSESQPVLTRMVELSEAQATQHDLLLEAYRSLARRYAALEARLAEEGVTSVDTISWDSGRLCHASHLSSHSSRGSARTPSGPRSPSSRAPYSPVYSPYPHPVSPSYTPGHTPVASSRRGPRFIRTARKRVVGSSTVFRFHYPAPPPPAARAAAGPRQVPPVPSRQPIDVSSTEEPTTGARFGFEDGRVEAEANHESANEQSHHSNRSHRTISRNAEVEQPRRSNRSHRTASRDAEMEQSHRSHRTASHNSGEERLPSPPHVENNMQHLMAVQTQILQGIAAAVAGYQHNAHGNGHPHMGNNRSKLTDFLRSRPPEFSQTVEPVEADDWLKDVNRKLNLVQCTPVEKTLYASHQLRGPAADWWENYCNAHPEPTNIAWDEFATAFCAAHVPESTIDMKKEEFNRLKQGNSSVNEYLSMFNKLARYAPEEVDSDKKKIRKFLKGIAALLLEDARKEATEEYKKRKSNHQGNSSQGAPRPRYGQPMQYHQSVTQANRQPGYAPRPQMNRPAPQPQQRAPSGNIAPNSVTSFKSPQGPSAVQCFRCNQMGHYARQCPQNPTNTNSGHANGSTARTPTPAAAQSRPSTQASGQGSRASNHFGRGRVNHIQAETAQDAPDVVMGMFSVNSVPAIVLFDSGASHSFISQAFVKRNGWKTQNLRVPMIVHSPGRNIRATQICPEVNLRIEEIDFLAKPIVLDSQSLDNILGMDWLAKHKGQIDCAEKSITLQGPGGKQVRFTPNTPTASRSILTCLQVTSLESVPIVCEYPDVFPEELTRMPPDREIEFAIELAPGTAPIAKKPYRMAANELAEIKRQIEELESKGYVRPSSSPWGAPVLLVKKKDGSERMLKIRSEDIPKTAFSTRYGLYEFTVMSFRLTNAPAFFMNLMNKIFMEYLDQFVVVFIDDILIYSKNEEEHAEHLRLIMEKLRDHQLFAKFSKCEFWLVRVAFLGHVISSNGVEVDPSKVEAVLAWNPPKNVSEIRSFLGLAGYYRRFIEGFSKLARPMTELLKKEKKFQWSAACEDSFQEMKKRLTTAPVLTLPDIRKDFEIFCDASRQGLGCVLMQERKVVAYASRQLRPHEVNYPTHDLELAAVVHALKIWRHYLIGNRCEVYTDHQSLKYIFTQTELNMRQRRWLELIKDYDLGIHYHPGKAKVVADALSRKAYHNVAQIRPDQDHLCRELEKLRLTVVQSGVPASLTVXPTLESQIREAQKDDEGIKELIKGIQEKKDTNFSIDNQGTVWCGPRICVPAKKELRDLILKEAHESAYSIHPGSTKMYQDIKAYFWWAGMKRDVTEYVALCDICQRVKAEHQRPVGLLQPLPTPEWKWEEIGMDFITGLPRTPNGYDSIWVIVDRLTKSAHFVPVKITYDGKKLAELYMTYVVCRFGCPKKIVSDRGTQFTSSYQASIQMSPNEAMFGRKCRTPLCWNEVGEALVFGPDILKSAEEQVKLIRERLKTAHRQKNYADNRRCDLEFEKGDHVYLRVSPLRALASKGQTGSGRPRSVPPRARDPPRAVRPGPRAVSLVHRSPLSSPPVRALGRLLGRPAH

SEQ ID NO: 26178 - protein, 1595 aa, Oryza sativa
  Clone ID: TF_OsC1517_1561.pep
MAVNASFSSHGFGEGHHVAQLRDLARFLGFSCPEYTGYSVDRVPPHCELSVYLYPRGDARYPCPYSESQPVLTRMVELSEAQATQHDLLLEAYRSLARRYAALEACLAEEGVTSVDTISWDSGRLCHASHLSSHSSRGSARTPSGPRSPSSRAPYSPVYSPYPHPVSPSYTPGHTPVASSRRGPRFIRTARKRVVGSSTVFRFHYPAPPPLAMASRPRRTARAPARFGFEDGRVEPEANHESANEQSHHSNRSHRTVSRNAEVEQPRRSSRSHRTVSRDAEMEQSHRSHHTASHNSGEERLPSPPHVENNMQHLMAVQTQILQGLTTAIASFQHNAHGNGHPHMGNNRSKLTDFLRSRPPEFSQTVEPVEADDWLKDVDRKLNLVQCTPVEKTLYASHQLRGPAADWWENYCNAHLEPTNIAWDEFATAFRAAHVPESTIDMKKEEFNRLKQGNSSVNEYLSQFNKLARYAPEEVDTDKKKIRKFLKGIAVGMRLQLLAHDFPTFQHMINKALLLEDARKEATEEYKKRKSNHQGNSSRGAPRPRYGQPMQYHQSVTQANRQPGYAPRPQMNRPAPPPQQRAPSGNTAPNSVTSFKSPQGPSAVQCFRCNQMGHYARQCPQNPTNTNSGHANGSTARTPTPAAAQSRPSSQASGQGSRASNNFGRGRVNHIQAETAQDAPDVVMGPGGKQIRFTPNTPTASRSILTCLQVTSLESVPIVCAYPDVFPEELTRMPPDREIEFAIELALGTAPIAKRPYRMAANELAEVKRQIEELESKGYVRPSSSPWGAPVLLVKKKDGSERMVIDYRALNEVTIKNKYPLPRIDDLFDQLKGARVFSKIDLRSGYHQLKIRSEDIPKTAFSTRYGLYEFTFVVVFIDDILIYPKNVSEIRSFLGLAGYYRRFIKGFSKLARPMTELLKKEKKFQWSAACEDSFQEMKKRLTTAPVLTLPDIRKDFEIFCDASRQGLGCVLMQERKVVAYASRQLRPHEVNYPTHDLELAAVVHALKIWRHYLIGNRCEVYTDHKSLKYIFTQTELNMRQRRWLELIKDYDLGIHYHPGKANVVADALSRKAYCNVAQIRPDQDHLCRELEKLRLTMVQSGVPASLTVQPTLESQIREAQKDDEGIKELIKRIQEKKDTNFSIDDQGTVWCGPRIYVPAKKELRDLILKEAHESAYSIHPGSTKMYQDIKAYFWWAGMKRDVAEYVALCDICQRVKAEHQRPAGLLQPLPIPEWKWEEIGMDFITGLPRTPSGYDSIWVIVDRLTKSAHFVLVKTTYDGKKLAELYMTHVVCRFGCPKKIVSDRGTQFTSRFWKQLHEALGTDLNFSTAYHPQTDGQTERVNQILEDMLRACALDFEGTWDRCLPYAEFSYNNSYQASIQMSPNEAMFGRKCRTPLCWNEVGEALVFGPDILKSAEEQVKLIRERLKTAQNRQKNYADNRRRDLEFEKGDHVYLRVSPLHGMRRFGMSGKLAPRYIGPYLITARRGEVAYQLELPEGLADVHNVFHVSQLKKCLRIPEEQVPLVSEPEDPQCEDFEDQAPDLEQGKPPLNILSLLLVWDPSRRHMVNLCRLSKCLVMKAWRSPDVADPHGLDDPG

SEQ ID NO: 26179 - protein, 1598 aa, Oryza sativa
  Clone ID: TF_OsC1517_1568.pep
MAANSIRAQELAWVVELSMMANSVQYMASRPRRAARAPARFGFEDGRVEPEENHESANEQSHHSNRSHRTVSRNAEVEQPRRSSRSHRTVSRDAEMEQSHRSHRTASHNSGEERLPSPPHVETNMQHLMAVQTQILQGLTTAIASFQHNAHGNGHPHMGNNRSKLTDFLRSRPLEFSQTVEPVEADDWLKDVDRKLNLVQCTPVEKTLYASHQLRGPTADWWENYCNAHPEPTNIAWDEFATAFRAAHVPESTIDMKKEEFNRLKQGNSSVNEYLSQFNKLARYAPEEVDTDKKKIRKFLKEIAVGMRLQLLAHDFPTFQHMINKALLLEDARKEATEEYKKRKSNHQGNSSRGAPRPRYGQPMQYHQSVTQANRQPGYAPRPQINRPAPQPQQRAPSSDTAPNSVTSFKSPQGPSAVQCFRCNQMGHYARQCPQNPTNTNSGHANGSTSRTPTPAAAQSRPSSQASGQGSRASNNFGRGRVNHIQAETAQDAPDVVMGMFSVNSVPAIVLFDSGASHSFISQAFVKRNGWKTQNLRVPMIVHSPGSNIRATQICPEVNLRIEEVDFLAKPIVLDSQSLDIILGMDWLAKHKGQIDCAEKSITLQGPGGKQVRFTPNTPTASRSILTCLQVTSLESVPIVCEYPDVFPEELTRMPPDQEIEFAIELAPGTAPIAKRPYRMAANELAEVKRQIEELESKGYVRPSSSPWGAPVLLVKKKDGSERMVIDYRALNEVTIKNKYPLPRIDDLFDQLKGARVFSKIDLRSGYHQLKIRSEDIPKTAFSTRYGLYEFTVMSFGLTNAPAFFMNLMNKIFMEYLDQFVVVFIDDILIYSKNEEEHAEHLRLIMEKLRDHRLFAKFSKCEFWLDRVAFLGHMISSNGVEVDPSKVEAVLAWNPPKNVSEIRSFLGLAGYYRRFIEGFSKLARPMTELLKKEKKFQWSAACEDSFQELKKRLTTAPVLTLPDIRKDFEIFCDASRQGLGCVLMQEQKVVAYASRQLRPHEANYPTHDLELAAVVHALKIWRHYLIGNRCEVYTDHKSLKYIFTQTELNMRQRRWLELIKDYDLGIHYHPGKANVVADALSRKAYCNVAQIRPDQDHLCRELVKLRLTMVQSGVPASLTVQPTLESQIREAQKDDEGIKELIKRIQEKKDTNFSTDDQGTVWCGPRICVPAKKELRDLILKEAHESAYSIHPGSTKMYQDIKAYFWWAGMKRDVAEYVALCDICQRVKPEHQRPAGLLQPLPIPEWKWEEIGMDFITGLPRTPNGYDSIWVIVDRLTKSAHFVPVKTTYDGKKLADLYMTHVVCRFGCPKKIVSDRGTQFTSRFWNQLHEALGTDLNFSTAYHPQTDGQTERVNQILEDMLRACALDFEGTWDRCLPYAKFSYNNSYQASIQMSPNEAMFGRKCRTPLCWNEVGEALIFGPDILKSAEVQVKLIRERLKTAQNRQKNYADNRRHDLEFEKGDHVYLRVSPLRGMRRFGMSGKLAPRYIGPYLITARRGEVAYQLELPEGLADMHNVFHVSQLKKCLRVPEEQVPLGNIELEKNLTYKERPIKVLEETERQTRRKTIKFYKVQWSNHSEDETTWEREDLLRAEFPDLLP

SEQ ID NO: 26180 - protein, 1792 aa, Oryza sativa
  Clone ID: TF_OsC1517_1573.pep
MMAVNASFSSHGFGEGHHVAQLRDLARFLGFSCPEYTGYSVDRVPPHCELSVYLYPRGGIHGAGLCPHHFTVARPTLQIAYQDLSWTALRRLAHDYSHRLGGSAFRQLPHLPSGHSDARYPCPYSESQPVLTRMVELSEAQATQHDLLLEAYRSLARRYAALEARLAEEGVTSVDTISWDSGRLCHASHLSSHSSRGSARTPSGPRSPSSRAPYSPVYSPYPHPVSPSYTPGHTPVASSRRGPRFIRTARKRVVGSSTVFRFHYPAPPPPAARAAAGPRQMASRPRRAARAPARFGFEDGRVEPEENHESANEQSHHSNRSHRTVSRNTEVEQPRRSSRSHRTVSRDAEMEQSHRSHRTASHNSGEERLPSPPHVETNMQHLMAVQTQILQGLTTAIASFQHNAHGNGHPHMGNNRSKLTDFLRSRPPEFSQTVEPVEADDWLKDVDRKLNLVQCTPVEKMLYAFHQLRGPAADWWENYCNAHPEPTNIAWDEFATAFRAAHVPESTIDMKKEEFNRLKQGNSSVNEYLSQFNKLARYAPEEVDTDKKKIRKFLKGIAVGMRLQLLAHDFPTFQHMINKALLLEDARKEATEEYKKRKSNHQGNSSRGTPRPRYGQPMQYHQSVTQANRQPGYTPRPQMNRPAPPPQQCAPSGNTAPNSVTSFKSPQGPSAVQCFRCNQMGHYARQCPQNPTNTNSGHANGSTARTPTPAAAQSRPSSQASRQGSRASNHFGRGRVNHIQAETAQDAPDAVMGMFSVDSVPAIVLFDSGASHSFISQAFVKRNGWKTQKLRVPMIVHSPGRNIRATQICPEVNLRIEEVDFLAKPIVLDSQSLDIILGMDWLAKHKGQIDCAEKSITLQGPAGKQVRFTPNTPTASRSILTCLQVTSLESVPIVYEYPDVFLEELTRMPPDREIEFAIELAPGTAPIAKRPYRMAANELAEVKRQIEELESKGYVRPSSSPWGAPVLLVKKKDGSERMVIDYRALNEVTIKNKYPLPRIDDLFDQLKGARVFSKIDLRSGYHQLKIRSEDIPKTAFSTRYGLYEFTVMSFGLTNAPAFFMNLMSKIFMEYLDQFVVVFIDDILIYSKNEEEHAEHLRLIMEKLRDHQLFAKFSKCEFWLDRVAFLGHVISPNGVEVDPSKVEAVLAWNPPKNVSEIRSFLGLAGYYRRFIEGFSKLARPMTELLKKEKKFQWSAACEDSFQEMKKRLTTAPVLTLPDIRKDFEIFCDASRQGLGCVVMQERKVVAYASRQLRPHEVNYPTHDLELAAVVHALKIWRHYLIGNRCEVYTDHKSLKYIFTQTELNMRQRRWLELIKDYDLGIHYHPGKANVVADALSRKAYCNVAQIRPDQDHLCRELEKLRLTVVQSGVPASLTVQPTLESQIREAQKDDEGIKELIKRIQEKKDTNFSIDDQGTVWCGPRICVPAKKELRDLILKEAHESAYSIHPGSTKMYQDIKAYFWWAGMKRDVAEYVALCDICQRVKAEHQRPAGLLQPLPIPEWKWEEIGMDFITGLPRTPNGYDSIWVIVDRLTKSAHFVPVKTTYDGKKLAELYMTHVVCRFGCPKKIVSDRGTQFTSRFWKQLHEALGTDLNFSTAYHPQTDGQTERVGEALIFGPDILKSAEEQVKLIRERLKTAQNRQKNYADNRRHDLEFEKGDHVYLRVSPLRGMRRFGMSGKLAPRYIGPYLITARRGEVAYQLELPEGLADVHNVFHVSQLKKCLRVPEEQVPLGNIELEKNLTYKERPIKVLEEAKRQTRRKTIKFYKVQWSNHSEDEATWEREDLLRAEFPELLP

SEQ ID NO: 26181 - protein, 1621 aa, Oryza sativa
  unsure (1)..(1621): unsure at all Xaa locations
  Clone ID: TF_OsC1517_1576.pep
MGYSVDVFPLAVSSLCTFTLAEVYTELAFAHTTSLWLGPPSRSRTRTSPGLRFVAWPTTTATVSGALPSGSSHVFLLATQMPARFSFEEGRVEPEANHESANEQSHHSIRSHHTASRNAEVEQPHRSNRSHHTASRNAEVEQSHRSHRTASHNSGEERIPSPPHVENNMQHLMTVQTQILQGLAAAIAGFQHNAHGNGHPHMGNNRSKLTDFLRSRPPEFSQTVEPVEADDWLKDVDRKLNLVQCTPVEKMLYASHQLRGHAADWWENYCNAHPEPTNIAWDEFATAFRGAHVPESTIDTKKEEFNRLKQGNNSVNEYLSQFNKLARYAPKEVDTDKKKIRKFLKGIAVGMRLQLLAHDFPTFQHMINKALLLEDARKEATEEYKKRKFNHQGNSSRGAPRPRYGQPMQYHQSVTQANRQPGYAPRPQMNRPAPQPQQHAPSGNTAPNSVTSFKSPLGLSAVQCFRCNQMGHYARQCPQNPTNTNSGHANGSTARTPTPAAAQSRPSSQASGQGSRASNNFGRGRVNHIQAETAQDAPDVVMVHSPGRNIRATQICPEVNLRIEEVDFLAKPIVLDSQSLDIILGMDWLAKHKGQIDYAERSITLQGPRGKQVCFTTNTPTASRSILTYLQVTSLESVPIVCEYPDVFPEELTSMPPDREIEFAIELAPGTAPIAKRPYQMAANELAEVKRQIEELESKGYVRPSSSPWGAPVLLVKKKDGSERMVIDYRALNEVTIKNKYALPRIDDLFDQLKGARVFSKIDLRSGYHQLKIRSEDIPKTAFSTRYGLYEFTVMSFGITNAPAFFMNLMNKIFMEYLDQFVVVFIDDILIYSKNEEEHAEHLRLIMGKLRDHQLFAKFSKCEFWLDRVAFLGHVISFNGVEVDPSKVGAVLAWNPPKNVSEIHSFLGLAGYYRRFIEGFSKLARPMTELLKNEKKFQWSTACEDSFQEMKKRLTTAPVLTLPDIRKDFEIFCDASRQGVGCVLMQERKVVAYASRQLRPHEVNYPTHDLELAAVVHALKIWRHYLIGNRCEVYTDHKSLKYIFTQTELNMRQRRWLELIKDYDLGIHYHPGKANVVADALSRKTYYNVAQIWPDQDRLCGELEKLRLTVVQSGVPASLTVQPTLESQIREAQKDDEGIKELIKRIQEKKDTDFSXIDDQGTVXKELRDPILKEAHESAYSIHPGSTKMYQDIKAYFWWAGMKRDVAEYVALCNICQRVKAENQRPAGLLQPLPIPEWKWEEIGMDFITGLPRTPSGYDSIWVIVDRLTKSAHFVPVKTTFDGKKLAELYMTHVVCRFGCPKKIVSDRGTQFTSRFWKQLHEALGTDLNFSTAYHPQTDGQTERVNQILEDMLPLVTSLTSRQSDLVTGLGLVAASAHAPASVSNSVGPSKLQNGSLRSEVTTSFADPSLYPLPLQIHRCHLSVPPDLAYLRSEAAVGTTKSLAILMKALILLVPARVAQGLGDTGVASLPSRPIISSHLYLIAAQASHQKTVPFFSSLKVLRLEPVARSTMGQPPRHRVESRWRSFREGTGDQRHARRSLRVASMQAERRASSQRSRNYYVACGKLGNDNTCGGDGILTGIWGEARVTKKSPHLSGNEWKNTNIYISYRNVGNNLTIEKK

SEQ ID NO: 26182 - protein, 1851 aa, Oryza sativa; identical to SEQ ID NO: 20420
  Clone ID: TF_OsC1517_1586.pep

SEQ ID NO: 26183 - protein, 1522 aa, Oryza sativa
  Clone ID: TF_OsC1517_1607.pep
MASRPRRAARAPARFGFEEGRVEPEENHESANERSHHSNRSHRTASRNAEVEQPRRSNRSHHTASRNAEMEQSHRSHRTASHNSGEERLPSPPHVENNMQHLMAVQTQILQGLAAAIAGFQHSAHGNGHPHMGNNRSKLTDFLRSRPPEFSQTVEPVEADDWLKDVDRKLNLVQCTPVEKTLYASHQLRGPAADWWENYCNAHPEPTNIAWAEFATAFRAAHVPESAIDMKKEEFNKLKQGNNSVNEYLSLFNKLARKEATEEYKKRKSNHQGNSSRGAPRPRYGQPMQYHQSVTQANRQPGYAPRPQMNRQAPQPQQRAPSGNTAPNNVTSFKSSLGPSAVQCFRCNQMGHYARQCPQNPTNTNSGHANGSTARTPTPAAAQSRPSSQASGQGSRVSNNFGRGRVNHIQAETAQDAPDVVMGMFSVNSVPAIVLFDSGASHSFISQAFVKRNGWKTQNLRVPMIVHFPGRNIRATQICPEVNLRIEEVDFLAKPIVLDSQSLDIILGMDWLAKHKGQIDCAEKSITLQGPGGKQVRFTSNTPTASRSILTCLQVTSLESVPIVCEYPNVFPEELTSMPPDREIEFAIELAPGTAPIAKRPYRMAANELAEVKRQIEELESKGYVRPSSSPWGAPVLLVKKKDGSERMVIDYRALNEVTIKNKYPLPRIDDLFDQLKGARVFSKIDLRSGYHQLKIRSEDIPKTAFSTRYGLYEFTVMSFGLTNAPAFFMNLMNKIFMEYLDQFVVVFINDILIYSKNEEEHAEHLRLIMEKLRDHQLFAKFSKYEFWLDRVAFLGHVISPNGVEVDPSKVEAVLAWNPPKNVSEIRSFLGLAGYYRRFIEGFSKLARPMTELLKKEKKFQWSTACEDSFQEMKKRLTTAPVLTLPDIRKDFEIFCDASRQGLGCVLMQERKVVAYASRQLRPHEVNYPTHDLELAAVVHALKIWRHYLIGNRCEVYTDHKSLKYIFTQTELNMRQRRWLELIKDYDLGIHYHPGKANVVADALSRKTYCNVDQIRPDQDRLCRDLEKLRLTVVQSGVAASLTVQPTLESQIRKAQKDDEGIKELIKRIQEKKDTDFSIDDQGTVWYGPRICVPAKKELRDLILKEAHESAYSIHPGSTKMYQDIKAYFWWAGMKRDVAEYVALCDICQRVKAEHQRPAGLLQPLPIPEWKWEEIGMDFITGLPRTPSGYDSIWVIVDRLTKSAHFVPMKTTFDGKKLAELYMTHVVCRFGCPKKIVSDRGTQFTSRFWKQLHEALGTDLNFSTAYHPQTDGQTERVNQILEDMLRACALDFEGTWDRCLPYAEFSYNNSYQASIQMSSNEEMFGRKCRTPLCWNEVGEALVFGPDILKAAEEQVKLIRERLKAAQNRQKNYVDNRRRDLEFEKGDHVYLRVSPLRGIRRFGMSGKLAPRYIGPYLITARRGEVAYHLELPEGLADVHNVFHVSQLKKCLRVPEEQVPLGNIELEKNLTYKERPIKVLEEAERQTRRKTIKFYKVQWSNHSEDEATWEQEDLLRAEFPELLP

SEQ ID NO: 26184 - protein, 1530 aa, Oryza sativa
  unsure (1)..(1530): unsure at all Xaa locations
  Clone ID: TF_OsC1517_1610.pep
APRRRHLGRDRVKQTPVRRFPPPPRARGPPRAVRLRVGLPHRVLREPRASVAVIFCLPVIPALFPGTGIDXQMAVNASFSSHGFGEGHHVAQLRDLARFLGFSCPEYTGYSVDRVPPHCELSVYLYPRGGIHGAGLRPHHFTVARPTLQIAHHLGGFAFRQLPRLPSGHSDARYPCPYSESQPVLTRMVELSEAQATQHDLLLEAYRSLARRYAXRLCHGSHLSSHSSRGSARTPSGPRSPSSRAPYSPVYSPYPHPVSPSYTPGHTPVASSRRGPRFIRTARKRVVGSSTVFRFHYPAPPPPAARAAVGPRQVPPVPSRQPIDISSTEEPTTGARFGFEDGRAEPEANHEQSHHSNRSHRTASRNAEVEQPRRSNRSHRTASCDVEMEQSHRSHRTASHNSGEERLPSPPHVENNMQHLMAVXTQILQGLAAAVAGFQHTAHGNGHRHMSNNRSKLTDFLRSRPPEFSQTVEPVEADDWLKDVDRKLNLVQCTPVEKTLYASHQLRGPAADWWENYCNAHPEPTNIAWDEFATSFRAAHVPESTIDMKKVEFNRLKQGNSSVNEYLSMFNNLARYAPEEVDTDKKKIRKFVKGIAALLLEDARKEATEEYKKRNSNHQGNSSRGAPRPHYGQPMQYHQSVTQANRQPGYAPRPQMNCPAPQPQQRAPSGNTAPNSVTSFKSPQGPSAVQCFRCNQMGHYARQCPQNPTNTSSGHANGSTARTPTPAAAQSRPSSQASGQGSRVSNNLGRGRVNHIQAETAQDAPDVVMGMFSVNSIPAIVLFDSGASHSFISQAFVKRNGWKTQNLRVPMIVHSPGRDIRATQICLEVNLRIEEVDFLAKPIVLDSQSLDIILGMDWLAKHKGQIDCAEKSITLQGPGGKQVRFTPNTPTASRSILTCLQVTSLESVPIVCEYPDVFPEELTSMPPDREIEFAIELAPGTAPIAKRPYRMAANELVEVKRQIEELESKGYVRPSSSPWGAPVLLVKKKDGSERMLKIRSEDIPKTAFSTRYGLYEFTEMSFGLTNAPAFFMNLMNKIFMEYLDQFVVVFIDDILIYSKNEEEHAEHLRLIMEKLRDHQLFAKFSKCEFWLDRVAFLGHVISSNGVEVDPSKVEAVLAWNPPKNVSEIRSFLGLVGYYRRFIEEFSKLARPMTELLKKEKKFQWSAACEDSFQEMKKRLTTAPVLTLPDIRKDFEIFCDASRQGLGCVLMQERKVVAYASRQLRPHEVNYPTHDLELAAVVHALKIWRHYLIGNRCEVYTDHKSLKYIFTQTELNMRQRRWLELIKDYDLGIHYHPGKANVVADALSRKAYCNVAQIRPDQDRLCRELEKLRLTVVQSGVPASLTVQPTLESQIREAQKDDEGIKELIKRIQEKKDTNFSIDDQGTVWCGPRICVPAKKELRDLILKEAHESAYSIHPGSTKMYQDIKAYFWWAGMKRDVAEYVALCDICQRVKAEHQRPAGLLQPLPIPEWKWEEIGMDFITGLPRTPSGYDSIWVIVDRLTKLAHFVPVKTTWEREDLLRAEFPELLP

SEQ ID NO: 26185 - protein, 1771 aa, Oryza sativa
  Clone ID: TF_OsC1517_1625.pep
MTVLLLCNKETSVAMIFCLPVIPALFPGTGIDEQMAVNASFSSHGFGEGHHVAQLRDLARFLGFSCPEYTGYSVDRVPSRYELSVYLYPRGGIHGAGLRPHHFTVARPTLQIAHRLGGSAFRQLLRLPSGRTDTRYPCPYSESQPVLTRMVELSEAQATQHDLLLEAYRSLARRYAALEARLAEEGVTSVDTASWDLGRLCHASHLSSHSSRGSVRTPSGPRTPSSRVPYSPVHSPYPHPVSPSYTPGHTPVASSCRGPRFIRTVRKRVVGSSTVFRFDHPARPPPAARAAAGPRQVPPISSRQPIDVSSTEEPTTGAHFGFEEGRVEPEANHESANEQSHHSNRSHHTASRNAEVEQPHRSNRSHRTVSRNAEVEQSHRSPRAAIHNSREERIPSPPHVENNMQHLMAVQTQILQGLATAIAGIQHNAHGNGHPHTGNNRSKLTDFLRSRPPEFSQTVEPVEADDWLKDVERKLNLVQCTPVEKTLYASHQLRGPAADWWENYCNAHPEPTNIPWDEFAAAFRAAHVPESTIDMKKEEFNRLKQGNTSVNEYMSQFNKLARYAPEEVDTDKKKIRKFLKGVTHMINKRLLLEDARKEATEEYKKRKSTHQGNSSRGEPRPRFGQPMQYHQSVTQANRQPSYAPRPQMNRLAPQPQQRAPSGNTAPNSVTSFKSPPGLSAVQCFRCNQMGHYARQCPQNLTNSNSGHTNGSTARTPTPAAAQSRPSTQASGQGSRASNNFGRDRVNHIQAETAQDAPDVVMGMFSVNSAPAIVLFDSGASHSFISQAFVKRNGWKTQNLRVPMIVHSPGRDIRATKICSEVNLRIEEVDFLAKPIVLDSQSLDIILGMDWLAKHKGQIDCAERSITLQGPGGKQVRFTPNTLTASRSILTSLQATSLESVPIVCEYPDVFPKELTEMPPNREIEFAIELALGTAPIAKSPYRMAANELAEVKKQIEELESKGYVRPSSSPWGAPVLLVKKKDGSERMLKIRYEDIPKTAFSTRYGLYEFTVMSFGLTNAPAFFMNLMNKIFMEYLDQFVVVFIDDILIYSKNEEEHVEHLRLIMEKLRDHQLFAKFSKCEFWLDRVAFLGHVISSNGVEVDPSKVEAVLAWYPPKNESEIRSFLGLAGYYRRFIEGFSKLARPMTELLKKEKKFEWSAACEDSFQEMKKRLTTAPVLTLPDIRKDFEIFCDASRQGLGCVLMQERKVVAYASRQLRPHEVNYPTHDLELAAVVHALKIWRHYLIGNRCEVYTDHKSLKYIFTQTELNMRQRRWLELIKDYDLGIHYHPGKANVVADTLSRKTYCNAAQIWPDQDRLCRELEKLRLTVVQSGVPASLTVQPTLESQIREAQKDDEGIKELIKRIQKMKDTDFSIDDQGTVWCGPRICVPAKKELRDLILKEAHESAYSIYPGSTKMYQDIKAYFWWVGMKRDVAEYVALCDICQRVKAEHQRPAGLLQPLPIPEWKWEEIGMDFITGLPRTPSGYDSIWVIVDRLTKSAHFVPAKTTFDGKKLAELYMTHVVCRFGCPKKIVSDRGTQFTSSYQASIQMSPNEAMFGRKCRTPLCWNEVGKALVFGPDILKSAEEQVKLIRERLKTAQNRQKNYADNRRRDLEFEKGDHVYLRVSPLRGMRRFGMSGKLAPRYIGPYLITARRGEVAYQLELPEGLADVHNVFHVSQLKKCLRVPEEQVPLGNIELEKNLTYKERPIKVLEEAEPAHPLVLASQRVRARADAARCFPRARAVVADRPVAAAVSLCTRLSPVSPLRSKPPRRH

SEQ ID NO: 26186 - protein, 1759 aa, Oryza sativa; identical to SEQ ID NO: 20442
  Clone ID: TF_OsC1517_1640.pep

SEQ ID NO: 26187 - protein, 1852 aa, Oryza sativa; identical to SEQ ID NO: 20426
  Clone ID: TF_OsC1517_1674.pep

SEQ ID NO: 26188 - protein, 1761 aa, Oryza sativa
  Clone ID: TF_OsC1517_1687.pep
MTVPLLYNKETSVAVIICLPMIPALFPGSGINLQMAVNASVSSHGFGEGHHVAQLRDLARFLGFSCPEYTGYSVDRVPPRCELSVYLYPRGGIHGAGLRPHHFTVARPTLQIAYQDLSWTALRRLAHDYSHRLGGSAFRQLPRLPSGHADARYPCPYSESQPVLTRMVELSEAQATQHDLLLEAYRSLARRYAALEAHMAEEGVTSVDTVSWDSGRLCHASHLSSHSSRGSARTPSGPRSPSSRAPYSPVYSPYPHPVSPSYTPGHTPVASSRRGPRFIRTARKRVVGSSTVFRFHYPAPPPPAACAAAGPRQHLMAVQIQILQGLAAAVAGYQHNAHGNGHPHMGNNRSKLTDFLRSRPPEFSQTVEPVEADDWLKDVDRKLNLVQCTPVEKTLYASHQLRGPTADWWENYCNAYPEPTNIAWDEFATAFRAAHVPESTIDMKKEEFNKLKQGNSSVNEYLSMFNKLARYAPEEVDTDKKKIRKFLKGIAVGMRLQLLAHDFPTFQHMINKALLLEDARKEATEEYKKRKSNHQGNSSRGAPRPRYGQPMQYHQSVTQANRQPGYAPCPQMNRPAPQPQQRAPSGNTAPNSVTSFKSPQGPSAVQCFRCNQMGHYARQCPQNPTNTSSRHANGSTARTPTPAAAQSRPSSQASGQGTCASNNFGRGRVNHIQAETAQDAPDVVMGMFSVNSVPAIVLFDSGASHSFISQAFVKRNGWKTQNLRVPMIVHSPGRNIRATQICPEVNLRIEEVDFLAKPIVLDSQSLDIILGMDWLAKHKGQIDCAEKSITLQGPGGKQVRFTSNTPTASRSILTCLQVTSLESVPVVCEYPDVFPEELTSMPPDREIEFAIELAPGTAPIAKRPYRMVANELAEVKRQIEELKSKGYVRPSSSPWGAPVLLVKKKDGSERMIIDYRALNEVTIKNKYPLPRIDDLFDQLKGARVFSKIDLRSGYHQLKIRSEDIPKTAFSTRYGLYEFTLDQFVVVFIDDILIYSKNEEEHAEHLRLIMEKLRDHQLFAKFSKCEFWLDREAFLGHVISSNGVDVDPSKVEAVLAWNPPKNVLEIRSLLGLAGYYRRFIEGFSKLVRPMTELLKKEKKFHWSAACEDSFQEMKKRLTTAPVLTLPDIRKDFEIFCDASRQGLGCVLMQERKVVAYAFRQLRPHEVNYPTHDLELAAVFHALKIWRHYLIGNRCEVYTDHKSLKYIFTQTKLNMRQRRWLELIKDYDLGIHYHPGKANVVADALSRKAYCNVAQIRPDQDRLCRELEKLRLTVVQSGVPASLTVQPTLESQIREAQKDDEGIKELIKRIQEKKDTNFSIDDQGTVWCGPRICVPAKKELRDLILKEAHESAYSIHPGSTKMYQDIKAYFWWTGMKRDVAEYVALCDICQRVKAEHQRPAGLLQPLPIPEWKWEEIGMYFITGLPRTPSGYDSIWVIVDRLTKSAHFVPVKTIFDGKKLAELYMTHVVCRFGCPKKIVSDRGTQFTSRFWKQLHEALGTDLNFSTAYHPQTDGQTERVNQILEDMLRACALDFEGTWDRCLPYAEFSYNNSYQASIQMSPNEAMFGRKCRTPLCWNEVGEALVFGPDILKAAEEQVKLIRERLKTAQNRQKNYADNRRRDLEFEKGDHVYLRVSPLRGMRRFGMSGKLAPRYIGPYLITARRGEVAYQLELPEGLADVHNVFHVSQLKKCLRVPEEQVPLGNIELEKNLTYKERPIKVLEEAVRQTRRKTIKFYKVQWSNHSEDEATWEREDLLRAEFPELLP

SEQ ID NO: 26189 - protein, 1542 aa, Oryza sativa
  Clone ID: TF_OsC1517_1697.pep
MAVNASFSSHGFGEGHHVAQLRDLARFLGFSCPEYTGYSVGRVPPHCELSVYLYPRGGIHGAGLAHTTSLWPGPLSRSRTRTSPGLRFVAWHTTTATVSGAPPSGSFHAFLLATQTPARAPARFGFEDGRAEPEVNHEQSPHSNRSHRTASRNAEVEQPRRSNRSHRTASCDAEMEQSHRSHHTASHNSGEELLPSPPHVENNMQHLMAVQTQILQGLAAAVAGFQHNAHGNGHPHMSNNRSKLTDFLRSRPPEFSQTVEPVEADDWLKDVDRKFNLVQCTPVEKTLYASHQLRGPAADWWENYCNAHPEPTNIAWDEFATAFRAAHVPESTIDMKKEEFNRLKQGNSNVNEYLSQFNKLARYAPEEVDTDKKKIRKFLKGIAVGMGLQLLAHDFPTFQHMINKALLLEDARKEATEEYKKRKSNHQGNSSRGAPRPRYGQPMQYHQSVTQANRQPGYAPRPQMNRPAPQPQQRAPSGNTVPNSFTSFKSPQGPSAVQCFRCNQMGHYARQCPQNPTNTSSGHANGSTARTPTPAAAQSRPSSQASGQGSHASNNFGRGGANHIQAETAQDAPDVVMGMFSVNSIPAIVLFDSGASHSFISQAFVKRNGWKTQNLRVPMIVHSPGRDIRATQICPEVNLRIEEVDFLAKPIVLDSQSLDIILGMDWLAKHKGQIDCAEKSITLQGPGGKQVRFTSNSPTASRSILTCLQVTSLESVPIVCEYPDVFPEELTSMPPDREIEFAIELAPGTAPIAKRPYRMAANELAEVKRQIEELESKGYVRPSSSPWGAPVLLVKKKDGSERMFVVVFIDDILIYSKNEEEHAEHLRLIMEKLRDHQLFAKFLKCEFWLDRVAFLGHVISSNGVEVDPSKVEAVLAWNPPKNVSEIRSFLGLAGYYRRFIEGFSKLARPMTELLKKEKKFQWSAACEDSFQEMKKRLTTAPVLTLPDIRKDFEIFCDASRQGLECVLMQERKVVAYASRQLRPHEVNYPTHDLELAAVVHALKIWRHYLIGNRCEVYTDHKSLKYIFTQTELNMRQRRWLELIKDYDLGIHYHPCKANVVADALSRKAYCNVARIRPDQDRLCRELEKLRLTVVQSGVPASLTVQPTLESQIREAQKNDEGIKELIKRIQEKKDTNFSIDDQGTVWCGPRICVPAKKELRDLILKEAHESAYSIHPGSTKMYQDIKAYFWWAGMKRDVAEYVALCDICQRVKAEHQRPAGLLQPLPIPEWKWEEIGMDFITGLPRTPSGYDSIWVIVDQLTKPAHFVPVKTTYDGKKLAELYMTHVVCRFGCPKKIVSDRGTQFTSRFWKQLHEALGTDLNFSTAYHPQTDGQTERMSPNEAMFGRKCRTPLCWNEVGEALVFGPDILKAAEEQVKLIREHLKTAQNRQKNYADNRRRDLKFEKGDHVYLRVSPLRGMRRFGMSGKLAPRYIGPYLITARRGEVAYQLELPEGLADVHNVFHVSQLKKCLRVPEEQVPLGNIELEKNLTYKGRPIKVLEEAERQTRRKTIKFYKVQWSNHSEDEATWEREDLLHAEFPELLP

SEQ ID NO: 26190 - protein, 537 aa, Oryza sativa
  Clone ID: TF_OsC2559_1.pep
MAVFGAAVLVALAVTCGLIWSRSRRLSKEMRDIPGTMGWPVVGETFSFISGFSSPAGILSFMRDRQKRFGKVFKTYVLGRMTVFMTGREAAKILLSGKDGVVSLNLFYTGKQVLGPTSLLTTNGDEHKKLRRLIGEPLSIDALKKHFDFINDLAVQTLDTWLDRRVLVLEEASSVIIKLFTLKVIANMLISLEPEGEEQEKFRANFKIISSSFASLPLKIPGTAFHRGLKKARNRMYAMLDSVIARRRDGGEVRNDFLQTLLRKHAKDGTAADEDDGGGGGDRDADKLTDAQLKDNILTLLVAGHDTTTAGLTWLIKFLGENPEALQKLRVMNETLRRATILPWFSRKAAQDFSIDGYEIKKGTSVNLDVVSIHHDPSVFADPYKFDPNRFDGTLKPYSFLGFGSGPRMCPGMSLARLEICVFIHHLVCRYSTPAGSQEIKQQELLRGKVTRNSYFSGKCDKEQQPRSIAQIFRSLKHDHSRAVTRNGTIQEATQQQQLRKGQGQWNNNQVAKPIRVTKKHYARQQWPSHAKPHMID

SEQ ID NO: 26191 - protein, 508 aa, Oryza sativa
  unsure (1)..(508): unsure at all Xaa locations
  Clone ID: TF_OsC359_6058.pep
MSWHKAGVLLLGGSILPACPGGSGRRWGWMFNREKEKNVRGYASSNSSFQLNPPLASRELTRAHPWSIPSMLLGSQLPLVGSQDQNQYVFDQAFATQVNELPMPEEHVPFCHDCREQGHYALNCPWVYAKEAPSFGLAGQTSLNPPPRTKSSLQPSVQGREPNGENPLNPENCFPPSLSYHVGSRTKQAKGKKSKSQKRKAPMRTKEEVRKMTITSAEWPPAGITIPRRQRGNTFRGARRLTQHLLSHGGRVSDQVSSDDEDESPRHLGEEEMESKACTRCGEIGHVASMCLTLCLHCEEDHPPDRCPTSRITCFFCEGTDHVPKDCQSSFLLTKKMANQPASSNGEKHQGNTNPRQDYSFSLTPVPGQRNQNEKRKCRVREDICCFNCQGMGHFADKCPKPRNIAASTSVHATPCNQKLAPQRIVIHASRSSPIARVATAPTPASALPQGVNAQFQPQPSVDKTEAXSALYLWMFQHSSQRNQVQDEEPEQKHEIMNELDKLMKDPC

SEQ ID NO: 26192 - protein, 526 aa, Oryza sativa; identical to SEQ ID NO: 20453
  Clone ID: TF_OsC359_7004.pep

SEQ ID NO: 26193 - protein, 1232 aa, Oryza sativa
  unsure (1)..(1232): unsure at all Xaa locations
  Clone ID: TF_OsC1713_3645.pep
IANSAIKEVSHSRSGGGRFTVQTDKDGLNLWSDRPCEGNPSLSKLWQFSPISSIGAKFGCKQLAKELENNNCELLDKFVAGGIIAKLPPSCSDFATCLKHKRXEFSVSDLIGSLGVEEKARAKDVQGKKIEGGSSANMVQKKNPQASHNNKKVKPDVKPKAATNFKKKGKGKAKGDCFVCGKSGHWAKDCPERKDRKSANMVISEGGGTSGYGKILPTVLSVFHSPDWWVDTXANIHVCADISLFSSYQVGRGSSLLMGNGSLAAVHGVGTIDLKFTSGNTVQLKNVQHVPSYIKKNLVSGSLLCREGFRLVFESNKCVVSKYETFVGKGYDSGGLFRFALNDMCNNHNAVNHISENDESNVWHSRLCHVNFGCMTRLANMSLIPKFTLVKGSKCHTCVQSKQPRKPHKASEARNLAPLELVHSDLCEMNSVLTKGGKKYFMTLTDDCTRFCYVYLLKRKDEALHYFKIYKAEVENQLERKIKRLRSDRGREYFSNEFASFCEEFGIIHERTPPYLPQSNGVAERKNRTLAEIVNAMLDTTGLCKEWWGEAVLTACYVLNKIPMKHKKVTPFEEWERKKLNLSYLRTWGCLAKVNVPIAKKRKLGPNTVDCVFLGYAIHSVGYRFLIVNSGVPDMHVGTIFESRDAIFFENEFPMKHTPSTSSQETVMPHEHFAPIEHNDQTPKKNPEEDNIVDTRKSKRQRVAKSFGDDYIVYLVDDTPRTIEEAYSSPDADYWKEAVRSEMDPIMSNGSWEVVERPYGCKPIGCKWVFKKKFRPNGTIEKYKARLVPKGYTQKEGEDFFDIYSPVARLTTIRVLLALAASHGLLVHQMDVKTAFLNGELEEEIYMDQLDGYVLEGREGMVCKLLKSLYGIKQAPKQWHEKFDTTLTSVGFVVNVVDKCMYYRYGGGEGVILCLYVDDILIFGISLNVIEEVKDYLSKSFEMKDLGEADVILNIKLQRGDEGGITLVQSHYVDKVLSRFGYSDCKPAPTPYDPSVLLRKNRRIVRDQLRYSQIIGSLIYLASATRPDISFAVSKLSRFVSNPGDDHWQALERVMRYLKGTMSYGIHYTGYPKVLEGYSDSNWISDADEIKVTSGYVFTLGGGAVSWKSCKQTILTRSTMEVELTALDTATVEAEWLRELLMDLSVVEKPVPAILMNCDNQTVIIKLNSSKDNMKLSRHIKRRLKSVRKXKNSGVIALDYVQTARNLADQFTKGLPRNVIDSASREMGMIPT

SEQ ID NO: 26194 - protein, 693 aa, Oryza sativa
  unsure (1)..(693): unsure at all Xaa locations
  Clone ID: TF_OsC1713_3689.pep
MSAPGAGAAAAAAAAGAGDGVPGAGAGAVANVNTNRGNSASQSSGGPFSGYILLLLLTHSFIALLVLLVASQLQLLGSASRTIARPPCMRLEPELPPVPLLLELEMARLELEPELLRTSTPTEAILPHNPTEGHSRVGFAAALKPHAFDGSNYKRWKARALLWLTAMQCFYVSRGKQSEPPLSPEEEAKFEASDCLFRGALISVLADNIVDVYMHMPSGKDMWDALEAKFGVSDAGSELYVMEQFYDYKIVDDRSVVEQAHEIQMLAKELENNNCELPDKFVAGGIIAKLPPSWSDLATSLKHKRQEFSVSDLIGSLGVEEKARTKDVRGKKVEGGSSANMVQKKNPHASHNNKKVKPDVKPKAATNFKNKGKGKAKGDCFVCGKSGHWAKDCPERKDRKSANMVISEGGGTSGYGXRGSSLLMGNGSLAAVHGVXFCYVYLLKTKDEALHFFKTYKAEVENQLERKIKRLRSDRGGEYFSNEFASFCEEFGIIHERTPPYSPQSNGVAERKNRTLTEMVNAMLDTAGLSKEWWGEAVLTACHVLNKIPMKHKEVTPFEEWERKKLNLSYLRTWGCLAKVNVPIAKKRKLGPNTVDCVFLGYAIHSVGYKFLIVNSRVPDMHVGTIIESRDATFFENEFPMKHTPSTSSQETIMPHEHFAPIEHNDQTPEENPEEDNIVDTRKSKRQRVAKWR

SEQ ID NO: 26195 - protein, 1361 aa, Oryza sativa; identical to SEQ ID NO: 20343
  Clone ID: TF_OsC1713_3856.pep

SEQ ID NO: 26196 - protein, 1137 aa, Oryza sativa
  Clone ID: TF_OsC1713_3861.pep
MSNTGDKEKETPVNTNGGNTASNSSGGPFLGSFSVVGFAATLKPHAFDGSNYKRWKARALLWLTAMQCFYVSRGKRSEPPLSPEEEAKFEASDCLFRGALISVLADNIVDVYMYMPSGKEMWDALEAKFGVSDAGSELYVMEQFYDYKMVDDRSIVEQAHEIQMLAKELENNNCELPDKFVAGGIIAKLPPSWSDFATSLKHKRQEFSVPDLIGSLGVEEKARAKDVRGKKVEGGSSANMVQKKNPHASHNNKKVKPDVKPKAATNFKKKSKGKAKGDCFVCGKSGHWAKDCPERKDRKSANMIISEGGGTSGYGKILPTVLSVFHSLDWWVDTGANIHVGRGSSLLMGNGSLAAVHGVGTVDLKFTSGKTVQLKNVQHVPSIKKNLVSGSLLCREGFRLVFESNKCVVSKYGTFVGKDYDSGGLFRFSLNDMCNNHNAVNHISENDESNVWHSRLCHVNFGCMTRLANMSLIPKFTLVKGSKCHTCVQSKQPRKPHKASEARNLAPLELVHSDLCEMNGVLTKGGKKYFMTLIDDCTRFCYVYLLKTKDEALHFFKIYKAEVENQLERKIKRLRSDRGGEYFSNEFASFCEEFGIIHEMTPPYSPQSNGVAERKNRTLTEMVNAMLDTAGLSKEWWGEAVLTACHVLNKIPMKHKEITPFEEWERKKLNLSYLRTWGCLAKVNVPIAKKRKLGPKTVDCVFLGYAIHSVGYRFLIVNSGVPDMHVGTILESRDATFFENEFPMKYTPSTSSKETVMPHEHFAPIEHNDQTPEENPEEDNIVDTRKSKRQRVAKSFGDDYIVYLVDDTPRTIEEAYSSPNADYWKEAVRSEMDSIMSNGTWEVVERPYGCKPVGCKWVFKKKLRLDGTIEKYKARLVAKGYTQKEGEDFFDTYSLVARLTTIRVLLALAASHGLLVHQMDVKTAFLNGELEEEIYMDQPDGYVLEGQEGMVCKLLKSLYGLKQAPKQCHEKFDTTLTSAGFVVNEADKCVCYRYGGGEGVILCLYVDDILIFGTSLNVIEEVKDYLSKSFEMKDLGEADVILNIKLQRGDEGGITLVQSHYVDKVLSRFGYSDCKPAPTPYDPSVLLRKNRRIARDQLRYSQIIGSLMYLASATRPDISFAVSKLSRFVSNPGDDHW

SEQ ID NO: 26197 - protein, 1101 aa, Oryza sativa
  Clone ID: TF_OsC1713_4039.pep
MSAPGAGAAGVAVGGDGVPGAGAGGGALGARAGATNNNINGGNFASQSSGGPFSGYILLLFLLLALYRYVPVPDIHDAFSMLALYCYVPVPDIHDAFSVLLRYCYVIHDAFSMLLVMLSLDYPTLRWKAHALLWLTAMQCFFVSRGKRSEPPLSPEEEAKFEASDCLFRGALISVLADNIVDVYMHMPSGKDMWDALEAKFGVSDAGSELYVMEQFYDYKMVDDRSVVEQAHEIQMLAKELENNNCELPDKFVHKRQEFSVSDLIGSLGVEEKARAKDNRGKKKKNPHASHNNKKIKLDVKSKAATKFKKKCKGKAKGDCFVCGKSGHWAKDCPECKDRKSANMVISEGGGTSGYGKILPTVLSVFHSPDWWVDTGANIHACADISLFSSYQVGRGSSLLMGNRSLAAIHGVGTVDLKFTSGKTMQLKNVQHVPSIKKNLVSGSLLCREGFRLVFESNKCVISKYGTFVGKGYDSGGLFRFSLNDMCNNHNVVNHISENDESNVWHSRLCHVNFGCMTLLANMSLIPKFTLVKGSKCHTCVQSKQPCKPHKTSEARNLAPLELVHSDLCEMNGVLTKGGKKYFMTLIDDCTRFCYVYLLKTKDEALHFFKTYKAEVENQLERKIKLLRSDRGGEYFFNEFASFCEEFGIIHERTPPYSPQSNGVAERKNRTLTEMVNAMLDTAGLSKEWWGEAVLTACHVLNKILMKHKEVIPFEEWERKKLNLSYLRTWGCLAKVNVPIAKKRKLGPNTVDCMFLGYAIHSVGYRFLIVNSGVPDMYVGTIIESRDATFFENEFPMKHTPSTSSQETVMPHEHFAPIEHNDQTPEENPEEDNIVDTRKTSHGVLVHQMNVKTAFLNGELEEEIYMDQPDGYVLEGFVVNGADKCVYYRYGGGEGVILCLYVDDILIFGTNLNVIEGVKDYLSKSFEMKDLGEADVILNIKLQRGDEGEITLVQSHYVDKILSHFGYSGCKPASTPYDPSVLLRKNRRIARDQLRYSQIIGSLMYLASATRPDISFAVSKLSRFVLNPGDDHWQALERVMRYLKGIMSYGIHYTRYPKVLEGYSDSNWISDADKIKATSGYVFALEGGTVSWKPCKQTGIL

SEQ ID NO: 26198 - protein, 1438 aa, Oryza sativa
  unsure (1)..(1438): unsure at all Xaa locations
  Clone ID: TF_OsC1713_4055.pep
MSGVAAATAGGGGTPPTGAGSGAGAPGGAVNDNNNGVNSASPSSGGPFSGYTLLLLLLLLALFLFPLLALSLYYVRYVLVPVLHDASSMLSRYWYVPVPDIHDAHSMLLVMLRSPYTAYAMIIALTFWIKICRLMTIFPTIQKPDRSFSVVGFAAALKPHAFDGSNYKRWKARALLWLTAMQCFYVSRGKRSEPPLSPEEEAKFEASDCLFRGALISVLADNIVDVYMHMPSGKDMWDALEAKFGVSDAGSELYVMEQFYDYKMVDDRSVVEQAHEIQMLAKELENNNCELPDKFVAGGIIAKLPPSWSDFATSLKHKRQEFSVPDLIGSLGVEEKARAKDVRGKKVEGGSSANMVQKKNPHASHNNKKVKPDVKPKAATNFKKKGKGKAKGDCFVCGKSGHWAKDCPERKDRKSTNMVISEGRGTSGYGKILPTVLSVFHSPDWWVDTGANIHVCADISLFSSYQVGRGSSLLMGNGSLAAVHGVGTVDLKFTSGKTVQLKNVQHVPSIKKNLVSCSLLCREGFRLVFESNKCVVSKYGTFVGKGYDSGGLFRFSLNDMYNNHNAVNHISENDESNVWHSRLCHVNFGCMTRLANMSLIPKFTLVKGSKCHTYVQSKQPRKPHKASEARNLAPLELVHSDLCEMNGVLTKGGKKYFMTLIDDCTRFCYVYLLKTKDETLHYFKIYKAEVENQLQRKIKLLRSDRGGEYFSNEFASFCQEFGIIHEMTPPYSPLSNGVAERKNRTLTEMVNAMLDTAGLSKELWGEAVLTACHILNKIPMKHKEVTPFEEWERKKLNLSYLRTWGCLAKVNVPIAKRRKLGPKTVDCVFLGYAIHSVGYRFLIVNSGVPDMHAGTIFESRDATFFENEFPMKYTPSTSSKETVMPHEHFAPIEHNDQTPEENPEEDNIVDARKSKRQRVAKSFGDDYIVYLVDDTPRTIEEAYSSPDADYWKEAVRSEMDSIMSNGTWEVVERPYGCKPVGCKWVFKKKLRPDGTIEKYKARLVAKGYTQKEGEDFFDTYSPVARLTTIRVLLALAASHGLLVHQMDVKTAFLNGELEEKIYMDQPDGYVLEGQEGMVCKLLKSLYGLKQAPKQWHEKFDTTLTSAGFVVIEADKCVYYRYGGGEGVILCLYVDDILIFGTSLNVIEEVKDYLSKSFEMKDLGEADVILNIKLQRGDEGGITLVQSHYVDKVLTPTPYDPSVLLRKNRRIVRDQLRYSQIIGSLMYLASATRPDISFAVSKLSRFVXNPGDDHWQALERVMRYLKGTMSYGIHYTGYPKVLEGYSDSNWISNADEIKATSGXVFTLGGGAVSWKSCKQTILTRSTMEAELTALDTATVEAEWLRELLMDLPVVEKPVPAILMNCDNXTVIIKVNNSKDNMKSSRHIMRRLKSVRKQKNSGVIALDYVQTARNLADQFTKGLPRNVIDSASREMGLIPT

SEQ ID NO: 26199 - protein, 1126 aa, Oryza sativa; identical to SEQ ID NO: 20323
  Clone ID: TF_OsC1713_4266.pep

SEQ ID NO: 26200 - protein, 1371 aa, Oryza sativa; identical to SEQ ID NO: 20332
  Clone ID: TF_OsC1713_4346.pep

SEQ ID NO: 26201 - protein, 1084 aa, Oryza sativa; identical to SEQ ID NO: 20373
  Clone ID: TF_OsC1713_4393.pep

SEQ ID NO: 26202 - protein, 1187 aa, Oryza sativa
  unsure (1)..(1187): unsure at all Xaa locations
  Clone ID: TF_OsC1713_4437.pep
MSAPGAGASDGAPGAGAGDGAPGAANVNTNGGNFASQSSGGPFSGEPPLSPEEEAKFEASDCLFRGALISVLADNIVDVYMHMPSGKDMWDALEAKFGVSDAGSELYVMEQFYDYKMVDDRSVVEQTHEIRMLAKELENNNYELPDKFVAGGIIAKLPPSWSDFATSLKHKRQEFSVSDFIGSLGVEEKARAKDVRGKKVEGGSSANMVQKKNPHASHNNKKVKHDVKPKAATNFKKKGKGKAKGDCFVCGKSGHWAKDCPERKDKKSANMVISEGGGISGYGKILPTVLFVFHSPDWWVDTSANIHVGRGSSLLMGNGSLAAVHGVGMVDLKFTSGKTVQLKNVQHVPSIKKNLVSGSLLCREGFRLVFKSNKCVVSKYGTFVGKGYDSGGLFRFSLNDMCNNHNVVNHISENDESNVWHSRLCHVNFGCMTRLANMSLIPKFTLVKGSKCHTCVQSKQPLKPHKASEARNLAPLELVHSNLCEMNGVLTKGGKKYFMTPIDDCTRFCCVYLLKTKDEALHFFKTYKAEVENQLERKIKRLRSDRGGEYFSNEFSSFCEEFGIIHERTPPYSPQSNGVAERKNRTLTEMVNAMLDIVELSKEWWGKAVLTACHVLNKIPMKHKEVNVPIAKKWKLGPNTVDCVFLGYAIHSVGYRFLIVNSGVPGMHLGTIIECRDATFFENEFPMKHTPSTSSQETVMPHEHFAPIEHNDQTPEENPEEDNIVDTRKKEAYSSPDADYWKEAVRSEMDSIMSNGTWEVIEHPYGCKPVGCKWVFKKKLRLDGTIEKYKARLVXKGYTQKEGEDFFXDTYSPVARLTTIRVLLALAASHGLLVHQMDVKTAFVNRELEEEIYMDQPYGYVLEGQEGMVCKLLKSLYGLKQAPKQCHEKFDTTLTSAGFVVNETDKCVYYHYSGGEGVILCLYVDDILIFGTSLNVIEEVKDYLSKSFEMKDLGEADVILNIKLQRGDEGGITLVQSHYVDKVLSRFGYSDCKPAPTPYDPSVLLRKNRRIARDQLRYSQIIGSLMYLASATRPDISFAVSKLSRFVSNPGDDHWQALERVMRYLKGTVSYGIHYTGYPKVLEGYSDSNWISDADEIKATGGYVFTLGGGAVSWKSCKQTILTSSKDNMKSSRHIKRRLKSVRKQKNSGVIALDYVQTARNLADQFTKRLPRNVIDSASREMGLIPT

SEQ ID NO: 26203 - protein, 1126 aa, Oryza sativa; identical to SEQ ID NO: 20363
  Clone ID: TF_OsC1713_4451.pep

SEQ ID NO: 26204 - protein, 1382 aa, Oryza sativa
  Clone ID: TF_OsC1713_4689.pep
MSNTGDKEKETPVNTNGGNTASNSSGRPFLGYNLITLFQLEVLLLMFIAMSTLCHYVIVDAYSMLSMLMLITFTTITGSNPIVNIMFIILLFWIKICRIMTKFLTIQKPDRSFSVVGFAATLKPHAFDGSNYKRWKARALLWLTAMQCFYVSRGKRSEPPLSPEEEAKFEASDCLFRGALISVLADNIVDVYMHMPSGKEMWDALEAKFGVSDAGSELYVMEQFYDYKMVDDRSVVEQAHEIQMLAKELENNNCELPDKFVAGGIIAKLPPSWSDFATSLKHKRQEFSVPDLIGSLGVEEKARAKDVRGKKVEGGSSANMVQKKNPHASHNNKKVKPDVKPKAATNFKKKSKGKAKGDCFVCGKSGHWAKDCPERKDRKSANMIISEGGGTSGYGKILPTVLSVFHSPDWWVDTGANIHVGRGSSLLMGNGSLAAVHGVGTVDLKFTSGKTVQLKNVQHVPSIKKNLVSGSLLCREGFRLVFESNKCVVSKYGTFVGKGYDSGGLFRFSLNDMCNNHNAVNHISENDESNVWHSRLCHVNFGCMTRLANMSLIPKFTLVKGSKCHTCVQSKQPRKPHKASEARNLAPLELVHSDLCEMNGVLTKGGKKYFMTLIDDCTRFCYVYLLKTKDEALHFFKIYKAEVENQLERKIKRLRSDRGGEYFSNEFASFCEEFGIIHEMTPPYSPQSNGVAERKNRTLTEMVNAMLDTAGLSKECIRKTPFEEWERKKLNLSYLRTWGCLAKVNVPIAKKRKLGPKTVDCVFLGYAIHSVGYRFLIVNSGVPDMHVGTILESRDAIFFENEFPMKYTPSTSSKETVMPHEHFAPIEHNDQTPEENPEEDNIVDTRKSKRQRVAKSFGDDYIVYLVDDTPRTIEEAYSSPDADYWKEAVRSEMDSIMSNGTWEVVERPYGCKPVGCKWVFKKKLRPDGTIEKYKARLVAKGYTQKEGEDFFDTYSPVARLTTIRVLLALAASHGLLVHQMDIKTAFLNGELEEEIYMDQPDGYVLEGQEGMVCKLLKSLYGLKQAPKQWHEKFDTTLTSAGFVVNEADKYVYYRYGGGEGVILCLYVDDILIFGTSLNVIEEVKDYLSKSFEMKDLGEADVILNIKLQRGDEGGITLVQSHYVDKVLSRFGYSDCKPAPTPYDPSVLLRKNRRIARDQLRYSQIIGSLMYLASATRPDISFAVSKLSRFVSNPGDDHWQALERVMRYLKGTMSYGIHYTGYPKVLEGYSDSNWISDADEIKATSGYVFTLGGGAVSWKSCKQTILTRSTMEAELTALDTATVEAEWLRELLMDLPVVEKPVPAILMNCDNQTVIIKVNSSKDNMKSSRHIKRRLKSVRKQKNSGVIALDYVQTARNLADQFTKGLPRNVIDSASREMGLIPT

SEQ ID NO: 26205 - protein, 1504 aa, Oryza sativa
  Clone ID: TF_OsC1713_4708.pep
RLRAAAPPAACRLPRLRPPLFALTRHQTASYGAAARGLELLRLASASAAPAATSCQRQLPPGGGGTPPPTGAGAPPPTGAGAPGGGAVNDYNNGGNSASPSSGGPFSGYNLLLLLLLLALFLFPLLALYCVRYVLVPILRDASSMLSRYWYVPVSDIHDAHSMLLVMLRLPYTAYAMIIVSISWIKICRIMTIFPTIQKPDRSFSVVGFAAALKPHAFDGSNYKRWKARALLWLTAMQCFYVSRGKRSEPPLSPEEEAKFEASDCLFRGALISVLADNIVDVYMHMPSGKDMWDALEAKFGVSDAGSELYIMEQFYDYKMVDDRSVVEQAHEIQMLAKELENNNCELPDKFVAGGIIAKLPPSWSDFATSLKHKRQEFSVPDLIGSLGVEEKARAKDVRGKKVEGGSSANMVQKKNPHASHNNKKVKPDVKPKAATNFKKKGKGKAKGDCFVCGKSGHWAKDCPERKDRKSANMIISEGGGTSGYGKILPTVLSVFHSPDWWVDTGANIHVCADISLFSSYQVERGSSLLMGNGSLAAVHGVGTVDLKFTSGKTVQLKNVQHVPSIKKNLVSGSLLCREGFRLVFESNKCVVSKYGTFVGKGYDSGGLFRFSLNDMCNNHNAVNHISKNDESNVWHSRLCHVNFGCMTRLANMSLIPKFTLVKGSKCHTCVQSKQPRKPHKASEARNLAPLELVHSDLCEMNGMLTKGGKKYFMTLIDDCTRFCYVYLLKTKDEALHYFKIYKAEVENQLERKIKRLRSDRGGEYFSNEFASFCEEFGIIHEMTPPYSPQSNGVAERKNRILTEMVNAMLDTAGLSKEWWGEAVLTACHVLNKIPMKHKEVTPFEEWERKKLNLSYLRTWGCLAKVNVPIVKKRKLGPKTVDCVFLGYAIHSVGYRFLIVNFGVPDMHAATIFESRDATFFENEFLMKYTPSTSSKETVMLHEHFAPIEHNDETPEENPEEDNIVDTRKSKRQRVAKSFGDDYIVYLVDDTPRTIEEAYSSPDADYWKEAVRSEIDSIISNGTWEVVERPYGCKPVGCKWVFKKKLRPDGTIEKYKARLVAKGYTQKEGEDFFDTYSPVARLTTIRVLLALAASHGLLVHQMDVKTAFLNGELEEEIYMDQPDGYVLEGQEGMVCKLLKSLYGLKQAPKQWHEKFDTTLTAAGFVVNEADKCVYYRYGGGEGVILCLYVDDILIFGTSLNVIEEVKDYLSKSFEMKDLGEADVILNIKLQRGDEGGITLVQSHYVDKVLSRFGYSDCKPAPTPYDPSVLLRKNRRIARDQLRYSQIIGSLMYLASATRPDISFAVSKLSWFVSNPGDDHWQALERVMRYLKGTMSYGIHYTGYPKVLEGYSDSNWISDADEIKATSGYVFTLGGGAVSWKSCKQTILTRSTMEAELTALDTATVEAEWLRELLMDLPVVEKPVPAILMNCDNQTVIIKVNSSKDNMKSSRHIKRRLKSVRKQKNSGVIALDYVQTARNLADQFTKGLPRNVIDSASREMGLIPT

SEQ ID NO: 26206 - protein, 1456 aa, Oryza sativa
  Clone ID: TF_OsC1713_4762.pep
MSGVAAAAIGGGGAAPPPTPTGAGSGAGAPGGGAVNDYNNGGNSASPSSGGPFSGYNLLLLLLMLSHYWYVPVSDIHDAHSMLLVMLRSPYTAYAMIIVSISWIKICRIMTIFPTIQKPDRSFSVVGFAAALKPHAFDGSNYKRWKARALLWLTAMQCFYVSRGKRSEPPLSPEEEAKFEASDCLFRGALISVLADNIVDVYMHMPSGKDMWDALEAKFGVSDAGSELYVMEQFYDYKMVDDRSVVEQAHEIQMLAKELENNNCELPDKFVAGGIIAKLPPSWSDFATSLKHKRQEFSVPDLIGSLGVEEKARAKDVRGKRVEGGSSANMVQKKNPHASHNNKKVKPDVKPKAATNFKKKGKGKAKGDCFVCGKSGHWAKDCPERKDRKSANIVISEGGGTSGTVGRGSFLLMGNGSLAAVHGIAKKRKLGPKTVDCVFLGYAIHSVGYRFLIVNSGVPDMHAGTILESRDATFFENEFPMKYTPSTSSKETVMPHEHFAPIEHDDQTPEENPEEDNIVDTRKSKRQRVAKSFGDDYIVYLVDDTPRTIEEAYSSPDADYWKEAVRSEMDSIMSNGTWEVVERPYGCKPVGCKWVFKKKLRPDGTIEKYKARLVAKGYTQKEGEDFFNTYSPVARLTTIRVLLALAASHGLLVHQMDVKTAFLNGELEEEIYMDQPDGYVLEGQEGMVCKLLKSLYGLKQAPKQWHEKFDTTLTSAGFVVNEADKCVYYRYGGGEGVILCLYVDDILIFGTSLNVIEEVKDYLSKSFEMKDLGEADVILNIKLQRGDEGGITLVQSHYVDKVLSRFGYSDCKPAPTPYDPSVLLRKNRRIARDQLRYSQIIGSLMYLASATRPDISFAVSKLSRFVSNPGDDHWQALERVMRYLKGTMSYGIHYTGYPKVLEGYGDSNWISDADEIKATSGYVFTLGGGAVSWKSCKQTILTRSTMEAELTALDTATVEAEWLRELLMDLPVVEKPVPAILMNCDNQTVIIKVNSSKDNMKSSRHIKRRLKSVRKQKNSGVIALDYVQTARNLADQFTKGLPRFWGVPPARLLIAMSGVAAAATGPPTGAGGTPPPTGAGSGAGAPGGGAVNDYNNGGNSASPSSGGPFSGDGYAFASTENSMVIYNINVAPLIKSNKYTLLAERTRKWEEEKRQERREGKAPAAPAGNRRGEAKQKATAEDIDDGDEDLGFQEPEATVATVDGGACAHASRWSLKAMKRELLAAAPTHEATRRARWSEVALTFDQTDHPPCVARGGQIAMVVSPTVCNVKLGRVLIDGGAALNILSPVAFDAIKALGMVLRPSQPIIGVTLGHTWPLGHIDLPVTFGGSANFRTERVDFDVADLSLPYNAVLGRPALVKFMAAVHYAYLQMKMPGPGGPITVHGDLKVALACMEQHADHLAAASKPAGGDERLSASVPAAPRQRMVTCDEVPVKEVALGDGPSKTTRIGGLLDDK

SEQ ID NO: 26207 - protein, 1638 aa, Oryza sativa
  Clone ID: TF_OsC1713_4807.pep
MQCFYVSRGKRSEPPLSPEEEAKFEASDCLFRGALISVLADNIVDVYMHMPSGKDMWDALEAKFGVSDAGSELYVMEQFYDYKMVDDRSVVEQAHEIQMLAKELENNNCELPDKFVAGGIIAKLPPSWSDFATSLKHKRQEFSVPDLIGSLGVEEKARAKDVRGKKVEGGSSANMVQKKNPHASHNNKKVKPDVKPKAATNFKKKSKGKAKGDCFVCGKSGHWAKDCPERKDRKSANMIISEGGGTSGDATFFENEFPMKYTPSTSSKETVMPHEHFAPIEHNDQTPEENPEEDNIVDTRKSKRQRVAKSFGDDYIVYLVDDTPRTIEEAYSSPDADYWKEAVRSEMDSIMSNGTWEVVERPYGCKPVGCKWVFKKKLRPDGTIEKYKARLVAKGYTQKEGEDFFDTYSPVARLTTIRVLLALAASHGLLIHQMDVKTAFLNGELEEEIYMDQPDGYVLEGQEGMVCKLLKSLYGLKQAPKQWHEKFDTTLTSAGFVVNEADKCVYYRYGGGEGVILCLYVDDILIFGTSLNVIEEVKDYLSKSFEMKDLGEADVILNIKLQRGDEDGRAIRFLGSARRDYSLFVNIYFIFTNMSNTGDKEKETPVNTNGGNTTSNSSGGPFLGTIHFHLFESGFMPSYNCWTSHGEQGVEMEEDEVEDDNIPDFAQYVGFEGNQTGEEEIAADGNDVADDLGQMLQDAREDSESEKEAHKLDKMLEDHRTSLYPGCEQGHKKLDTTLDLLQWKAKNGDGILRHPADGSQWRNIDRKFKEFGKDARNIRFGPKQPGNDIDVYLRPLVEDLKQLWKKEGVPVWDEDKQEEFNLRALLFVTINDWPALSNLSGQSNKGYKACTHCMDETESTYLKHCRKVVYMGHRRFLAANHPVRKKDKHFEHKADHRTKPKHRSGKTVFAMVKDLKVVFGKGPGSQHIESEDGHAAMWKKNSIFWELPYWEFLDVRHAIDVMHLTKNLCVNLLGFLGVYGKSKDTLEARNDLKHMEQRSDLHPEPKEKGSHYLSPASYTLSKAEKESMFECLESIKVPSGYSTNIKRIISTKEKKFTNLKSHDCHVLMTQLLPVVIRGILPDNVRATITKLCAFMNAISQKVIDPDRLEALQNEVVQCLVSFELIFPPSFFNIMTHLLCHLVKEIRILGPMYLHNMFPFERYMGVLKKYVRNRARPEASIAKGYGTEEVIEFCVEFIEDLRPIGVPKSRHEGRLQGKGTLGRKAITTVDNNLFRKAHFTVLQHSSLVAPYIEEHLALVRARNIGKSDAWITRHHIDTFPAWLRQHLMGNESINQQLAFLAWGPSGSIATFQGYEINGYTFYTRAQDMKSTNQNSAVRVDAMGHDGTTATYYGSIEDIWELDYGPLKVPLFRCQWVRLTGGGVMIDDSGMTTVDLNKVGYSDEPFVLANDVTQVFFVKDMSSKGKKGRGPDEPKRQVVLPGKRKIVGVEDKTDEDYDQLDGQPPFTVTIDPSILLSNEDTPYSRSDHKEGTIGASPRRRRRHISPSSRARRRRRLLRHRRISGVRAAARRLPLDLSLRSRSLSLSRLPPAAEFQTPTLTSSRHDAAPRRRRATRRHDAARRRRATPMPRAAPRRRRPAPPPLRCRHTENVNERTNVNENKVNECERERANERERANERE

SEQ ID NO: 26208 - protein, 1276 aa, Oryza sativa
  Clone ID: TF_OsC1713_4916.pep
MSGVAGGGGAPPPTGAGSGAGAPPPTGAGSGAGAPGGGAVNDYNNGGNSASPSSGGPFSGYNLLLLLLLLALYCVSYVLVPVLHDASSMLSHYWYVPVSDIHDAHSMLLVMLRSPYTAYAMIIVSISWIKICRIMTIFPTIQKPDRSFSVVGFAAALKPHAFDGSNYKRWKARALLWLTAMQCFYVSRGKRSEPPLSPEEEAKFEASDCLFRGALISVLADNIVDVYMHMPSGKDMWDALEAKFGVSDAGSELYVMEQFYDYKMVDDRSVVEQAHEIQMLAKELENNNCELPDKFVAGGIIAKLPPSWSDFATSLKHKRQEFSVPDLIGSLGVEEKARAKDVRGKKVEGGSSANMVQKKNPHASHNNKKVKPDVKPKAATNFKKKGKGKAKGDCFVCGKSGHWAKDCPERKDRKSANMIISEGGGTSGYGKILPTVLSVFHSPDWWVDTGANIHVGRGSSLLMGNGSLAAVHGVGTVDLKFTSGKTVQLKNVQHVPSIKKNLVSGSLLCREGFRLVFESNKCVVSKYGTFVGKGYDSGGLFRFSLNDMCNNHNAVNHISENDESNVWHSRLCHVNFGCMTRLANMSLIPKFTLVKGSKCHTCVQSKQPRKPHKASEARNLAPLELVHSDLCEMNGVLTKGGKKYFMTLIDDCTRFCYVYLLKTKDEALHYFKIYKAEVENQLERKIKRLRSDRGGEYFSNEFASFCEEFGIIHEMTPPYSPQSNGVPERKNRTLTEMVNAMLDTAGLSKEWWGEAVLTASHVLNKIPMKHKEVTPFEEWERKKLNLSYLRTWGCLAKINVPIAKKRKLGPNTVDCVFLGYAIHSVGYRFLIVNSGVPDMNAGTILESRDATFFENEFPMKHSPSTSSKETVMPHEHFAPTEHNDQTPEENPDEDNIVDTRKSKRQRVAKSFGDDYIVYLVDDTPRTIEEAYSSPDADCWKEAVRSEMDSIMSNGTWEVVERPYGCKPVGCKWVFKKKLRPDGTIEKYKARLVAKGYTQKEGEDFFDTYSLVARLTTIRVLLALAASHGLLVHQMDVKTVFLNGELEEEIYMDQPDGYVLEGFVVNEADKCVYYRYGGGEGVILCLYVDDILIFGTSLNVIEEVKDYLSKSFEMKDLGEADVILNIKLQRGDEGGITLMQSHYVDKVLSLFGYSDCKPAPTPYDPSVLLRKNRRIARDQLRYSQIIGSLMHLASATRPDISFVVSKLSRFVSNPGDYHWQALERVMRYLKGTMSYGIHYTGYPKVLEGYSDSNWISDANEIKATSGYVFTLGGGAIS

SEQ ID NO: 26209 - protein, 1504 aa, Oryza sativa; identical to SEQ ID NO: 20371
  Clone ID: TF_OsC1713_4934.pep

SEQ ID NO: 26210 - protein, 1457 aa, Oryza sativa; identical to SEQ ID NO: 20353
  Clone ID: TF_OsC1713_4959.pep

SEQ ID NO: 26211 - protein, 1419 aa, Oryza sativa; identical to SEQ ID NO: 20374
  Clone ID: TF_OsC1713_4998.pep

SEQ ID NO: 26212 - protein, 494 aa, Oryza sativa
  unsure (1)..(494): unsure at all Xaa locations
  Clone ID: TF_OsC1713_5057.pep
MAAAAGPSLSITVEKNPPEARLLQLGIKSWPKWGCPPGKFPLKFDARLTCYLLKGRVRASVKGTGRCVEFGAGDLVVFPKGLSCTWDVVVGIDKHYNFDSYGLEPSFGPGGRVVTDGRAIRFLGSARRDYSLFVNIYFIFTNISNTGDKEKETPVNTNGGNTASNSSGGTFLGVLADNIVKVYMHMPSGKDMRDALEAKFGVSDAGSELYVMEQFYDYKMVDDRSVVEQAHEIQMLAKELENNNCELPDKFVAGGIIAKLPPSWSDFATSLKHKRQEFSVPDLIGSLGVEEKARAKDVRGKKVEGGSSANMVQKKNPHASHNNKKVKPDVKPKAATNFKKKSKGKAKGDCFVCGKSGHWAKDCPERKDRKSANMIISEGGGTSGYGXRGSSLLMGNGSLAAVHGVGTVDLKFTSGKTVQLKNVQHVPSIKKNLVSGSLLCREGFRLVFESNKCVVSKYGTFVGKGYDSGGLFRFSLNDMCNNHNVVNQKKKKKK

SEQ ID NO: 26213 - protein, 1236 aa, Oryza sativa
  Clone ID: TF_OsC1713_5171.pep
MSGVAAAATGGGGAPPPTGAGAPPPTGAGSGAGAPGGGAVNDYNNGGNSASPSSGGPFSGYNLLLLLLLLALFLFPLLALYCVRYVLVPVLHDASSMLSRYWYVPVSDIHDAHSMLLVMLRSPYTAYAMIIVSISWIKICRIMTIFPTIQKPDRSFSVVGFAAALKPHAFDGSNYKRWKARALLWLTAMQCFYVSRGKRSEPPLSPEEEAKFEASDCLFRGALISVLADNIVDVYMHMPSGKDMWDALEAKFGVSDAGSELYVMEQFYDYKMVDDRSVVEQAHEIQMLAKELENNNCELPDKFVAGGIIAKLPPSWSDFATSLKHKRQEFSVPDLIGSLGVEEKARAKDVRGKKVEGGSSANMVQKKNPHASHNNKKVKPDVKPKVATNFKKKGKGKAKGDCFVCGKSGHWAKDCPERKDRKSANMIISEGGGTSGYGKILPTVLSIFHSPDWWVDTGANIHVGRGSSLLMGNGSLAAVHGVGTVDLKFTSGKTVQLKNVQHVPSIKKNLVSGSLLCREGFRLVFESNKCVVSKYGTFVGKGYDSGGLFRFSLNDMCNNHNAVNHISKNDESNVWHSRLCHVNFGCMTRLANMSLIPKFTLVKGSKCHTCVQSKQPRKPHKASEARNLAPLELVHSDLCEMNGVLTKGGKKYFMTLIDDCTRFCYVYLLKTKDEALHYFKIYKAEVENQLERKIKRLRSDRGGEYFSNEFASFCEEFGIIHEMTPPYSPQSNGVAERKNRTLTEMVNAMLDTAGLSKEWWGEAVLTACHVLNKIPMKHKEVTPFEEWERKKLNLSYLRTWCCMAKSRDATFFENEFPMKYTPSTSSKETVMPHEHFAPIEHNDQTPEENPEEDNIVDTRKSKRQRVAKSFGDDYIVYLVDDTPRTIEEAYSSPDADYWKEAVRSEMDSIMSNGTWEVVERPYGCKPVGCKWVFKKKLRPDGTIEKYKARLVAKGYTQKESEDFFDTYSPVARLTTIRQAPKQWHEKFDTTLTSAGFVVNEADKCVYYRYGGGEGVILCLYVDDILIFGTSLNVIEEVKDYLSKSFEMKDLGEADVILNIKLQRGDEGGITLVQSHYVDKVLSRFGYSDCKPAPTPYDPSMLLRKNRRIARDQLRYSQIIGSLMYLASATRPDISFAVSKLSRFVSNPGDDHWQALERVMRYLKGTMSYGIHYTGYPKVLEGYSDSNWISDADEIKATSGYVFTLGVEAELTALDTATVEAEWLRELLMDLPVVEKP

SEQ ID NO: 26214 - protein, 1447 aa, Oryza sativa
  Clone ID: TF_OsC1713_5234.pep
MSGVAAAAIGGGGAPPPTGAGSGAGAPGGGAVNDYNNGGNSASPSSGGPFSGYNLLLLLLLALLLFPLLALYCVRYVLVPVLHDASSMLSHYWYVPVSDIHDAHSMLLVMLRSPYTAYAMIIVLISRIKICRIMTIFPTIQKPDRSFSVVGFAAALKPHAFDGSNYKRWKARALLWLTAMQCFYVSRGKRSEPPLSPEEEAKFEASDCLFRGALISVLADNIVDVYMHMPSGKDMWDALEAKFGVSDAGSELYVMEQFYDYKMVDDRSVVEQAHEIQMLAKELENNNCELPDKFVAGGIIAKLPPSWSDFATSLKHKRQEFSVPDLIGSLGVEEKARAKDIRGKKVEGGSSANMVQKKNPHASHNNKKVKPDVKPKAATNFKKKGKGKAKGDCFVCGKSGHWAKDCPERKDRKSANMIISEGGGTSGYGKILPTVLSVFHSPDWWVDTGANIHVCADISLFSSYQVGRGSSLLMGNGSLAAVHGVGTVDLKFTSGKTVQLKNVQHVPSIKKNLVSGSLLCREGFRLVFESNKCVVSKYGTFVGKGYDSGGLFRFSLNDMCNNHNAVNHISENDESNVWHSRLCHVNFGCMMRLANMSLIPKFTLVKGSKCHTCVQSKQPRKPHKASEARNLAPLELVHSDLCEMNGVLTKGGKKYFMTLIDDCTRFCYAYLLKTKDEALHYFKIYKAEVENQLERKIKRLRSDRGGEYFSNEFASFCEEFGIIHEMMPPYSPQSNGVAEKKNRTLTEMVNAMLDTAGLSKEWWGEAVLTACHVLNKIPMKHKEVTPFEEWERKKLNLSYLRTWGCLAKVNVPIVKKRKLGPKTVDCVFLGYAIHSVGYRFLIVNSGVPDMHAGTIFESRDATFFENEFPMKYTSSTSSKETVMPHEHFAPIEHNDQTSEENPEEDNIVDTRKSKRQRVAKSFGDDYIVYLVDDTPRTIEEAYSSPDADYWKEAVRSEMDSIMSNGTWEVVERPYGCKPVGCKWVFKKKLRPDGTIEKYKARLVAKGYTQKEGEDFFDTYSPVARLTTIRVLLALAASHGLLVHQMDVKTAFLNGELEEEIYMDQPDGYVLEGQEGMVCKLLKYLYGLKQAPKQWHEKFDTTLTSAGFVVNEADKCVYYRYGGGEGVILCLYVDDILIFGTSLNVIEEVKDYLSKSFEMKDLGEADVILNIKLQRGDEGGITLVQSHYVDKVLSRFGYSDCKPAPTPYDPSVLLRKNRRIARDQLRYSQIIGSLMYLASATRPDISFAVSKLSRFVSNPGDDHWQALERVMRYLKGTMSYGIHYTGYPKVLEGYSDSNWISDADEIKATSGYAFTLGGGAVSWKSCKQTILTRSTMEAELTALDTATVEAEWLRELLMDLPVVEKPVPAILMNCDNQTVIIKVNSSKDNMKSSRHIKRRLKSVRKQKNSGVIALDYVQTARNLADQFTKGLPRNVIDSASREMGLIPT

SEQ ID NO: 26215 - protein, 1234 aa, Oryza sativa
  Clone ID: TF_OsC1713_5259.pep
MSNTGDKEKETPVNTNGGNTASNSSGGPFLGYNLITLFQLEVLLLMFIAMSTLCHYVIVDAYSTLSMLMLITFTTITGSNPIVNIMFIILLFWIKICRIMTKFPTIQKPDRSFSVVGFAAALKPHAFDGPNYKRWKTRALLWLTAMQCFYVSRGKRSDPPLSPEEEAKFEASDCLFRGALISVLADNIVDVYMHMPSGKDMWDALEAKFGVSDAGSELYVMEQFYDYKMVDDRSVVEQAHEIQMLAKELENNNCELPDKFVAGGIIAKLPPSWSDFATSLKHKRQEFSVPDLIGSLGVEEKARAKDVRGKKVEGGSSANMVQKKNPHASHNNKKVKPDVKPKAATNFKKKSKGKAKGDCFVCGKSGHWAKDCPERKDRKSANMIISEDGGTSGYGKILPTVLSVFHSPDWWVDTGANIHVGRGSSLLMGNGSLAAVHGVGTVDLKFTSGKTVQLKNVQHVLSIKKNLVSGSLLCREDFRLVFESNKCVVSKYGTFVGKGYDSGGLFRFSLNDMSNNHNAVNHISENDESNENQTVGSDRGGEYFSNEFASFCEEFGIIHEMTPPYSPQSNGVAERKNRTLTEMVNAMLDTAGLSKEWWGEAVLTACHVLNKIPMKHKEVTPFEEWERKKLNLSYLRTWGCLAKVNVPIAKKRKLGPKTVDCVFLGYAIHSVGYRFLIVNSGVPDMHVGTILESRDATFFENEFPMKYTPSTSSKETVMPHEHFAPIEHNDQTPEENPEEGNIVDTRKSKRQRVAKSFGDDYIVYLVDDTPRTIEEAYSSPDADYWKEAVRSEMDSIMSNGTWEVVERPYGCKPVGCKWVFKKKLRPDGTIEKYKARLVAKGYTQKEGEDFFDTYSPVARLTTIRVLLALAASHGLLVHQMDVKTAFLNGELEEEIYMDQPDGYVLEGQEGMVCKLLKSLYGLKQAPKQWHEKFDTTLTSAGFVVNEADKCVYYRYGGGEGVILCLYVDDILIFGTSLNVIEEVKDYLSKSFEMKDLGEADVIINIKLQRGDEGGIHLCNPTMWTSATRPDISFAVSKLSRFVSNPGDDHWQALERVMRYLKGTMSYGIHYTGYPKVLEGYSDSNWISDADEIKATSGYVFTLGGGVVSWKSCKQTILTRSTMEAELTALDTATVEAEWLRELLIDLPVVEKPVPAILMNCDNQTVIIKVNSSKDNMKSSRHIKRRLKSVRKQKNSGVIALDYVQTARNLADQFTKGLPRNVIDSASREIGLIPT

SEQ ID NO: 26216 - protein, 1253 aa, Oryza sativa
  Clone ID: TF_OsC1713_5387.pep
MLLRYCNVPVSDIHDAHSMLLHDASSMLLRYCNIPVPDIHDTHSMLLVMLRSPYTAYAMIIVLTFWIKICRFMTIFPTIQKPDRSFSVVGFAAALKPHAFDGSNYKRWKACALLWLTAMQYFYVSRGKRSEPPLSPEEEAKFEALDCLFRGALISVLADNIVDVYMHMPSGKDMWDALEAKFGVSDAGSELYVMEQFYDYKMVDDRSVVDQPHEIQMLAKKLENNNCELPDKFVAGGIIAKLPTSWSDFATSLKHKRQEFSVSDLIGSLGVEKKARAKDVRGKKVEGGSSANMVQKKNPHASHNNKKVKPDVKPKAATNFKKKGKGKAKGDCFVCGKSGHWAKDCPERKDRKSANMVISEGGGTSGYGKILPTVLSVLHLPDWWVDTGANIHVGRGSSLLMGNGSLAAVHGVGSKCHTCIQSKQPRKPHKSSEARNLAPLELVHSDLCEMNDVLTKGGKKYFMTLIDDCTRFCYVYLLKTKDKALHYFKIYKAEAENQLERKIKRLRSDRSGEYFSNEFASFCEEFGIIHERTPPYSPQSNGVAERKNRTLTEMVNAMLDTSGLSKEWWGEAVLTTYHVLNKIPMKHKEVTPFEEWERKKLNLSYLRTWGCLAKVNVPIAKKRKLGPNTVDCVFLGYAIHSVGYRFLIVNFGVPDMHVGTILESRDATFFENEFPMKHTPSTSSKETVMPHEHFAPVEHNDQTPEENPEEDNIVDTRKSKRQRVAKSFGDDYIVYLVDDTSRTIEEAYSSPDADYWKEAVRSEMDSIMSNGTWEVVELSYGCKPVGCKWVFKKKLIPDGTIEKYKARLAAKGYTQKEGEDFFDTYSPVARLTTIRVLLALAASHGLLVYQMDVKTAFLNGELEEEIYMDQLDGYVLEGQEGMVCKLLKSLYGLKQAPKQWHEKFDTTLTSAGFVVNETDKCVYYRYGGGEGVILCLYVDDILIFGTSLNVIEEVKDYLSKSFEIKDLGEADVILNIKLQIGDEGGITLVQSHYVDKVLSRFGYSDCKPAPTPYDPSVLLRKNRRIARDQLRYSQIIGSLMYLASATRPDISFAVSKLSRFVSNPGHDHWQALERVMRYLKGTMSYGIHYTGYPKVLEGYSDSNWISDADEIKATSGYVFTLGGGAVSWKSCKQTILTRSTMEAELTALDTATVEAEWLHELLMDLPVVEKSVPAILMNCDNQTVIIKVNSSKDNTKSSRHIKRRLKSVRKQKNSGVIALDYVQTARNLADQFTKGLPRNVIDNASREMGLIPT

SEQ ID NO: 26217 - protein, 591 aa, Oryza sativa
  unsure (1)..(591): unsure at all Xaa locations
  Clone ID: TF_OsC1713_5421.pep
MGLGGGGRPVEVSLEGLRSLAVTSRPRQNLPWFGKVSGIDKWRMDRQWMYADRRSKEFIDGVHYFLRVAKANRQRGFICCPCNKCKNQKEYSAFRTIHFHLFESGFMPSYNCWTSHGEQGVEMEEDEVEDDNIPDFAQYVGFEGNQTGEEEIAADGNDVADDLGQMLQDAREDCESEKEAHKLDKMLEDHRTSLYPGCEQGHKKLDTTLELLQWKAKNGVSDKAFGDLLKLVKNILPGGNKLPEKTYEAKKIVCPLGLEVHKIHACPNDCILYRGEEYENLEACHVCKALRYKIRRDDPGEVDGQLTKKRIPAKVMWYFPIIPRLRRLFRNKGNARMLRWHAEERQQDGMLRHPADGSQWRNIDRKFKEFGKDARNIRFGLSTDGMNPFGEMSSGHSTWPVTMCIYNLPPWLCMKRKYIMMPIIIQGPKQPGNDIDVYLRPLVEDLKQLWKKEGVPVWDEDKQEEFNLRALLFVTINAXPALSNLSGQSNKGYKACTHSNHPVRKKGKHFEHKADHCVYGKSKDTLEARNDLKHMEQRGDLHPEPKEKGSHYLSPASYTLSKGYPSRQCPGNNNKAMCIHERNFAEGHRSG

SEQ ID NO: 26218 - protein, 1397 aa, Oryza sativa
  Clone ID: TF_OsC1713_5483.pep
VALASPLLISCAHERLEGAVPPKPHLCLRSAPGRRVIRFLGSASRTTAHHHVWSCHRHCWRRWYAADRSSIRSWCARRCRERQQQRRQFATAGGGGTPPTGAGSGAGAPGGAVNDNNNGGNSASPSSGGPFSGYNLLLLLLLLALSLYYVRYVLVPVLHGASSMLSRYCYVPVPDIQDAHSMLLVMLRSPYTAYAMIIALTFWIKICRLMTIFPTIQKPDRSFSVVGFAAALKPHAFDGSNYKRWKARALLWLTAMQCFYVSRGKRSEPPLSPEEEAKFEASDCLFRGALISVLADNIVDVYMHMPSGKDMWDALEAKFGVSDAGSELYVMEQFYDYKMVDDRSVVEQAHEIQMLAKELENNNCELPDKFVAGGIIAKLPPSWSDFATSLKHKRQEFSVPDLIGSLGVEKKARAKDVQGKKVEGGSSANMVQKKNPHASHNNKKVKPDVKPKTATNFKKKGKGKAKGDCFVCGKSGHWAKDCPERKDRKSANMIISEGGGTSGYGKILPTVLSVFHSPDWWVDTGANIHVCADISLFSSYQVGRGSSLLIGNGSLAAVHGVGTVDLKFTSGKTVQLKNVQHVPSIKKNLVSGSLLCREGFRLVFESNKCVVSKYGTFVGKGYDSGGLFRFSLNDMCNNHNAVNHISENDESNVWHSRLCHVNFGCMTRLANMSLISKFTLVKGSKYHTCVQSKQPRKPHKASEARNLAPLEHVHSDLCEMNGVLTKGGKKYFMTLIDDCTRFCYVYLLKTKDETLHYFKIYKAEVENQLERKIKRLRSDRGGEYFSNEFASFCEEFGIIHEMTPPYSPQSNGVAERKNRTLTEMVNTMLDTAGLSKEWWGEAVLTACHVLNKIPMKHKEVTPFEEWERKKLNLSYLRTWGCLAKVNVPIAKKRKLGPKTVDCVFLGYAIHSVDYRFLIVNSGVPDMHVGTILESRDATFFENEFPMKYTPSTSSKETVMPHEHFAPIEHNDQTPKENPEEDNIVDTRKSKRQRVAKSFGDDYIVYLVDDTPRTIEEAYSSPDADYWKEAVRSEMDSIMSNGTWEVVERPYGCKPVGCKWVFKKKLRPDGTIEKYKARLVAKGYTQKEGEDFFDTYSPVARLTTIRVLLALAASHGLLVHQMDVKTAFLNGELEEEIYMDQPDGYVLEGQEGMVCKLLKSLYGLKQAPKQWHEKFDTTLTSAGFVVNEADKCVYYRYGGGEGVILCLYVDDILIFGTSLNVIEEVKDYLSKSFEMKDLGEADVILNIKLQRGDEGGITLMQSHYVDKVLNHFGYSDCKPAPTPYDPSVLLRKNQRIVRDQLRYSQIIGSLMYLASATRPDISFAVSKLSRFVSNPGDDHWQALERVMRYLKGTMSYGIHYTGYPKVLEGYSDSNWISDADEIKATSRYVVILGGGAVS

SEQ ID NO: 26219 - protein, 1540 aa, Oryza sativa
  unsure (1)..(1540): unsure at all Xaa locations
  Clone ID: TF_OsC1713_5486.pep
MASLGANPSVFVAWLRPSASPYCFAPSALLWTQSTPSGFGGFSSPTSCNRSSACLWSLQKDRGDADMCENEMKREPPQRQVVLPTVITVLQPCQHCHWRRAGDQVFGSSRRDYSLFVNIYFTFTNMSNTGDKEKETPVNTNGGNTASNSSGGPFLGYNLITLFQLEVLLLMFIAMSTLCHYVIVDAYSTLSMLMLITFTTITGSNPIVNIMIIILLFWIKICRIMTKFPTIQKPDRSFSVVGFAAALKPHAFDGSNYKRWKARALLWLTAMQCFYVSRGKRSEPPLSPEEEAKFEASDCLFRGALISVLADNIVDVYMHMPSGKDMWDALEAKFGVSDAGSELYVMEQFYDYKMVDDRSVVEQAHEIQMLAKELENNNCELPDKFVAGGIIAKLPPSWSDFATSLKHKRQEFSVPDLIGSLGVEEKARAKDVRGKKVEGGSSANMVQKKNPHASHNNKKVKPDVKPKAATNFKKKSKGKAKGDCFVCGKSGHWAKDCPERKDRKSANMIISEGGGTSGYGKILPTVLSVFHSPDWWVDTGANIHVCADISLFSSYQVGRGSSLLMGNGSLAAVHGVGTVDLKFTSGKTVQLKNVQHVPSIKKNLVSGSLLCREGFRLVFESNKCVVSKYGTFVGKGYDSGGLFRFSLNDMCNNHNAVNHISENDESNVWHSRLCHVNFGCMTRLANMSLIPKFTLVKGSKCHTCVQSKQPRKPHKASEARNLAPLELVHSDLCEMNGVLTKGGKKYFMTLIDDCTRFCYVYLLKTKDEALHFFKIYKAEVENQLERKIKRLRSDRGGEYFSNEFASFCEEFGIIHEMTPPYSPQSNGVAERKNRTLTEMVNAMLDSAGLSKEWWGEAVLTACHVLNKIPMKHKEVTPFEEWERKKLNLSYLRTWGCLAKVNVPIAKKRKLGPKTVDCVFLGYAIHSVGYRFLIVNSRVPDMHVGTILESRDATFFENEFPMKYTPSTSSKETVMPHEHFAPIEHNDQTPEENPEEDNIVDTRKSKRQRVAKSFGDDYIVYLVDDTPRTIEEAYSSPDADYWKEAVRSEMDSIMSNGTWEVVERPYGCKPVGCKWVFKKKLRPDGTIEKYKARLVAKGYTQKEGEDFFDTYSPVARLTTIRVLLALAASHGLLVHLXQMDVKTAFLNGELEEEIYMDQPDGYVLEGQEGMVCKLLKSLYGLKQAPKQWHEKFDTTLTSAGFVVNEADKCVYYRYGGGEGVILCLYVDDILIFGTSLNVIEEVKDYLSKSFEMKDLGEADVILNIKLQRGDEGGITLVQSHYVDKVLSRFGYSDCKPAPTPYDPSVLLRKNRRIARDQLRYSQIIGSLMYLASATRPDISFAVSKLSRFVSNPGDDHWQALERVMRYLKGTMSYGIHYTGYPKVLEGYSDSNWISDADEIKATSGYVFTLGGGAVSWKSCKQTILTRSTMEAELTALDTATVEAEWLRELLMDLPVVEKPVPAILMNCDNQTVIIKVNSSKDNMKSSRHIKRRLKSVRKQKNSGVIALDYVQTARNLADQFTKGLPRNVIDSASREMGLIPT

SEQ ID NO: 26220 - protein, 1259 aa, Oryza sativa
  unsure (1)..(1259): unsure at all Xaa locations
  Clone ID: TF_OsC1528_2046.pep
MSMQCARHSRSGHCGHLARSARGVKRLLGPLMMVEPLILMHRCYHLPQTRVAKVCCLALNPKQRWDSGSGNIKEIKIRGELGLRDEQSSSDAALTWQSTRTLRKHLLIRRGECWSEYSSIVNTDDEAKATCNSFCETCWKILRFRSNQTFHQLNPFLNLRNRCNRVKHGNPMVVLQFHLEIISLSFGKLENRGRNVLRGRLRYLQGKDFRLPVKEGRRPSTSIPEHDIGKISVLIKSLYAYNLNNPKTYYRHCDFTMAGFADALRPDKFTGVHFKRWQIRVTLWLTAMKCFWVSTGKPEGVLTAEQQKQFEEATTLCVGCILSVLGDRLVEVYMHMTDAKELWDALNTKFGATDASNDLYIMEQFHDYKMADNRSVVEQAHEIQTMAKELELLKCVLPDKFVARCIIAKLPPSWRSFGTALKHKRQEYSVEGLIASLDVEEKAREKDAASKGDGGQSSANVVHKAQNKSKGKYKAQQTTNFKKQKKNNNNPNQDERTCFVCGQLGHLARKCPQRKGMKAPTGQTSKSANVTISNTGDGSGYGNLPAIFSVNQSTNWWVDTRSNVARGSTVLMGNGSHVSVHGVGTVDLKFTSGKIVQLKNVQHVPSIDRNLVSGSRLTRAGFKLVFESNKVVVSKHGYFIGKGYECGGLFRFSLSDFCNKSVNHICGSVDDEANVWHSRLCHINFGLMSRLSSMCLIPKFSIVKGSKCHSCVQSKQPRKPHKVAEERNLAPLELLHSDLCEMNGVLTKGGKRYFMTLIDDATRFCYVYLLKTKDEALDYFKIYKAEVENQLDRKIKRLMSDRSGEFFSNEFDLFCEEQDIIHERTPPYSPESNGIAKRKNRTLTDLVNAMLDTAGLPKAWWGEALLTSNYVLNRVPNRNKDKTPYEIWIGRKPSLSYLRTWGCLAQVNVPITNKHKLGPKTVDCVFLGYAYHNIAYRFLIVKSEVPDMHVGXIMKSRDATFFESFFPMKDTHSSSSQPSEVIPSSITPPEQTEHTHEYVTEEDVSEAPRRSKRQRTAKSFGDDFIVYLVDDTPKSISEAYASPDADYXKEVVCSEMDSIIANGTWEVTERPYGCKPVGCKXVFKKKLRPDGTIEKYKVRLVTKGYTQKEGEYFFDTYSPVARLTTIRVLLSLAASHSLLVHQMDVKTAFLNGELDEEIYMDQPDGFVVEGQEGKMCKLLKSLYGLKHAPKQWHEKFDKTLTSTGFAVNEADKCVYYSHGGGEGVILCLYVDDILIFGTNLEVINEVTSTLSLHRPVSEA

SEQ ID NO: 26221 - protein, 319 aa, Oryza sativa; identical to SEQ ID NO: 20506
  Clone ID: TF_OsC108353_1.pep

SEQ ID NO: 26222 - protein, 2664 aa, Oryza sativa
  Clone ID: TF_OsC359_7779.pep
MPRYKPEYLFGVEGFVQELRTMSFVIGFGTAPFYAQIPHDRHEEKCRVKVTLNSNSEEVPSVMFEAGGRNYIHACQEVARIAIGELRDRYSDQLADTEYRYHPRQPQGSDRGSYLETEGIENDVTTKHLVEMLWAMDESRAETVLAAQDREDRNRGKICKLEDKVDRLEKELAALKGEAPPQKARIRLTARKRALFVPRYQLAPKVRVVEKEVAPAQADPPVIIISSDEEEESKRNHSKIEWVATQDDEDEPSIDLRCLEELDTTNPVEASDWLHAIEKKLDLLQCTDQEKVSFASHQLHGPASEWWDHFRLNRTTAEPITWLEFTAAFRKTHIPSGVVSLKKKEFRSLSQGSRSVTEYLHEFNRLARYAPEDVRNDEERQEKFLGGLNDELSYPLMVGDYPDFQKLVDKAIRQEDKYNRMEQKKRRIAQFKTQQGNNQKPRLTLGPQSMPQGGSSSVVRPQRQFFNNNAGNNIRNQAPRPVAAPAQQQPAKREQGNKPVVCFNCGDPGHYADKCPKPRRVKVVPAQNNSAVPASKARVNHVAAAEAQDAPDVILVREYPDVFPDDLPANELAEVKRQVDDLLQKGYIRPSSSPWGAPVIFVEKKDHTQRMCVDYRALNDVTIKNKYPLPRIDDLFDQLKGATVFSKIDLRSGYHQLRIKEEDIPKTAFTTRYGLFECTVMSFGLTNAPAFFMNLMNKVFMEYLDKFVVVFIDDILIYSRTKEEHEEHLRLALEKLREHQLYAKFSKCEFWLSEVKFLGHVISAGGVAVDPSNVESVTNWKQPKTVSEIRSFLGLAGYYRRFIENFSKIAKPMTRLLQKDVKYKWSEESLEAKPTLIDQVREAQINDPDIQEIKKNMRRGKAIGFLEDEQGTPCSAVAPAVAAAREDRRRHRQVAAVLVRPFAAVGTRRSFVAVDNPKVAAASFSSPSSSKIPSFPESPFSQKKSLKSSKASKATPGLEWYIPGLEIELCSRGGCSEWLGLYNRMPRYKPEYLFGVEGFVQELRTMSFVIGFGTAPFYAQIRHDRHEERCRVKVTLNSNSEDIPSVMFEAGGRNYIHACQEVARIAIGELRDRYSDQLADTEYRYHPRQPQGSDRGSYLETEGIENDATTRHLVEMLWAMDESRAETVLAAQDREDRNRGKICKLEDKVDRLEKELAALKGEAPPQKARIRLTARKRTLFVPRYQLAPKMVNTRSNGNGPNLNNPNNNNNGENPTLAQVLAQQTQLMNMMMQQFQNQQNQGNNHVPPQNKLAEFLRVRPPVFSSTTNPVEASDWLHAIEKKLDLLQCTDQEKVSFASHQLHGPASEWWDHFRLNRTTAEPITWLEFTAAFRKTHIPSGVVSLKKKEFRSLSQGSRSVTEYLHEFNRLARYAPEDVRNDEERQEKFLGGLNDELSYPLMVGDYPDFQKLVDKAIRQEDKYNRMEQKKRRIAQFKTQQGNNQKPRLTLGPQPMPQGGSSSVVRPQRQFFNNNAGNNIRNLAPRPVAVPAQQQPAKREQGNKPVVCFNCGDPGHYADKCPKPRRVKVVPAQNNSAVPTSKARVNHVAAAEAQDAPDVILGMFLVNSVPATVLFDSGATHSFLSMSFAGNHGMEVEDLRCPLMVSTPSNQALSLQRSPSVRIEIQGVPFLANLILLESKDLDVILGMDWLARHKGVIDCANRKVTLNSYDGRVVTVHALSSESLRSRLNQITLEEIPIVREYPDVFPDDLPGMPPKRDIEFRIDLVPGTTPIHKRPYRMAANELAEVKRQVDDLLQKGYIRPSSSPWGAPVIFVEKKDHTQRMCVDYRALNDVTIKNKYPLPRIDDLFDQLKGATVFSKIDLRSGYHQLRIKEEDIPKTAFTTRYGLFECTVMSFGLTNAPAFFMNLMNKVFMEYLDKFVVVFIDDILIYSRTKEEHEEHLRLALEKLREHQLYAKFSKCEFWLSEVKFLGHIISAGGVAVDPSNVESVTNWKQPKTVSEIRSFLGLAGYYRRFIENFSKIAKPMTRLLQKDVKYKWSEECEQSFQELKSRLISAPILILPDPKKGFQVYCDASKLGLGCVLMQDGKVVAYASRQLRPHEKNYPTHDIELAAVVHALKIWRHYLFGTRTEVYTDHKSLKYIFTQSDLNMRQRRWLELIKDYDMGIHYHPGKANVVADALSRKGYCNATEGRQLPLELCKEFERLNLGIVGRGFVAALEAKPTLIDQVREAQINDPDIQEIKKNMRRGKAIGFLEDEHGTVWLGERICVPDNKDLKDAILKEAHDTLYSIHPGSTKMYQDLKERFWWASMKREIAEYVAVCDVCQRVKAEHQKPAGLLQPLKIPEWKWEEIGMDFITGLPRTSSGHDSIWVIVDRLTKVAHFIPVKTTYSGSRLAELYMARIVCLHGVPKKIVSDRGSQFTSNFWKKLQEEMGSKLNFSTAYHPQTDGQTERVNQILEDMLRACALDFGGSWDKNLPYAEFSYNNSYQASLQMAPYEALYGRKCRTPLLWDQTGERQVFGTDILREAEEKVKIIQERLRVAQSRHKSYADNRRRDLSFEEGDYVYLRVTPLRGVHRFHTKGKLAPRFVGPYKIVSRRGEVAYQLELPQSLAGVHNVFHVSQLKKCLRVPTEEANIEQIEVQEDLTYVEKPIRILETNERRTRNRVIRFCKVQWSNHSEEESTWEREDELKSAHPHLFASSSESRGRDSV

SEQ ID NO: 26223 - protein, 1266 aa, Oryza sativa
  Clone ID: TF_OsC1713_4911.pep
MEGAVPPKPHLRLRSAPGRRVIRFLGSASRTTARLLIAMSGVAAATAGGGGTPPTGAGSGAGAPGGAVNDNNNGGNSASPSSGGPFSGYTLLLLLLLLALFLFPLLALSLYYVRYVLVPVLHNASSMLSCYWYVPVPDIHDAHSMLLVMLRSPYTAYAMIIALTFWIKICRLMTIFPTIQKPDRSFSVVGFAAALKPHAFDGSNYKRWKARALLWLTAMQCFYVSRGKRSEPPLSPEEEAKFEASDCLFRGALISVLADNIVDVYMHMPSGKDMWDALEAKFGVSDAGSELYVMEQFYDYKMVDDRSVVEQAHEIQMLAKELENNNCELPDKFVAGGIIAKLPPSWSDFATSLKHKRQEFSVPDLIGSLGVEEKARAKDVRGKKVEGGSSANMVQKKNPHASHNNKKVKPDVKPKAATNFKKKGKGKAKGDCFVCGKYGHWAKDCPERKDRKSANMVISEGGGTSGYGKILPTVLSVFHSPDWWVDTGANIHVGRGSSLLMGNGSLAAVHGVGTVDLKFTSGKTVQLKNVQHVPSIKKNLVSGSLLCREGFRLVFESNKCVVSKYGTFVGKGSKCHTCVQSKQPRKAHKASEARNLAPLELVHSDLCEMNGVLTKGGKKYFMTLIDDCTRFCYVYLLKTKDEALHYFKIYKAEVENQLERKIKRLRSDRGGEYFSNEFASFCEEFGIIHEMMPPYSPQSNGVAERKNRTLTEMVNAMLDTAGLSKEWWGEAVLTACHVLNKIPMKHKEVNVPIAKKRKLGPKTVDCVFFGYAIHSVGYRFLIVNSGVPDMHAGTILESRDATFFENEFPMKYTPSTSSKETVMPHEHFAPIEHNDQTPEENPEEDNIVDTRKRKRQRVAKSFGDDYIVYLVDDTPRTIEEAYSSPDADYWKEAVRSEMDSIMSNGTWEVVERPYGCKPVGCKWVFKKKLRPDGTIEKYKARLVAKGYTQKEGEDFFDTYSPVARLTTIRVLLALAASHGLLVHQMDVKTAFLNGELEEEIYMDQPDRYVLEGQEGMVCKLLKSLYGLKQAPKQWHEKFDTTLTSAGFVVNEADKCLYYRYGGGEGVILCLYVDDILIFGTSLNVIEEVKDYLSKSFEKKDLGEADVILNIKLQKGDEGGITLVQSHYVDKVLSRFGYSDCKPAPTPYDPSVLLRKNRRIVRDQLRYSQIIGSLMYLASATRPDISFAVSKLSRFVSNPGDDHWQALERVMRYLKGTTSYGIHYTGYPKVLEGYSDSNWISDADEIKATSGYVFTLGGGAVSWKSCK

SEQ ID NO: 26224 - protein, 936 aa, Oryza sativa
  Clone ID: TF_OsC1713_5111.pep
MSTTGDNNNTGDKEKEPPVNTNRGNTASNSSGGPLSGVLADNIVDVYMHMPSGKDMWDALEAKFGVFDAGSELYVMEQFYDYKMVDDRSVVEQAHEIQMLAKELENNNCELPDKFVAAGIIAKLPPSWSDFATSLKHKRQEFGVTDLIGSLGVEEKARAKDNRSKKIKGGSSANLVQKKNPHASHNNNKKVKPDVKPKATTNFKKKGKGKAKGDCFVCGKYGHWAKDCPECKDKKSASMVIGEGGGTLRYGKFLPTVLFVCHSPDWWVDTGANIHVGRCSSLLMGNGSLAAVHGVGYDSGGLFRFSLDDMCNKVVNHDEALHYFKIYKAEVENQTGKENQTVEYGIIHERTPPYSPQSNGVAERKNRTLTEMVNAMLDTAGLSKEWWGEAILTACHVLNRIPTKHKEVTQFEEWERKKLNLSHLRTWGYLAKVNVPIAKKRKLGPKTVDCVFLGYAIHSVGYRFLIVNSRVPDMRIGTITESRDATFFENEFPMKNAPSTSSQEPILSPEHFAPIEYIDQTLEENPVEDNIMDVKTAFLNGELEEEIYMDQPDGYVLESQEGMVCKLLKSLYGLKQAPKQWHEKFDNTLTSAGFVVNEADKCVYYRCGGGEGVILCLYVDDILIFGTSLNVIEEVKDFLSKSFEMTDLRVADVILNIKLLRGDEGGITLVQSHYVDKVLSRFGYSDCKAAPTPYDPRTMSYGIHYAGYPKVLEGYSDSNWISDADEIKATSGYVFTLGESFPGSVHLRAQVYGTSRCLRNSVRLRTCTGRRAIKFLGSASSATAPVLRDYYYCIDAFVNMSMEIGDKEVNDINGGNTASKSSGGTFLGEILLSGRKFTWANSMPSPTYKNAASASARAPPSLPRVQPSAAAAPVTAVAPEGHRQVRKVATVLIPSSVSAKDCRSAAAIDDPKTAAASTSLPSSSKPPVSCRVALYA

SEQ ID NO: 26225 - protein, 566 aa, Oryza sativa
  unsure (1)..(566): unsure at all Xaa locations
  Clone ID: TF_OsC359_7392.pep
MLFAKGFSVLPSSDFQLVLDGQLCEEEDVVNCLPKLRKTAXGSASEVEEAVKPAVKQDKRLRSVKVLSLVSNLSLPFVFPLSLSKPLQQMADNEKGNKVRSQDIGTSSSRVNEAPDTSCVAVVQHLINQNQLLIEILQQHRMPILNPSQMQHQVQLEAVQALTPQVSAPPTSQKAPHAMPHVDPKEASIICFMCDEQGHYARNCPQQKRKAPMRTEDEVRKMIITSTEWPPPGMTKHQRRNSSRGAQQLTEHLLANGGRVSGSEDSDQVSSDDEDAKSPQGFNQNKIELKACSRCGEIGHVASSCASTCVHCEEDHPPDRCPTSRITCFFCEGTDHVPKDCQFSFLLTKKMANQPASSNGEKHQGNTNPRQGHRFSLTPVPGQRNRNEKRKCRVREDICCFNCQGMGHFADKCPKPRNIAAGTSVHATPCNQKLAPQRIVIHASRSSPIARVATAPIPMNALPQGVNAQFQPQPPADKTGASICVVPLEVPIQQLRNQVQDEEPECKKVIVCYNCSEEGHYSKNCPQPRQNRPPHYRQFTRSRHSNRIVVTGANAVPVRPRVNQNP

SEQ ID NO: 26226 - protein, 645 aa, Oryza sativa
  Clone ID: TF_OsC359_7849.pep
MADNEKGNKVRSQDIGTSSSRVNEAPDTSCVAVVQHLINQNQLLIEILQQHRMPILNPSQMQPQVQLEAVQALTPQVSAPPTSQKAPHAMPHVDPKEASIICFMCDEQGHYARNCPQQKRKAPMRTEDEVRKMIITSTEWPPPGMTKHQRRDSFRGAQQLTEHLLASGGRVSDSEDSDQVSSDDEDEKSPQGFNQNKIELKACSRCGEIGHVASSCASTCVHCKEDHPPDRCPTSRITCFFCEGTDHVPKDCQFSFLLTKKMANQPASSNGEKHQGNTNPRQDHRFSLTPVPGQRNRNEKRKCRVREDICCFNCQGMGHFADKCPKPRNIAAGTSVHATPCNQKLAPQRIVIHASRSSPIARVATTPIPMSALTQGVNAQFQPQPPADKTEASICVVPLEVPIQQLRNQVQDEEPECKKVIVCYNCSEEGHYSKNCPQPRQNRPPHYRQFTRSRHSNRIVVTGANAVPAEPRAINLRRAIPSRRPSSASTSNQKEASPVNDSSMQSYHIITEPIEDAVTGTMPAISLQNQNEQPCLWFSVRYLSWCNRKFAAIIFMSINIDNLSEVDSEDMNHEKFWNGSITELPQPSLSQPKGAPWSKSGEEKIPSATGGQAKQFRVVKFCWKFVKTQRKKSDKKRSPPNLSSC

SEQ ID NO: 26227 - protein, 530 aa, Oryza sativa
  Clone ID: TF_OsC359_5515.pep
MRASKHSSLAGAGVLAPGDGTLVPVRYIPGFIRFMTGLTMVMSSADSHVPTSRLLPAEVETKSLEPHPGPPAEPAKGGLRGLPVRSPKLRQKVFARSPEKDEKQCPGSNQAPCQSTDKKDGTLQPNSGANRTVIWKMDNGRTMIITGSEFTPEDAARIPKRQRGRNTFRGARQLTRHLIKYGPPRPEDDESGERFSADDDDDNDDDNDDNDDATLDSFRERELKFKACARCGIVGHTASLCLPTCRCGEYTHYSNACPLRKVTCFLCEGTDHVPKDCQLNAVIAKTKKEQGTTVQPIRQPMTIDNSGHNPSALPPTPAPVEANHGRSNVTKDVHKSLLVPVSAAKVHNQKPAPRDQASRFCRNCHKPGHRFSDCPLPRAAKAVRRDSQVTSTAHDTNRHLNVQPPPQRIIVKGTVKGRIVPPAIVSSLQHQRQQGKQCQENNSSLQLQRGGTLPRQHPRQVLSATGRPTVVSSSNAPRIAPIWRPIDKSPLGNPTGKKILPVTADKTVAPPPSKINKQSNVPGETSGSRN

SEQ ID NO: 26228 - protein, 524 aa, Oryza sativa
  Clone ID: TF_OsC359_7154.pep
MVGLGWLGTSWDPGSGCQFGLNHRRPWVKAVLDGQLCEEEDVVSCLPKLRKTAGSASEAKEAVKPAVKQDKRLRSVKVLSLVSNLSLPFVFPLSLSKPLQQMAVNEKGNKVRSQDIGTLSSRVNEAPDTSCVTLVQHLINQNRLLIEILQQHQTPILNLSQIQPQVQLEAVQALTPQVSMPPASRRTQGDVPHVDPKEASNICFMCDEQGHYARERPQQKRKTPMRTEDEVRKMIITSTEWPPPGMTRRQRRNTFRGAPQLTEHLLANGGRVSDSEDSDQVSSDDEDEMECKACSRCGEIGHVASSCATICVHCEEDHPPDRCPTSRITCFFCEGIDHVPKDCQFSFLLTKKMANQPASSNGEKHQGNTNPRQDYSFSLTPVPGQRNQNERRKCRVREDICCFNCQGMGHFADKCPKPRNIAASTSVHAAPCNQKLAPQRIVIHASQSSPMARVATAPTPASALPQGVNAHFQPQQRIVVDGRSCVSPRPTPGQAKGNRPPEGDTKQKTVIRLNQQSEGNFSCE

SEQ ID NO: 26229 - protein, 859 aa, Oryza sativa
  Clone ID: TF_OsC359_6375.pep
MEMDEVGGRWTSVPEVPAVGGVGSVLLSMARMGWKLCHVFRPYAVVNKPNIHHNSKRLRSVKVLSLVSNLSLPFVFPLSLSKPLQQMADNEKGNKVRSQDIGTSSSRVNEAPDTSCVTLVQHLINQNRLLIEILQQHQTPILNLSQIQPQVQLEAVQALTPQVSMPPASRRTHGDVPHVDSKEASIICFMCDEQGHYARECPQQKRKTPMRTEDEVRKMIITSIEWPPPGMTKRQRRNTFRGAPQLTEHLLANGGRVSDSEDSDQVSSDDEDEKSPQGFNQNKMERKACSRCGEIGHVASSCATTCVHCEEDHPPDRCPTSRITCFFCEGTDHVPKDCQFSFLLTKKMANQPASSNGEKHQGNTNPRQDYSFSLTPVPGQRNQNEKRKCRVRKDICCFNCQGMGHFADKCPKPRNIAASTSVHATPCNQKLAPQRIVIHASRSSPIAPVATAPTPASALPQGVNAQLQPQPPVDNTEASIGIVPLDVPAQQPRNQNWNNPAGATNVQVPTVQQQCKLSEFLKTETPTFAIAVDPMEASDWLRTVEKKLGLVQCTDQERVVFATHQLISHVPAGMITLRKREFRYLNQEDLTVTEYLHEFHRLAHYAPEDVENDEDKQEKFLQALKDEIAVQLLLEEYEDFEKLVDKAIQLESEHNRMKNCKRRIVSIPVSSCGNQRQRTEPLQIIGSSVAHQEFPPQEDGHNADNNISNTNDDDTTNNHAPCPISDHSNQACNVNIIHQGVDDSIDDGTQNDNPSNCDSEKDSNGDSNYGTTDANVSKDFQPPIPTPSQNDRPQTDSSAKKTLICYNCKEPRHYSRDCLQPRQSRPPHYRQVTQSRHPNRIVVTGANTVPVRPRVNQNP

SEQ ID NO: 26230 - protein, 1933 aa, Oryza sativa
  unsure (1)..(1933): unsure at all Xaa locations
  Clone ID: TF_OsC359_6999.pep
MLDLGGKDGEIGNEDGASSKGTPSPKGATIPFDYRKLTIPSHNFVSVPSGRAPQFDGTHYAAWKHKMKLHLISLHPSIWKVVCTGIDVPHEDMELTSEKEQLIHRNAQASNAILSALSPEEFDKGSPAVREAKIELLEGRLGRFVMDDNETPQEMYDRMMILVNKIKGLGSEDMTNHFVVKRLLRAFGPRNPTLVSMIQERKDFKRLTPSDILGRIVSHKMQEEEAREVRQMVKNAAMIKNQEVALKAKQEEESSGEESEDEEMAFIVKRFKHFLRKSGYGKGRKVDDKGKRQSKRACFNCGEFGHFIADCPKSNEAKAKGGKKKLERAHVAEAHMAEVWYSGDEEDPEVKPKPKSKDKVEGEGGVATVTFKSSSSSKERLFNNLSDDDDDSYHYSCFMAQGRKVMTQKPSHTSLDVESSDEESDNELDDVLKSFSKPAMQHLAKLMRALDSTEQLLVRQEELLILEKKRNLALEESLAKESAKNKQLANELNFANGSLASLRDVNETLQEKFACLDKSHKVQIDTLWNSTSQPNVVSNSSNPSTSNGCARCYNIDLNSYATNIVAMQALKKENERLGTLVKYGCMKTYHSKDALYKTITAHPNKDGHGLGFSGGSPVSKRVMVNGKECLMFVREGKAPQASEVTNLVSSQGPGTSGQTGQNLRVGVSVSQKFPPGSSGQFARKFRANGRAQDITGSSEHNARRFWPDGLYYDSYVIFKNSEGKVVAYFNGNYNDEYRTCVWVPKALAYSSGGSSWVVDSGCTNHMTGERSMFTSLDEENGTRENIVFGDDGKGKLGYNCLFTDEDVTVFRRDDSSVAFKGKLKGDLYLVDFDVDRVNPEACLIAKSSMGWLWHRRLAHVGMRNLATLLKGEXSSGSLMSHLRKIRFAKQAQNLYDLTIKRVRSDNGGEFKNTQVEEFLDEVGIKHEFSAPYDPPQNGIVERKNRTLIEAARSMLDEYKTSDIFWAEAVSTACHAINRLYLHKILKKTSYELLSGKKPNVSYFRVFGSKCFILSKRPRSSKFSPKVDEGFLLGYESNAHAYRVFNKTSGIVEVTRDVTFDESNGFQGEQVVVHVVSDVDPSQAIGTKAIGDIRPVETQDDQEDRDQPSSSTSNSPKLSQVSVDPEVPGPDGRNLRTSPGQEVPGPSARKFRAEDSQGVPMAQVDGIDAEGTVEHPDQAQVPSVHHPRIHHTVQRDHPVDNILGDIRKGVTTRSRVASFCQHYSFVSSLESTRVEDALGDPDWVMAMLFQMDVKSAFLNGPISELVFVEQPPGFEDPKLPNHVYKLHKALYGLKQAPRAWYECLRDFLLKNGFEIGKADTTLFTKKFKSDLFICQIYVDDIIFGSTNASFCEEFSSIMTKRFEMSMMGELTFFLGLQVKQAQEGTFISQTKYVKDILKKFGMEDAKPIKTPMPTNGHLDLDDNGKCVDQKDVSGDESPPIRFPRGRLGKEKVVEGGSGSGTRTSPRFRRQTSNRPVQIRDVDSGQGSDAPSSRGRGRGGGRSSGAGRASHDFPVGSRENLVRLYKTIGFDTTPMHHIGRPKSNYLHQLAKCRRGRLIDPETQPEESQDPRFRTLTQLDWYNSVIMARDNLVVEMKWIDWTYMRKKNNEVFNQAMQVCHNKNLGDILALEYDWNEEVIAQFYATAFFGSTRKGTPYVKWMTEGVRHKISIAQFAEILGLEDEDLNRPNIHSEAPLPLIKTKFMYTKNAPRTCMGPTHGLHPNYKVLYSIFRWSLLPKVGDATALPSKHAHLLSRMRYNQPPFSVKLIWYEIANTILEPKRVAPRSIPSTSAGPSSSAPPPSSSSSPIKKALQAIFCMCAKTAKKVKKIERRQKEDRREAGKEVSDDSEDEVYVDPFEAYEAARNVAGEGPSTYFNEESSQSDDDDDDDDDEDDIDAAAEYVPTDVEEAVDTAAQSDESHLSGDTEIVPSDGDGDE

SEQ ID NO: 26231 - protein, 159 aa, Oryza sativa
  Clone ID: TF_LIB3434-029-P1-K1-D7.pep
VHQGAGATAGAEAEAEAGARARARARAGVAAGAGAEAEALGEKGCVVSVYHVAAAAAAVAVAQFVEENIAATGILYARIAGGLVTLLGIANLLLHATDAIFQDTSQQNALLKLFVGTASSLATLLPNARMTPCVTPAARQVIWHVIAQVQDLVSYATNV

SEQ ID NO: 26232 - protein, 231 aa, Oryza sativa
  unsure (1)..(231): unsure at all Xaa locations
  Clone ID: TF_OsC103556_1.pep
VHQGAGATAGAEAEAEAGARARARARAGVAAGAGAEAEALGEKGCVLFCQSPRLDPPQPPRDLICKNCRRPGHFARDCQSTATCNRCNLPGHFAAECTSETVCWNCKQSGHIATECKNDALCHTCSKTGHLARDCPSSXLPGHIARECTNEPVCNLCNVSGHLARNCQKTTISSEIQGGPFRDITCRLCGKPGHISRNCMTTMICGTCGGRGHMSYECPSARMFDRGLRRF

SEQ ID NO: 26233 - protein, 792 aa, Oryza sativa
  unsure (1)..(792): unsure at all Xaa locations
  Clone ID: TF_OsC1713_4732.pep
MDNTGNKGYGNDGSDDSRTQASGNEKSINKTSPELIQIVVNQTNMLATAFQLLQNWNNPAGTTNVQVPTVQQQCKLSEFLKTEPPTFAIAVDPMEASDWLRTIEKKLGLIQCTDQERVGFATPQLVGPASEWWDSYEASRPEGHTITWNEFSSVFRRSHVPAGMITLRKXEFRYLKQGDLTVTKYLHEFYRLAHYAPEDVETDEDKQEKFLQGLKDELAVQLLLEDYXDFEKLVDKAMQLESEHNRMTNCKRRIVNIPVFPCGNQRQRTEPLQITGSSVVHQEFLPQEDGRNADNNTSNTNDDDTTNNHGSCLISDHSNKACNVSSIHQDVNDSINVGIQNDNLSNFDTEKDSNGDSNYGTTDANVSKDFQPPIPTPSQNDRPQMDSSTKKTLICYNCKEPGHFSRDCPQPKRNLRHHSGHYARRRQVTRLVVTGANAIPVSLKGSKPKDLIVPRSVRNPXKEYHLLEISRKDSSRKKSIREIKNSVLEINSKTSSIRIRXQRLAPIFGGPQTSPASLMEPRSPAPASPSSSSTSPPAAPSTAPVHQPALPSPPSASPHRPPPRLLLGFAGTPSQRRPLHPLHRQCPFGRPFHLPGSSACCTSTIFGIAAATSSSASPPLXRTPPVSVVVFTVHPRRLAVSRRRLRRRHRSGVFHAILASVQPLPAALVVSSLAPVVVVVVLSSFPVVVAFVPPSSRSRXRPRFVKCAAAPSSSSSSPPRRQASCRPCLAFVPGSLPKSFPRRXAAPVRRCRSHASSRGGKDPSSRCPVLVLLVSPRTRCAVVDPGTRVPVS

SEQ ID NO: 26234 - protein, 803 aa, Oryza sativa
  unsure (1)..(803): unsure at all Xaa locations
  Clone ID: TF_OsC359_5625.pep
MDNTGNKGYGNDGSDDSKTQANGNEKSINETSPELIQIVVNQTNMLATAFQLLQNRNNPAGATNVQVPTVQQQCKLSEFLKTGPPTFAMAVDPMEASDWLRTVEKKLGLIQCTDQERVGFATHQLVGPASEWWDSYEASRPEGHTITWNEFSSVFKRSHVPAGMITLRKREFRYLKQGDLTVAEYLHEFYRLAHYAPEDVETDEDKQEKFLQGLKDELAVQLLLEDYEDFEKLVDKAMQLESEHNRMTNCKRRMVNNPVFPGGNQRQRTEPLQITGSSVVYPEFLPQEDGRNADNNTSNTNNDDTTNNHGSCPISDHSNKACNVGSIRQDVNDSINVGTQNDNLSNXFDTEKDSNGDSNDGTADANVSKGFQPPIPTPSHNDHPQMDSSAKKTLICYNCKEPGHFSRDCPQPKRNLRHHSGHYARRRQVTRLVVTGANAVPVSLKGSKPKDLIVTRSIHNSRSEEYLVDKVDXQRYELCKVLELKPHLQVPQPSRSQLKXNQGQVSCPLSLGQPSVSRGKHRRRVLAGVQXVATTSPPPAASATSPERRPTPPPPSSAPRRRSHPRHHLLLARTSPEHRRXAGFSFLLGGSTGRXTSTTSGIAAARSXLGIISPPSKPLRGPSSSSPIVLVVDVPSVARLVVSRRRLRHRHRSGVFHVILAAVQPLPAALVASSPAPVVVVLVLSSFSVVVAFVPPSSRSRSSSSLXSRSLQPPSSSSSSPPRRQASRRPRLAFVQGSPPKPSPRRSSPLRPSVSAAPVRRCRSHASSRGGKVPSXRCPVLVLSVSPXARCAVVGPGTRVSAS

SEQ ID NO: 26235 - protein, 482 aa, Oryza sativa
  unsure (1)..(482): unsure at all Xaa locations
  Clone ID: TF_OsC359_6528.pep
MDNTGNKGYGNDGSDDSRTQANGNEKSINETLPXLIQIVVNQTNMLATAFQLLQNRNNPAWATNVQVPIVQQQCKLSEFLKTGPPTFAIAVDPMEANDWLRTVEKNLGLIQCTDQERVVFATHQLVGLASEWWDSYEVSRPEGHTITWDEFLAVFKRSHVPAGMITLRKXEFRYLKQEYLTVIEYLHEFHRLAHYAPEDVETDEDKQEKFLQGLKDELAVQLLLEDYEDFEKLLDKAIQLESEHNQMKNCKRRIVNIPVIPCGNQRQRTEPLQITGSSVAHQEFLPQEDGYNADNNISNTNDDDTTTNHGSCPISDHSNQACNVNNIHQDVDDSINEGTQNDNPSNCDSEKESNGDSNYGTTDANVSKDFQPPIPTPSQNDRSQTDSSVKKKLICYNCKEPGHFSRDCPQPKRNLRHHSGHYARRRQVTRLVVTGANAIPVSLKGSKPKDHIATRSIHNSQSEEYLVEKVDTQDMNYEKFSN

SEQ ID NO: 26236 - protein, 527 aa, Oryza sativa
  unsure (1)..(527): unsure at all Xaa locations
  Clone ID: TF_OsC359_6849.pep
MDNTGNKGYGNDGSDDSRTQANGNEKSINETSPELIQIVVNQTNMLATAFQLLQNRNNPAGATNVQVPTVQQQCKLSEFLKTGPPTFAMAVDPMEASDWLRTVEKKLGLIQCTDQERVGFATHQLVEPASEWWDSYEASRPEGHTITWNEFSSVFKRSHVPAGMITLRKREFRYLKQGDLTVTEYLHEFYRLAHYAPEDVETDEDKQEKFLQGLKDELAVQLLLEDYEDFEKLVDKAMQLESEHNRMTNCKRRIVNIPVFPGGNQRQRTEPLQITGSSVAHQEFPPQEDGRNADNNTSNTNDDDTTNNHGSCPISDHSNKACHVSSIHQDVNDSINDGTQNDNPSNWDSGKDSNGDSNNGTTDANVSKDSQPPIPTPSQNDRPQMDSSVKKTLICYNCKEPGHFSRDCPQPKRNLRHHSGHYARRRQVTRLVVTGANAVPVSLKGSKPKDLIVTRSIHNSRSEEYLVDKVDAKDMNYEKXSGTEVPSSSATIQSKSARGATREKSGEEKIPSITGDRAKQSRVEKFC

SEQ ID NO: 26237 - protein, 501 aa, Oryza sativa; identical to SEQ ID NO: 20478
  Clone ID: TF_OsC359_6888.pep

SEQ ID NO: 26238 - protein, 449 aa, Oryza sativa; identical to SEQ ID NO: 20483
  Clone ID: TF_OsC359_7436.pep

SEQ ID NO: 26239 - protein, 482 aa, Oryza sativa
  Clone ID: TF_OsC359_7475.pep
MDNTGNKGYGNDGSDDSRTQANGNERSINETSPELIQIVVNQTNMLATAFQLLQNWNNPAGATNVQVPTVQQQCKLSEFLKTGPPTFAMAVDPMEASDWLRTVEKKLGLIQCTDQERVGFATHQLVGPASEWWDSYEASRPEGHTITWNEFSSVFRRSHVPAGMITLRKREFRYLKQGDLTVTEYLHEFYRLAHYAPEDVETDEDKQEKFLQGLKDELAVQLLLEDYEDFEKLVDKAMQLESEHNRMTNCKRRIVNIPVIPGGNQRQRTEPLQITGSSVVYQEFLPQEDERNADNNTSNTNADDTTNNHGSCPISDHSNKACNVSSIHQDVNDSINVGTQNDNLSNFDSEKDSNGDSNNGTTDANVSKDFQPPIPTPSQNDRSQTDNSAKKTLICYNCKEPGHFSRDCPQPKRNLRHHSGHYARRRQVTRLVVTGANAVPVSRKGSKPKDLIVTRSIHNSRSEEYLVDKVDSKDMNYAKFWN

SEQ ID NO: 26240 - protein, 473 aa, Oryza sativa
  Clone ID: TF_OsC359_7477.pep
MSWQRVGALLLGAQSRLPVPGVPAVGGIGSVLLSMARMGWKLCHVFRLYTVVMDNPGNQGYGNDGSDDSRTQANGNERSINATSPELIQVVVNQTNMLATAFQLLQNWNNPAGATNVQVPTVQQQCKLSEFLKTEPPTFAIAVDPMEASEWLRTIEKKLGLIQCTDQERVGFATHQLVGPASEWWDSYEASRPEGHTITWNEFSSVFRRSHVPAGMITLRKREFRYLKQGDLTVTEYLHEFYRLARHAPEDVETDEEKQEKFLQGLKDELAVQLLLEDYENFEKLVDKAMQLESEHNRMTNCKRRIVNIPVFPGGNQRQRTEPLQIIGSSVGYHEFLPQEDERNVDNNNIIHQDIDDSINEGTQNGNPSNFDSEKDSKGDSNNGTTDANVSKDFQPPIPTPSQDDRSQADNSAKKTLICYNCKEPGHFSRDCPQPKRNLRHHSGHYARRRQVTRLVVTGANVIPVRPRVNHNP

SEQ ID NO: 26241 - protein, 549 aa, Oryza sativa; identical to SEQ ID NO: 20467
  Clone ID: TF_OsC359_7569.pep

SEQ ID NO: 26242 - protein, 595 aa, Oryza sativa
  unsure (1)..(595): unsure at all Xaa locations
  Clone ID: TF_OsC359_7686.pep
MSNGANEGYTSCGPVVEMSYGGGLVXMLGAQFCLPVPGIPAVGRIGSVLLSKARMGWKLCHIFTTGSKAMDSTGNKGYGNDGSDDSRTQANGNEKSINETSPELIQVVVNQTNMLATAFQLLQNRNNPAGATDVQVPTVQQQCKLSEFLKTGPPTFAMAVDPMEASDWLRTVEKKLGLIQCTDQERVGFATHQLVGPASEWWDSYEASRPEGHTITWNEFSSVFRRSHVPAGMITLRKREFRYLKQGDLTVTEYLHEFYRSAHYAPEDVETDEDKQEKFLQGLKDELAVQLLLEDYEDFEKLVDKAMQLESEHSRMTNCKRRMVNNPVFPGGNQRQRTEPLQITGSSVVYQEFLPQGDERNADNHNSNTNADDTTNNHGSGPISDHSNKACNVSSIHQDVNDSINVGTQNDNLSNFDSEKDSNGDSNYGTTDANVSKDFQPPIPTPRHNDHPQMDSSAKKTLICYNCKEPGHFSRDCPQPKRNLRHHSGHYARRRQVTRLVVTGANAVPVSLKGSRPKDLIATRSIHNSRSEEYLVTKVDSKDMNYAKFWNXAPSSSAATQSKSAKGSTRDKSGEEKIPSATGDRAKQSRVKKFC

SEQ ID NO: 26243 - protein, 791 aa, Oryza sativa; identical to SEQ ID NO: 20491
  Clone ID: TF_OsC359_7766.pep

SEQ ID NO: 26244 - protein, 658 aa, Oryza sativa
  unsure (1)..(658): unsure at all Xaa locations
  Clone ID: TF_OsC359_7894.pep
MDNTGNKGYGNDGSDDSRTQANGNEKSINETSPELIQIVVNQTNMLATAFQLLQNRNNPAGATNVQVPTVQQQCKLSEFLKTGPPTFAIAVDPMEASDWLRTIEKKLGLIQCTDQERVGFAAHQLVGPASEWWYSYEASRPEGHTITWNEFSSVFKRSHVPAGMVTLRKQEFRYLKQGDLTVTEYLHEFYRLAHYAPEDVETDEDKQEKFLQGLKDELAVQLLLEDYEDFEKLVDKTMKLESEHNRRTNCKRRIVNIPVFPGGNQRQRTEPLQITGSSVAHQEFPPQEDGRNADNNTSNTNDDDTTNNHGSCPISDHSNKACNVSSIHQDVNDSINVGNQNDNLSNFDSEKDSNGDSNYGTTDANVSKDFQPPIPTPSHNDRPQMDSSVKKTLICYNCKEPGHFSRDCPQPKRNLRHHSGHYARRRRVTRLVVTGANAVPVSLKGSKPKDLIVTRSIHNSRSEEYLYEVDAKDMNYEKXSGTEVPSSSATIQSKSARGATREKSEWRSFASPRRKLAGTVPPPATSGIGATVLPPAGCCSSPVRRSTPPSPPSTPRHRLLPRHHLLLARISPERRRXRAGLTFLLVDISSGCPGRRARASADVAVSSLGDAASPSTPACPRFRRNVAANLSVRLAGVVRPPVPPRRVPVGHLHHHLRH

SEQ ID NO: 26245 - protein, 811 aa, Oryza sativa
  unsure (1)..(811): unsure at all Xaa locations
  Clone ID: TF_OsC359_7944.pep
MDNTGNKGYGNDGSDDSRTQANGNEKSINETSPELIQIVVNQTNMLATAFQLLQNWNNPAEATNVQVPTVQQQCKLSEFLKTEPPTFAIAVDPMEASDWLRTIEKKLGLIQCTDQERVGFATHQLVGPASEWWDSYEASRPEGHTITWNEFSSVFRRSHVPAGMITLRKREFRYLKQGDLTVTEYLHEFYRLAHYAPEDVETDEDKQEKFLQGLKDELAVQLLLEDYGNFEKLVDKAMQLESEHNRMTNCKRRIVNIPVFPCGNQRQRTEPLQITGPSVVHQEFPPQEDGRNADNNTSNTNDDDTTNNHGSCPISDHSNKACNVSSIHQDVNDSINVGTQNDNLSNVDTEKDSNGDSNYGTTDANVSKDFQPPIPTPSQNDRPQMDSSVQKTLICYNCKEPGHFSRDCPQPKRNLCHHSGHYARRRQVTRLVVTGANAVPVSLKGSRLKYHIVTKSIHNSRSEEYLVDKVDAKDMNYEKXSGTEVPSSSATTQSKSAKRCTLXKSATSSPSVSPPFRGESTGDAFSPAXSGVAATVPPPAATVAFPVRRPTSPPPPSAPRRRPPPRLLLGFAGTPSPRRPLHPLRRRRPFGHPFLLVGXVAPLHHHLLQHRSSAFHAVPSSAQPLLPAIIVSSSPFVLXIDVTSVAWLIVSRRRLRRRHRSGVVRAILASVQPLPAALIASSPAPVVAVVVLSSFPVVVAFVPPSSRSRPSSAFVKRTAAAPSSSSSSAPRRQASCRPRLAFVQGSPPKPSPRRSSPLCPSVSAAPVRRCRSHASSRGGKVPSXRCPVLVLSVSPVPVVRLSTPVPMYRCR

SEQ ID NO: 26246 - protein, 690 aa, Oryza sativa
  Clone ID: TF_OsC359_8145.pep
VIWQRVGALLLGAQFCLPVPGIPAAGGIGSVLLFMARMGWELCHVFRPYTVVMDNTGNKGYGNDGSDDSRTQANGNEKSINKTSPELIQKVVNQTNMLTTAFQLLQNWNNPAGATNVQVPTVQQQFKLSEFLKTEPPTFAIAVDPMEASDWLRTVEKKLGLIQCTDQERVGFATHQLVGPASEWWDSYEASRPEGHTITWNEFSSVFKRSHVPAGMITLRKREFRYLKQGDLTVTEYLHEFYRLARYAPEDVETDEDKQEKFLQGLKDELVVQLLLEDYEDFEKLVDKAMQLESEHNRMTNCKRRIVNIPVIPGGNQRQRTEPLQITGPSVVHQESPPQEDGRNADNNTSNTNDDDTTNNHGSCPISDHSNKACNVSSIHQDVNDSINVGTQNDNLSNFDTEKDSNGDSNYGTTDANVSKDFQPPIPTPSHNDHPQMDSSAKKTLICYNCKEPGHFSRDCPQPKRNLRHPSGHYARRRQVTRLVVTGANAVPAASQRTSSSPEASAIHIKEYHLLEISRKMIDKKRLAKMFSSIKEVGRKVIDKQKHALHRSRKTPDCNCPATVTLSLSKQDDLGKSVSMKARSEIFNSVSDATRSEKCKHRLPVDNLSEVDSEDMNHEKFWNGSITELPQPSLSQPKGAPWSKSGEEKIPSATGGQAKQFRVVKFCWKFVKTQRKKSDKKRRPPNLPSC

SEQ ID NO: 26247 - protein, 1947 aa, Oryza sativa
  Clone ID: TF_OsC1713_5408.pep
MKKLKKEGKKIEAFIGEWNSNEESSASSGSEEEGGDDASSKKKKMAVVAIKEAPSLFAPLCLMAKGSSKVASLSDSESDDDCDDVSYDELVSMFEKLHAYSEKEIVKFKALEKDHASLEVLYEELKTSHERLTISYEKIKEAHDNLLSTTQHGAHIDVGISCDLLDDSASSHIPHVASSSISTSCDDLMDMPSSSYSSCVSICDASLVVENNELKEQVAKLNKSLERCFKGKNTLDKIFSEQRCILNNKGLGYIPKKGKKPSHRVTRFVKSNGKYCSKCHEVGHLVNDCPGSKPSKTCMFDSHYMLKKAHDGSIVARYVGSPILGGKKNAIWVPKALVSNLQGPKQVWVNYRIGGSHWVLNSGCIQHMTGDRAMFTIFEVGGKEQEKVTFRDNSKGKEEIALLARRCFECGEKGHFASKCPSKDDDGDKSSKKKSGGYKLMKKLKKEGKNIEAFIGEWDSNEESSASSGSEEEGGDDASSKKKKMAVVAIKEAPSLFAPLCLMAKDSSKVAFLSDSESDDDCDDVSYDELVSMFKELYAYSEKEIVKFKARKKDHASLEVLYEELKTSHERLTISHEKLKEAHDNLLSTTQHGVLIDVGISCDLLDDSAICHIAHVVSSSISTSCDDLVDMPSSSSSTCVSICDASLVVENNELKEQVVKLNKSLEMCFKGRLMMVALLLDMWVPLYSVVNYRTGGSHCVLDSGCTQHMTGDRAMFTIFEVGGKEQEKVTFGDNSKGKVIGLVAKTSMGWLWHRRLAHVCVNQLSKLSKRDLVVGLKDVKFEKDKLCSACQAGKQVACSHPTKSIMSTSRPLELLHMDLFGPTTYKSIGVERKNRTLIEMAMTMLDEYGVSDSFWAEAINTACHATNWLYLHRLMKKTFYERIIGRKPNVAYFRVFGCKCYIYQKGVRLTKFESRCDEGFLLGYASNSKAYRVYNKNKGIVEETADVQFDETNGSQEGHKNLDDVGDEGLMRAMKNMSIGDVKPTEVEDKPSTSTQDEPSTSATPSQAQVEVEEEKAQDPPMPPRIHTALSKDHPIDQVLSDISKGVQTRSRVASICEHYSFVSCLEPKHVDEALCDPDWMNAMHEELNNFARNNVWTLVERLRDHNVIGTKWVFRNKQDENGLVVRNKARLVAQGFTQVEGLDFGETFAPVARLEAIRILLAFALCFDIKLFQMDVKSAFLNGEIAELVFVEQPPGFEDPKNPNHVYKLSKALYGLKQAPRAWYERLRDFLLSKDFKIGKVDTTLFTKIIGDDFFVCQIYVDDFIFGSTNKVFCKGFGDMMSREFEMSMIEELSFFLGLQIKQLKDGTFVSQTKYIKDLLKRFGLEDAKPIKTPMATNGHLDLDEGGKPVDLKLYRSMIGSLLYLTASRPDIMFSVCMCARFQAAPKECHLVAVKRILRYLKHSSTIGLWYLKGAKFKLVGYSDSDYAGCKVDRKSTFGSCQMLGRSLVSWSSKKQNSVALYRRGGICFGGNYILIFGQNEIFLQNEIEREFEKSFKTKLRWSDRARSAVDGLTELGRRSDRHVDGGLTGRYPPQMPPRTRHSRREPTPDPVSEESSGDEYAQSDEEVEANVEGASEEESGDDVSGSGEDEDEGSDDMHIDPSIQFVVNMRNPSQYTILRHHDQFLRPRDTRNPRFHTAFQKMWVAGDYSEMKWMSDTLQCSISRRQFWRLLSIRLDFGDDLHEEHTHNPLSIDYVSQFYEDGVWYTHGKVAGLRTIPCVVNRIVRVTILPRLGNNDDIRGVAWHVIDAIIQGHQFDIVSLMMQEIAISKATFTQGIYYAPYIMRLIQDKLGAVGQNLKKHKQYKPRLQLGAPRAPRAAPSSHPGASSSSAPPPPHGYDPNAFFYPQYAYFGMQPNEYFNPVLGAINTLSESIQRLSTGHEALHENVRGLRTDVGDLNASVGRLHTRVGTLDSRVQMLESSQAFVYHRRRDAPHPSTSARPPPLQE

SEQ ID NO: 26248 - protein, 839 aa, Oryza sativa
  unsure (1)..(839): unsure at all Xaa locations
  Clone ID: TF_OsC359_7994.pep
RRRRRGFRRIPPSPRTIKRGKSLPVIPSLFSPAFPSLSPSGSFGFAPAIFAGASMAPEMAAAVSFPSGLSLSLPALYNRSPXSLLRFRRSPLALPVGIKPAPSSSLSAVAAELRFAAVVAPDLLPLRRRLLRLRRVFVDLVRSFVSPADRRSAAVLVDPNRAAASRRFGRRFRHRRRPGVSRGPPLRFPLLSSLSAAAPPXPMAAAGDHRGAGAPPPVGRAGEAAFGRAPWLPGGARPSAARARXVRLTRGTHGAGRLCLINLQNKPNIHHNSKRLRSVKVLSLVSNLSLPFVFSLSLSKPLQQMANNEKGNKVRSQDIGTSSSRVNEAPDTSCVTLVQHLINQNRLLIEILQQHQTPILNLSQIQPQVQXRQSKHSHHESACRQHPERPMVTCHMLTQKKQARECPQQKRKTPMRTEDEVRKMIITSTEWPPPGMTKRQRRNTFRGAPQLTEHLLANGGRVFDSEDSDQVSSDDEDEMERKACSRCGEIGHVASSCATTCVHCEEDHPPDRCPTSRITCFFCEGTDHVLKDCQFSFLLTKKMANQPASSNGEKHQGNTNPRQDYSFSLTPVPGQRNQNEXRKCRVREDICCFNCQGMGHFADKCPKPRNIAAGPSVHATPCNQKLAPQRIVIHASRSSPIARVATAPTPASALPQGVNAQFQPQPSVDKTEAXSALYLWMFQHSSQXNQVQDEEPEQDHPPGECPTRKVTCFLCEETNHVPKDCQLSVLLTKTAEIQRTTLRLSHQLVSSNSNIDDIIHSTNAPPAPPNSATNHSTNTFSTNHSLHRQPQQRIVVDGRSCFSXPTPGRAKGNQPQEGDTKQKTVIRFNQQSEGSFSCE

SEQ ID NO: 26249 - protein, 896 aa, Oryza sativa
  Clone ID: TF_OsC359_7971.pep
MAPGGASPGAPGPPWTTLQLRKIRSSWKLKPTFGKASKASHIILEHIESQWTKSGSMDISRTNEGYTSCGPVVEMSWHRAGVLLLGAQSCLPVPEVPAVGGIGSVLLSMARMGWELCHVFRPYTVVNKPNIHHNSKRLRSVKVLSLVSNLSLPFVFPLSLSKPLQQMADNEKGNKVRSQDIGTSSSRVNEAPDTSCVTLVQHLINQNRLLIEILQQHQTPILNLSQIQPQVQLEAVQALTPQVSMPPASQKTDGGVPHVDSKEASIICFMCDEQGHYARNCPQQKGKTPMRTEDEVRKMIITSTEWPPPGMTKRQRRNTFRGAPQLTEHLLANGGRVSDSEDSDQVSSDDEDEKSPQDCQFSFLLTKKMANQPASSNGEKHQGNTNPRQDYSFSLTPVPGQRNQNEKRKCRVREDICCFNCQGMGHFADKCPKPRNIAASTSVHATPCNQKLAPQRIVIHASRSSPIARVTTAPTPASALPQGVNAQFQPQPPVDKTEASIGIVPLDVPAQQPRNQNWNNPAGATNVQVPTVQQQCKLSEFLKIETPTFAIAVEPMEASDWLRTVEKKLGLIQCTDQERVVFATHQLVGLASEWWDSYEASRPEGHTITWDEFSSVFKRSHVPAGMITLRKREFRYLKQEDLTVTEYLHEFHRLAHYAPEDVENDEDKQEKYLQGLKDEIAVQLLLEEYEDFEKLNCKRRIVSIPVFPCGNQRQRTEPLQITGSSVAHQEFPPQEDGHNADNNISNTNDDDTTNNHASCPISDHSNQACNVNIIHQGVDDSINDGTQNDNPSNCDSEKDSNGDSNYGTTDANVSKDFQPPIPTPSQNDRPQTDSSAKKTLICYNCKGPGHYSRDCLQPRQSRPPHYRQFTRSRHPNRIVVTGANAVPVRPRVNQNP

SEQ ID NO: 26250 - protein, 247 aa, Oryza sativa; identical to SEQ ID NO: 20574
  Clone ID: TF_OsC34615_1.pep

SEQ ID NO: 26251 - protein, 863 aa, Oryza sativa; identical to SEQ ID NO: 20577
  Clone ID: TF_OsC359_7184.pep

SEQ ID NO: 26252 - protein, 1235 aa, Oryza sativa
  unsure (1)..(1235): unsure at all Xaa locations
  Clone ID: TF_OsC1528_1980.pep
MAGFADALRPDKFTGVHFKRWQIRVTLWLTAMKCFWVSTGKPEGVLTAEQQKQFEEATTLFVGCILSVLGDRLVEVYMHMTDAKELWDALNTKFGATDASNDLYIMEQFHDYKMADNRSVVEQAHEIQTMAKELELLKCVLPDKFVAGCIIAKLPPSWRSFGTALKHKRQEYSVEGLIASLDVEEKAREKDAASKGDGGQSSANVVHKAQNKSKEKYKAQQTTNFKKQKKNNNNPNQDERTCFVCGQVGHLARKCPHRKGMKAPAGQTSKSANVTIGNTGDGSGYGXRGSTVLMGNGSHASVHGVGTVDLKFTSGKIVQLKNMQHVPSIDRNLXYECGGLFRFSLSDFCNKYVNHICGSVDDEANVWHSRLCHINFGLMSRLSSMCLIPKFFIVKGSKCHSCVQSKQPRKPHKAAEERNLAPLELLHSDLCEMNGVLTKGGKRYFMTLIDDATRFCYVYLLKTKDEALDYFKIYKAEVENQLDRKIKRLRSDRGGEFFSNEFDLFCEEHGIIHERTPPYSPESNGIAERKNRTLTDLVNAMLDTAGLPKAWWGEALLTSNHVLNRVPNRNKDKTPYEIWIGRKPSLSYLRTWGCLAKVNVPITKKRKLGPKTVDCVFLGYAHHSIAYRFLIVKSEVPDMHVGTIMESRDATFLESFFPMKDTHSGSNQPSEIIPSSITPPEQTEHTHELVSEEDVSEAPRRSKRQRTAKSFGDDFTVYLVDDTPKSISKAYASPDADYWKEAVRSEMDSIIANGTWEVTERPYGCKPVGCKWVFKKKLRPDGTIEKYKARLVAKGYTQKEGEDFFDTYSPVARLTTIRVLLSLAASHGLLVHQMDVKTAFLNGELDEEIYMDQPDGFVVEGQEGKVCKLLKSLYGLKQAPKQWHEKFDKTLTSAGFAVNEADKCVYYRHGGGEGVILCLYVDDILIFGTNLQVINEVKSFLSQNFDMKDLGVADVILNIKLIRGENGINLLQSHYVEKILNRFGYIDSKPSPTPYDPSLLLRKNKRIARNQLEYSQIIGSLMYLASATRPDISFAVSKLSRFTSNPGDDHWRALERVIRYLKGTVELGLHYTGYPAVLEGHSDSNWISDVDEIKATSGYVFTLGGGAVSWRSCKQTILTRSTMEAELTALDTATVEAEWLRDLLMDQPVVEKPVPAILMNCDNQTVIVKVNSSKDNMKSSRHVKRRLKSVRKLRNSGVITLDYIQTARNLADPFTKGLSRNVIDNASKEMGLRPM

SEQ ID NO: 26253 - protein, 559 aa, Oryza sativa
  unsure (1)..(559): unsure at all Xaa locations
  Clone ID: TF_OsC359_6691.pep
MSHLEGDEYLEEKGDASSTKETGSKGATIHFDYIKLNVPPHNFVSVPSGRAPHFDGTHYAAWKHKMKLHLISLHPSIWKVVCTGIDVPNDDMELTSEQEQLIHRNAQASNTILSALSPKEFNKFDGLEEAKEIWDTLQLAHEGSPAVREDKIELLEGRLGRFVMDDKETPQEMYDRMMILVNKIKGFGSEDMTNHFVVKRLLRAFGPRNPTLVSMIRERKDFKRLTPSDILGRIVSHEMQEEEAREVRQMVKNAAMIKNQEVALNAKQEEESSXKKRFKHFLLKSGYGXGRKDDDKGKRQSERACFNCGEYGHFIADCPKTNEAKAKGDKKKPERAHVVKAHMVEVWYSEDEEASEDKPKPKPKDKIEGEGGIATVAFKSSSSSKECLFNNLSDDDDDSYHYSCFMAQGRKVMTQKPSHTSLDDDSSDEETSLRDVNETLQEKFAILDKSHKDLEVQLDTLWSSTSQPNVVSNSSNPSTSNGCARCYNIDLTSYATNVDAMQALKKENERLGTLVKYGCMKTYHSKDALYKTITAHPNKDGHGLGFSGGMSRPDKFIPK

SEQ ID NO: 26254 - protein, 1450 aa, Oryza sativa
  Clone ID: TF_OsC359_7135.pep
MELTSEQEQLIYRNAQASNAILSALNPEEFNKVDGLEEAKEIWDTLQLAHEGCPAVREAKIELLEGRLGRFVMDDKETAQEMKDFKRLTPSDILGRIVSHEMQEEEAREVRQMMKNAAMIKNQEVALKAKQEEESSCEESEDEEMAFIVKRFKHFLYKSGYGKGRKDDDKGKRQSKRACFNCGEYGHFIADCPKSNEANAKGGKKKPERAHVAEAHMAEVWYFGDEEDPEVKPKPKSKDKVEGEGGVATVAFKSSSSSKERLFNNLSDDDDDSYHYSCFMAQGRKVMTQKPSQTSLDVDSSDEESDNELDDVLKSFSKPAMQHLAKLMRALDSKEQSLERQEELLILEKKRNLVLEESLAKECAKNKQLANELNLANGSLASLRDVNETLQEKFANLDKSHKDLEVQFDTLWNSTSQPNVVSNSSNPSTSNALKKENEKLCTLVKYGCIKTYHSKDALYKTITAHPNKDGHGFGFSGRSPVSKRVMVNGKECLMFVREGKAPQASEVTGLVSCQGPGTSGQTGRNLRVGVSVSQKFPPESSGRFAKKFRANGRAQDMTGSSGHNARRFRPDGLYYDSYVISKNLEGKVGAYFNGNYNDEYRTCVWVPKALAYSSGGSSWVVDSGCTNHMTGERSMFTSLDEENGTRENIVFGDDGKGKLQFIIRFSIMDDSSVAFKGKLKGDLYLVDFDVDRVNPEACLIAKSSMGWLWHHRLAHVGMQNLATLLKGEHILGLTNVTFEKDRVCSACQAGKQVGNPHPIKNIMTTTRPLELLHMDLFGPVAYISIGGNKYVFVIVDDFSRFTWVYFLHDKSKAQDVFKRFAKQAQNLYDLTIKRVRSDNGGEFKNTQVEEFLDEEGIKHEFSAPYDPPQNGIVERKNRTLIEAARAMLDEYKTSDVFWAEAVSTACHAINRLYLHKILKKTSYELLSGKKPNVSYFRVFGSKCFILSKRPCSSKFSPKVDEGFLLGYESNAHAYRVFNKTSGIVEVTRDVIFDESNGSQGEQVVVHVVGDVDPSQAIGTKAIGDIRPVETQDDQEDRDQPPSSTSNSPTSVVSAEPEVPGPIDRNLRTSPGPEVPGSTVRNLRTSGSEDVPTAQVDGIDAAGTLEVEDELGDPDWVMAMQEELNNFIRNQVWTLVERPDQNVIGTKWIFRNKQDEHGVVVRNKARLYQMDVKSAFLNGPISELVFVEQPPGFEDPKLPNHVYKLHKALYGLKQAPRAWYECLRDFLLKNGFEIGKADTTLFTKKFENNLFICQIYVDDIIFGSTNASFCEEFSSIMTKRFEMSMMGELTFFLGLQVKQAQEGTFISQTKYVKDIVKKFGMEDAKPIKTPMPTNGHLDLDENGKCVDQKVYRSIIGSLLYLCASRPDIMLSVCMCARFQAEPKECHLIAVKRILRYLVHTPNLGLWYPKGCDFELLGYSDSDYAGCKVDRKSTTGTCQFLGRSLVSWSSKK

SEQ ID NO: 26255 - protein, 1381 aa, Oryza sativa
  unsure (1)..(1381): unsure at all Xaa locations
  Clone ID: TF_OsC359_7430.pep
ASPCCNEEFGISSKXEHILGLSNVSFEKDRVCSACQAGKQVGSPHPIKNIMTTTRPLELLHMDLFGLVAYISIGGNKYGFIIVDDFSRFTWVYFLHDKSEAQDVFKRFAKQAQNLYDLTIKRVRSDNGGEFKNTQVEKFLDEEGIKHEFSAPYNPPQNGIVERKNRTLIEAARAMLDEYKTSDVFWAEAMSTACHAINRLYLHKILKKTSYELLSGKKPNVSYFHVFGSKCFILSKRPRSSKFSPKVDEGFLLGYESNAYAYRVFNKTSGIVEVTRDVTFDESNGSQGEQVVVHIVGDVDPNQAIGTKAIGDIRPVETQDDQEDRDQPPXSSTSNSPTSAVSAEPEVPGPIDWNLRTSPGPEVPGSTVXTSGSVAVKTCQWHKVEDALGDPDWVMAMQEELNNFTRNQVWTLVERPKQNVIGTKWIFRNKQDEHGVVVRNKARLFQMDVKSAFLNGPISELVYVEQPPGFEDPKLPNHVYKLHKALYGLKQAPRACFEIGKVDTTLFTKKFKSDLFICQIYVDDIIFGSTNASFCEEFSSIMTKRFEMSMMGELTFFLGLQVKQALVGIFISQTKYVKDILKKFGMEDAKPIKTPMPTNGYLDLDDNGKCVDQKVYRSMIGSLLYLCASRPDIMLSVCMCARFQAEPKECHLIAVKRILRYLVHTPNLGLWYPKGCGFELLGYSDSDYAGCKVDRKSTTGTCQFLGRSLVSWSSKKQNSIALSTAEAEYVAAGSCCAQLLWMRQTLKDFGYNFTKIPLLCDNESAIKIANNPIQHSRTKHIDIRHHFLRDHETKGDICLTHVRTESQLADIFTKPLDEKRFCELRSFHFQIFEFSSIPLNLGLTALCSVRPEVPVTPVRNFRGSGAGNSGVLGPELPVSVQPASNLDFATVSFNHCTPTLLILVAVVIMPREKRQKLSQDVPADSSPPVRGPRGRLGKEKVGDFYSGSQIPIHSRRASSIVIRDAPRSPSPAASDSDDGGNEDEPGSESNPLRLYKTRAVDPDPKRPRVNYLKNLLKCGRDRMVDWYNSVIMGRSHPVVEMKWLDWQYMSSKNNIVFNEVRKVCERKHVADLLALQYSWNEEVIGQFYSTAFFGTTKKGLDFVKWTIQGQQYRVSMAQFAAALGLDDDDLSRPHIFVEDALSPTSTTFMYEKDAPKDCLGTTRGLRPYYRVLYSIFRWSLLPKVGDATALPGRHALLLSRMRYNKPDFSIMKLIWSEIYETVCEPKRGFIYAPYIMKMIEAKTGICYFKDNQHKPFRPHAPTTSATPTTRVTRASTSAAPSFSAAPQRSESSSPIKKALRAIFCMCAKTAKSDEGPSGTSRFFNEESSHSEESSDDEESDAPTENAPTDPNEAVDAAGQDIDSPHSGDTEIIPSDGDNDEA

SEQ ID NO: 26256 - protein, 570 aa, Oryza sativa; identical to SEQ ID NO: 20683
  Clone ID: TF_OsC359_7882.pep

SEQ ID NO: 26257 - protein, 1978 aa, Oryza sativa
  unsure (1)..(1978): unsure at all Xaa locations
  Clone ID: TF_OsC359_8323.pep
MLDLGGKNGENGNEDEASSKGTPPPKGATIPFDYSKLTIPSHYFVSMPSGHTPQFDGTYYDAWKHKVKLHLISLHPSIWKVVCTGIDIPHDDMELTSGQEQFIHRNAQASNAILSALSPEEFNKVDGLEEAKEIWDTLQLAHEGSPAVREAKIELLEGRLGRFVMDVKETPQEMYDRMMILVNKIKGLGXRLLRAFGPRNPTLXSMIRERKHFKRLTPSDILGRIVSHEMQEEEAREVRQMVNNAAMIKNQEVALKAKQEEESSCEESEDEEMAFIVKRFKHFLRKSGYDKGRKDDDKGKRQSKRACFNCGEYGHFIADCPKSNEAKAKGGKKKPERAHVAEAHMAEVWHSGDEEDPEVKPKPKSKDKVEGEGGVATVAFKSSSSSKECLFNNLSDDDDDSYHYSCFMAQGRKSFSKPAMQHLAKLMRALDSKEQSLERQEELLILEKKRNLALEESLAKECAKNKQLANELNLANGSLASLRDVNETLQEKFANLDKSHKDLEVQFDTLWNSTSQPNVVSNSSNPFTSNGCARCYDIDLNSYATNIDAMQALKKENERLSTLVKYGCMKTYHSKDVLYKTITAHPNKDGHELGFSGGSPVPKRVMVNGKECLMFVREGKAPQASEVTGLVSCQGPGTSGQTGRNLWVGVSVSQKFPPGSSGRFARKFRANGRAQDMTGSSGHNARRFQPDGLYYDSYVISKNSEGKVVAYFNVNYNDEYRTCVWAYSSGGSSWVVDSGCTNHMTGERSMFTSLDKENGTRENIVFGDDGKGKLGYNCLFTDEDVTVFRRDDSSVAFKGKLKGDLYLVDFDVDRVNPETCLIAKSSMGWLWHRRLAHVGMRNLATLLKGEXSSGSLMSHLRKIRFAKQAQNLYDLTIKRVRSDNGGEFKNTQVEEFLDEVGIKHEFSAPYDPPKNGIVERKNRTLIEAARAMLDKYKTSDIFWAEAVSTACHAINCLYLHKILKKTSYELLSGKKPNVSYFRVFGSRCFILSKRPRSSKFSPKVDEGFLLGYESNAHAYRVFNKTFGIVEVIRDVTFDESNGSQGEQVVVHVVGDVDPSQAIGTKAIGDIRPVETQDDQEDRDQPSSSTSNSPTSSQESVDPEVPGPDDRILRTSPSQEVPGPSARKFRAEDSQGVPVDGIDAEGTVEHPDQAQVPSVHHPRIHHTVQRDHPVDNILGDIRKGITTRSRVANFCQHYSFVSSLEPTRVEDALGDTDWVMAMQEELNNFTRNQVWTLLERPDQNIIGTKWIFRNKQDEHRVVVRNKVRLVAQGFTQVEGLDFGETFAPVARLESIRILLAYAAHHDFRLFQMDVKSAFLNRPISELVYVEQPPGFEDPKLPNHVYKLHKALYGLKQAPRACSIMTKRFEMSMMGELTFFLGLQVKQAQEGTFISQTKYVKDILKKFGMEDAKPIKTPMPTNGHLDLDDNGKCVDQKVYRSKSVCMCAHFQAEPKECHLIAVKRILRYLVHTPNIGLWYPKGCDFELLGYSDSDYAECKVDRKSTTGTCQFLGRSLVSWSSKKQNSIALSTAEAEYVAAGSCCAQLLWMKQTLKDFGYNFTKIPLLCDNESTIKIANNPVQHSRTKHIDIRHHFLRDHETKGDICLTHVRTESQLADIFTKPLDEKRFCELRISTMPREKRQKASQDVSGDKSPPIRFPRGRLGKEKVVDXGSGSSTRTCPRFTXVIMARENPVVEMKWIDWAYMRKKNNEVFNQVMQVCHNKNLGDILALEYDWNEEVIAQFYATAFFGTTRKGTPYVKWLTEDDEDLNRPNIHSEASLPMIKTKFMYAKDAPRTCMGSTHGLHPNYKVLYSIFHWSLLPKVGDATALPSKHAHLLSRMRYNQPPFNVMKLICPFLAECLKEFHSTYDDELLQWNGAELMTRVIRNMSDKADDNSGHLDIKFEPSVAFYPISSTDITRYFSEADSTDERAQHDALFSRIVNDSTTFHLWNSITSSLVPEPNSLVERILNRYCLHCLDVL

SEQ ID NO: 26258 - protein, 449 aa, Oryza sativa
  Clone ID: TF_OsC9918_3.pep
MKDTESIDEFAGKISGLANKLSDLGVTMDDDEQVKKLLDSVPDKFLHVIAAIEQFSDLDSMPFDEAIGRLKAYEERIRKRDDKNGEHLLFTSGDTSGGRSRVKKPDRSKTMCYYCQELGHFAYECPEKKKKKEIALLAAASSFAQGSSVWQQRIRAKRRDSNNWYQSQFMPKILRFNKMAIVEHSASRSMREGGVSLPYPVLTSTNYSTWAIKMEANMEAQGIWDAIEPAADEAVEKKKDKQARACLFGAVPEEVLQQIAKKKTAKEAWESLKTRFLGVERVKKARVQTLKSEFKALRMKDTETIDEFAGKISGLANAMSGLGATMTDDELVKKLLDSVPEKFLHIIAAIEQFCDLDTMPFEEAIGRLKAFEERIRKHSDNYGEQLLLTTRNTDDGAGRARSKRFDKSKVMCYHCQELGHFAFECPAKKKNKEIALLATASSDDEPTLL

SEQ ID NO: 26259 - protein, 1475 aa, Oryza sativa; identical to SEQ ID NO: 20622
  Clone ID: TF_OsC1528_1921.pep

SEQ ID NO: 26260 - protein, 1484 aa, Oryza sativa
  unsure (1)..(1484): unsure at all Xaa locations
  Clone ID: TF_OsC1528_2034.pep
MSDARSRRSVASSTRRQQDAELAAAEERRRATAQTAAAAARAARLAAAELAAARAEAEAEAAEDAARAAEVEVETLRISINGSIAGDITADRELEELARGRARERAERWAAAHLHGGGGGPRDRAPANGNPDGRGRAGGSPEPARGPRRQCGSFSPDRRHGHHGVQTVVRDFGPGGGWPTLTKTNYIEWAAVMRVRLQVRHMWEAVRXPPEMQFSLSQKRTAKEAXDAITAACIGSDRARKSTLQAXRKEWENLAFKPGEDVDDFALRLNTLLQKMVQYGDDTYDEERAVEKLFRCVPEKYRQIARSIESLLDLSTMSIEEALGRLKVVDGDEPQPLSGPITIGGKLHLTREQWEASQGDGRKGESSSPTGGRKPRKARGGVQLRWARRRAEGGARRGAQGVATGNHKPARDDACRNCGKLGHWAKDCRQPRRGQAHVARVEEEPALLLAHASIELPPAAPAAAAFLHLDEPKVLVSLCNGSSNDKADGWYLDTGATHHMTGRREFFTEFDSSVRGSVKFGDASGVEIKGVGSVTFTAKSGEHRLLTGVYYIPALRNSIISVGQLDENGSRVLVEDGLMRIWDRRRRLLAKVTRGTNRLDILNVQVAQPVCLAAHRDDEAWQWHERFGHLHFEALKQLSAKEMVRGMPCLDHVEQLCDVCVVTKQRRLPFPQQTSFRAKERLELVHGDLCGPVTPATPGGRRYFLLLVDDLSRYMWVMVLGSKGEAADAIRHAQAAAKAECGRKLRVLRTDNGGEFTAAEFASYCADEGIQRHYTTPYSPQQNGVVERRNQTVVGMARALLKQRGMPAIFWGQAVVTAAYILNRSPTKALDGRTPYEAWHGRKPAVSHLRVFGCLAFAKELGHIGKLDDRSTPGVFIGYAEGSKAYRILDPETQRVRTARDVVFDEGRGWVWDKAVDDGSTPTYDDFTVEYVHFEGAGGVGSSSSPSVSTPAPESPPTPTPTHPRATTSTTTSSSSTQPQPVTPHAPAPTATPPSTSTPTPARVERSPVEFATPLSHDGERIDAYHDGEQLRYRTMEDLLGDQPVPGLVPRDLEAQLHLACDDGEPRSFVEAEKHAAWRAAMQSEMDAVQENRTWELADLPRGHRAITLKWVFKLKRDEAGAIIKHKARLVARGFVQQEGIDYDDAFAPVARMESVRLLALAAREGWGVHHMDVKSAFLNGDLKEEVYVHQPPGFVIPGKEGKVLRLHKALYGLRQAPRAWNAKLDSTLKGMGFEQSPHEAAIYRRGNGGNALLVGVYVDDLVITGTKDAEDNSGITLRQTAYAKRVVELAGLTDCNPALTPMEERLKLSRDSTAEEVDATQYRRLVGSLRYLTHTRPDLAFSVGYVSRFMQRPTTEHQQAVKRIIRYVAGTLDHGLYYPRCPGKAHFVGYSDSDHAGDIDTSKSTSGILFFLGKCLVSWQSVKQQVVALSSCEAEYMAASAASTQALWLARLLSDLLGRDTRTVELRVDSKSALALAKNPVFH

SEQ ID NO: 26261 - protein, 1355 aa, Oryza sativa
  Clone ID: TF_OsC1528_2045.pep
MRVRLQVRHMWEAVRYGDVDYDEDRQALDALIAAVPPEMQFSLSQKRTAKEAWDAITTARIDSDRARKSTLQALRKEWENLAFKPGEDVDDFALRLNTLLQKMVQYGDDTYDEERAVEKLFRCVPEKYRQIARSIESLLDLSTMSIEEALGRLKVVDGDEPQPLSGPITIGGKLHLTREQWEASQGDGRKGESSSSTGGRKPRKVRGGVQLRWARRRAEGGARRGAQGVATGNHKPARDDACRNCGKLGHWAKDCRQPRRGQAHVARVEEEEPALLLAHASIELPPAAPAAAAFLHLDEPKVLVSLCNGSSNDKADGWYLDTGATHHMTGRREFFTEFDSSVRGSVKFGDASGVEIKGVGSVTFTAKSGEHRLLTGVYYIPTLRNSIISVGQLDENGSRVLVEDGLMRIWDRRRQKNAKVTGGTNRLYILSAQVAQPVCLAARRDDEAWQWHERFGHLHFEALKQLSAKEMVRGMPCLDHVEQLCDVCVVTKQRRLPFPQQTSFRAKERLELMHGDLCGPVTPATPGGRCYFLLLVDDLSRYMWVMVLGSKGEAADAIRHAQAAAEVECGRKLRVLRTDNGGEFTAAEFTSYCADEGIQRHYTMPYSPQQNGVVERRNQTVVGMARALLKQRGMPAIFWGETVVTAAYILNRSPTKALDGRTPYEVWHGRKPAVSHLRVFSCLAFAKELGHIGKLDDRSTPRVFIGYAKGSKAFRILDPETQRVRTARDVVFDEGRGWVWDKAVDDGSTPTYDDFTVEYVYFEGAGGVGSSSSPSVSTPAPESPPTPTPTHPRATTSTTTSSSLTPPQPVTPHAPAPTATPPSTSTPTPARVERSPVEFATPLSHDGERIDAYHDGEQLRYRTMEDLLGDQPVPVPRDLEAQLHLACNDGEPRSFAEAEKHAAWRAAMQSEMDAVQENRTWELADLPRGHRAITLKWVFKLKRDEAGAIVKHKARLVARGFVQQEGIDYDDAFAPVARMESEGWGVHHMDVKSAFLNDNLKEEVYVHQPPGFVIPGKEGKRGNGGNALLVGVYVDDLVIAGTKDAEVAAFKEEMKATFQMSDLGPLSFYLGIEVHQDDSEITLRQTAYAKRVVELAGLTDCNPALTPMEERLKLSRDSTAEEVDATQYRCLVGSLRYLTHTRPDLAFSVGYVSRFMQRPTMEHQQAVKRIIRYIAGTLDHGLYYPRCPGKAHFVGYSDNDHAGDIDTNKSTSRILFFLGKCLVSWQSDKQQVVALSSYEAEYIAASAASTQALWLARLLSDLLGRDTGTVELRVDSKSALALAKNPVFHERSKHIRVRYHFIRSYLEEGSIKASYINTKDQLADLLTKPLGRIKFLELCSRIGMAQLAHKTTHKT

SEQ ID NO: 26262 - protein, 1600 aa, Oryza sativa; identical to SEQ ID NO: 20623
  Clone ID: TF_OsC1528_2070.pep

SEQ ID NO: 26263 - protein, 2605 aa, Oryza sativa
  Clone ID: TF_OsC1528_2158.pep
MALERRLAYAALIPFLLLALPILPSDSPSGGGGGGAGGGGGGGETLDPPAAKYVVRFVEYRPADEHREYLEDGLRGAARPPPAASWRWVERRNPAAAFPTDFAVLEIRDACRAAVVDAVSALGRVRDVHADASYSRGVLSADRPRQQGKLFTAMSFEGEEGGGDREVGCSTDSNNSSSAGWRRKLLVQRSQVTSLFGAERLWGRGFTGRKVKMAIFDTGIRADHPHFRNIKERTNWTNEDTLNDNLGHGTFVAGVIAGQDAECPGFAPDTEIYAFRVFTDAQISYTSWFLDAFNYAIATGMDVLNLSIGGPDYLDLPFVEKDAELAAAEERRRATAQTAAAAARAARLAAAELAAARAEAEAEAAKDAARAAEVEVETLRSSINGSIAGDITADRELEELARGRARERAERWAAAHLHGGGGGPRDRGPANGNPDGRGRAGGSPEPARGPRRQRGSFSPDRRHGHHGVQTVVRDFGPGGGWPTLTKTNYIEWAAVMRVRLQVRQMWEAVRYGDVDYDEDRRALDALIAAVPPEMQFSLSQKRTAKEAWDAIAAARIGSDRARKSTLQALRKEWENLAFKPGEDVDDFALRLNTLLQKMVQYGDDTYDEERAVEKLFRCVPEKYRQIARSIESLLDLSTMSIEEALGRLKVVDGDEPQPLSGPITIGGKLHLTREQWEASQGDGRKGESSSPTGGRKPRKARGGVQLRWARRRAEGGARRGAQGIATGNHKPARDDACRNCGKLGHWAKDCRQPRRGQAHVARVEEEEPALLLAHASIELPPAAPAAAAFLHLDEPKVLVSLCDGSSNDKADGWYLDTGATHHMTCRREFFTEFDSSVRGSVKFGDASGVEIKGVGSVTFTAKSGEHRLLTGVYYIPALRNSIISVGQLDENGSRVLVEDGLMRIWDRRRRLLAKVTRGTNRLYILSAQVAQPVCLAARRDDEAWQWHERFGHLHFEALKRLSAKEMVRGMPCLDHVEQLCDVCVVTKQRRLPFPQQTSFRAKERLKLVHGDLCGPVTPATPGGRRYFLLLVDDLSRYMWVMVLGSKGEAADAIRRAQAAAEAECGRKLRVLRTDNGGEFTAAEFASYCADEGIQRHYTAPYSPQQNGVVERRNQTVVGMARALLKQRGMPAIFWGEAVVTAVYILNRSPTKALDGRTPYEAWHGHKPAVSHLRVFGCLAFAKELGHIGKLDDRSTPGVFIGYAEGSKAYRILDPETQRVRTARDVVFDEGRGWVWDKAVDDGSTPTYDDFTIEYVHFEGAGGVGSSSSSVSTPAPESPPTPTPTHPRATTSTTTSSSSTPPQPVTPHAPAPTATPPSTSTPTPARVERSPVEFATPLSHDGERIDAYHDGEQLRYRTMEDLLGDQLVPGLVPRDLEAQLHLACDDGEPRSFAEAEKHAAWRAAMQSEMDAVQENRTWELADLPRGHRAITLKWVFKLKRDEAGAIVKHKARLVARGFVQQEGIDYDDAFAPVARMESVRLLFALAAQEGWGVHHMDVKSAFLNGDLKEEVYVHQPPGFVIPGKEGKVLRLHKALYGLRQAPRAWNAKLDSTLKGMGFEQSPHEAAIYRRGIGGNALLVGVYVDDLVITGTKDAEVAAFKEEMKATFQMSDLGPLSFYLGIEVHQDNSGITLRQTAYAKRVVELAGLTDCNPALTPMEERLKLSRDSTAEEVDATQYRRLVGSLRYLTHTRPDLAFSVGYVSRFMQRPTTEHQQAVKRIIRYVAGTLDHGLYYPRCPGKAHFVGYSDSDHAGDIDTSKSTSGILFFLGECLVSWQSIKQQVVALSSCEAEYMAASAASTQALWLARLLSDLLGRDTGAVELRVDSKSALALAKNPVFHERSKHIRVWELTANNIIMVSAIGNDGPLYGTLNNPADQSDVIGVGGIDYNNHIASFSSRGMTTWELPHGYGRVKPDVVAYSRDIMGSKISTGCKTLSGTSVASPVVAGVVCLLVSVIPEEHRKSILNPATMKQALVEGASRLSGPNMYEQGAGKIDLWQSYEILKSYQPRASIFPNTLDFTDCPYFWPFCRQPLYAGAMPVVFNATILNGMGVIGYVKDPPVWQPSEDVGNILSVHFTYSDVIWPWTGYLALHLQVKDEGSQFSGIISGKVTLSIYSPAAHGESSPRSSSCVLYLKVKVVPTPVRSRRILWDQFHNIKYPSGFVPRDSLNVHNDILDWHGDHLHTNFHILFNMLRDAGYYIETLGSPLTCFDASNYGTLLMVDLEDEYFSEEIQKLKDDVVHKGLGVVVFAEWYHVDTMVKMTFFDENTRSWWTPITGGANVPALNELLAPFGIAFGDKVLSGDFSINGEQTHYASGTDIVQFPAGGFLHSFQLQDNSKISQDNSRSADTQNTPDKSKCLLVCGSVHMLSSILGMMEAGKGRVAVYGDSNCLDSSHMVTNCYWLLRKLVEFTGNRIKDPVLFSESAQLKFPVFESIHQLSRRPDVNFSTYSTVVGNELICHQDSRFEVWGTKGYGTQQTGTTRKLPEYQKSEAYNISTPIASDSTPDEAGLQRNISTPIASKFDKRMDYFGFLGHEENSGSLYAVQFVHTLSNSKIDIGMLVASQWMVPCFAATACLMLYLSCRVQQKRRRRKKGSTAARLSSMDRMV

SEQ ID NO: 26264 - protein, 1441 aa, Oryza sativa
  unsure (1)..(1441): unsure at all Xaa locations
  Clone ID: TF_OsC1528_2206.pep
SSNIWELEELARGRARERAEXGGGGPRDRAPADGNPDGRGRAGGSPEPARGPRRQRGSPSPDRCHGHHGVQTVVRDFGLGGGWPTLTKTNYIERAAVMRVRLQVRHMWEAVRYGDVDYDEDRRALDALIAAVPLEMQFSLSHKWTAKEAWDAIAVARIGSDRARKSTLQALRKEWENLAFKPGEDVDDFALRLNTLLQKMVQYGDDTYDEERAVEKLFRCVPEKYRQIARSIESLLDLSTMSIEEALGRLKVVDGDEPQPLSGPITIGGKLHLTREQWEASQGDGRKGESSPSTGGRKPCKARGGVQLRWARRRAEGGARRGAQGGAAGNHKPARDDACRNCGKLGHWAKDCRQPRRGIELSPAAPAATAFLHLDEPKVHAFLGNSSSNDKADGWYLDTGATHHMTGRREFFTELDSSVRGSIKFGDASGMEIKGVGSVTFTAKSGEHRLLTGVYYIPVLRNSIISVGQLDENGSRVLVEHGVMTIWDRRRRLLAKVTRGTNRLYILSAQVAQPVCLAARRDDEAWQWHERFGHLHFEALKWLSAKEMVRGLPCLDHVEQLCDVCVLTKQRRLPFPQQTSFRAKEQLELVHGDLCGPVTPATPGGRRYFLLLVDDLSRYMWVMVLGSKAEAADAIRRAQAAAEVECGRKLRVLRTDNGGEFTAAEFASYCADEGIQRQYTAPYSPQQNGVKRRNQTVVGMARALLKQRGMPAIFWGEVVVTAVYILNRSPTKALDGRTPYEAWHERKPGVSHLRVFGCLAFVKELGHIGKLDDRSTPGVFIGYAEGSKAYRILNSETQRVRTARDVVFDEGRGWVWDKAVDDGSTPKYDDFTVEYVHFEGAGGVGNSSSPSVSTPVPEPPPTPTPTHSRATTSTTTSSSPTPPQPVTPRAPAPTATPPSTSTPTPASVERNPVEFATPLSHDGERIDAYHDGEQLRYRTMEDLLGDQPVPGLVPPDLEAQLHLACDDGEPRSFAEAEKHVAWRAAMQSEMDAVQENRTWELADLPRGHRAITLKWVFKLKRDEAGAIVKHKARLVARGRLGVHHMDVKSAFLNGDLKEEVYVHQPPGFVIPGKEGKVLRLHKALYGLRQAPRAWNAKLDSTLKGMGFEQSPHEAAIYRRGNGGNALLVGVYVDDLVITGTKDAEVAAFREEMKATFHMSDQGPLSFYLGIEVHQDDSGITLRQTAYAKRVVELARLTDCNPALTPMEERLKLSRDSTTEEVDATQYRRLVGSLRYLTHTAGLGLLRRLRQSAVKRIIRYVAGTLDHGLYYPRCPGKAHFVEYSNSNHAGDIDTSKSTSGILFFLGECLVSWQSVKQQVVALSSCEAEYMAASAASTQALWLARLLSDLLGRDTGAVELRVDSKSALALAKNPVFHEWSKHIWVRYHFIRSYLEEGSIKASYINTKDQLADLLTKPLGRIKFLELCFRIGMAQLPHKTTHKT

SEQ ID NO: 26265 - protein, 1585 aa, Oryza sativa
  Clone ID: TF_OsC1528_2209.pep
ALSQQQQQHRLLLLPLSLPPLHAAAPRRCAMSDARSRRSVASSTRRQQDAELAAAEERKRATAQTAAAAARAARLAAAELAAAREEAEAEAAEDAAHAAEVEVETLRSSINGSIAGDITADRELEELARGRARERAERWAAAHLHGGGGGPRDRAPANGNPDGRGRAGGSPEPARGPCRQRGSLSPDRRHGHHGVQTVVRDFGPGGGWPTLTKTNYIEWAAVMRVRLQVRHMWEAVRYGDVDYDEDRRALDALIAAVPPEMQFSLSQKRTAKEAWDAIAAARIGSDRARKSTLQALRKEWENLAFKPGEDVDDFALRLNTLLQKMVQYGNDTYDEERAVEKLFRCVPEKYRQIARSIESLLDLSTMSIEEALGRLKVVDGDEPQPLSGPITIGGKLHLTREQWEASQGDGRKGESSSPTGGRKPRKARGGVQLRWARRRAKGGARRGAQGVATGNHKPARDDACRNCGKLGHWAKDCRQPRRGQAHVARVEEEEPALLLAHASIELPPAAPAAAAFLHLDEPKVLVSLCNGSSNDKADGWYLDTGATHHMTGRREFFTEFDSSVRGSVKFGDASGVEIKGVGSVTFTAKSGEHRLLTGVYYIPALRNSIISVRQLDENGSRVLVEDGLMRIWDRRRRLLAKVTRGTNRLYILSAQVAQPVCLAARRDDEAWQWHERFGHLHFEALKRLSAKEMVRGMPCLDHMEQLCDVCVVTKQRRLPFPPQMSFRAKERLELMHGDLCGPVTPATPGGRRYFLLLVDDLSRYMWVMVLGSKGEAADAIRRAQAAAEAECGRKLRVLRTDNGGDEGIQRHYTASYSPQQNGVVERRNQTGEAVVTAVYILNRSPTKALDGRTPYEAWHGHKPAVSHLRVFGCLAFAKELGHIGKLDDRSTPGVFIGYAEGSKAYRILDPETQRVRTVRDVVFDEGRGWVWDKAVDDGSTPTYDDFTIEYVHFEGAGGVGSSSSPSVSTPVPEPPPTPTPTHPRATTSTTTSSSSTPPQPVSPRAPAPTATPPGTSTPTPARVERSPVEFVTPLSHDGERIDAYHDGEQLRYRTMDDLLGDQPVPGLVPRNLEAQLHLACDDGEPRSFAEAEKHAAWRAAMQLEMDAVQENRTWELADLPRGHRAITLKWVFKLKRDEAGAIVKHKARLVARDFVQQEGIDYDDAFAPVARMESVRLLALAAQEGWGVHHMDVKSAFLNGDLKEEVYVHQPPGFVLPGKEGKVLRLHKALYGLRQAPRAWNAKLDSTLKGMGFEQSPHEAAIYRRGNGGKCLADAEVATFKKEMKATFQMSDLGPLSFYLGIEVHQDDSGITLRQTAYAKRVVELAGLTDCNPALTPMEERLKLSRDSTAEEVDATQYRRLVGSLRYLTHTRSDLAFSVGYVSRFMQQPTTEHQQAVKRIIRYVAGTLDHGLYYPRCPGKAHFVGYSDSDHAGDIDTSKSTSGILFFLGECLVSWQSVKQQVVALSSCEAEYMAASAASTQALWLARLLGDLLGRDTGAVELRVDSKSALALAKNPVFHERSKHIRVRYHFIRNYLEEGSIKASYINTKDQLADLLTKPLGRIKFLELCSRIGMAQLSHKTTHKT

SEQ ID NO: 26266 - protein, 240 aa, Oryza sativa
  Clone ID: TF_OsC10527_2.pep
MGSSDGDKPLRRIAASFEELEAVAKQQAPGPAMEVGSFARACSNVSVLFGCLGIAFKFAEMDYVAKASPRRHPRSLVFALPCPRGVRSAINCLLLPPFQVDDLLEASKSISKLPEMVELDIQKGTVRQAGSHTRNMLRVKRGIDMVKILFEQILVTEGNSLRDAASKAYAQVFAPHHGWAIRKAVAAGMYALPSKSQLLKKLNEDENSAKVQMQTFIRASGPVILYVEDLFTSRNLGMDW

SEQ ID NO: 26267 - protein, 692 aa, Oryza sativa; identical to SEQ ID NO: 20618
  Clone ID: TF_OsC1713_4329.pep

SEQ ID NO: 26268 - protein, 959 aa, Oryza sativa
  Clone ID: TF_OsC1528_1666.pep
MAAAVLPALRPTPPASNFPALLPTPPRSQMLPLLPTPCLIILPASFRAPPASDPKPGRADAVERWDARKEAGSSAASSSSSSSSSGLPCRADSCERWDAHKNKKAGGSAASSSSRARGGISPGRADSYERWDAHKTPGSPASSTGSSRSPCRADSVERWDSNKRPLSRASSAERWDINKKPRPKKDAVGSGKNNSTSQTTTMVSGTSAFDVLHREKTAIRFLGSASRDCSLFVRDGSPSSPLACFAPSSTLATASSSCRATGLSTTSIRVTLWLMVMKCFWVSTGKPEGILTADHQKQFEEATTLFVGCILSVLGDRLVKVYMHMTDAKELWDALNTKFGATDASNDLYIMEQFHDYKMADNRSVVEQAHEIQTMAKELELLKCVLPDKFVAGCIIAKLPPSWRSFGTALKHKRQEYSVEGLIASLDVEEKAREKDAASKGDGGQSSANVVHKVQNKSKGKYKAQQTTNFKKQKKNNNNPNQDERTCFVCGQPGHLARKCPQRKGMKAPAGQTSKSANVTIGNTGDGSGYVGTVDLKFTSGKIVQLKNVQHVPSIDRNLVSGSRLTRDGFKLVFESNKVVVSKHGYFIGKGYECGGLFRFSLSDFCNKSVNYICASVDDEANVWHSPSHGLLVHQMDVKTAFLNGELDEEIYMDQPDGFVVEVNEADKCVYYRHGGGEGVILCLYVDDILIFGTNLEVINEVKSFLSQNFDMKDLGVADVILNIKLIRGENEITLLQSHYVEKILNRFGYSDSKPSLTPYDPSLLLRKNKRIARNQLEYSQIIGSLMYLASATRSDISFAVSKLSRFTSNPGDDHWRALERVMRYLKGNMELGLHYTGYPAVLEGYSDSNWISDVDEIKATSGYVFILGGGAVSWRSCKQTILTRSTMEAELTALDTATVEAEWLRDLLMDLPIVEKPPVGAEPQPPAPHLPTPPAFSAPLRAPLRARVAAHLPHISRP

SEQ ID NO: 26269 - protein, 383 aa, Oryza sativa; identical to SEQ ID NO: 20670
  Clone ID: TF_OsC1528_1686.pep

SEQ ID NO: 26270 - protein, 1460 aa, Oryza sativa
  unsure (1)..(1460): unsure at all Xaa locations
  Clone ID: TF_OsC1528_1816.pep
MPLRRGALPPRAPLRPAPGGLCGRALLRRTCSLSWPATTGGAALRHTKYKNLADLYYAEDLVVDLISALYSYQMKNSRWKPVFALETGGPSNADSQDFEDDGGFLGRTRLGRLIQAAGRELLEKLNSARSNSPTKIFLVLFGFYTANALATILGQTGDWDVLVAGVVVAAIEGIGMLMYRKPMSRPPGRFQSLIAMVNYWKAGEAKVRECLGDRRRRGELDAGWEWWIVEGDELLLDIICHSPLGIGALLWVWRIHTVHAAAYSQRVTIQLPTMGLESRDATSGGDLRSRAKDDSYHNPQAPCKEELGAVTGQRRRKIRICFIVGNIPKNPVSTGKPMGVLNADQQKEFDEATTLFVGCIPSVLGDRLVEVYMHMTDAKELWDALNTKFGATDASNDLYIMEQFHDYKMADNRSVVEQAHEIQTMAKELELLKCVLPDKFVAGCIIAKLPPSWRGFGTALKHKRQEYSVEGLIASLDVEEKAREKDVASKGDGGQSTANVVHKAQNKSKGKYKAQQTTNFKKKNNNNNPNQDKRTCFVCGQPGHLARKCPQCKGMKAPAGQTSKSANVTIGNTGDGSGYGANVHVCADISLFSSYQVAWGSTVLIGNGSHASVHGVGTVDLKFTSGKIVQLKNVQHVPSIDRNLVSGSRLTRDGFKLVFESNKVVVSKHRYFIGKGYECGGLFCFSFSDFCNKSVNHICGSVDDEANVWHSRLCHINFGLMSRLSSMCLIPKFSIVKGSKCHSCVQSKQPRKPHKAAKERNLAPLELLHSDLCKMNGVLTKGGKRYFMTLIDDATRFCYVYLLKTKDEALDYFKIYKAKVENQLDRKIKRLRSDRGGEFFSNEFDLFCEEHGIIHERTPPYSPESNKIAERKNRTLTDLVNAMLDTAGLPKAWWGETLLTSNHVLNRVPNRNKDKTPYEIWIGRKPSLSYLRTWGCLAKVNVSITNKRKLGPKTVDCVFLGYAHYSIAYRFLIVKSEVPDMHVGTIMESRDATFFESFFPMKDTHSSSSQPSEIILSSITPPEQTEHTHEHVTEEDDSEAPRRSKRQRTVKSFGDDFTVYLVDDTPKSISEAYASPDADYWKEVVRSEMDSIIANGTWEVTERXYGCKHVGCKWVFKKKLRPDGTIEXSYGLLVHQMDVKTAFLNGELDEEIYMDQPDGFVVEGFAVNEADKCVYYRHGGGEGVILCLYVDDILIFGTNLEDLGVVDVILNIKLIRGENEITLLQSHYVEKILNCFGYIDSKPSPTPYNPSLLLRKNKRIARNQLEYSQIIGSPMYLASATRPDISFAVSKLSWFTSNPGDDHWRALERVMRYLKGTMELGLHYSGYPAVLEGYSDSKWISDVDEIKATSGYVFTLGGGAVSWRSCKQTILTRSTMEAELTALDTATVEAEWLHDLLMDLPIVEKPVLAILMNCDNQTVIVKVNSSKDNMKSSRHVKRRLKSVRKLRNSGVITLDYIQTA

SEQ ID NO: 26271 - protein, 893 aa, Oryza sativa; identical to SEQ ID NO: 20669
  Clone ID: TF_OsC1528_2002.pep

SEQ ID NO: 26272 - protein, 1083 aa, Oryza sativa
  unsure (1)..(1083): unsure at all Xaa locations
  Clone ID: TF_OsC1528_2106.pep
MAGFADALRPDKFTGVHFKRCRSNSRKPLFVGCILSVLDDRLVEVYMHMTDAKELWDALNTKFGATDASNDLYIMEQFHDYKMADNRSVVEQAHEIQTMAKELELLKCVLPDKFVAGCIIAKLPPSWRSFASLDVEEKAREKDAASKGDGGQSSANVVHKAQNKSKGKYKAQQTTNFKKQKKNNNPNQDERTCFVCGQPGHLARKCPQCKGMKAPAGQTSKSANVTIGNTGDGSGYGNLPTVFSVNQSTNWWVDTGANVARGSTVLMGNGSHASVHGVGTVDLKFTSGKIVQLKNVQHVPSIDRNLVSGSRLTRDKFKLVFESNKVVVSKHGYFNGKGYECGGLFRFSLSDFCNKSVNHICGSVDDEANVWHSRLCHINFGLMSRLSSMCLIPKFSIVKGSKCHRCVQSKQPRKPHKAAEERNLAPIELLHSDLCEMNGVLTKGEKRYFMTLIDDATRFCYVYLLKTKDEALDYFKIYKAEVENQLDRKIKRLRSDRGGEFFSNEFDLFCEEHGIIHERTPPYSPESNGIAEKKNRTLTDLVNAMLDTAGLPKAWWREALLTSNHVLNRVPNRNKDKTPYEIWIGRKPSLSYLRTWGCLAKVNVLITKKCKLGPKIVDCVFLGYAHHSIAYRFLIVKSEVPDMHVGTIMESRDATFFESFFPMKDTHSGSRQPSEIIPSSITPPEQTEHTHEHVSEEDVSEAPRRSKRQRTAKSFGDDFTVYLVDDTPKSISEAYASPDADYSKEAVHSEMDSIIANGTWEVTERPYRCKPVGCKWVFKKKLRLDGTIEKYKARLVAKGYTQKEGEDFFDTYSPVARLTTIRVLLSLAASHGLLVHQMDFSFIKWXVKTAFLNGELDEEIYMDQSDGXFAVNEADKCVYYRHGGGEGVILCLYVDDILIFGTNLEVINEVKSFLSQNFDMKDLGVADVILNIKLIRELGRNVLVHVRPRRSAGSSPQNTLFASARPCNDVMLKKLGGISPVRLFCDKANMRSAGRCDKPSGMELPRRFWSNSSCTIFVRFASDGGKWPESELWLSWSTVRFGNASSHRGMPPTIEVVVFEVRDVEGGAIVERVRYLAGERVVA

SEQ ID NO: 26273 - protein, 1355 aa, Oryza sativa; identical to SEQ ID NO: 20647
  Clone ID: TF_OsC1528_2166.pep

SEQ ID NO: 26274 - protein, 1508 aa, Oryza sativa
  Clone ID: TF_OsC1528_2167.pep
MAGFADTLRPDKFTGVHFKRWQIRVSTGKPEGVLTAEQQKQFEEATTLFVGCILSVLGDRLVEVYMHMTDAKELWDALNTKFGATDASNDLYIMEQFHDYKMADNRSVVEQAHEIQTIAKELELLKCVLPDKFVAGCIIAKLPPSWRSFNTALKHKRQEYSVEELIASLDVEEKAREKDAASKGDDGQSSANVVHKAQNKSKGKYKAQQTTNFKKQKNNNNNPNQDERTCFVCGQPGHLARKCPQRKGMKAPAGQTSKSANVTIGNTGDGNGNLVSGSRLTRDGFKLVFESNKVVVSKHGYFIGKGYECGGLFRFSLSDFCNKSVNHICGSVDDEANVWHSRLCHINFGLMSRLSSMCLIPKFSIVKGSKCHSCVQSKQPRKPHKAAEERNLAHLELLHSDLCEMNGVLTKGGKRYFMTLIDDATRFCYVYLLKTKDEALDYFKIYKAEVENQLDRNIKRLRSDRGGEFFLYEFDLFCEEYGIIHERTPPYSPESNGIAERKNRTLTDLVNAMLDTAGLPKAWWGESRDVTFFESFFPMKDTHSNSSQPSEIIPSSFTPPEQIEYTHEHVTEEDDSEAPRRSKRQRTTKSFGDDFTVYLVDDTPKSISEAYASPDADYWKEAVRSEMDSIIANGTWEVTERPYGCKPVGCKWVFKKKLRPDSTIEKYKARLVAKGYTQKEGEDFFDTYSPVARLTTICVLLSLAASHGILVHQMDVKTAFLNGELDEEIYMDQPDGFVVEGQEAKVCKLLKSLYSLKQAPKQWHEKFDRTLTSACFAVNETDKCVYYRHGGGEGVILCLYVDDILIFRTNLEVINEVKSFLSQKFDMKDLGVADVILNIKLIRGKNGITLLQSHYVEKILNHFGYIDSKPSPTPYDPNLLLRKNKRIARNQLEYSQIIGSLMYLASATRPDISFAVSKLSRFTSNPGDDHWRALERVMRYLKGTMELGLHYSGYPAVLEGYSDSNWISDVDEIKATSGYVFTLGGSAVSWRSCKQTILTRSTMEAELTALDTATVEAEWLRDLLMDLPIVEKPVPAILMNCDNQTVIVKVNSSKDNMKSSRHVKRRLKSVRKLRNSGVITLDYIQTTRNLADPFTKGLSRNVIDNASKEMGLRPIEDAVLQSILERTHLCELDCWSQSMKILGESSRKLTKDLGDCGHCGRALAAHAAGLQQCASAALRLRRQPAKAADCIHMLVLVPCILLLIACPFLMLILNPCRCNSLQDEKTIRLSRLGDKWNIRLSDSSGNRRMVGGCRKFAEDNDVGVGDICLFEPVFGGLDSGLLLGREAVDDERAVHVDRHLPEVDVAQPERHRRADVHVERHVAGLLALLQRALQPRPEAVPPLHGHPHHRRVPVALVERRQPPRAQRRAAVRHRRPRPGAVADPDHVVGVLRADGRHQLGVHGEVGGAHVEPRHGHVGHGVGRGLGPARVQEVRRRRRHRHDEEEEEAAAPAEAAAQAATVRDAVPGHVAAGARRDRGQRAGAVLLREHHVPRRRRRLGRPRAPVVRH

SEQ ID NO: 26275 - protein, 1239 aa, Oryza sativa
  Clone ID: TF_OsC1528_2230.pep
MAKELKLLKCVLPDKFVAGCIIAKLPPSWRSFGTALKYKRQEYSVEGLIASLDVEEKAREKDAAYKGDGGQSSANVVHKAQNKSKGKYKAQQTTNFKKQKKNNNNPNQDKRTCFVCGQPGHLARKCPQRKGMKAPAGQTSKSANVTIGNTGNGSGYGNLPTVFSVNQSTNWWVDTGANVHVCADISLFSSYQVARGSTVLMGNGSHASVHGVGTVDLKFTSGKIVQLKNVQHVPSIDRNLVSGSRLTRDGFKLVFESNKVFVSKHGYFIGKGYECGGLFRFSLSDFCNKSVNHICGSVDDEANVWHSRLCHIIFGLMSRLSSMCLIPKFSIVKGSKCHSCVQSKQPRKPHKAAEERNLAPLELLHSDLCEMNGVLMKGGKRYFMTLIDDATRFCYVYLLKTKDEALDYFKIYKAEVENQLDRKIKRLRSDRGGEFFSNEFDLFCEEHGIIHERTPPYSPESNGIAERKNRTLTDLVNAMLDTAGLLKAWWGEALLTSNHVLNRVLNRNKDKTPYEIWIGRKPSLSYLRTWGCLAKVNVPITKKRKLGPKTVDCVFLGYAHHSIAYRFLLVKSEVPDMHVGTIMKSRDATFFESFFPMKDTHSGSSQPSEIIPSSITPPEQIEHTHEHVSEEDVSEAPRRSKRQRTAKSFGDDFTVYLVDDTPKSISEAYASPDADYWKEAVRSEMDSIIANGTWEVTERPYGCKPVGCKWVFKKKLRPDGTIEKYKARLVAKGYTQKEGEDFFDTYSPVARLTTIRVLLSLAASHGLLVHQMNVKTAFLNGELDEEIYMDQPNGFVVVGQGKVCKLLKSLYGLKQAPKQWYKKFNKTLTSAGFAVNEADKCVYYRHGGGEGVILCLYVDDILILGQTLRGENGITLLQSHYVEKILNRFGYIDSKPSPTPYDPSLLLRKNKIIARNQLEYSQIIGSLMYLASATRPDISFVVSKLSRFTSNPGDDHWHALERVMHYLKGTMELGLHYTGYRAVLEGYSDSNWISDVDEIKATSGYVFTLGGGAVSWRSCKQTILTRSTMEAKLTALDTATVEAEWLRDLLMDLPIVKKPVPAILMNCDNQTVIVKVNSSKDNMKSSRHVKRRLKSVRKLRNSGVITLDYIQTARNLADPFTKGLSRNVIDNASKEMGLRPIEDAVLQSSLERTHLCKLDYWSQSMEILGESSRKLTKDLGMPAKSFDRAAGLSATSVRSSAAIALGPGARPSYACRPAATTRGRRRLDGDRSVPPMQVN

SEQ ID NO: 26276 - protein, 914 aa, Oryza sativa
  Clone ID: TF_OsC1528_2260.pep
MADQGHSVAGSDEMLLGVYMTDAKELWDALNTKFGATDASNDLYIMEQFHDYRMADNRSVVEQAHEIQTMAKELELLKCVVPDKFVAGCIIAKLPPSWRSFGTALKHKRQEYSVEGLIASLDVEKKAREKDAASKGDGGQSSANVVHKAHNKSKGKYKAQQTTNFKKQKKKKNNPNQDERTCFVCGQPGHLARKCPQRKGMKAPAGQTSKSANVTIGNTRDGSGYVARGSTVLMGNGSHASVHGVGTVDLKFTSGKIVQLKNVQHVPTIDMNLVSGSRLTRDGFKLVFESNKVVVSKHGYFIGKGYECGGLFCFSLSDFCNKSVNHICGSVDRGGKNKTEPKNRTEKTETETEKTEIETEKTETEKFGSDHGGELFSNKFDLFCEEHGIIHERTPPYSPESNGIAERKNRTLTDLVNAMLDTAGLPKAWWGKALLTSNHVLNRVPNRNKDKTPYEIWIGRKPSLSYLRTWGCLAKVNVPITKKRKLGPKTVDCVFLGYAHHSIAYRFLIVKSEVPDMHVGTIMESRDATFFESFFPMKDTHSSSSQPSEIIPNSITEHTHEHVTEEDVSEAPRRSKRQRTAKSFGDDFTVYLVDDTPKSISEAYASPDADYWKEAVRSEMDSIIANGTWEVTERPYGCKPVGCKWVLKKKLRPDGTIEKYKARLVAKGYTQKEGEDFFDTYSPVARLTTIRVLLSLEDSHGLLVHQMDVKTAFLNGELDEEIYMDQPDGFIVEVNEADKCVYYRHGGGEGVILCLYVDDILIFGTNIEVINESHYVEKILNHFGYIDSKPSPTPYDPSLLLRKNKRIARNQLEYSQIIGSLMYLASATRPDISFAVSKLSRFTSNPGDDHWCALERVMRYLKGTMELGLHYTGYPAVLEGYSDSNWIFDVDEIKATSGYVFTLGGGAVSWRSCK

SEQ ID NO: 26277 - protein, 214 aa, Oryza sativa; identical to SEQ ID NO: 20674
  Clone ID: TF_OsC359_5521.pep

SEQ ID NO: 26278 - protein, 660 aa, Oryza sativa
  unsure (1)..(660): unsure at all Xaa locations
  Clone ID: TF_OsC359_6217.pep
MDEFVATMDISEANEGYVSCGSVIEMSRQMKAARAGVRAQSXPACXGIPTVGKVGSVLLFTARMGEGLCHMFTTGSKAMECGVKMCLVGWPWLAWDELGPRSGYQFGLNHRRPLVKAVLDGHLCEEEDAVNCLPKLRKTVGSASEAKEAVKPAVKQEKKIRSVKVLSLVSDLSLPFXVFPLSLSKPGXQMADNEKGSKVRNQDKGASCSQVNKAPDTSCVVVVQHLINQNKLLIDLLQHHQTPILNPSQMQPQVQFEADQAPTSPDNVPLASQQAHCAMPHVDSKEAIIICLIYDEQGHYARNCPQQKRKAPMRTDDEVRKMTITGTEWPPPGMTKRQIGNFFRGAPQLTQHLLANGGRVSDSEDSDQVSSGDEDEKSPXGFKQNKMEHKACSRCGEIGHVASSCVTTCLHCEKDHPPGECPMSRITCFLCEGTDHVPKDCQFSFLLTKKMANHPASSNKEKHQDHVNPRQEYSFQPNSRVGQRNQNGKSKSRVRQDISCLNCQXLGHFAARCPKLRNIAASMSVHATPHNQKLVPXRIVIHASRSSRIAXLQQLSALPQRCQCXFQPQPPVDKTEANICVVPLDVPVQQPRNXVLDEELGRKKVIVCYNCSEERHYSRNCPQPKRNPRHHSGRYARRRHDHNIRVTGANAVPVKPSASQ

SEQ ID NO: 26279 - protein, 1342 aa, Oryza sativa; identical to SEQ ID NO: 19855
  Clone ID: TF_OsC1713_3583.pep

SEQ ID NO: 26280 - protein, 1204 aa, Oryza sativa
  unsure (1)..(1204): unsure at all Xaa locations
  Clone ID: TF_OsC1713_4249.pep
MSALVAAAASPRAGAAATVPGDGMPGAGAAVNDNVNGGSSASQSSGGTFSGSPHIVHVMIIVLIFWIKICRYMTIFPTIQKPDRSFSVVGFALKPHAFDGSNYKRWKARALLWLTAMQCFYVSRGKRSEPPLSPEEEVKFEASDCLFRGALISILADNIVDVYMHMPSGKDMWDALEAKFGVSDAGSELYVMEQFYDYKMVDDRSVVEQAHEIQMLAKELENNNCELSDKFVAGGIIAKLPPSWSDFATSLKHKRQEFSVSDLIGSLGVEEKARAKDNRHKKVEGGSSANMVQKKNPHASHNNKKVKPDGKPKATTNFKKKGKGKANGDCFVCGKSGHWAKDCPKRKDRKSANMVISKGGETSGYGKLLPTVLSVFHSSDWWVDTGANIHVGRGSSLSMGNGSLAAVHGVGMVDLKLTSGKTVQLKNVQHVLSIKKNLVSGSLLCREGFRLVFESNKCVVSKYGTFVGKGYDRGGLFRFSLDDMCNNHNVVNHISENGSKCHTCVQSKQSRKPHKASEARNLAPLELVHFDLKALHYFKTYKAEVENQLERKIKRLRSDRGGEYFSNEFASFCEEFGIIHERTPLYSPQSNGVAERKNRTLTEMVNAMLDTTGLSKEWWGEAVLTACHVLNKILMKHKDVTPFEEWERKKLNLSYLRTWGCLAKVSVPIAKKRKLGPNTVDCVFIGCAIHSVGYRFLIVNSGVPDMRVGTIIESRDATFFENEFPMKHTPRTSSQETVIPHEHFAPIEHNDQTPEGNPEEDNIVDTRKSKRQRVAKSFGDDYIVYLVDDTPRTIEEAYSSPDAYYWKEAVRSEMDSIMSNASHGLLVHQMDVKTAFLNGELEEEIYMDQPDEYVLEGQEGMGCKLLKSLYGLKQAPKQWHEKFDTTLISVGFVVNEADKCVYYRYGGGEGVILCLYVDDILIFGTSLNVIEEVKDFLSKSFEMKDLGVADVIINIKLLRGDEGGITLVQSHYVDKVLSRFGYSDCMPAPTPYDPSVLLRKNRRIARDQLRYSQIIGSLMYLASATRPDISFAVSKLSRFVSNPGDDHWQALERVMRYLKGTMSYGIHYTRYPKLLEGYSDSNWISDADEIKAASEYVFTLGGGVVSWKSCKQTILTRSTMEAELTALDTATVEAECLRELLMDLPMVEKPVPAILMNYDNQTMIIKVNSSKDNMKSSRHIKRRLKSVRKHKXLRSDSIRLCPNS

SEQ ID NO: 26281 - protein, 363 aa, Oryza sativa
  Clone ID: TF_OsC24769_1.pep
MENTQFSRPKAVPYNDSWEIPNSDYILLYLNDKQTGKITCMVCGKEGHYTCECPMKNKEKYVICTLCGKVGHCHLWCCHQNESERRACRRCGEKGHYDNWHHLGCSSCEKHHPLGRCPMGKITCFLCEGNGHVPVQCHLSPMLTAITQNQRESFNQGEEGHSALRNPNRCHVPSSDKANVAADKAPNQSLGVTCFNCGGKGHYSNKCPQKQKQHGVRSTNAAAMKDKTPNLTGVTCFDCGDRGHFSYTCPQNLLEVMLTAELEPHDDTYERQPKADNGTVPTVLSLNCGEASHCGRNNPMKSLESSSDKINSTAMTYKAPKRVLGVICFNCHEEGHYANRCPQKQQGINSGTSQSPIKRQRKE

SEQ ID NO: 26282 - protein, 1951 aa, Oryza sativa
  Clone ID: TF_OsC73154_1.pep
MTPRRGELLPTMLACLRVASPSRTWAALSPENRAGSGFSGSIGGDVQSIQAESIQAGRTGHLQGETTSSGLGEAASPTATFGRRSVGNVSFASPAATVQPSVEIQSAASSAVAPAIGRATVATATLRTARLDSAALLALTVLGSRPLHHVEFVLPHTPRLRLANALHLAVVPTRAAFLTRTPPPLVAPARQRIRHATAPPLLHCRHPPSRIPSPGPRRRLRDRPWLRLVSWAARAPPTTEPRDVEQAFLDEFKLRRGEVAVSLHHPQAFLIKFQHRRHCEEALAKGYVKRHGIEIHFIKWRSLKSALGVALMFRVRLCLDGVPMHAWAADIAERIIGRTCALEQIETDVVHPVESGNTRSIDLWAWTANPSTIPKRMWLGFTKRAKDPNLAPLFAVENPLEHWQRGVRHPVLFHLEEIHDYTAATIDLEGQGSFQPAKRRLPPWSLGVLDGEQVPGRVFEDFPHHPPPPRSVHERLGGRDRDDERREARRPERRSDRDAIDGRADRPRRGRAVRGGHLHDEGDHDDEDDWDGERDDRDGCADRDGRHARDQGGRGGRGRRRGSGNDHPRPWRRNDRDDDRDDRGRDLGRGRDDRRGSDNNYRRERTRSPRRWDRGGANRSGGGTRRTADPVYDSSKLMNIPLLHKSANQAEVGEFRLLHALHNSSFLCQEPQTNTLSPVSQLQWLSIIADKAATPALSGRPAKPRIEAWFQNAAWEPIPVEHAFARIKSALPPPTSTTTCQQVEEALLRIELAAAATDPPVGEPFPQIDSPPPRVTSPALAQGPVVPTGAMEIDDIVAPPPPSPVATQLAQAAASASPISTGVLDALFASPPQPIIASPPRSPPRSPCARPLHMGRRLKIRTRQHSQPTRRSERIAKQPARPTMERCQRVLFKRLGVLNGEEGASIEQVIAEYVAMFDGPLPAHVIAALTTIFGIDDEEQETMDAALISLVGEANVGKNFVFLLFHLRAVVFAPAPTDCYLISWNVRGLNSPARCNVVHELMLDTKCTLACFQETKLQSIDDGLARFLGGYKLDKFAFKPARGTRGGILLLWSSGDFDVQEVRIGRFSISAQITDIRSGVTFLLTGVYGPTRHHLKDSFLRHIRRLRPSPGEGWLILGDFNMIYRARDKNNSNLNLARMRRFRAVIDRCELHEIPLQNRKFTWSNERRKATLVKLDRCFCNEEWDLAFPHHVLHALPTGPSDHYPLVLSNPQGPHRPRTFKFENFWTRVPGFKDKVKDIWSQPSSHTEPMHRLNQKLQHTAVGLRDWTKGICSEAKLQFHMALNVIQRLDVAQEHRELTPLETRLRAALKRKVLGLASIERARKKQASRVTHIREGDANTKFFHLKVNARRRRNTIQRLKKDSGWAVTHGDKELTIHDHFASFMGRPGPRPNELNWETLDITPIDLATLGEPFTEEEVHKAIKEMPADKAPGPDGFTGAFFKVCWEIIKDDILLVFSSIYNLRCAHLNLLNSANIVLIPKKDGAESVSDYRPISLIHSIAKIFAKMLALRLRPHMHELISVNQSAFIKGRSIHDNYLFVRNTIRRYHRQRRAMLLFKLDITKAFDSVRWDYLLALLQRKGFPTRWIDWLGALLSSSISQRILSKATELGAISKLRGRTTRLRISMYADDDVIFINPTQNDVATSANILHRFGTAIGLVTNLQKSQVAAIRCGNIDLEEVLQGVPAKRANFPLKYLGLPLALGRLRKTDLQPVFDKISGRVASWRGKNMAAAGRTTLVKSVLSAQPIYLLTALKVMKESLEQLDKQRRRFLWAGTGDITGGKCKVNWAKTCLPTSQGGLGVLSLDKFTRALRLRWLWNEWRDPSKPWVGLETPCDGVDRNLFAASTKITVGDGNTTRFWDSAWINGRRPKDLMPLVYEISKNRKKSLRQGKEDDSWVHDLTLDAGLSITINLLDQLVRLWEANCKKCQGYQLLDYLSLSGPITVSRARSASP

SEQ ID NO: 26283 - protein, 499 aa, Oryza sativa
  Clone ID: TF_OsC73154_11.pep
PMANAHPMVPLVLRNLLPLLRDVDTVQFALDVAHARMRDNAARLAMLVPLLARARRLAPAGVDAEAAELMDQLEEAVVGALEARLQLVQVVTLLVVVRAVATARRRARRLPSVLLAVAALAFAVSGSGVALGPLRVFVMVSTVLLLVLSWELRFVWISASFSTVPIAVLSNGASCRSARARRERRTAVAEAACKRDGQRSGVEQMRGGGGGQSSAWRPVGSGGGGGACGGGSPLAVGMVVVGVSVPRARYSRRDPLLLVSVVVSLVPAGSRRGAVASVLLLLRRRIDGVLRFSLPATSAASSMSAALSGEVRGEHVVVLDHEPVEAAAGTTRNLLIRDGFSVTDLWIVTDKPGVGIGGDVQSIQAESIQARRTGHLQGETTSSGLGEAASPTATFGRRSVGNVSFASPAATVQPSVEIQSAASSAVAPAIGRATVATVTLRTARLDSAARLALTVLGSRPLHHVDAFATQPRLPCSTAITRQAGSRHPAPDAASATAPG

SEQ ID NO: 26284 - protein, 389 aa, Oryza sativa; identical to SEQ ID NO: 19860
  Clone ID: TF_OsC1713_5364.pep

SEQ ID NO: 26285 - protein, 374 aa, Oryza sativa
  Clone ID: TF_OsC1713_5535.pep
RPGSTDSPVSSRVHPPAACGDLHPASSGAGAGVPLLPPHPLSLEMPRYDDHYGSTRLYVGRLSSRTRSRDLEYLFGRYGRIREVELKRDYAFIEFSDPRDADEARYNLDGRDVDGSRILVEFAKGVPRGAAGGSREYMGRGPPPGTGRCFNCGIDGHWARDCKAGDWKNKCYRCGERGHIERNCQNSPRNLRRERSYSRSPSPRRGRGHGRSRSYSRSRSRSYSRSRSRSLSGSPRGRRDRDDRRSRSLSYSRSPRRSISPAANGKERNPSPNGRRSPRSPQDRVSPPPKDNDERNGDSPWGRENSRSPSDGYRSPVAANGRSPSPRNNGSPSPMDNNSRSPRDNGSPSPRDGNGDGGSRGGSRSPRASESPEA

SEQ ID NO: 26286 - protein, 343 aa, Oryza sativa
  Clone ID: TF_OsC1713_5589.pep
QPPHPRRPRPRIPPPFSSKEMPRYDDRYGSTRLYVGRLSSRTRSRDLEYHFSRYGRIREVELKRDYAFIEFSDPRDAEEARYNLDGRDVDGSRILVEFAKGVPRGPGGSREYMGRGPPPGTGRCFNCGIDGHWARDCKAGDWKNKCYRCGERGHIERNCQNSPRNLRRERSYSCSPSPRRGRGRSRSYSRSRSRSRSYSRSRSRSLSGSPRARRELERSRSLSYSRSPRRSISPAANEKKRSPTPDGSRSPRSPQDQVSPPPKDNAERNGSDHGDSPRGRENSRSPSDGYRSPAAANGRSPSPRNNGSPSPMDNGSRSPRDGNGDGGSRGGSRSPRPSESPEA

SEQ ID NO: 26287 - protein, 1286 aa, Oryza sativa; identical to SEQ ID NO: 19770
  Clone ID: TF_OsC1713_4259.pep

SEQ ID NO: 26288 - protein, 1020 aa, Oryza sativa; identical to SEQ ID NO: 19777
  Clone ID: TF_OsC1713_4290.pep

SEQ ID NO: 26289 - protein, 742 aa, Oryza sativa; identical to SEQ ID NO: 19784
  Clone ID: TF_OsC359_7892.pep

SEQ ID NO: 26290 - protein, 963 aa, Oryza sativa; identical to SEQ ID NO: 19766
  Clone ID: TF_OsC1528_1838.pep

SEQ ID NO: 26291 - protein, 1494 aa, Oryza sativa
  unsure (1)..(1494): unsure at all Xaa locations
  Clone ID: TF_OsC2630_1.pep
MWGLHKSYPPPLFLFVSVGRELAAVAGASSNSIHSLLLPFPAASLLAAAVHQPASGGDPGVALERRQRRAREGQSGGGGGDRGRRGRLAVGRKKTSHENGRVLATLGPATALSTAALDALSAGHDAPASAVLPPCPRTRKGRLRLATATHVGILSKMAAFGGGFFCTCGGSVEGGRSSAGEGGGGTTDGRGQHAEPADNGTVGNKPYTMYLGNLTSGIRARFRAWTRDRALEGVFMPRGRTHSPRRRSASPSVHVSGSGGRASGSGGSDRGLVIHRVVKEAGGAANYPLLTRTNYNDWSLLMKIKLQARCLWGAIDPGGVELHEDRMALDAICSAVPPEMISTLATKASAKEAWDCIRILRVGDDRIRKASAQKVRMEYESLVLRDGETVEDFAMRLTSTVNQLATLGDPEPADKVVEKYLRVARPRFTQLVLSIETLLDISTLSLEEVTGRLKAAEDAMPLPSSSSDNAGKLYLTEEEWLERHNKKEQEAKKNSGSPSNRGKRRGGKGRNGGGAGVGGAKNTNSGAARREDKCRNCGKYGHWAKDCRSKPKRDEQAHVAQDDEPTLLLLTGGVITHACEQEHAPAPSAPTPSSDPIYLEEKKLFAALDDAAKRDPGRWIVDSGASNHMTGCRTAFSDIDTGITGNVRLGDGSVVRIEGRGTVLFSCKNGEHRTLSNTYLIPRLAANIISVGQLDETGFKVEAEDGVMRIWDEQRRLLARIHRNPGRLYVLDVELARPVCLTARIGDEAWKWHARFGHINFTALRKMGREQLVRGLPAVSQVDQLCEACLAGKHRRTPFPQQAQQRSLEPLQLLHGDLCGPISPPTPSGNRYFLLLVDDYSRFMWLSLLPSKDGAAAAIKRIQAAAERKSGKKLRALRTDRGGEFLVHHFADYCAELGVRRETTAPYSPQQNGVVERRNQSVVGTARSMLKAKGLPXTTPNVKKLDDRSKPMIFVGYEPGSKAYRCYDPASRRVHISRDVAFDEEAQWRWDGETASELDFTIEYTTVYHPAVVNAPRADSEQPELPTPSATSTSPCTPAATAGTTATSAEFATPPTIAADDLDADHDDAPLRFRRVDEILGPATPPGLAVREFDDELMMASAEEPASLAEAQQQDCWRQAMLDEMKSIEENGTWLLVDPPPRQRPIGLKWVFKTKKDAAGNITKHKARLVAKGYVQRQGIDYDEVFAPVARLESVRLLLAYAASEGWAVHHMDVKSAFLNGELKEEVYVAQPPGFVVDGKEQKVLRLVKALYGLRQAPRAWYTKLDASLLSLGFHRSASEHAVYMRGANARRLVVGVYVDDLVITGGNHSELDQFKKEMRETFQMSDLGLLRYYLGLEVSQTDEGITLSQGAYAKKILEAAGMVGCNPSQTPMEPRLKLSKLSTSPCVDATDYRKIVGSLRYLVNSRPDLAFSVGYVSRFMEKPTTEHLAAVKRVLRYVAGTINRGCSYRRKKGAVHLVGFSDSDVADDVDKREITTGVIVCLGKQPLTGWFGR

SEQ ID NO: 26292 - protein, 728 aa, Oryza sativa
  unsure (1)..(728): unsure at all Xaa locations
  Clone ID: TF_OsC359_6011.pep
LRSLNRGSAFSHSLVAPPPPRIPPLPSAPRAIKRXGINPRVPLPRFPLFPLSLSLGFVRIKPVIVAGAINGAESXRAIPPSPAALSFPRRYLNPPRAPLFRFRRSPLTLAVGIVLAPXHLLSAVAAVLRLAAAAAPLLLPTRRHLPRHRRIAVDLVRASVSLADRRSTVVIVIPSRAAVSLRSGRRSRRRRCPGVSRGPPFAFPLPSSLSGAAPPRRWSPAVTIGARARRSRRPRRRGRPRARPRGCQVGPAVSRPRPRVRLTRGTHGADRRQPRAPGPPWTVGLTRGPHSPWTRANEGYTSCGPMADNEKGNKVRSQDIGTSSSRVNEAQDTSCAAVVQHLINQNKLLIEILQQHRMPILNPSQMQPQVQLEAVQALTPQVSAPPTSQKAPHAMPHVDPKEASIICFMCDEQGHYARNCPQQKRKAPMRTEGEVRKMIITSTEWPPPGMTRRQRRNTFRGAPQLTEHLLANGGRVSDSEDSDQVSSEDEDKMERKACSRCGEIGHVASSCASTCVHCEEDHPPDRCPTSRITCFFCEGTDHVPKDCQFSFLLTKKMANQPAGFNGEKHQGNTNPRQDYSFSLTPVPGQRNQNEKRKCRVREDICCFNCQGMGHFADKCPKPRNIAAGTSVHATPCNQKLAPQRMVIHASRSSPIARVATAPIPMSALPQGVNAQFQPQQRIVVDGRSCVSPRPTPGRAKGNQPPEGDTKQKTVIRCNQQSEGSFSCE

SEQ ID NO: 26293 - protein, 789 aa, Oryza sativa
  unsure (1)..(789): unsure at all Xaa locations
  Clone ID: TF_OsC359_7259.pep
KENPKRSSFSPPPSLLGRLGPLLPPSLSLLPRGPSASPRARAADRRARPPLSLTGGAHLSSPSSRRARRRARALAPPPPRIAPHPAVPARIKERGITPRDSLSRFPRFPLSLSLGSVRIHPVILAGDIYGARDPRAXFPSSPAAFSPSRCYIIAPRAPLFRFRRSPLALAVGSVLAPCSSLSAVAADLRLAADVAPVLLPARRHLPRHRRIAVDLVRASVSLADRRSAAVIVIPSRAAVSLRSVRRSRRRRCPGVSRGPXPLRFPLPSSLSGAAPPRRWSPAATIGARVRRSRRPCRRGRLRARPRGCQVGPAVSRPRPRVRLTRGTHGADRRQPRAPGPPWTERLTRGPHXPWTRANEGYTSCGPMADNEKGNKVRSQDIGTSSSRVNEAPDTSCVAVVQHLINQNQLLIEILQQHRMPILNPSQMQPQVQLEAVQALTPQVSAPPTSQKAPHAMPHVDPKEASIICFMCDEQGHYARNCPQQKRKAPMRTEDEVRKMIITSTEWPPPGMTEHQRRNSFRGAQQLTEHLLANGGRVSDSEDSDQVSSDDEDKIELKACSRCGEIGHVASSCASTCVHCEEDHPPDRCPTSRITCFFCEGTDHVPKDCQFSFLLTKKMANQPASSNGEKHQGNTNPRQDSSFSLTPVPGXRKQNEKRKCRVREDICCFNCQGMGHFADKCPKPRNVAASTSVHANPRNQKLAPQRIVIHASRSSPITRVATAPIPMSALPQGVNAQFQPQQRIVVDGRSCVSPRPTPGRAKGNQPPEGDTKQKTVIRFNQQSEGSFSCE

SEQ ID NO: 26294 - protein, 453 aa, Oryza sativa; identical to SEQ ID NO: 19779
  Clone ID: TF_OsC359_7550.pep

SEQ ID NO: 26295 - protein, 508 aa, Oryza sativa
  Clone ID: TF_OsC359_7896.pep
RWSRRPLVRCLLDGQVSEEEDIVSCLPKLRKTAGSASEMEEVVKPAVHNSKRLRSVKVLSLVSNLSLPFVFPLSLSKPLQQMADNEKGNKVRSQDIGTSSSRVNEAPDTSCVTLVQHLVNQNRLLIEILQQHQTPILNLSQIQPQVQLEAVQALTPQVSAPPTSQKAPHAMPHVDPKEASIICFMCDEQGHYARNCPQQKRKAPMRTEDEVRKMIITSTEWPPPGMTRRQRRNTFRGATQLTEHLLANGGRVSGSEDSDQVSSDDEDEKSPQGFNQNKIELKACSRCGEIGHVASSCASTCVHCEEDHPPDRCPTSRITCFFCEGTDHVPKDCQFSFLLTKKMANQPASSNGEKHQGNTNPRQDYSFSLTPVPGQRNRNEKRKCRVREDICCFNCQGMGHFADKCPKPRNIAASTSVHATPCNQKLAPQRIVIHASRSSPIARVATAPTPASALPQGVNAQFQPQPSVDKTEASIGIVPLDVPAQQPRNQVQDEEPKRKKVIYNGSTC

SEQ ID NO: 26296 - protein, 1454 aa, Oryza sativa
  Clone ID: TF_OsC372310_1.pep
MSAPTPRVSRSREPHQRRISRSPPHRRGRRRPGEDRELIPVQRVVKEVGGSANYPLLTKTNYGDWALMMKVMLQARGLWDAVEHGDADFQADRMAMEAILRAVPPEMLASLAVKPSAKEAWDAIKTMRVGVDRVRKSKAQMLQKQYDAMEFKDGETVEEFSLRLNGLVTNLATLGVHLEEGKVVEKSLNSVPDHLSQIALSIETLLDLDELTLEEVTGRLRNAEEKLPAKSSAAGGKLFLTEEQWTARWKEKQAAESSSGKAKSGGGNRRRRGGKKKAEAAARDGDRAGRDTQEGREPNRDKCRNCGRTGHWAKDCRQPKRPAEAHQALADEDDDEPALLMAHVVDAAPVSASSSSAPPASSPPSQPDKTIELVEPKVFAHLLTEKQTDGGVWHLDTGATNHMTGIREVFAELDLSVRGSVRFGDGSVVGIEGRGKIIFECRNQEHRALTGVYYIPKLNANLISLGQLDENGCDVRIYHGVCTIRDPAAQLLARVRRTRNRLYLIKLTIGQPVCLAAKAQECAWLWHARYGHLHFDALRRLASRHMVRGMPDIDHVEQLCDSCVISKQRRTPFPRRSMFRAEDRLELVHGDLCGPISPATPGGKTHFLLLVDDASRYMWITLLGRKSEAADAIKRFQARAEAESKQKLRILRTDNGGEFTSVEFATYCAEQGVSRHFSAPYSPQQNGVVERRNQTILGMARSLLKAKNMPARYWGEAVTTAVFLLNRAPTKSLANMTPYEAWHGKKPAVGYLRTFGCLAYVKDVRPHLPKLSDRSKPMVLIGYADGAKAYEVFDPVSGRVQVSRDVIFDEGAGWDWDAAGAAAVPGGGGCSDFTVEYLTTATSPSPSTSAPSSASSGASASRAVTPSSASTPATLASASTPATPTFVSPPPGVDENLDAEQDDCPLRYRSMGDLLGDARSPGFATRDPEKGELHLLAAEEPASFTEAEQRQEWRRAMLDEIASIEENNTWRLVDLPSGHRAIGLKWVFKLKKDAEGRVAKHKARLVAKGYVQQPGIDFEEVFALVARLESVRLLLAQAAQAGWTVHHMDVKSAFLNGELAEEVYVKQPPGFVEEGREHQVLRLDKALYGLRQAPRAWNSKLDATLLSLGFRQNDCEHAVYVRGNTSARLLVGVYVDDLIITGTKEDEIVRFKGEMKALFKMSDLGLLSFYLGIEVEQVAGSIRLSQAAYARRILERAGMLGCNPSATPMEQRLKLSKTSAAAPVNPNWYRGIVGCLRYLVHTRPDIAFSVGYVSRFMEAPTTEHEAAVKRILRYIAGTTEFGCHYHQSSSPVQLVGYSDADMAGDPDTRKSTTGVVFFLGTSPVSWQSVKQKVVALSSCEAEYIAATTAACQGVWLSQLLGEVNQEEPDAFKLLIDNKSAIALSKNPVFHERSKHIATRYHYIRERVGDGSVHVEFVRTEGQIADILTKALGRTRFQELRSRIGVADVKFRCKT

SEQ ID NO: 26297 - protein, 941 aa, Oryza sativa
  unsure (1)..(941): unsure at all Xaa locations
  Clone ID: TF_OsC1713_4588.pep
MQCFYVSQGKRSEPPLSPKEEAKFEASDCLFRGALISVLTDNIVDVYMHMPSGKDMWDALEAKFGVSDAVSELYVMEQFYDYKMMLAKEFENNNCELPDKFVAGGIIAKLPPSWSDFATSLKHKRQEFSVTDLIGSLGVEEKARVKDNRGKNIEGGSSANLVQKKNPHASHNNNNKKVKPDVKPKATTNFKKKGKGKAKGDCFVCGKPGHWAKNCPDRKDKKSANMVISEGGGTSGYGXRGSSLLMGNGSLAAVHGVGTVDLKFTSGKNVQHVPSIKKNLVSGSLLCRDGFRLVFESNKCVVSKYETFIGKGYDSGGSKCHTCVQSKHPRKPHKASEARNLAPLELVHSDLCEMNSVLTKGGKKYFMTLIDDCTRYCYVYLLKTKDEALHYFKIYKAEVENQLERKIKRLRSDRGGEYFSNEFTSFCEEFGIIHERTPPYSPQSNGVAERKNRTLTEMVNAMLDTAGLSKEWWGEAILTACHVLNKIPVKHKEVIPFEEWERKKLNFSYLRTWGCLAKVNVPIAKKRKLGPKTVDCVFLGYAIHSVGYRFLIVNSGVPDMRVGTITESRDATFFENEFPMKNTPSTSSQEPVLPHEHFAPIEHNDQTPEENPEEDNIVATRKSKRERTAKSFGDNYIVYLVDDTPRTIEEAYSSTDADYWKEVVRSEMDSIMSNGTWEVVERPYGCKPVECKWVFKKKLRPGGTIENLNVIEEVKDFLSKSFEMKDLGVTDVILNIKLLRGDEGGITLVQSHYVDKVLSRFGYSDCKPAPTPYDSSVLLRKNRRIARDQLRYSQIIGSLMYLASATRPDISFAVSKLSRFVSNPGDDHWQALERVMRYLKGTMSYGIHYTGYPKVLEGYSDSNWISDADEIKATSGYVFTLGGGAVSWKSCKQTILTRSTMEAELTALDTATIEAEWLRELLMDLPVVEKXKPVPAILMNC

SEQ ID NO: 26298 - protein, 847 aa, Oryza sativa
  Clone ID: TF_OsC1713_5062.pep
MATVCPCARLPTGMSSVYLVVSECVALAPASETTRCCDVCTDGRAIRFLESVRRDYSLFVNIYFTFTNMSNTGDNGNTGYKEKEAPVNINGGNTASNSNGGPFLGVLADNIVDVYMHMPSGKNMWDALEAKFGVSDAGSELYVMEQFYDYKMVDDRSVVEQAHEIQMLAKELENNNCELPDKFVAGGIIAKFPPSWSDFATSLKHKRQEFSVTDLIGSLGVEEKARAKDNRGKNIEGGSSANLVQNKNPHASHNNNKKKVKPDVKPKATTNFKKKGKGKAKGDCFVCGKPGHWAKNCPDRKDKKSANMVISEGGGTSGYGYFLPTVLSVFHSPDWWVDTGANIHVGRGSSLLMGNRSLAAIHVFDIAVYLLKTKDEALHYFKIYKAEVENQLERKIKRLRSDKGGEYFSNEFTSFCEEFGIIHERTPPYSPQSNGVAERMNRTLTKMVNAMLDTAGLSNEWWGEAIFTACHVLNKIPVKHKEVTPFEEWERKKLNLSYLRTWGCLAKVNVPIAKKRKLGPKTIDCVFLGYAIHSVGYRFLIVNSGVPDMRVGTITESRDAIFFENEFPMKNTPSTSSLEPVLPHEHFAPIKHNEQTLEGNPEEDSIVDTRKSKRQRVAKSFGDDYIVYLVDDTPRTIEEAYSSPDADYWKEAVRIVERPYGCKPVGCKWVFKKKLRPDGTIEKYKARLVAKGYTQKEGEDFFDTYSPVARLTTIRVLLALAASHGLLVHQMDVKTVFLNGELEEEIYMDQPDRYVLKGQEGMVCKLLKSLYGLKQAPKQWHEKFDPTLTSAGFVVNEADKCAYYRYGRGEGVILCLYVDDILIFGTSFNVIEEVKDFLSKSFEMKDF

SEQ ID NO: 26299 - protein, 145 aa, Oryza sativa
  unsure (1)..(145): unsure at all Xaa locations
  Clone ID: TF_LIB4833-033-R1-N1-B4.pep
FPNDLCNNCKRPGHFARDCPNVALCHACGLPGHIAAECSSKDLCWNCKEPGHMANSCPNEGICRNCGKSGHIARECSAPPMLPGEMRLCSNCYKPGHLAAECTNEKACNNXRKSGHLARNCPNEPVCXLCNVSGHLARECPKSDA

SEQ ID NO: 26300 - protein, 844 aa, Oryza sativa; identical to SEQ ID NO: 19801
  Clone ID: TF_OsC1232_8.pep

SEQ ID NO: 26301 - protein, 731 aa, Oryza sativa
  unsure (1)..(731): unsure at all Xaa locations
  Clone ID: TF_OsC359_6616.pep
KKVNPSCFRLARALAPPPPRIPPLTSVPRAIKRXGNIPRDSLPLSPPPHFSLPLSLGFVXNSSPNLAGXINGGRIFRARFPLXPAALSPSQPYINTPRASLRRFRHSPHSLSAGIELAPSLSLSAVAAELRSAAVLAPDHLPPRRRLLRLRRNLADLVHLSVSVADRRNAAVPVNPSHAAAPLRSSRRSRRRRRPGVSRGPPIRFPLPSPLSGAAPPRRWSPAXTIGARARRXSRRLCRRGRLRARPAAAMWGPAVSRPHPRVRLTHWTHGAGRCEPGAPGPPWTVRLPRGPHXPWTRTNEGYTSCGPMADNEKGNKVRSQDIGTSSSRVNEAPDTSCVTLVQHLINQNRLLIEILQQHQTPILNLSQIQPQVQLEAVQALTPQVSMPPASRRTHGDVPHVDSKEASIICFMCDEQGHYARECPQQKRKTPMRTEDEVRKMIITSTKWPPLGMTKRQRRNTFRGAPQLTEHLLANGGRVSDSEDSDQVSSDDEDEMERKACSRCGEIGHVASSCATTCVHCEEDHPPDRCPTSRITCFFCEGTDHVPKDCQFSFLLTKKMANQPASSNGEKHQGNTNPRQDYSFSLNPVPGQRNQNEKRKCRVREDICCFNCQGMGHFADKCPKPRNVAASTSVHATPCNQKLAPQRIVIHASRSSPIARVATAPTPASALPQGVNAQFQPQQRIVVDGRSCVSPRPTPGRAKGNQPPEGDTKQKTAIRFKQQSEERFSCE

SEQ ID NO: 26302 - protein, 530 aa, Oryza sativa; identical to SEQ ID NO: 19806
  Clone ID: TF_OsC359_6910.pep

SEQ ID NO: 26303 - protein, 736 aa, Oryza sativa
  Clone ID: TF_OsC359_7459.pep
MADNEKGNKVRSQDIGTSSSRVNEAPDTSCVTLVQHLINHNRLLIEILQQHQTPILNLSQIQPQVQLEAVQALTPRVSMPPASRRTHGDVPHVDSKEASIICFMCDEQGHYARECPQQKRKTPMRTKDEVRKMIITSTEWPPPGMTKRQRRNTFRGAPQLTEHLLANGGRVSDSEDSDQVSSDDEDEKSPQGFNQNKMERKACSRCGEIGHVASSCATTCVHCEEDHPPDRCPTSRITCFFCEGTDHVPKDCQFSLLLTKKMANQPASSNGEKHQGNTNPRQDYSFSLTPVPGQRNQNEKRKCRVREDICCFNCQGMGHFADKCPKPRDIAASTSVHATPCNQKLAPQRIVIHASRSSPIARVATAPTPASALPQGVNAQFQPQPPVDKTEATFQLLQNWNYPAGATNVQVPTVQQQCKLSEFLKTETPTFAIVVEPMEASDWLRTVEKKLGLIQCTDQERVVFATHQLVGLASEWWDSYEASRPEGHTITWDEFSSVFKRSHVPAGMITLRKREFRYLKQEDLTVTEYLHEFHRLAHYAPEDVENDEDKQEKYLQGLKDEIAVQLLLEEYEDFEKLVDKAIQLESEHNRMKNCKRRIVSIPVFPCGNQRQRTEPLQITGSSVAHQEFPPQEDGHNADNNISNTNDDDTTNNHASCPISDHSNQACNVNIIHQGVDDSINDGTQNDNPSNCDSEKDSNGDSNYGFSERQHAQGPHCPRSILNTRSEEYLVEKGRKW

SEQ ID NO: 26304 - protein, 1686 aa, Oryza sativa
  unsure (1)..(1686): unsure at all Xaa locations
  Clone ID: TF_OsC359_5506.pep
MPRYKPEYLFGVEGFVQELRTMSFVIGFGTAPFYAQIPHDRHEEKCRVKVTLNSNSEDIPSVMFEAGGRNYIHVCQEVARITIGELRDRYSDQLADTEYRYHPRQPQGSDRGSYLETEGIENDATTRHLVEMLWAMDETRAETVLAAQDREDRNRGKICKLEDKVDRLEKELAALKGEAPPQKARIRLTARKRALFVPRYQLAPKFSPVSLLVXCPCQMVLTRSNGNGPNNNNNNNNGENPTLAQVLAQQTQLMNMMMQQLQNQQNQLNQGNNNAPPPQNKLAEFLRVRPPTFSSTTNPVEAGDWLHAIEKKLDLLQCTDQENVSFASHQLHGPASEWXDHFRLNRTTAEPITWLEFTAAFRKTHIPSGVVSLKKKEFRSLTQGSRSVTEYLHEFNRLARYAPEDVRNDEERQEKFLEGLNDELSYPLMTRDYPDFQKLVDKAIRQEDKYNRMEQKKRRIAQFKTQQGNNQRPRLTLGPQSMPQGGSSSVVHPQRQFFNNNAGNNIRNQAPQPAKKEQGSKLVVCFNCGEPGHYADKCPKPRRVKVVPVQSNSTVPASKARVNHVAAAEAQDAPDVILGTFLVNSVPATVLFDSGATHSFLSMSFAGNHGMEVEDLRRPMMVSTPSNQALSLQRSPSVRIEIKGVPFLANLILLESKDLDVILGMDWLARHKGVIDCANRKVTLTSNGGRVVTVHALSSESLRSRLNQITLEEIPIVREYPDVFPDDLPGMPPKRDIEFRIDLVPGTTPIHKRPYRMAANELAEVKRQVDDLLQKGYIRPSSSPWGAPVIFVEKKDHTQRMCVDYRALNDVTIKNKYPLPRIDDLFDQLKGATVFSKIDLRSGYHQLRIKEEDIPKTAFTTRYGLFECTVMSFGLTNASAFFMNLMNKVFMEYLDKFVVVFIDDILIYSRTKEEHEEHLRLALEKLREHQFYAKFSKCEFWLSEVKFLGHIISAGGVAVDPSNVESVTNWKQPKTVSEIRSFLGFTGYYRRFIDNFFKIAKPMTRLLQKDVKYKWSEECEQSFQELKNRLISAPILILPDPKKGFQVYCDASKLGLGCVLMQDGKVVAYASRQIRPHEKNYPTHDLELAAVVHALKIWRHYLFGTRIEVYTDHKSLKYIFTQPDLNMRQRRWLELIKDYDMGIHYHPGKANVVADALSRKGYCNATEGRQLPLELCKEFERLNLGIVSRGFVAVLEAKPTLIDQVREAQINDPDIQEIKKNMRRGKAIGFLEDEQGTVWLGERICVPDNKDLKDAILKEAHDTLYSIHPGSTKMYQDLKERFWWANMKREIAEYVAVCDVCQRVKAEHQKPADLLXPLKIPEWKWEEIGMDFITGLPRTSSGHDSIWVIVDRLTKVAHFIPVKTTYSGSRLAELYMARIVCLHGVPKKIVSDRGSQFTSNFWKKLQEEMGSKLNFSTAYHPQTDGQTERVNQILEDMLRACALDFGGSWDKNLPYAEFSYNNSYQASLQMAPYEALYGRKCRTPLLWDQTGEHQVFGTDILREAEEKVKIIQERLRVAQSRHKSYADNRRRDLSFEEGDYVYLRVTPIRGVHRFHTKGKLAPRFVGPYKIVSRRGEVAYQLELPQSLAGVHNVFHVSQLKKCLRVPTEEANLEQIEVQEDLTYVERPTRILEIDERKTRNXVIRFCKVQWSNHSEEESTWEREDELKSAHPHLFASSSESRGRDSV

SEQ ID NO: 26305 - protein, 1596 aa, Oryza sativa; identical to SEQ ID NO: 19789
  Clone ID: TF_OsC359_6712.pep

SEQ ID NO: 26306 - protein, 1690 aa, Oryza sativa
  Clone ID: TF_OsC359_8039.pep
ACAVRAVRAAEPPPPVVTSSPTSSSPSPIPSFPESPFSQEKSLKSSKASKATPGLEWYIPGLEIGLCSRDGCSEWLGLYNRMPRYKPEYLFGVEGFVQELRTMSFAIGFGTAPFYAQIPHDRHEEKCRVKVTLNSNSEDIPSVMFEAGGRNYIHTCQEVARIAIGELRDRYSDQLADTEYRYHPRQPQGSDRGSYLETEGIENDATTRHLVEMLWAMDETRAETVLAAQDREDRNRGKICKLEDKVDRLEKELAVLKGEAPPQKARVRLTARKRALFVPRYQLVPKVRVVEKEVTPALADPPVVNMVLTRSNGNGPNSNNNNNNEGNPTLAQVLAQQTQLMNMMMQQLQNQQNQGNNHAPPQNKLAEFLRVRPPIFSSTANPVEAGDWLHAIEKKLDLLQCTDQEKVSFASHQLHGPASEWWDHFRLNRITAEPITWLEFTAAFRKTHIPSGVVSLKKKEFRSLTQGSRSVTEYLHEFNRLARYAPEDKLVDKAIRQEDKYNRMEQKKRRIAHFMTQQGNNQRPRLTLGPQSMPQGGSSSVVRPQRQFFNNNAGNNIRNQAPRPVAALTQQQPAKKEQGSKPVVCFNCGEPGHYADKCPKPRRAKVVPAQSNSTAPASKARVNHVAAAETQGAPDVILAPSIRIEIQGVPFLANLILLESKDLDVILGMDWLARHKGVIDCANRKITLTSNDGRVVTVHALSPEFLRSRLNQITLEEIPIVREYPDVFPDDLPGMPPKRDIEFRIDLVPGTTPIHKRPYRMAANELAEVKRQVDDLLQKGYIRPSSSPWGAPVIFVEKKDHTQRMCVDYRALNDMTIKNKYPLPRIDDLFDQLKGATVFSKIDLRSGYHQLRIKEEDIPKTAFTTRYGLFECTVMSFGLTNAPTFFMNLMNKVFMEYLDKFVVVFIDDILIYSRTKEEHIEHLRLALEKLREHQLYAKFSKCEFWLSEVKFLGHVISAGGVAVDPSNVESVTNWKQPKTVSEIRSFLGLAGYYRRFIENFSKIAKPMTRLLQKDVKYKWSEECEQSFQELKNRLISAPILILPDPKKGFQVYCDASKLGLGCVLMQDGKVVAYASRQLRPHEKNYPTHDLELAAVVHALKIWRHYLFGTRTEVYTDHKSLKYIFTQPDLNMRQRRWLELIKDYDMGIHYHPGKANVVADALSRKGYCNATEGRQLPLELCKEFERLNLGIVSTGFVAALEAKPTLIDQVREAQINNPDIQEIKKNMRRGKAIGFLEDEQGTVWLGERICVPDNKDLKDAILKEAHDTLYSIHPGSTKMYQDLKERFWWASMKREIAEYVAVCDVCQRVKAEHQKPAGLLQPLKIPEWKWEEIGMDFITGLPRTSSGHDSIWVIVDRLTKVAHFIPVKTTYSGSRLAELYMARIVCLHGVPKKIVSDRGSQFTSKFWKKLQEEMGSKLNFSTAYHPQTDGQTERVNQILEDMLRACALDFGGSWDKNLPYAEFSYNNSYQASLQMAPYEALYGRKCRTPLLWDQTGERQVFGTDILREAEEKVKIIQERLRVAQSRHKSYADNRRRDLSFDAGDYVYLRVTPLRGVHRFHTKGKLAPRFVGPYKIISRRGEVAYQLELPQSLAGVHNVFHVSQLKKCLRVPTEEANLEHIEVQEDLTYVERPIHILEIDERRTRNRVIRFCKVQWSNHSEEESTWEREDELKSAHPHLIASASESRGRDSV

SEQ ID NO: 26307 - protein, 1544 aa, Oryza sativa
  unsure (1)..(1544): unsure at all Xaa locations
  Clone ID: TF_OsC1713_5497.pep
MSNKVNHVGKAPMFNGTNYSXWKIKISTHLKAMSFHIWSIVDVGFAITGTPLTEIDHRNLQLNAQAMNALFNSLSQEEFDRVSNLETAYEIWNKLAEIHEGTSEYKDAKLHFLKIQYETFSMLPHENVNDMYGRLNVIVNDLKGLGANYTDLEVAQKMLRALPEKYETLVTMLINSDMSRMTPASLLGKINTNDMYKLKKKEMEEASPSKKCIALQAEVEDKSKSKVNEVNEDLEEEMILLARRFNDLLGRRKERGRGSNSNRRRNRRPNKTLSNLRCFECRKKIEAFIGEWDSNEESSASSGSEEEGGDDASSKKKKMVVVAIKEAPSLFAPICLMAKGSSKVTSLSDSESDDDCDDVSYDELVSMFEELYAYSEKDIVKFKALKKDHASLEVLYEXLKISHERLTISHEKLKEAHDNLLSTTQHGAHIDVGISCDLLDDSATCHIAHVASSSISTSCDDLMYMPSPCSSSSSCVSICDASLVVENNELKEQVAKLNKSLERCFKGKNTLDKILSEQRCILNKEGLGFIPKKGKKPSHHATRFVKRNGKYCYKCREVGHLVMNYHTGGSHWVLDSGCTQHMTGDRAMFTTFEVGGNEQEKVTFGDNSKGKVIGLGKIAISNDLSIDNVSLVKSLNFNLLSVAQICDLGLSCAFFPQEVIVSSLLDKSCVFKGFRYGNLYLVDFNSSEANLKTCLVAKTSLGWLWHRRLAHVGMNQLSKLSKRDLVVGLKNVKFEKDKLCSACQAGKQVACSHPTKSIMSTSRPLELLHMDLFGPTTYKSIGGNSHCLVIVDDYSRYTWVFFLHDKSIVAELFKKFAKRVQNEFNCTIVKIISDNGSEFKNTNIEDYCDDLGIKHELSATYSPQQNGVMERKNRTLIEMAWTMLDEYGVSDFFWVEAINTACHATNRLYLHRLLKKTSYELIVGRKPNVAYFRVFGCKCYIYRKGVRLTKFESRCDEGFLLGYASKSKAYRVYNKNKGIVEETADVQFDETNGSQEGYENLDDVCDEGLMRAMKNMSIGDVKPIEVEDKPSTSTQDEPSTSATPSQAQVEVEEEKAQDPPMPPRIHTALSKDHPIDQVLGDISKGVQTRSRVASICEHYSFVSCLEPKHVDEALCDPDWMNAMHEELNNFARNKVWTLVERPRDHNVIGTKWVFRNKHDENGLVVRNKARLVAQGFTQVEDPKNPKHVYKLSKALYGLKQAPRAWYERLRDFLLSKDFKIGKVDTTLFTKIIGDDFFVCQIYVDDIIFGSTNEVFCKEFGDMMSREFEMSMIGELSFFLGLQIKQLKDGTFGLEDAKPIKTPMATNGYLDLDEGGKPVDLKLYRSMIGSLLYLTASRPDIMFSVCMCARFQAAPKECHLVAMKRILRYLKHSSTIGLWYPKGAKFKLVGYSDSDYAGCKVDRKSTSGSCQMLGRSLVSWSSKKQNSVALSTAEAEYVSVCSCCAQLLWMKQTLLDYGISFTKTPLLCDNDSAIKIANNPVQHSRTKHIDIRHHFLRDHVAKCDIVISHIRTEDQLADIFTKPLDETRFCKLRNELNVIDFSNVA

SEQ ID NO: 26308 - protein, 178 aa, Oryza sativa
  unsure (1)..(178): unsure at all Xaa locations
  Clone ID: TF_LIB4309-037-R1-K1-D4.pep
MAGKEEGRIFVGGLSFHTDERKLADAFRRFGKVVDAQIMLERHTQRHRGFFFVTFSDPEAVDSAIKEMHCQELDGRTISVNKAEPKMNTDDTRYESGGGRGEYRGGRGDGPPPGNCFECGRAGHWARDCPNPGGGRSARYSSSSSAXGGRGDRFSGSDRFGDRYMDDRYDGGYREPCD

SEQ ID NO: 26309 - protein, 323 aa, Oryza sativa; identical to SEQ ID NO: 19816
  Clone ID: TF_OsC7718_1.pep

SEQ ID NO: 26310 - protein, 1716 aa, Oryza sativa; identical to SEQ ID NO: 19802
  Clone ID: TF_OsC359_5804.pep

SEQ ID NO: 26311 - protein, 277 aa, Oryza sativa
  Clone ID: TF_OsC20523_1.pep
MANKRQREARKRFREANPGLFPANPTPPADGTKKKKNNKKSMFKKTSKAGGGGAGRSKHPLRVPGMRPGERCFICKAADHVAKVCPEKSLWEKNKICLLCRQRGHSLKNCPDKNDENLKKFCYNCGESGHSLSKCPKPIENGGTKFASCFVCKQQGHLSKNCPENKHGIYPKGGCCKICGEVTHLAKHCPNRGRQDLISSGDDAFNTEEHHLEDNAVLRGGDDLDDDFIEEEETRHTKAKKAKQSSSKSTTETGDGDKNTNTKAKVKQAPKVVKFFG

SEQ ID NO: 26312 - protein, 374 aa, Oryza sativa
  Clone ID: TF_OsC359_8329.pep
MVEVCGKKWPSEEFTSPRCSSSHLDEYSCIMEKSYLEKENLELKAQLVELTSKHVDLQEKYDELLCSHGNLVDSHAMLEVTHEVIIITVKSYVPHVQVDFTCANSCCSQANIFLRTTCDLDYVGKKDKYIDHGFVCNAQPSQDNRESMLKKLEKGSTVACTKFYQEDNKSNNKSKGQDQSKNKASITCFKCKKMGHHVRDCPWKKQKKLSKNEDLAHKFFKSTKEGHFASSCPCKIDDEATLPRKTSRINRRKCYGCIEKGHEIGFCPHKKDDHSNRSSKRQTGNKQVKKQDKSKTQLCYNCRAKGHIGKNCPIGKIPKPNLSFHHNLLRKAKNGTCATRVISSLHASTKAIWVPKSLVTNIHGPNVIWVPKYA

SEQ ID NO: 26313 - protein, 200 aa, Oryza sativa
  unsure (1)..(200): unsure at all Xaa locations
  Clone ID: TF_OsC6521_1.pep
MARVYVGNLDPRVTAREIEDEFRVFGVLRSVWVARKPPGFAFIDFDDRRDAEDAIRDLDGKNGWRVELSTKAGSGRGRDRSGGSDMKCYECGEPGHFARECRLRIGSGGLGSGRRRSRSRSRSPRYRGRSRSRSPRYRRSPSYGRRPTGSXPKRRSYSRSPPPARARSYSRSPPPPRERSYSRSPAQPANREESPYANNA

SEQ ID NO: 26314 - protein, 1647 aa, Oryza sativa; identical to SEQ ID NO: 19828
  Clone ID: TF_OsC91_2317.pep

SEQ ID NO: 26315 - protein, 1554 aa, Oryza sativa; identical to SEQ ID NO: 19827
  Clone ID: TF_OsC91_2600.pep

SEQ ID NO: 26316 - protein, 1496 aa, Oryza sativa; identical to SEQ ID NO: 19823
  Clone ID: TF_OsC91_2629.pep

SEQ ID NO: 26317 - protein, 95 aa, Oryza sativa
  Clone ID: TF_uC-osflM202067e09b1.pep
MMELRKHWGVGGRRCGACEASPAAVHCRGCGGVYLCTVCDARPGHARAAHERVWVCEVCEVAPVADTCKADVGVLCAACDADHPKGNPVARRHAR

SEQ ID NO: 26318 - protein, 407 aa, Oryza sativa
  unsure (1)..(407): unsure at all Xaa locations
  Clone ID: TF_OsC1274_1.pep
MDALCDFCRGAXSLVYSRSDAPALCVSCDRNLHSVNPLSRRQTCVLLXDRXVIDPAPDRCLEETTCLCPHTERTGRGGGCSVVFHQRERRRCXSWCSTSTQLSRIWSSSMDIPTESTETNCEEGINMMSINDNDVNNHCGAPEDGRLLDIASTALMSDLPTGDKFKPLIGSSSGDGMNLLPLNSDQPAEPVSTTPKAPCVTDKDMFNDGSVYGDFCVDDADLTFENYEELFGTSHVQTEQLFDDAGIDSYFEMKDVPADESNEQPKPVQPECSNVASVDSGMSNPAARADSSHCIPGRQAISNISLSFSGLTGESSAGYFQDCGVSSMILMGEPPWHPPGPESSSAGGSRDNALTRYKEKKKRRKFDKKIRYASRKARADVRKRVKGRFVKAGEAYDYDPLSQTRSY

SEQ ID NO: 26319 - protein, 92 aa, Oryza sativa
  Clone ID: TF_rsiceb_8130.y1.abd.pep
MEMELGLGRYWGVGRRRCGACAVAPAAVYCRTCDGDGGGGGYLCAGCDAEHGRAGHERVWVCEVCELAPAAVTCKADAAALCAACDSDIHDA

SEQ ID NO: 26320 - protein, 452 aa, Oryza sativa; identical to SEQ ID NO: 18113
  Clone ID: TF_OsC79690_1.pep

SEQ ID NO: 26321 - protein, 278 aa, Oryza sativa
  Clone ID: TF_OsC69289_1.pep
MSVAAEGKEKGVGGGGGGAGAGACELCGAAARVYCGADEATLCWGCDAQVHGANFLVARHARALLCRGCARPTPWRAAGPRLGPTASLCERCVRRGGGGRGGGGGGGAAGGGGRGGGGDEEMGGEGDEEEEDEDEEVVVVEEEDEDDEDEEGEGEGENQVVPWAEEAEATPPPVASSTSSSSREAAANGANAADRVKEDQPCSTSQPSLCRYASSAHHGGGGRSDEATSSRNGGGVGGRFLASRHRKRSPSDFRRSGLAQSVSGVQGSNRLQGGRWSK

SEQ ID NO: 26322 - protein, 108 aa, Oryza sativa
  Clone ID: TF_jC-osroLIB3475022g09b1.pep
MTWRSCDYCGEAAAALHCKADTARLCVACDRHVHGANALSRRHVRAPFCARCEARPAAARVAAVAGAGGCGGGGEARLLCAGCADDDSADAARVPAVGFSRCPRARRA

SEQ ID NO: 26323 - protein, 160 aa, Oryza sativa
  Clone ID: TF_OsC34358_2.pep
MMELRKYWGVGGRRCGACEASPAAVHCRGCGGVYLCTACDARPGHARAAHERVWVCEVCEVAPAAVTCKADAAVLCAACDADIHDANPLARRHARVPVAPIGSAAAAAVIPEALLIRINPAGAQPEALENKLLHRAPKLQTGNRKNVPQPYTDCRSSQSY

SEQ ID NO: 26324 - protein, 357 aa, Oryza sativa; identical to SEQ ID NO: 18114
  Clone ID: TF_OsC80961_1.pep

SEQ ID NO: 26325 - protein, 223 aa, Oryza sativa; identical to SEQ ID NO: 20710
  Clone ID: TF_OsC378772_1.pep

SEQ ID NO: 26326 - protein, 257 aa, Oryza sativa
  Clone ID: TF_OsC1269_1.pep
MRIQCDACEAAAATVVCCADEAALCARCDVEIHAANKLASKHQRLPLDAALPAALPRCDVCQEKAAFIFCVEDRALFCRDCDEPIHVPGTLSGNHQRYLTTGIRVGFSSVCSANADHLPPPAPKGNSKPPASGIAAAAAPKPAVSAAAQEVPSSPFLPPSGWAVEDLLQLSDYESSDKKGSPIGFKDLEWLDDIDLFHVQSPAKGGSTAAEVPELFASPQPASNMGLYKASGARQSKKPRVEIPDDDEDFFIVPDLG

SEQ ID NO: 26327 - protein, 126 aa, Oryza sativa
  unsure (1)..(126): unsure at all Xaa locations
  Clone ID: TF_8956058.pep
MKLLCSACEAAEASVLCCADXAALCARCDRDIHAANRLAGKHLRLPLLSPASSSSPPPPPSRRXPPSPPKCDICQESHAXFFCLEDRALLCRSCDVAVXXAXAFVSAHRRFLLXGVXVGQGTRALP

SEQ ID NO: 26328 - protein, 122 aa, Oryza sativa
  unsure (1)..(122): unsure at all Xaa locations
  Clone ID: TF_jC-osleLIB3474042h04b1.pep
SRVRVLRFCDACGGEAVRLFCRADPVILCAGSDARPHGPGSXHARVWLCEVCEHAPVGVTCWADAAASCVGLRRDIHSANPVARRHERLPGAPFFGALAYTPKQGSGAHGGDAVAVDDDGSN

SEQ ID NO: 26329 - protein, 360 aa, Oryza sativa; identical to SEQ ID NO: 18118
  Clone ID: TF_OsC1272_1.pep

SEQ ID NO: 26330 - protein, 479 aa, Oryza sativa; identical to SEQ ID NO: 20717
  Clone ID: TF_OsC770_1.pep

SEQ ID NO: 26331 - protein, 51 aa, Oryza sativa
  Clone ID: TF_uC-osflM202027f08b1.pep
MRIQCDTCEAAAVTVVCLADEAVLRARCDIKIHAADKLARKHQLLPLDATL

SEQ ID NO: 26332 - protein, 269 aa, Oryza sativa; identical to SEQ ID NO: 20718
  Clone ID: TF_OsC280_2.pep

SEQ ID NO: 26333 - protein, 271 aa, Oryza sativa
  Clone ID: TF_3618313.pep
MKIQCDACESAAAAVVCCADEAALCAACDVEVHAANKLAGKHQRLPLEALSARLPRCDVCQEKAAFIFCVEDRALFCRDCDEPIHVPGTLSGNHQRYLATGIRVGFASASPCDGGSDAHDSDHHAPPMGSSEHHHHHQQPAPTVAVDTPSPQFLPQGWAVDELLQFSDYETGDKLQKESSPPLGFQELEWFADIDLFHNQAPKGGAAAGRTTAEVPELFASQAANDVAYYRPPTRTAAAAFTAATGFRQSKKARVELPDDEEDYLIVPDLG

SEQ ID NO: 26334 - protein, 403 aa, Oryza sativa; identical to SEQ ID NO: 20708
  Clone ID: TF_OsC1268_1.pep

SEQ ID NO: 26335 - protein, 380 aa, Oryza sativa; identical to SEQ ID NO: 18117
  Clone ID: TF_OsC62991_1.pep

SEQ ID NO: 26336 - protein, 395 aa, Oryza sativa
  Clone ID: TF_OsC385_1.pep
MNYNFGGNVFDQEVGVGGEGGGGGEGSGCPWARPCDGCRAAPSVVYCRADAAYLCASCDARVHAANRVASRHERVRVCEACERAPAALACRADAAALCVACDVQVHSANPLPAITIPATSVLAEAVVATATVLGDKDEEVDSWLLLSKDSDNNNNNNNNNDNDNNDNNNSNSSNNGMYFGEVDEYFDLVGYNSYYDNRIENNQDRQYGMHEQQEQQQQQQEMQKEFAEKEGSECVVPSQITMLSEQQHSGYGVVGADQAASMTAGVSAYTDSISNSISFSSMEAGIVPDSTVIDMPNSRILTPAGAINLFSGPSLQMSLHFSSMDREARVLRYREKKKARKFEKTIRYETRKAYAEARPRIKGRFAKRSDVQIEVDQMFSTAALSDGSYGTVPWF

SEQ ID NO: 26337 - protein, 448 aa, Oryza sativa
  unsure (1)..(448): unsure at all Xaa locations
  Clone ID: TF_OsC84660_2.pep
MSSTAKAAAAGAVGAKSARACDGCLRRRARWYCAADDAFLCQGCDTSVHSANPLARRHERLRLRPSSPPPLVPPSGSGRRDEAVPAAWFKRKARTPRSHAAKSAAAFGQLLSRRLVVVPEAAAGSGGDSPEERKDEGEIVEEQEQLLYRVPIFDPALSEFCSPPPLEDAAAAVSCCNEDGAVENPTKPSMTTTTATTPPLQFFPDGQANFGPTDAELREFAADMEALLGRGLDDGNDEDSFCMETLGLIEPVDDDAGRVKVEADGDAGMTLAWCHELDTETSSGEMLDIDFDCGSPQAATTPDEKVGSSGPAAADDDAQLQQSNLALSLNYEAIIESWGTSPWTDGERPHVKLDDSWPRDYSGVWMAAAGVFGHGGEEQALTPRLGMDGGREARVSRYREKRRTRLFSKKIRYEVRKLNAEKRPRMKGRFVKRAAAXPPPPSPRRASR

SEQ ID NO: 26338 - protein, 192 aa, Oryza sativa
  unsure (1)..(192): unsure at all Xaa locations
  Clone ID: TF_OsC174263_1.pep
SGALGPALLGGGRRRRARHPRRHRQEQPRRHVRAGLQPPEQRGLSGAGAAAATGGGGGDLRPERGGHRDADRDAGGGDATAHRAERRPGRGGAPARRARRQPHPLRPPXQNRLRARGTPPAPAPPSDVLALHRXRRRRRGRRGVRRRHARARRRGPGVILLIHHLNPQPAAGGALFGYFLDHIKSSDQITFN

SEQ ID NO: 26339 - protein, 332 aa, Oryza sativa; identical to SEQ ID NO: 18116
  Clone ID: TF_OsC1713_5565.pep

SEQ ID NO: 26340 - protein, 303 aa, Oryza sativa
  Clone ID: TF_OsC281_1.pep
MMASDGSASPASCGGAACGVCGGAATVYCAADAAALCVPCDAAVHAANPLASRHDRVPLAVAMAAASSGVYDHLFAPDDDAASSWAAAAAAGAAVQGQGQGSPNDSSSSFTNDSAGGGGGGGAERSLFDLLSDVDIMSCGGGGLASSFDGAAAPPLWLHPGQLAALTPWSPADSVVVPTSAAGAVAAAAAAREERVRRYREKRKNRKFQKTIRYASRKAYAEARPRIKGRFVKRATTAAASSSSDDDSTAAAGVSGAGGAGAAATKEAKFWLSFSDDGRADGVGFYMDSTTAATAAYGVVPTF

SEQ ID NO: 26341 - protein, 531 aa, Oryza sativa
  Clone ID: TF_OsC106088_1.pep
MAVSVFNTRRRTSLVSAFIDRTRMFISTPLPQVRDKVSRTKPPKPHGGGGERRRKKQPQEAAARAGGGMGGSSASPCDLDREFAPQIAQLLATPPLQPAQEYYNGLIQSRKHDGIRVNFSSKHGKGVCANKEFAEGDLILKDQILVGAQHSLNKIDCAVCSYCFRFIGSIEFQIGRRLYWQSVGSSSDCTNRRHCHESDLGSSASSSGATKENSSTLPEEVLGSLITGDMSLPFTDHFSLPQVVPCRGCEEERYCSQSCADSDWETYHSLLCTGSKTEPSQRSALQKFIEHANGSNDIFLVAAKAITFTLLRYKKLKTQPEFQNNTDESNFSLLMEAWKPLSMGYKKRWWDSVALPEDVDSCDEDTFRQQIRDLALTIIIFCVSQSLQLLKDAIFDSDGLVVPSPVEDYFIHIDDLPDDEKCNISQEEAEKVTRPFLDALGEDYAAPCEGTAFFPLQSCMNHSCCPNAKAYKRDEDTDGNAVIIALEPIKKDDEITISYIDEDVSYEERQAELADYGFICTCPRCQEEKPN

SEQ ID NO: 26342 - protein, 381 aa, Oryza sativa
  Clone ID: TF_OsC63363_1.pep
MASWEEMASWEEQLRDELAARDLAVASVPGKGRGLFAARSFFPGEVVISQEPYASTPNKISVGSNCDNCFASRNLRKCSVCRVAWYCGSACQREEWKLHQLECRAIAALTEDRKKMLTPTIRLMVRLVLRRKLQDDKMANLVQLILPSFELDLKEITHTFSKFACNAHTICDPELRPLGTGLYPVLSIINHSCVPNAVLIFEGRTAYVRALQPISKNEEDSEEDALLEGYRCNDQKCDGFLLPNAVDNSEVGSMYKTIEELERKLYHPLSITLLHTRETLLKIYMELQDWQTALMYCRLTIPVYERIYPPFHPMIGLQFYTCGKLEWLLEYTEDALMSLTRAADILRITHGTKSEFMKELLGKLEEVRAEASFRLSAGDEQ

SEQ ID NO: 26343 - protein, 233 aa, Oryza sativa
  Clone ID: TF_OsC22960_1.pep
MECAAKGLVAEPCAGEARRRCGGCGAVAYCSRAHQTVHWGFHKEECARLAEQMSRIDMLKQFPFTFSVESPAPNHTFPSLRCFLLESFKLHQKGLWKSECICDPEVTSVKDLSKTTDWSMGSALCPCTEPEHNVSTPLTSWKDYYRWRSLPLQSPVAVLLHWQLTLYLIVAPNAGIAAYPSWIPTIEIIRKVGIPAIFTDFCEEAAHLASSCITSITGQPLRVPIQNCKFVSP

SEQ ID NO: 26344 - protein, 1010 aa, Oryza sativa
  Clone ID: TF_OsC64741_1.pep
MGAGGWSARSRWVGQGRRRSRVPGSKGRRRWWMAEAAGSSSSSSASAVVVAVVIAVVVVVWVVVRRKVRRAAARREEVLRLTRLAQEESEMAEVECARAYYSELFPSVVHATEMVDEAAWGAPPAVVPAQAEAEAEMEARAQPQPQPPVGAKGVCAVCFRPTTFRCKQCKAVKYCSFKCQIAHWRQGHKNECRPPSTDANHDDVAELSVAKERKIEQTSASEENIAETNTAATVKNLNDKTKDMPSEVLASVEVPDDDHSVSAVKLPQSSSQVASLGSRKTESNMKPTTPVENGSYTKDLDEALVCRFQPSPPKISGSGSLINKESLIDSKKHQDCSQTSNSKKYADNNNAQAALPVAVEPKTSRTALHVEVGHSKTKAAGSDNIGVSKMVPSVLTVDKVSPVPGGRSVTPNSSKRADNIAERNSKPSEKSISTANSLATSLKKIVRQQTAPKVVRHYPSEPTHFPYELFIKLYEKVELQPFGLHNLGNSCYANAVLQCLMFTRPLTSYLLGGLHSKNCSKKEWCFMCEFEKLVGEGRQGKIALSPTGILSHLPDIGSSFGPGKQEDAHEFLRYAIDAMQSVCMKEARKSGTHRLHEETTLMQLIFGGYLRSKIRCTRCDATSEQHERILDLTVEIDGDISSLEGALERFTSTEVLDGDNKYKCSRCKSHERAKKKLTISEAPNVLTIALKRYQSGKFGKINKAIRFPETLNLQRYMSPKADDTSPVYSLYAVVVHHDIMNAAFSGHYVCYVKDTHGKWYKTDDSQVKPVSLENVMSKCAYMLLYARCSPRAPSSVRPALMAQDPARVKKDKARVNSGRWHGGGPIHQGGQMYADHMTDDLPHTYDEFGHGPYSPAESPSPSESSSIFTSSDTGSHSTDSSESTRNSTSEDMERLIFGDQVSYFDGSMFGHGENGRMTYSRSKSSLGTSSSGQEVDQYRPDEHRLQGAREGWNQGDESSSLYTNQSKHQFSSKLTEQYRRRLDGTEHDPGEANSVLLRRSARERTAQTFY

SEQ ID NO: 26345 - protein, 919 aa, Oryza sativa
  Clone ID: TF_OsC49686_1.pep
MATPDVILPGPSLRPMPYMRSAPSARPEYHECATCHGPAKTRCSRCKSVRYCSGKCQIIHWRQGHKQTCQQWNGFGTSSSGGLPPTENTEQMPFLSNLNSPLRGSDVHLHDMDFDTMSEPSFVTTDSYNLDTSPFLSDRSNMNKPNQFLHTSENGAAIGSYEKNDYSIDGEVPSSEILSGNKGLNNSSGSGENCGNRDVIYPLNSVVHQPNNYAPEIRKRPKASITVYESDKGVYLTSDMISSGEGPYASAAESLQRSNSSGNVTGKGNMIHKKPPYPSGSTKTAVSTNSSLQGCNGISKAGASKVEALKKPSKFLKTSLVGLINDNKRSKVLFPYEDLVKFFQYEVRGISPRGLFNCGNSCYANAVLQCLMCTKPLMIYLLLRLHSKDCNTKTQAPTLLGVVVKSLTISDFFDIDCFILLGCSKNWCLMCELEQYASTLRESGGPVSPSRILSNLRNIGCRLGGGSQEDAHEFLRHLVMSMQGACLDGLGGEKQVEASLQETTLIQQMFGGRLKSKVKCLRCYHESERYENIMDLTLEIHGWVESLQDALTQFTAPEDLDGENMYKCGRCSAYVKARKQLSVHEVPNILTVVLKRFQTGKYGKINKCVTFPDMLDMVPFVTGAGDNPPLYFLYAVVVHVDTENASFSGHYISYVKDMQGTWLRIDDSEVQAVSLNQVMSEGAYMLFYMRSFPRPPKIYIEKGLSSVPTCSKRHSSKSSKGSKQDLNHTESLFASSDQTYGIYDFRPDNGYIQDQHAALRTRNFYHTDDAFADSISTDFSDATSSEWSLFTSSDESSFTTESTRDSFSVVDYGDNAGLDPISSIFGPYYAQDHPPGSFASCTRLSPSNPQTRYFQENTGFVSDSSMPAHLPGNVHRGRYPDRACSSSAEPPASANPRSVYGRYGLSREGFVQTSGFCQM

SEQ ID NO: 26346 - protein, 385 aa, Oryza sativa
  unsure (1)..(385): unsure at all Xaa locations
  Clone ID: TF_OsC8143_1.pep
MRTRSGSLYRSGGGGGETAMVGQKRKRSSLPPQYATAGDCCGGGGRRKRLAGGGPDYLDELPDDLVLAVLSKLGASASSPSDLLSVHLTCKRLNGLGRHDMVFAKASPASLAVKAASWSEPVQRFLKLCADAGNLEACYILGMIRFYCLGNRSGGAALLARAAVGGHAAALYSLAVIQFNGSGGAXGPRAGAALCARAAALGHVDALRELGHCLQDGYGVRRDPAEGRRFLVAANARELTLALAAAASHRPFAALPLAGGAAAGAIGCPLLSDFGWSLPEAEPHPANLFMADWWASRGVQATAKKPGLEAPAAATGDSDGGGELRLCSHVRCGRRETRRHEFRRCSVCGAANYCSRACQALDWKRAHKAQCVPMDRWLLAAGEAQ

SEQ ID NO: 26347 - protein, 403 aa, Oryza sativa
  unsure (1)..(403): unsure at all Xaa locations
  Clone ID: TF_OsC11539_1.pep
KPRTRRGVDEDEARRVLLAGVVPGRAAEEAEDRRRRRGGIGCGGRGGGRRRRGAXNDMFEELPDDLVVSILADVAASARSPGDLAGAMLTCKRFRELGQSKVVLARASPRCLAVRAKAWSDAAHRFLQRCADAGNLDACYLLGMIRFYCLGSRGSGAALMAAAAVGGHREALYSLAVIQFNGSGGSKDDRDLRAGAALCARAASLGHVDALRELGHCLQDSYGVRRSVLDGRRLLIQANARELAAAVAASASLLRAATGKPAAAASRRHSCLLNDFGXTPRRPRPAGEAHAANRFLVDWFASRPLTGSTTSAAPAPTPGSAAEDEAAGLRLCSHALCGRPETRRHEFRRCSVCGVVNYCSRACQALHWKTAHKAECTPMDRWLDNAAAGAANPNAAAMAAPAP

SEQ ID NO: 26348 - protein, 419 aa, Oryza sativa; identical to SEQ ID NO: 20722
  Clone ID: TF_OsC114099_1.pep

SEQ ID NO: 26349 - protein, 181 aa, Oryza sativa
  unsure (1)..(181): unsure at all Xaa locations
  Clone ID: TF_rsiceb_7074.y1.abd.pep
ARGADKDARAGCRCCAXRCAAWLGHTPALRELGHCLQDGYGARRDAPAGRRLLLHAAAREHLSWKKHNHGHHDGSAAEDAVSRFMVAWWDSHRAKAAARGCLPGEHGDGEHDGGEDLRLCSHARCGRRETRRHEFRRCSVCGAASYCSRACQALDWKRAHRAQCAAARWLAAAAAADGVAH

SEQ ID NO: 26350 - protein, 161 aa, Oryza sativa
  Clone ID: TF_uC-osflM202007a02b1.pep
GFKDIRCNQPCGKNRQCGMHACNRSCHPSPCDPPPANGDASSSTGGRASCGQVCGAPRRECKHTCTAPCHPSSPCPDLRCEFPMTIACSCGRITATVPCSAGGTANGDNMFEVSIIQKLPMPLQPVESDGRRVPLGQRKLFCDEDCAQMERKRVLAEAFDI

SEQ ID NO: 26351 - protein, 858 aa, Oryza sativa
  unsure (1)..(858): unsure at all Xaa locations
  Clone ID: TF_OsC24256_3.pep
QQQRRPRRRNHGGGGQRRGPPQERPSAAPPPPPPQQQQRQQHAAPAPTRAAAPAPARVAATKAAAGGDGAVPQLVQEIQDKLARGAVECMICYDMVRRSAPVWSCGSCFSIFHLPCIRKWARSPASAADASDPDSSWRCPGCQSVHAVPARELAYTCFCGRRREPPNDLFLTPHSCGEPCSKPLEKADPAVKADDAAATRCPHVCVLQCHPGPCPPCKAFAPDRLCPCGKQTIVRRCADRTTPVTCGQRCDRLLPCRRHRCEKVCHTGPCGDCNVLISARCFCGKKTETLLCGEMELKGNLSEKDGVFSCSEACSHMLSCGNHACQDICHPGPCGECELMPGKVTACHCGKTRLLEKRASCLDPIPTCDKVCDKKLPCGVHRCKVTCHEGDCPPCVVRVEQRCRCGSSGQMVECYKVLEEEFRCNKPXCNQPCGKNRQCGMHACNRSCHPSPCDPPPANGDASSSTGGRASXDSAGGTANGDNMFEVSIIQKLPMPLQPVESDGRRVPLGQRKLSCDEDCAKMERKRVLAEAFDITPPNLDALHFGENSNASDLLSDLFRREPKWVMAIEERCKFLVLGKTRGNSSGNLKVHVFCHMTKDKRDAIRVIADRWKLSVQAAGWEPKRFITIHPTPKSKAPARILGSKPGVFVAASHPFFDPLVDMDPRLVVAMLDLPRDADVSALVLRFGGECELVWLNDKNAVAVFNDPARAATALRRLDYGSAYQGAAVFLPSSSAQPGNVWVAGQKDGVAATKSSANPWKKATASEPDPSSGDWTGVLGQAPGSVWRRGGDTVAQVMGTSNRWNALESDAATSSRPVEESKPAPRTDAVSSAGPSTAPPVSKMQPEVEVDDWEEACE

SEQ ID NO: 26352 - protein, 5100 aa, Oryza sativa
  Clone ID: TF_OsC4072_1.pep
MAAEISALLDLLLHPPAAAAGDRDPPARRLRGPAARAGLEALAGALAAGPPADPARARAVLAAARAVMRKNNQLPVSTSDPSIPFGFENNMKCEVSTVVELSVPPSFIEGRYTFVLVEQVESTVVEIVERSLEFCLLYLEKSSYACEDYGLLNEVAYFMECVLLRGTPSKVYSLEPSVVNDVIEQWSSVQVDSERISPQEKYFCYLKGLWNVGALFADCFLMAQPGFNCSNSGDDLQRFRLTLSPECLQQDYVIAENTESSHTASPNGMVSIAQHFAVVHLHCIPVLLTLVQKLCQSPALDVIEDTNFNMRLSFGQRILKLVHGLAMEFPCDASDAMMLCSVARCTDSLPVLFKLKFKFANHDRVFSGDGVGTVLLQILDEFLQLIHIIFCNSDICCTVQVCILASLLEIFSPEKWKYDRSAACLMPPLVYSPHIVQYVLKLLNDTKRWTSRVDRDRPGKDVLGYSCNSETDGLSCHARSKKVPLLKKYTSEEYLQLIFPSEEQWLDDLVHLIFFLHEEGVKSMPLLEKPQMSCTKQVTLSELESVASHEEEALFGNLFAEARSTGVADSVEQPISLGSGPSSSQHGPIQLAADLICFMKMSIFSPEWCTAIYVDACRKFHSNHLEQFLSILQCPAFCSDESIATTSLSEVNSLHINTACFELLQMFLISHECPASLREDLVDKVFNAENGMYTYNNYTLALVARAIISGASSIYNLGRKVFVQYVGYLLEKANDKSSSSLDLNNFCRILPCAFHLEILLVAFHSTTGPEKADLINIVLSSLEKMRQPPLGVNASGLTRWALLLSRLLLVLRHMLLYPVTHPSWLLMRLRSRMRDILLKEGQSRSMNDYLPSFTAEVVEGIFADTVKEYASTSSLFPQLIDVTPAHAEIYFDKSALEALGLNFANLGSNISEILGVWKGRKAEVAEDLIAERYLFLICWSTLSGIGYSGGYEGLLNPDFADVNFFISFALSVSDDASSLLDANLPSVIFGFLKLLQSEILCGPSVLESWDFLRKGAWLSLILSLINTGFWGHQTSGKPDVDLQGKQVVQDAEIFGKSLLTFISENSGHCLHVLSSLLETYLHAFKEAFISFVVEKGRVCEDHCYPSWLLKHSAFDKSKHPLLFEKVGSNIGMLEPICDLSSRIDRVATKLGDGRKEYFLLKCLLHGFPVNSASNNSAILSCVLVINEIIYMLNGCIKIMQPNDRDLVDVGVISKLLSMIMTIKSDGMFTSIHKLCDSIFMSLIDQKDDLAGYSDLFVLKQLEGYLADINSKEIMDNEVKEIIVFTIVDLVEDLRSKTNVFKFFLGEAEGAPERANSLFALEQADMSVFIDVLDKCQSEQVNLKILNLFTDILGDGLCPDLKQKLQHKFIGMDVSCFSSWLEFRTLGHSMKIESTNSTTSGPTALRELTMDFLMRLTCPSSETLAKELQHHLFDSMLLLLDKAFMSCDLQIVKAHFHFIAQLSTDESHFKELFEKTLKLMENMVGNEGLLHTLKFLFTCVESVFGDAGSNRSALKRLSSKSSGNSFGSGSLIPKQLKNSDSLVLRTNQESNSTVDCDASSGEEDEDDGTSDGELVSIDRDEEEDGNSERALATKVCTFTSSGSNFMEQHWYFCYTCDLTVSKGCCSVCAKVCHQGHRVVYSRSSRFFCDCGAGGVRGSSCQCLKPRKFTGTSSVSPPVTSSFQPILPYHEDVEPVADSGSDFEDDISTEAENCIKLSVPKGFSDELPVFLKNLDVEVRMLELCKKLLPMILSQRELNLLKDRKVFLGGEMPMSQASDIFQLKKAFKSGSLDLKIKADYPNSRELKSHLANGSLTKSLLSISIRGKLAVGEGDKVAIFDVGQIIGQPTAAPITADKTNVKPLSRNIVRFEIVHLIFNPLVEHYLSVAGYEDCQVLTLNSRGEVTDRLAIELALQGAYIRCVEWVPGSQVQLMVVTNKFVKIYDLSQDNISPLHYFTVADDIIVDATLVPSSMGKLVLLVLSEGGLLYRLNVALAGDVGAKTLTDTVLVKDAVSMHKGLSLYFSSTYRLLFVSHQDGTTYMGRLDGDSSSITELSYICENDQDGKSKPAGLYRWRELIAGSGALACLSKFKSNSPLAVSLGPHELFAHNMRHASGSNAPVVGIAAYKPLSKDKAHCLLLYDDGSLNIYSHTPNGSDSSTTLTAEQTKKLGSSILSSRAYAGTKPEFPLDFFEKTTCITCDVKFNSDTTKSSDSESIKQRLSSDDGYLESLTSAGFKVTISNPNPDIVMVGCRIHVGNTSASNIPSEITIFHRVIKLDEGMRSWYDIPFTTAESLLADEEFTIVVGRTFDGSSIPRIDSIEVYGRAKDEFGWKEKMDAALDMEAHVLGGSSASGKSGKKAQTMQAAPIQEQVLADALRILSRIYLLCQPGFCTDTIDADMELNNLKCRSLLETIFQSDREPLLHSAACRVLQAVFPKKEIYYHVKDTMRLLGVIKSLPSITSRIGVGGAASSWVTKEFIAQIHTVSKVAVHRKSNLASFLETHAVAILNVTRKLGYAECLALHSNEKSGVSVAPAVALLKKLLFAPYEAVQTSSSLAISSRFLQVPFPKQTMIANDDAPDNHAKASAASNSTTGNAQVMIEEDPATSSVQYCCDGCSTVPILRRRWHCNICPDFDLCETCYEILDADRLPAPHSRDHPMSAIPIELDTFGGEGNEIHFSVDELTDSSVLQAPADRTIQTSPSSIHVLDASESVDFHGSMTEQRTVSISASKRAINSLLLSRLIEELSGWMETTAGTRAIPIMQLFYRLSSAVGGPFMDSTKPENLDLEKFVKWLIDEINISKPFPAKTRCSFGEVSILVFMFFTLMFRNWHQPGTDGSHSKSGGSSDLTEKGPVHVQVSTTTLQSSNDDHDKNEFASQLIRACSALRQQSFLNYLMDILQQLVHVFKSSSINGEGGSSSSGCGSLLTVRRELPAGNFSPFFSDSYAKSHPTDLFMDYYKLLLENTFRLVYSMVRPEKEKSADKDKSCKVPNTKDLKLDGYQDVLCSYISNAHTTFVRRYARRLFLHLCGSKTHYYSVRDSWQYSHEVKKLHKIINKSGGFRNPVPYERSVKLIKCLSTLCDVAASRPRNWQKFCLKHTDLLPFLMDNFYYFSEECIVQTLKLLNLAFYSGKDANHNAQKTESGDIGSSTRTGSQSSDSKKKRKGDDSSEGSSEKSCMDMEQAVVVFTGKDGDVLKRFVDTFLLEWNSTSVRHEAKSVLFGLWYHAKSSFKENMLTTLLQKVKYLPMYGQNIIEYTDLMTCLLGKANDSTAKQSDTELLNKCLTSDVVSCIFDTLHSQNELLANHPNSRIYNTLSCLVEFDGYYLESEPCVTCSCPDVPYSRMKLESLKSETKFTDNRIIVKCTGSFTIQSVTMNVYDARKSKSVKVLNLYYNNRPVTDLSELKNNWSLWKRAKSCHLTFNQTELKVEFPIPITACNFMIELDSFYENLQASSLESLQCPRCSRSVTDKHGICSNCHENAYQCRQCRNINYENLDSFLCNECGYSKYGRFEFHFMAKPSFSFDNMENDDDMRKGLTAIESESENAHRRYQQLMGFKKPLIKLVSSIGEQEIDSQQKDAVQQMMVSLPGPTGKVNRKIALLGVLYGEKCKAAFDSVSKSVQTLQGLRRVLMTYLHQKNSNDTDALPACSIPRSPSSCYGCSTTFVTQCLELLQVLSKHATSRKQLVSAGILSELFENNIHQGPRTARTLARAVLSSFSEGDADAVQELNNLIQKKVMYCLEHHRSMDISQSTREELLLLSETCALVDEFWEARLRVAFQLLFSSIKVGAKHPAISEHIILPCLRIISQACTPPKSDSGEKEPGMGKSSLMQAKNDDTVGHSVTNLSTSKTQSELSGKIPDGSRRRQDISLLSYSEWESGASYLDFVRRQYKVSQAVKGLQKTRHDSQKSDYLVLKYGLRWKRRACRKSSKGDFSKFALGSWVSDLILSSCSQSIRSEICTLISLLCPSNSSRQFQLLNLLMSLLPRTLSAGESAAEYFELLGTMIDTEASRLFLTVRGCLTTLCSLITKEVSNVESQERSLSIDISQGFILHKLVELLNKFLEIPNIRARFMSDNLLSDVLEAFLVIRGLVVQKTKLINDCNRLLKDLLDSLLVESTANKRQFIRACISGLQKHVKEKKRRTSLFILEQLCNLICPVKPEPVYLLILNKAHTQEEFIRGSMTRNPYSSAEIGPLMRDVKNKICHQLDLIGLLEDDYGMELLVAGNIISLDLSISQVYEQVWRKHHGQTQHSLSNASQLSAAASSVRDCPPMTVTYRLQGLDGEATEPMIKELEDEREESQDPEVEFAIAGAVRECGGLEIILSMIQSLREDELRSNQEELGSVLNLLKYCCKIRENRCALLRLGALGLLLETARRAFSVDAMEPAEGILLIVESLTMEANESDISIAQSVFTTTTEETGAGEEAKKIVLMFLERLCPPDGAKKSNKQQRNEEMVARILPNLTYGEPAAMEALVLHFEPYLMNWSEFDQLQKQHEENPKDETLSKNASMQRSAVENFVRVSESLKTSSCGERLKEIILEKGITKAAVGHLRESFASAGQASFRTSAEWTVGLKLPSIPLILSMLKGLAKGDLPTQKCVDEEDILPLLHALEGVPGENEIGARAENLLDTLANKENNGDGFLAEKIQELRHATRDEMRRRALKKREMLLQGLGMRQEFASDGGRRIVVSQPIIEGLDDVEEEEDGLACMVCREGYTLRPTDMLGVYAFSKRVNLGATSSGSGRGDCVYTTVSHFNIIHYQCHQEAKRADAALKNPKKEWDGATLRNNETLCNCIFPLRGPSVPPGQYTRCLDQYWDQLNSLGRADGSRLRLLTYDIVLMLARFATGASFSTDCKGGGRESNSRFLPFMIQMASHLVDGSANQQRHVMAKAVTSYLSSSPSTPESPVRLSALSGARGGSGSSEETVQFMMVNSLLSESYESWLQHRPAFLQRGIYHAYMQHKHGRSTLKLSADTSSSAVRSDEGSSADSNDSKRLFAIVQPMLVYTGLIEQLQQFFKKGKSSGTQKVGEKDGSSGGNLEAWEIMMKEKLGNMKEMLGFSKDVLSWLEDMTSSEDLQEAFDVMGALPDVFSGGHTTCEDFVRAIIHGAKS

SEQ ID NO: 26353 - protein, 848 aa, Oryza sativa; identical to SEQ ID NO: 20734
  Clone ID: TF_OsC96744_1.pep

SEQ ID NO: 26354 - protein, 576 aa, Oryza sativa; identical to SEQ ID NO: 20737
  Clone ID: TF_OsC329578_1.pep

SEQ ID NO: 26355 - protein, 881 aa, Oryza sativa; identical to SEQ ID NO: 20741
  Clone ID: TF_OsC15191_1.pep

SEQ ID NO: 26356 - protein, 265 aa, Oryza sativa
  Clone ID: TF_OsC1100_1.pep
MARGLKKHLKRLNAPKHWMLDKLGGAFAPKPSSGPHKSRECLPLILIIRNRLKYALTYREVISILMQRHVLVDGKVRTDKTYPAGFMDVISIPKTGENYRLLYDTKGRFRLQSVKDEDAKFKLCKVRSVQFGQKGIPYLNTYDGRTIRYPDPIIKANDTIKIDLETNKIVDFIKFDVGNVVMVTGGRNTGRVGVIKNREKHKGSFETIHVEDALGHQFATRLGNVFTIGKGNKPWVSLPKGKGIKLSIIEEQRKRDAAAQAAANA

SEQ ID NO: 26357 - DNA, 394 bp, Glycine max
  Clone ID: TF_11274280
ggcggattcttctcgggaggagaacgttttcatggcgaaattggcggagcacgccgaccgttacgaggagatggttgagttcatggagaaggttgcaaagactgtggaggttgaggagttgacggtggaggacaggaatctcctctacgcggcttacaaaaacgcgatcgctgcgaggagggctttgccgacgaccacttcctctattgatcgtaaggaggagaccccgtgcgctgaggaccacttggccatggttgaggaaccctccggcacattggctgcgtacatccctgcgatctgtcgggtgagataataactccgatcatacagccttataccttccgcttcatctgcccccagctccaccttttaggttaagattgatggtgattac

SEQ ID NO: 26358 - DNA, 273 bp, Glycine max
  Clone ID: TF_LIB3170-033-Q1-K1-B1
tggcccattcattcggtgtcggtccactccccttaatttacgttattctactcgtacgctgattaaaacaggacatgagaatggcatgagcataggggctaaacagataacagttcgtgtaccttgcgaagctgccagagcaggcagtgcggaacgaagagatggaggatttcatgcataatgatgcggtggagtggactccagcgactgatacttactgtggatgatcataacctcctatcggtggcctacaagaacgagaacggttctctg

SEQ ID NO: 26359 - DNA, 422 bp, Glycine max
  Clone ID: TF_LIB3106-074-Q1-K1-A6
gagaaagagagagagagagtgagaaactgttttaaattcgcaaaccctaagttcggaaaggggggctatggctgtctccaaggatcgcgagaacttcgactacatcgccaagctcgtcgaacaggccgagcgatactaagtgatagtggaatcaatgccgaacgcagcgctactagacgccgcaccaactgtaaagcagcgaaagaccctaacaagccaaagaggcctcctagtgctttcttcgatttcatggatgacttcaagaatgtattcaacatataacatcctgaaaacaaatcatcgtctgctgtgggcaaagctactggagcaaaatgcaagaccatgtctgatgctgaaaaagcaccttatgtggcaaagtctgataaaaggacagtggagcacgagaagatcatgccagccta

SEQ ID NO: 26360 - DNA, 287 bp, Glycine max
  Clone ID: TF_LIB3167-080-P1-K1-C4
gaattccggggtcgcaccacacccgtccgggtcaatgggccaactttcttctcctttaagggttccctttcggtgacccctttccagaccggaattttccattttttaggatataaccggcgagatccgggaatctgaaaaaggccggttcctcctcgggaggggaaggttcccttggcaaaatgggcggggcaggccgagcgttccaaggagagggtggagttcatgaaaaaggttccaaatcctgggtaggctttgtattggccggggtttgacccttttccttt

SEQ ID NO: 26361 - DNA, 371 bp, Glycine max
  Clone ID: TF_LIB3242-758-P1-K1-F4
taataaaaaatcaacggggtataccagtgatacagaacacttagcaaaatattacgcgtccttaaaatagaacacaaagaagcctgggctctgggcatacaacatcatattacagattgccaaccattgtatgaactacggcgattcttaatttggcacaaggaaatggcgtttagagtcaacctacatgagaggaagtataccacccatcaaacctatcagggatatcaaggctcatttcgctggtcctggacatcatatggtcaaagggtgaggttggcggctaaaaggtgcataatgtgcgtgctttctttgacggttttttgtttcaaggtgtgcagttgagaattcgtttctaaaaagccttgtta

SEQ ID NO: 26362 - DNA, 367 bp, Glycine max
  Clone ID: TF_10847191
gtggcctcgcaagaagaacatgatcctatcgaagctgccctggctatcggggccctacgaacagatggtgtagttgatgcggatagtgtacccttgagaccacgactaggagctcaccatcgaggagaggatcctcctctccgttccgtacaataacgttatcagagcgcgccgcgcctcgtggcgcatcatcttctcgatctagcacaaggaggagagccgcggtcactaggaccacctcttcctcatcctctactaccgattcaagatctattcctatctctgcaacatatgccaccgtatgctcaaactccttcactgctttctgataccatccacttcctccggctacttcaaagtcttatac

SEQ ID NO: 26363 - DNA, 241 bp, Glycine max
  unsure (1)..(241): unsure at all n locations
  Clone ID: TF_700977595H1
cttcgccgagttnaaagancggcggtnncccggaaagnaggccgccncgagacgcttctnccggttaccaaagccnttcaaggacattgataatancgagttgnctctcaactcaacnctatcnggctgggtttgctctgaattctccgtgtnttactatganattcttaactctcntgatcgggcttgcagacttgnaaaanaggctttgntgaaggnattgtgattggatacntgggag

SEQ ID NO: 26364 - DNA, 1479 bp, Glycine max
  Clone ID: TF_GmC1228_5
cttgcatgcctgcagaggctgagttaccacccacacatcccatccgtttgggcctggctttgaacttctctgtcttttattatgaaattttgaactctcctgaaaggtatgacttttattttattttcctgacagtattactgtttaaatgccaacctctttgtgtactatgtgcctaagttgggccctgtttaacaaatttaacaccatactcttcatatctcagggcctgtcaccttgctaagcaggcatttgatgaagccatctctgagttggatactctgagcgaggagtcttacaaagacagcaccctaattatgcagcttctgagggacaatctcaccctgtggacttctgacatccctgaagaaggaggtattcattaatggaaatcaatgttttgtgtcactctgttagctggacttgtccacaatgtaaattaaatacatgaaaacttttagggttaattacaagaattacactaaaaaacatttgtagctaagcagaacttaaaaaattaagagcattcataggcttagcctggattgatccaatgaatttaacccagtaaataccaaataatttaaaatgaaaggtttccaaccaaaaactcaaaccatcaaaggttggttttgggtggtgaagattcatgcttgcccttattgggtcagaagcccacaaaacttgaaattttggctgcctggtgtcagaaaaaactaaaaggggtttccaaaataaaaattgcaaaagcatgcataccatgcagcacacattccagtattggacattgttacagactacagtggcctgaagccataccactgctttagtatttttagggtcaggtgagtttgctgagagtattatgtacttggttgtggtgacttataaggtgatgtcctagtctttcgctttgtttttcaattcattttcactctaatttattgcttctattggtcatcatattttgattgtggtttactgtttggtatacttattttgctgttgtttccgactaggctattgcttctcattttattttctagctatttttctttctttgttctgtggtcctgccaacccaacatcagtatctatgatttgtctggttaattaaatacgtcctcttttaacagctgaggaacaaaaggtggattctgccagagctgctggaggtgacaatgcataggtaggttatgtacccatttagctgatggtatttgggttttacttttcaccttaacaaagttacattttgcaatgaagtgaagcaggtattggctaggaatttgtggtgtcatacgagaaggctagtctttctcttgataatttaccattaggatgtagtaatagaacatggagttggtctctagaaaatcaccatagggctttgtgagccttttattctatgcgtgtgctttctgttactggatggagactggagttgagatttgtatgttgtttgcctgtgattcagtg

SEQ ID NO: 26365 - DNA, 407 bp, Glycine max
  Clone ID: TF_LIB3040-008-Q1-E1-D4
cggtcacgaattaccgggctgacccacgcgtcaggcgagaacacgacagccaggaagagtgtgcttggtgctcccagatcgtcctggaggatcctgtcatccattcaacaccacgcatatactaacgggaactacttgagtgccaaccagcatattgagtacatacggacagttgaattggatctagccatcatctgctgtgatgttatgatagtgattgatgagcaccttatgccttctgctgcaactggtgaatccaccgtcttttactatcacatcatacgacattattatcgttatcttgctaaatttcagtcaagccctgacaccaacgaagctgctgatcagtctactatagcatctgagtctgctaccgctgcattcacaagctgatttacctcccacac

SEQ ID NO: 26366 - DNA, 388 bp, Glycine max
  Clone ID: TF_LIB3108-043-Q1-K1-D1
ctttcatataaaaaaaaaaaaaaaaaaaaatttaaaaaaaaaaaaaaaaaaaaaaaaaaaaaggaaaaaggaaaaaaaaaaaaaaaaaaaaaaaaaccccacgcttcccccaacccttccccttgagggaaagaacctttttttccttcccttaaaaaaactttttcgaacccccccggcctttgtggcccttattttctttattcgaccaaaagggggaaacccctggaaccgggtttaatatttccatattccggaattaccgttccaaaattctttccaacttttcaaacttttgaaacgttttcttaaagctcctaaattttcgcctaattcaatcggttttttcgggtatttccaaggttttttcctttaaattaaaggggtt

SEQ ID NO: 26367 - DNA, 585 bp, Glycine max
  Clone ID: TF_uC-gmroLIB3259P150a03b1
ctcactctctctctctctttgtcacccagatcttgtaccaatggcaagcgctcccactccacacaaagagatcatgtacatggcaaaactggcggaacaagccaagcgctacaaggatatggcggaattcatggagacggtctccagctccgtcgagagctaggagctgacacgtggaggagcgcacccttctctccgtcccctacaacaacgagatcatcgcgcgccagtcctcctggcgcatcatgtgcttaatcgagcagatggaggagagccgaagaccaatgaccacgtagcgtcatccgagactagccgtccaagatcgaagccaagctctgaaacatttgcgacggaatgctcaaactcctgaacacgcgccttgtccgctgcgacgactgcggcgactacaaggacttctacctcatgatgaaagcagactaccacatgcacctcgccgagttcaagaccggctctaatccgagggaggccgaccagagcacgctgtcctgctacacagcctctcacgacattgctcataccgagttgcctacgactgaccctatgaggctgcgtctagctctgaac

SEQ ID NO: 26368 - DNA, 348 bp, Glycine max
  Clone ID: TF_uC-gmflminsoy062f07b1
ccgaataaacaccccacccaagaggacaccgacccccagggagaacctttgaaggggaggccgcgcacacaccccgccgcgggcagcgaaaacgcacaaagaaaccacgcccgccgaaaaagagagagagacccaagtacaccaggccaaacgagccgagcaggcccacagaaccgaagaaaaggcgagcggacgaagaaagaagcaaaaacgcgaccaagaacaaacagcggaagaaaggaacccaccctgcaccgggaaacaaaaatgcgaacggcgcacgaagggccccgcggcgcaacaagaccgcaaatgaccagaaagaaagagccaagggaaaagaacaca

SEQ ID NO: 26369 - DNA, 597 bp, Glycine max
  Clone ID: TF_LIB4200-001-Q1-K1-H5
ggtccggattcccgggtcgacccacgcgtccggtgagatttgcgaatatgatatatggacgattcttctggggtaggagaatattgacacggcaaaattggcggcgcaagacagcgcgttacgaggagatggttgtgttcatggcgaagtagaaatactgtggtggctgaggtgttgacgaaggaggagaggaatctcctctgtgtgtcttacacaaacgggatagataccatgcagggctttgtggatgatcatgtcctccattgtactgcaagatgaaagcattggcaatgttgaccacgtggtcattataaaggaggacaggtgcgtaaatgagggtgatacttattatgaactgtgatgggatcttaaacctccttgaatccaacctcattcctttcattgcatttcccgatagcaaaatacatttccttgaaatgaagggtgactctgaggagactcttgctcagttcaaaaccggtgcagagacgaaagacgctgatgagagtacttttattgctgacagataaagtcatgatattgcttttgttgatctggcacctactcacccgattaggctgggacctgctttgacta

SEQ ID NO: 26370 - DNA, 322 bp, Glycine max
  Clone ID: TF_10842944
tcacttgcctcacgaagagaacgtttacatcgataaactcgccgtgcaagccgagtgctacgaatagatggtggagtgactggagagggtctctttcggcgccgacaacaacgaacttacctaggaggagatgaacctcttcttaccagcctgctggaacgtgatccgagcgcgccgcgcctggtggctcatcatctcttcgatcgagcaaaaggaggaaagcctgagccaccacgatcacgtctccggcatgctgcactaccgggtcatgatcgtgtccgagctctgcaacatatgcgacgtggtcctcaagctcctcgat

SEQ ID NO: 26371 - DNA, 532 bp, Glycine max
  Clone ID: TF_uC-gmroLIB3259P238b03a1
ggcgggggcaaaataaacccaacctttttgaaggagggaataaaaagccgcttttagggggaaagggaaatggttttttgtttaacggcccccttaaaacaaaaaggggaataaaaataaaaagttttaggggaaaaaaaggggggccaaccttcgggcttgggaaaaaattttaaaaaaaaccaaaatttttgaatgggcccccccagtcctttttggggggcccaaatcctttggaaaaaaagctgaaaaaggccctttgggggagccccttaaatttttgaccccggaaccacataaaggctcaggcccaaaaggttgggctttttcagcttttttggggccccccccccccccctttggaaaatcggaagcccaaaaagtagggttgtttttaaacagctgcttaaaaaaaggggggcccttgtatgacccttccctcggggggcccaacccccaaatggccccataaaaagcttgcttggccaaagggggggcccttttcggagaatctttttttttttaataaaaa

SEQ ID NO: 26372 - DNA, 144 bp, Glycine max
  Clone ID: TF_LIB3051-099-Q1-K1-H7
tttccaaaaggagggcgcccataacacactctccacctacaaagccgctcaacacattcctaataccgaattgcctccaactcaccctaccacgctcaatctagctctgaactattaacacaattactatcaaaatcttaaccc

SEQ ID NO: 26373 - DNA, 205 bp, Glycine max
  Clone ID: TF_11413695
gaagggagggtgccactagtaccattttgattgcaagacacgccccgcccgcattgaaggcggcgaaagcacgctctgcgcgtacagagccgttcaggacattgctaacaccgtgctgactacaactcaccctatcatgctgggtcttgctctgaattcatccgtgtttgactatgacattcttatctctactgcgcgtgcatgc

SEQ ID NO: 26374 - DNA, 580 bp, Glycine max
  Clone ID: TF_12488454
ggcggtcgttccctcgtcgagcgaatagaacgtgtatatggcgaatgtcgccgagcaggccgagcgctacctatagatggtggagttcatggagaaggtctccgccgccgccgacaactaggaacttaccgtggaggataggaacctactatccgtcgactactataacgtggatcgtagacggccggggccttgtgtcgcatcatctcctcgatcgaccagaaggaggagagccgcgggaacaatgatcacgtctacgtcatcctcgactaccgatccaagatcgagtcacgagctctccaacatgtgcaacggtatactcagactagtggactctcacatgatgctatccgctttctgcggcgattccaaggtctgctacctcaagatgaaggaagatgaccacagataccttgccgagttcatgagcggcgccaagcgtcgagaggctagcgatagcactctctctgcatgcagagtcgcacagcacgatgcgaatgcgcgatctgatgcaactgcttccgataagcgtggacatgcgcttgactatatgtatgagacttagacgtccttattctac

SEQ ID NO: 26375 - DNA, 1516 bp, Glycine max
  Clone ID: TF_GmC548_1
cccacgcgtccgtacggctgcgagaagacgacagaaggggatccaactcaggaagggaaggcgagacagctcaatcctacacatgacatctcaatctcaatctctttcgtagtgttttttgtttttaaatacataaaaaaccattcattctgtttcgttccactccctaatagctgctacagttacagcataacttctattctatatttctttctactcgcaagcaaatcagaacaagagaagagaatggcaggagcagaggggctaaacagagaacagtacgtgtacttggcgaagctgtcggagcaggcggagcggtacgaagagatggtggagttcatgcagaaggtggtggtggggtggacgccggcgtcggagctcacggtggaggagcgcaacctcctctcggtggcctacaagaacgtgatcgggtcgctgcgtgccgcgtggcgcatcgtctcctccatcgagcagaaggaggaagggcgcaagaacgacgaccacgtctccctcgtgaagcactacagatccaaggtcgagaacgagctcacgcaggtctgcgccagcatcctcaacctcctcgactccaacctcgtaccctccgtcttcgccagcgagtccaaggtcttctacttgaagatgaagggcgattaccaccgctatctcgcagagtttaaggttggggatgagagaaaaaccgctgctgaggataccatgttgtcttacaaggctgcccaggacattgcttctggggatcttccccctactcaccccatcagattgggtctcgctctcaacttctccgtcttctactatgaaatcctcaaccagtctgacaaagcgtgtgccatggctaaacaggcttttgaggaagcaattgctgagctggacaccttgggagaagaatcctacaaagacagcacgctcataatgcagcttttaagagacaacctcaccctttggacttctgatgtccaggaccagctagatgagccctgatatccattataggtttgatgggtggtattcttcctctcatggaggtgggctttgaatgtcatttctttgtgctaaattaagaatcgccctagtttataaaatgattggcaatctgtgatataatgttgtatgaacagagaccaggcttctttgttttttatttttatgtctcatgatattttggaaaggatactgtataatgggatatccaattaattaattattatatctgttgcaatctttaccgaagaaaactgtataatgggatatccaattaattattatctgttgcaatctttcttgtgttacttccacagtcccacaacacatagggtcctaactcataagtgcccccattttaaaattttgggtcagcatctggtggtcctataggaactagaaatgtcattgtagcaacattattctcttggaaagaacatttttcattacagctataatggcgcattaaataataatatataaaaataataatatttaatattaattataataaaaa

SEQ ID NO: 26376 - DNA, 1342 bp, Glycine max
  Clone ID: TF_GmC548_2
agactctgcaagggtgggtgagacaggtgaatcctacacatgttatctcaatctttttccaagtgtttttttatacataaaatccattcattcggtttcgttccactccccccaatagccgctattctactcgcaagcaaatcagaacaagagaagagaatggcaggagcagaggggctaaacagagaacagtacgtgtaccttgcgaagctgtcggagcaggcggagcggtacgaagagatggtggagttcatgcagaaggtggtggtggggtggacgccggcgtcggagctcacggtggaggagcgcaacctcctctcggtggcctacaagaacgtgatcgggtctctgcgtgccgcgtggcgcatcgtgtcctccatcgaacagaaggaggaagggcgcaagaacgacgaccacgtgtccctcgtgaagcactacagatccaaggtcgagaacgagctcacgcaggtctgcgccagcatcctcaacctcctcgactccaacctcgtaccctccgtcttcgccagcgagtccaaggtcttctacttgaagatgaagggcgattaccaccgctatctcgcagagtttaaggttggggatgagagaaaaaccgctgctgaggataccatgttgtcttacaaggctgcccaggacattgcttctggggatcttccccctactcaccccatcagattgggtctcgctctcaacttctccgtcttctactatgaaatcctcaaccagtctgataaagcgtgtgccatggctaaacaggcttttgaggaagcaattgctgagctggacaccttgggagaagaatcttacaaagacagcacgctcataatgcagcttttaagagacaacctcaccctttggacttctgatgttcaggaccagctagatgagccctgatatcccttataggttgatgggtggtattcttcctctcatggaggtgggctttgaatgtcatttatttgtgctaattaagaatcgccctagtttataaaatgattggcaatctgtgatataatgttgtatgaacagagaccaggcttcttttttttgtgtgtcatatggtattggaaaggatactgtataatgggatatccaattaattattatctgttgcaatctttcttgtgttacttccacagtcccacaacacatagggtcctaactcataagtgcccccattttaaaattttgggtcagcatctggtggtcctataggaactagaaatgtcattgtagcaacattattctcttggaaagaacatttttcattacagctataatggcgcataaaaaaaaaaaaaaacaagaaatatgaatacaaggg

SEQ ID NO: 26377 - DNA, 255 bp, Glycine max
  unsure (1)..(255): unsure at all n locations
  Clone ID: TF_700744868H1
ggttaagcggtgaccccagagaatctgtgacatggcggattcttgctcgggaggagatcgtttacatggcgcccacgnggagaggncgtgcgttacgaggacatcgtggagtttctggagaaggttgcaaagatcgccgaggttgacgagttgacggtggaggagaggaatctcctctctgtcgctttcaagaacgtgattggtgcgagtcgggcttcgtggaggatcatatcctccattgagcagaaggaggag

SEQ ID NO: 26378 - DNA, 268 bp, Glycine max
  Clone ID: TF_LIB3028-005-Q1-B1-B10
aagcttctccctcttactcttacactctcatccaaatcttgcaaaaaaaaaaaatcacaatggcagcgagcgctcacactccatccaaagagttcgtgtacatggccatcctggcggatcatgcccatcgctactaggagatggtagagttcatgagaaaggtctccgcctccgccgacaaccatgagcttagcgttgaggaacgcaacctcctctccgttggcgaacataactttatctgagcttgccgctccacctggcgcatcat

SEQ ID NO: 26379 - DNA, 484 bp, Glycine max
  Clone ID: TF_9204460
ggcggccgctccctcgcctaacgaagagaacgtgtacatggcgaagctcgccgagcaggccgagcgctacgaagagatggtggaggtcatagagaatgactccgccgccgccgacaacgaggagctaaccgtctatgagaggaacctcctctccgtcacgtacaaaaacgtgatcggagcgcgccgcacctcgtggcgcatcatctcctctatcgatcacaaggaagagagccacagcaacgacgaccacgtctacgtcatccgcgactaccgatccaagatctactccaatctctccaacatctgcgacagtattcttaaactcctcaactgtctcctcattcccttcgcttcctcctacgagttcaaagtcttctacctcgatatcaaagcagattacccacagtacctcatcaagttcaagaccagcacctaggctaatgaagctgacgacaacactctgtttacatacaaacccgttcac

SEQ ID NO: 26380 - DNA, 520 bp, Glycine max
  Clone ID: TF_LIB4164-027-Q1-K1-A12
ccacgcgtccggggggttacgcgtgcgaaagagaatgagagaatttgaaaaccctaatcttacaaagatcggtgatgactaacctctcaaggatcgagagaactttgtttacattgccatacttgtctatctggctgtgcgtttctaagagatggcggaatcaatgagaagcgctgctaatatccccatccgaactgacgagcggaggagcggaacttgctctctgtagagcacaagactgcgactagcgctcgcacagagacctgaaggatcctgacgtgcattgagcaaaagggagaaacaaaagggaactagttgtatgcaacatggactaaggactcccgacaagaaggcgaatcgaagctatcgaacatctgatgaggtaggatgagagcgagcgatgaacactttatcactgctggtgtacgtggggaatccactgcgttgaactattagacgacaggagagtatgactgggatcgagctgaatgcaaatcgagcaaagagaagaaggaagctg

SEQ ID NO: 26381 - DNA, 374 bp, Glycine max
  Clone ID: TF_uC-gmflLIB3260P031c03b1
cccacgcgtccgttcacgcgtccgcccacgcgtccgaaagacagcaccctaattatgcagcttctgagggacaatctcaccctgtggacttctgacatccctgaagatggagcagaggaacaaaaggtggattctgcccgagctgctggaggtgacgatgcatagcaggtattggccaaggaatttgtggagtgcatacgagaaggctagtctctctcttgatagtttaccattaggatgttgtaatagaacatggaattggtctctagaaaatcaccataaggctatgtgagccttttattctatgcgtgtgctttctgttactggagactggagttgagatttgcatggtgtttggctgcattttaatgaat

SEQ ID NO: 26382 - DNA, 207 bp, Glycine max
  Clone ID: TF_701044857H1
gcaaaaaaaaaaaaccacaatggcagcgagggctcccattccacgcgaagagttcgtgtacatggcgaactgtccggaacaggccgagcgctacgaggagatggtggagttcatggaaaaggtctccgcctccgccgaaagcgaggagctgcccgtggaggagcgaaacttcttctcggtggctaaaaaaaacgtattgggcgctcg

SEQ ID NO: 26383 - DNA, 330 bp, Glycine max
  Clone ID: TF_GmC418_4
gttactttgtttttcaggacattgcaaatgccgaactgcctccaactcatccaattaggcttggccttgcacttaacttctctgtattttactacgaaatccttaactctcccgatcgtgcctgcaaccttgcaaaacaggttagattcagatatagtgaatatcttgggctttgttttgctctgtttattttcgttttacaacattttgagcaatgttttggatgtttcccgtgaaaagaggaaggaattgggccccatacagtgaaatttgcagctattattgtccattaattcgaataactttatggctactcccataatgcatttc

SEQ ID NO: 26384 - DNA, 304 bp, Glycine max
  Clone ID: TF_5688049
ggcgagcgccccctcgcctcgcgaagagaacgtttgcatggcgaagctcgccgtactaggcgagcgctacgaagagatggaggcgtctatggagaaggtctacgccgacgtcgacaaccaagaacgtaccgcggaggagatgaaccatctctgcgtcgcctacaagaacgagatcggagcgcgccgcgcctcgtggcgcatcatctcctcgatcgagcaaaatgaggagagccgcggcatcgatgatcatatgtacgtcaatcgctgctacctattcaagatacagtcggagctctccagcata

SEQ ID NO: 26385 - DNA, 786 bp, Glycine max
  Clone ID: TF_LIB4203-002-R1-K1-G1
gctgtagcctgtgagcagccagatcagggacagagtctcagcctcgccgccaccgctgctgccgccgccgcccaaagactgccgagccgcgtccgtgtgccgccacccactccggacacagaatatccagttatggataaaaatgagctggtgcagaaggccaagctggccgagcaggcagagcgatatgatgacatggcagcctgcatgaagtctgtcactgagcagggagctgagctgtcgaatgaggagagaaaccttctctctgttgcttataaaaacgttgtaggagcccgtaggtcatcgtggagggtcgtctcaagtattgagcagaagacggaaggtgctgagaaaaagcagcagatggctcgagaatacagagagaagatcgagacggagctgcgtgacatctgcaacgatgtactgtctcttttggaaaagttcttgatccccaatgcttcgcaaccagaaagcaaagtcttctatttgaaaatgaagggtgactactaccgttacttggccgaggttgctgctggtgatgacaagaaaggaattgtggaccagtcacagcaagcataccaagaagcatttgaaatcagcaaaaaggagatgcagccgacacaccccatcagactgggtctggccctcaacttctctgtgttctattacgagatcctgaactccccagagaaagcctgctctcttgcaaaacagctttcgatgaagccattgctgaacttgatacattaagtgaagagtcgtacaaagacagcacgctaataatgc

SEQ ID NO: 26386 - DNA, 1366 bp, Glycine max
  Clone ID: TF_GmC518_1
ggcccgctcccgaggccggcccgggccgcggaagaaaacgcggacgacgtacctttcacttcacttgtggttcctcactctctctctctccacaccacactgaggagggagacagtggaaggaaggaacactcaaatcactgaaccagccatggctaccttctccaaggaacgcgagaactttgtatacgttgccaagttagctgaacaagctgaacgctatgatgaaatggtggatgccatgaagaaggtggcgaagctggacgttgagttgagtgtggaagagaggaacctgttctctgttgggtacaagaatgtggtggggtcacggagagcttcatggagaatcttgtcatcgatagagcagaaagaggattccaaagggaatgagttgcatgttaagcatatcagggattacaggaacaaggtggagttggagctgtccaacatttgcagtgacattatgataattttagatgagcatcttattccatccactaatattgcggagtccacagtgttttattataagatgaaaggagactattaccggtatttggcagaatttaaagctggcaatgaaaagaaagaggtggcagatcagtcacttaaagcatatcagacagcttctaccactgctgagagtgaactacaacctacacatcctattcgtttgggtctggctctaaatttctcagtgttttattatgagatattaaattcacctgaaagggcctgccatcttgcaaagcaagcctttgatgatgctgtctcggagctggataccctgaatgaggattcttacaaggacagtaccttgattatgcagctgttgagggataaccttactttatggacttctgatatccccgaagagggtgaggacctaaaaatggaaagcgcagccagggttgatcaaggagaagatgagttaggccgctaacccatcattctgtcatatgtctaagatttgatgcattaatttttctcaatcatattttctccattgtagtgaagcctctatctgaatggtgcactgcacctcatcaactttgagtcattcttatttttgagtgatggcctatttgagtcatctacttcatttttatgctattgttgagtagttttattcatgtgtttgtgacacaaaaacaccattggtttgcaatgcataatttccctatttgtatcctgttatggttaagatctgttcttgggttggcctttcaagaactgatcacatgtgagccactgtaatattgcaatatttagacttttgttaagtctcattttattaagacagacaaattaggttaaaaaaaaacccctaaaaaaaaaaatggtaataataaaagcaataatataag

SEQ ID NO: 26387 - DNA, 260 bp, Glycine max
  Clone ID: TF_700681991H1
ggatatagcgcatgccgatctggctccaacccaccccatcaagctctcgcctgctctcaacatctcagtgctctactacgagatcctcagcacccctgaccgtgcttgtaacattgcaaatcaggcctctgatgaggcaatcgccgcgctagacatcccatgagaggagtaccacaaagacagcactccgatcatgcagctcctgcgtgacaatataactgatggagtgccgacaccaacgaggacggcagtgatgacat

SEQ ID NO: 26388 - DNA, 292 bp, Glycine max
  Clone ID: TF_LIB3094-060-Q1-K1-D9
aacggggacgcgtgtgtctatgtctatcaaattctataacatccagagctcgggcaaaaagaagggcacgatgtcagagcgcgctccgactacactcgaacaggtcgtgtacatggcgaagctggctgagcatgccaagcgccacgaggagaaggtggagcatatggcgaatgactgcaactacagcgagagcgaggaactgacccgggaacaccacaaccgtgaatgggcctactacaagaacgtagtcctctctcaacgagcctacgagttcatcatgctctgaattgac

SEQ ID NO: 26389 - DNA, 1880 bp, Glycine max
  Clone ID: TF_GmC518_2
tgaggagggagacagtggaaggaaggaacactcaaatcactgaaccagccatggctaccttctccaaggaacgcgagaactttgtatacgttgccaagttagctgaacaagctgaacgctatgatggttctctctctctctctctcgattttcactgtgaagtgaacactcgttctggttccttcattttagctgcattccactttcaatcacgtttccatcatctcctgcagctacccattttctctttttccttataacagacatttgttctgataaagtttcaatttttccataaaagtccactgctttttcacttctgcatagaactgctattctacttttacatgcccatttcaccatctaaattattatgaaagaaaaagagtaaaatttggatttgtagtaggatatttccattgcatgctaagtttttaaaagtcatacctggacatgatttctgaaagagtgtggaaattaaactttgtattttatttgttacgtgttttggaatttgattcaagagtgttgagtggtggagtataataactatttaaaagtcatacctgagatgatttctgaatgagtgagtgtgaaaattgaactatatttgtttgttatgtgttttggaatttgattcaagagtgctgtgtggtggagtatgataattactttaaaagtcatacattcctcatgatttttgagtggatgagaccgtgaaaattaaactatatttatttgttatgtgttttggattttggttcaagagtgttgaggggtggagtatgataattactttaaaagtcatacctgacatgatttctgagtggatgagggtgtgaaaattaaactctatgtttatttgttgtgttttggaatttgattcaagatgtgtttgagtggtggagtgtggtgtgcagaaatggtggaggccatgaagaaggtggcgaagctggacgttgagttgagtgtggaagagaggaacctgttctctgttgggtacaagaatgtggtggggtcacggagagcttcatggagaatcttgtcatcgatagagcagaaagaggattccaaagggaatgagttgcatgttaagcatatcagggattacaggaacaaggtggagttggagctgtccaacatttgcagtgacattatgataattttagatgagcatcttattccatccactaatattgcggagtccacagtgttttattataagatgaaaggagactattaccggtatttggcagaatttaaagctggcaatgaaaagaaagaggtggcagatcagtcacttaaagcatatcagacagcttctaccactgctgagagtgaactacaacctacacatcctattcgtttgggtctggctctaaatttctcagtgttttattatgagatattaaattcacctgaaagggcctgccatcttgcaaagcaagcctttgatgatgctgtctcggagctggataccctgaatgaggattcttacaaggacagtaccttgattatgcagctgttgagggataaccttactttatggacttctgatatccccgaagagggtgaggacctaaaaatggaaagcgcagccagggttgatcaaggagaagatgagttaggccgctaacccatcattctgtcatatgtctaagatttgatgcattaatttttctcaatcatattttctccattgtagtgaagcctctatctgaatggtgcactgcacctcatcaactttgagtcattcttatttttgagtgatggcctatttgagtcatctacttcatttttatgctattgttgagtagttttattcatgtgtttgtgacacaaaaacaccattggtttgcaatgcataatttccctatttg

SEQ ID NO: 26390 - DNA, 751 bp, Glycine max
  unsure (1)..(751): unsure at all n locations
  Clone ID: TF_LIB4203-002-R1-K1-E7
ggacgggcgggcgagcgagcgagcgagtgagcaggcggtgtgggcgtgcgaggcgaggccgagtcgcgagcgacatgggggatcgagagcagctgctgcagcgggcgcgactggcggagcaggcggagcgctacgacgatatggcctccgccatgaaggcggtgacagagctgaatgaaccactatctaacgaagatcgaaatctcctctctgtggcctacaagaatgtagttggtgccaggcgatcttcttggagggttattagtagcattgagcagaaaaccatggcagatgggaatgagaagaagttggagaaagttaaagcctaccgggagaagattgaaaaggagctggagacagtttgcaatgatgtcttggctctgcttgacaagttccttatcaagaactgcaatgattttcagtatgagagcaaggtgttctacctgaaaatgaagggcgattactaccgctacctggcagaggtggcttctggggagaagaaaaacagtgtggttgaagcttctgaggccgcgtataaggaagccttcgaaatcagcaaagagcacatgcagccaacacaccccatccggcttggcctggccctcaatttttctgtgttctactatgagatccagaatgcaccagagcaagcctgcctcttagccaaacaagccttcgatgatgctatagctgagctggacacattaaacgaggattcctataaggactncactctcatcatgcagttgct

SEQ ID NO: 26391 - DNA, 2223 bp, Glycine max
  Clone ID: TF_GmC1228_1
ctcttattcaacaccaccacttccggcgaccatttctaactaattccggcgacgccacgctcccgacaccggtgacctctctacctctcactgaacgagtgaacgtgcatcttaatttttttttttttttctgtttatgattttggatcgatttgtttctgttactgaaaccaaagatgtgagatcccaccacttcacttcaattctctttcactacgctttcattttgcgaatcccgaacgttctctttctctgaatcgctcggttcaaattcacattcaatttcgaaggattttcttcaccagaattcatagcagtagcatgcactacgtaacttcgttttcatcaaaggtgtcactgaagtagaagcgttgaatattttctcaatcgttgttaaatgcttagccaccgtggaggataattgttaattgcgctgcgaatccgtgttctcaatcgttattctacggaaatttgattattcaaaattcgagaaagctagaaaatatttatgtagaagtaaaagtggctatatgactagtatctgtgcaaaattatttttggcccaccaaacgccattcaatttgcctccctcccaatcccacagcgctccctccaccgtgacaatcactcactccccactcatcaccaggagaaacgcgtgagaaacattcctctcagagcgcgtggaaacaccccctctcccaccaccaacccttgccgtcgtgccctgtccctccacaaccaaacccttccttctctcaacttgcttattcctgcgcgaacacgaccgaccacgcataatgacacaaaaaatttctagagcgagaaagtgagaggagagagaaagtagcagatcctccatggcctccaccaaggaacgtgaaaacttcgtctacgtcgccaagctcgccgaacaagccgaacgctatgaagaaatggtggaagcaatgaagaatgtggcgaagctaaacgtggaattgacggtagaggagcggaaccttctgtcggttgggtacaagaacgtggtgggtgctcgtagggcttcgtggaggattctttcctcgattgaacagaaagaagaagctaaagggaacgatgtgagcgtgaaggttaaatcctttggctccacgaggagcgcaaaacttgtcaacaccgccaagctagcgaacatgccgtaggttattaacatattgtcgatagaacatcgagtgaggcgaggtgactttgaattatgaggcgggaacggtacctgtagctcgtagggtcaaggcaggtggtgatggacataaggcttctgagcattttatgaaggcgattcaattgacttcagaagctaaagggaacgatgtgagcgtgaagaggataaaggagtataggctgaaggtggagtctgagttgtccaatatctgcagtgatatcatgactgttattgatgaataccttattccctctagctcatctggtgaacctagtgtctttttctacaaaatgaagggggactattaccggtacctcgcagagttcaagtccggtgatgagagaaaagaggctgctgatcattccatgaaagcgtatcagttggcttccactactgcagaggctgagttagcatccacacatcccatccgtttgggcctggctttgaacttctctgtcttttattatgaaattttgaactctcctgaaagggcctgtcaccttgctaagcaggcatttgatgaagcaatctctgagttggatactctgagcgaggagtcttacaaagacagcaccctaattatgcagcttctgagggacaatctcaccctgtggacttctgacatccctgaagatggagctgaggaacaaaaggtggattctgccagagctgctggaggtgacaatgcataggtattggctaggaatttgtggagtcatacgagaaggctagtctttctcttgatagtttaccattaggatgttgtaatagaacatggaattggtctctagaaaatcaccataaggctttgtgagccttttattctatgcgtgtgctttctgttactggagactggagttgagatttgcatggtgtttggctgtaatttagtgaatttcttcattttgactttctttctaagaggatgctaccttgcattcttttatcagtttacatagataatatttatttcaaattatgcgaatcattgtttctaaacagaagtttacgaccgtttttttttt

SEQ ID NO: 26392 - DNA, 364 bp, Glycine max
  Clone ID: TF_uC-gmflminsoy059f05b1
ttgacgcgtggggtgagattggcggatctcagaaatgtcagatttttctctgaaggagaacgattacagggcgaaattgtgaggagcagagccgagcgttacgaggagatggttgagttcattgagaaagttgcaaagactgtgtaaggtgaggagttggcagtagaggagaggaatataatatatgttgcttacaagagcctgatggatgcgatgcgggctttgtgggggatcatctactacatcaaggttatcgagtaatgagggttcggtggagacaacagtgggcgttctcagggagcccaggtgcgaatttgatctataagacctgttcagaaaggtaagaacataggacacgaacttt

SEQ ID NO: 26393 - DNA, 1538 bp, Glycine max
  Clone ID: TF_GmC1521_1
ggctcgaggcttctcttattcccttttctctctccttctactctccccctctttctcattttccggtgacatggagtccaagtggggtggcgcccccgccagcatcatggcggcgaatttcgacgacttcaagtggatcgcctccatgttcgatcccggaaacgacgacgtcaagcccttctccgacgcagctttccaaaaccaggatgcagtaactgcattttcaacttgtggtggagtaacagatgatacccttgttcgttcccaaaacctcactcccattcaatccaccatttctgcaactattgattctcagtcttccttttgtggtaccgttgggagcccagtgtctgctaacaaaccaaacgtgagagataatcaagtaaaaggggtcgccaccactacaagtggttcctcacgtgagccatctgatgaggatgatgaagcaggtccttgtgaacaaagcacaaacgctattgatatgaagcgccttagaaggaaggtttctaatagagagtctgcaaggaggtccaggagaagaaaacaagcccatttggctgacctggagtggcaagttgaacggctgagactggaaaatgcaaacctatttaagcagcttacagatgccagccaacaatttcgtgacgctgatacgaataaccgagtcctaaaatcagatgtcgaagctttgagagctaaggtgaaattagctgaggatatggtcactcgtggcacactcacccctatcaacaaccagattcttcaaaatcagagttcactaaacaccccacctcaactcaacacaaataatctacaccgcatgacacatgtttcgccaaccatcaccgtccgtgggaatgatgatgcttcatatggaggtggaattacagttagtggacaaaattcacctcttggtgggcttggaaacttggataatattccttgcagcgatttcaatagtggaatcaatagtaataatgctgtgagctctatgactagcatgtggccttaacgttattcttattgcaccacatgacttgtgttgtagtagtactgtccggttagatccaactttatgcatgtcttggttttattagatttgtggttatattgtggaaaatattatataggtaacaaaaatgtggtatctacgtgtaagaatccatctagaatatttagcatggtgtgtgttaaatggtttcttttttcttcttcacagtctttgcaaccttctccatgaactcaaccatctcctcgtaacgctcggcctgctccgccaatttcgccatgtaaacgttctcctcccgagaagaatccgccatttctcagattcgcaaatctcaccgcttaaccctgaaggaaaagaaagcgtagcccccttctgtcgtcttctcgcagccgtacccttctgtcgtcttctcgcagccgtacccttctgtcgtcttctcgcagccgtacccttctgtcgtctcctcgcaaccgtacccttctgtcgtcttctcgcagccgtatccttctgtcgtcttcgcagccgacga

SEQ ID NO: 26394 - DNA, 316 bp, Glycine max
  unsure (1)..(316): unsure at all n locations
  Clone ID: TF_700977467H1
wgtcgcangcacgcgtacgtaagctcggaattcggctcgagcacacaacaaattnctagagcgnnananngagannagagnnanannagcngatccnccatggnntccaccaaggancgcgaanactttgtctacaccgccaagctcgccgaacaanccgaacgctannaagaaanggtggaagcaatgnagaatgnngcgaagtgaacgtgnaattgacgntcgcngagccganncttctgtcggnanggtanaagaacgtngtgngtgctcgcacngcttcntggnggantntancgncgnttgnncacanana

SEQ ID NO: 26395 - DNA, 331 bp, Glycine max
  Clone ID: TF_LIB3094-072-Q1-K1-C6
gtccttaattcaccgatccagccacgcgtccgctctatcgctcacacacactatctctctgtctttctctcacccagatcttgtaacaagagctatgtctaccactccacgcgaaaaggtcacgtacatggccaagcataccgatcatgccaatcgctactaggagatgatgaaactcatggagaaggtatccgcctacaacgatagccatgagctcaccacggaggaacataaccttctctccgtaaactacaagaacgtgatcagcgctcgccacgcctactagcgcatcatctccataatcgagcacaaagaggataaacgcgtgaac

SEQ ID NO: 26396 - DNA, 358 bp, Glycine max
  Clone ID: TF_uC-gmroLIB3259P229h02b1
tgtaaaacatatttttgggagagagggtaacgggagggaaaatgtacgaccagtttcaggagaacaggaggttcataagggcccgtcggtgcgggaaccggcgcatcaggaaagacccgccgagaaagagagaaagacccagggctacttggccaagctcgccgagcaggccgagagatacgaagaaatggttgagtgcaggaagaaagcaggaacacttgttcccgatctaactgccgaagacaggaacctcctctcaacgggatacaaaaatgtgaccggcgcaccaagggcctcttggagcatgacgccctccattgagcacaccgacgagtctaagggcaatgagcgcactgtt

SEQ ID NO: 26397 - DNA, 189 bp, Glycine max
  Clone ID: TF_LIB3242-657-P1-J1-H5
gatcgcgagaacttcgcgtacatatgcaaactctccgagctgcccagccttccaagagatggtggaatcaatgaagaacgcgtgcgaatctctgcattgtactgtcgggggaggagcggaatttgctctctgttgggctcacaaatatgattggtgctcgcagagcgcgctggaggatcctgtcttcca

SEQ ID NO: 26398 - DNA, 506 bp, Glycine max
  Clone ID: TF_jC-gmXLIB3563P78cg03a1
tccagatcttgcaaaaaaaaaaaaaacacaagtggcgagcgatgcgctcccacctccacagcgaaagagttctgtgtacactgtgcgaatcctggcgggagcacggcccgagccgctacgagagagataggtgggagttcattggagaaggtgctcccgcctccgccggagagcagatgagcctgacccgtgggaggaggcgcaatccttcttcttcgtgaggctacaatgaacagtaattcgggagctccgcccgcgcgcttcctgagcgcattcatcttccttcacttgagcaaaatggagagagaggccgcggcaatcgaggaccacgtcagccgtcattccgtgactaccgctgccaagatcgagggccgagctctccaacatctgcgacggaatgctcaagctcctagacacgcgcctggtcccctccgccgcctccggcgactccaaggtcttctacctcaagatgaagggagactaccacaggtacctcgctgagttca

SEQ ID NO: 26399 - DNA, 594 bp, Glycine max
  Clone ID: TF_uC-gmroLIB3259P231f05a1
aaaaaaacaaatgaagggggtccccccttcgcttcctaaaataaggggcaattcgaagtttggtaaaaaaacccccatttgggtatttttttaaaccgcattttaggggaatttccaggggcttaaaaaaaatgggcggttcaaaacccctttttatgggagggccaaactaaaatggcccgggccctccccattttttaacgaaaaacccgattgcccaaaatctcggagccccggagattagccttcaaccccttctccttttgaaaactttacaagggggaggttcaaggcctaacaccccgagttgggtttgttaatttttgtcccccgccaccttgggggggggcttttttaattttattggcaccatcaccctgtttgtcaaaggtccaggggggggggttatcacttcctcgtgggttgaacaaagggccttccttgtaggacccctcccccaaggtatccatattaacaatagccctataaaaagcctgttttgcagggttgcccccccctcccggaaagttaaaaattctttatttaaacccggggaagtttaaagcaggcccccccctgtttgggggggggggg

SEQ ID NO: 26400 - DNA, 513 bp, Glycine max
  Clone ID: TF_LIB5118-006-B1-PF1-D4
tttgtttctatacgttgctggttttctggcaaattcaaagattctaggttgattgcttttgttgtttaaaaaagaaggagaataataaagaacatcaaaaactcttcataataacagagaagattgcttttacccttgccctttggaccttctcggacaccccacattagccaactatcactctcaaaacaaatggacggaatcagagtttgaactctctagaatgcaaccacaatggaggacgctccctcgcctcgagaaaaaaacgtgtacatggcaaatatcgcccaacaggccgagcgctacgaaaagaaggtggagctcatgaaaaaggtatcttctttcttttaacacccaccaccctaccggggaggaaagaaaccgcctctccgtagcctacaagaacgaaatggaagagcgccgcgcctcaggggaaatcttctcctctatctaacagaaggaggagagccacgctaagtaggatcacgacgccgtcatccgtgagtaccgata

SEQ ID NO: 26401 - DNA, 269 bp, Glycine max
  unsure (1)..(269): unsure at all n locations
  Clone ID: TF_LIB3242-769-P1-K1-A8
cagacgcgtgggcagactcgtggagtggagtttatggagaaggtcttctcctcctccaggagcttttagctaaccgtagaggatctcaaccttctttccgttaactacaagaacgtgatcggcactcgccgcgcctcctgcaacatcatcttctcaatctagcaaaacaatattattctcaatatccaaagcaatttgttctttaaacnctactaccgttccaatatcaagaaaaaccttcttcaacatttaatttcttattttcaaac

SEQ ID NO: 26402 - DNA, 451 bp, Glycine max
  Clone ID: TF_LIB5118-021-A1-PF1-A6
cggccgctcaggcggcgggcggattctcatattctcctcgttccctcctcccataacctccattctactcatcatcattctcatcgagatcacagaatggtgggagcaaagtcattactcccacatacagcacatataccttgcgaagctgtcggagcaggcggagcggtacgatcatatggccgaaggtcatggataatgctcagcagcgacgcatgacggcgccttccggtcgccgtgtgcatcgtgaacctactctctcagcactacattgactgaatcgctcctagtccatgcctgctaataatcctgtggtttctcactcaaaatgctgatgataacaccaaaaaattctattgggagctctgtgctcatgagtacctttatatgatatatgatatgaatccttgcttgcaactcatcgaataccgccagcgatacctattatata

SEQ ID NO: 26403 - DNA, 302 bp, Glycine max
  Clone ID: TF_LIB3049-054-Q1-E1-A8
gctctccgtcaggttcatcgtcccactttcttctccttttaaggtttcctttttgtttcacctttccagatctgcatcttccattttttaggattaagcggtgagattcatgaatctgagaaatgtcagattcttctcgggatgagaatgtttacaatgcgaaattggcggatcacgtcgaccgttacgatgagatggttgagttcatggacaatgtaccagacactgtggaagttgaggagttgacggtagatgagacaaatcttctctctgtggcttacaacaacgtgattggtgctatg

SEQ ID NO: 26404 - DNA, 373 bp, Glycine max
  Clone ID: TF_14991060
aggaaacttttcccggattttggaaaaattcaaggttggaaatgaaaaaaaaaagggggcaaaccagccccttaaagcttatgaaacactttctccccctgttgaaagggaactacaccctacccttcctattcgttggggccgggtccaaaattccccggggtttaataagaaaataatgaatccccctgaaagggccggccttcttgcaaagcaagcctttaataatgttgcctcaaacctgaatcccctgaaggaggatccttccaaggccagacccttgataatgcagttgttaaggaatacccttccttaatgaacttctgatatccccaaaaaggtggaggcccaaaaattggaaaccccacccagg

SEQ ID NO: 26405 - DNA, 283 bp, Glycine max
  Clone ID: TF_LIB3094-073-Q1-K1-C4
acggtttatctctcacacacactttctctctctctctatctcacccagatcttatatcagtgacgagcgctatcactccacgctaagagttcatgtacatggcgaacctggcttactcaacctaacgctactagcatatgatgaaattcatttaaaaagtctccgactacttcgagtaccagaatctcaccgacaacgctcgtaacctcctttccctatcctaccaaaactgcatcaacgctaccctcgcctcaccactcatcatctgctcaatctatctaaa

SEQ ID NO: 26406 - DNA, 221 bp, Glycine max
  Clone ID: TF_700755182H1
ctcacacacactttctctctctctctctctcatccagatcgtgtagcaatcgcgagcgctcccactccacgcgccgcgttcgtgtacatggcgaagctagcggagcaggccgcgcgctacgaggagatggtggacttcatggaaaaggtcaccgcctccgccgagcgcgacgagctgaccgtcgaggagcgtaacctcctctccgtcgcctacaagaacgt

SEQ ID NO: 26407 - DNA, 312 bp, Glycine max
  Clone ID: TF_LIB3242-403-P1-J1-G11
aattcggctcgagctcacacacactttatgtatctatctctatcagccagatcttgtagcaacggcgagcgctcccactccacgcgaagagttagtgtgcatggcgaagctggcggaacaagccaagcgctacaaggagacggtggagttcatggagaatgtctgcagctccgccgagagcgaggagctgaccgttgaggagcgtaacctcctctccgtcgactacaagaacgtgaacggcgctcgacgcgcctacaggcgcatcatctccttaattgagcagaaggaggagagccgcggaatctaggacca

SEQ ID NO: 26408 - DNA, 208 bp, Glycine max
  Clone ID: TF_8282709
ccacatgtccgtcatacgatactaccgctccaagatcgttgccgtactctacaacgtctactacggaatcctctatctcgtcgacactctccttgtccacttcgtcgtctacggcgacttcaaagtcttgtatctcaagatgaagggagactaccacaggtacctcgtcgagttcaagaccgtcgctgacctcaacgatgccgccgag

SEQ ID NO: 26409 - DNA, 498 bp, Glycine max
  Clone ID: TF_jC-gmro02910042d09a1
ggctcgaggagaaagtgagaggagagagaaagtagctgatcctccatggcctccaccaaggaacgcgaaaactttgtctacaccgccaagctcgccgaacaagccgaacgctatgaagacggttgaattttcgttgtggattttgaatttgaactttgcggagcacaattgtgtgtgattttttgagtgtttggtatgttgtggttagaaatggtggaagcaatgaagaatgtggcgaagctgaacgtggaattgacggtcgaggagcggaaccttctgtcggtagggtacaagaacgtggtgggtgctcgtagggcttcgtggaggattctatcgtcgattgaacagaaagaagaagctaaagggaacgatgtgagtgtgaagaggataaaggagtataggcagaaggtggagtctgagttgtccaatatctgcagtgatatcatgactgttattgatgaacaccttattccctctagctctgctggtgaacctagt

SEQ ID NO: 26410 - DNA, 262 bp, Glycine max
  unsure (1)..(262): unsure at all n locations
  Clone ID: TF_uC-gmropic116f05b1
gtcgcttctcgnccggcgaaannggcggagcgggccgattgaaacgaggagacggncgagcccacggagaagggngcaaagacngnggaggccgaggagccgacggnggaggagaggaancnccncncngnggcnaacaagaacgngannggngcgaggagggcnncgnggaggaacanancccccanngagcagaaggaggagagcaggggcaangaggaccacgnggccannanaaaggagnacaggggcaaaanngagg

SEQ ID NO: 26411 - DNA, 1069 bp, Glycine max
  Clone ID: TF_GmC1228_2
cacaaacacacaaaaaatttctagagcgagaaagtgagaggagagagaaagtagctgatcctccatggcctccaccaaggaacgcgaaaactttgtctacaccgccaagctcgccgaacaagccgaacgctatgaagaaatggtggaagcaatgaagaatgtggcgaagctgaacgtggaattgacggtcgaggagcggaaccttctgtcggtagggtacaagaacgtggtgggtgctcgtagggcttcgtggaggattctatcgtcgattgaacagaaagaagaagctaaagggaacgatgtgagtgtgaagaggataaaggagtataggcagaaggtggagtctgagttgtccaatatctgcagtgatatcatgactgttattgatgaacaccttattccctctagctctgctggtgaacctagtgtctttttctacaaaatgaagggggactattaccggtacctcgcggagttcaagtccggtgatgagagaaaagaggctgctgatcattccatgaaggcgtatcagtcggcttccactactgcagaggctgagttaccacccacacatcccatccgtttgggcctggctttgaacttctctgtcttttattatgaaattttgaactctcctgaaagggcctgtcaccttgctaagcaggcatttgatgaagccatctctgagttggatactctgagcgaggagtcttacaaagacagcaccctaattatgcagcttctgagggacaatctcaccctgtggacttctgacatccctgaagaaggagctgaggaacaaaaggtggattctgccagagctgctggaggtgacaatgcataggtattggctaggaatttgtggtgtcatacgagaaggctagtctttctcttgataatttaccattaggatgtagtaatagaacatggagttggtctctagaaaatcaccatagggctttgtgagccttttattctatgcgtgtgctttctgttactggatggagactggagttgagatttgtatgttgtttgcctgtgattcagtgaatttcttcattttgacttc

SEQ ID NO: 26412 - DNA, 3616 bp, Glycine max
  Clone ID: TF_GmC1521_2
ggggaataaagtatcaacccaaatatatatcatgttatctggtaaattgagttattatacaggaatccctactaaaatggacatcgcactaccttttacgaaaaaagagtaaccttagtgcaagccccccaacaaaatacacaattcaaaatacatggcagccaatcgcgaccagctggcagtgatagcactaccttaaattatcattccctcatctataagcagaaactagttttatctccatatacacgaagaattataacatgatggtgtttttatttctccgctaatgtttagtccctgatttgagatcataatgccagaacaatagctgcaaatttaatcggaatcaatactaactagcaacaataaaaaatttataaatcactaaaccacattcttctcatccataaaacacattagacaatccactgaaacattgtaaatcccaagcgcaacgcgcacttgaaatcataaaattcattaatacaataatcccactatggcaagccacattggatccatattatcggtaatacatatccaatcaactaccacatcgcaactgccatcgcctattcgcctggttgttgcttagatgtttccttgatctcatctccagcatcgtccgtgatgtctgatgtccacaaagtcagattgtcacggagaagttgcatgatcaatgtactatctttgtatgactcttcacccaatgtgtcaagctcggaaattgcctcatcaaatgcctgcttggcaagattacaagcacgatctggcgagttaaggatttcataatagaacacagaaaagttgagagcaagtcccaacctaatggggtgagtgggggccaagtcagcaagagcaatatcctgagcggatttgtaagcaagcaaagtactctctgcagcctctttcctctctgccccggtcttgaactcagcaaggtacctgtggtaatcacccttcattttaaggtaaaagactttgctctcgggagatgcagcggaaggaatgaggttggactcaaggaggttcaaaatcccatcacagatcttgctgagttcagcctcaattttgcccctgtactcctttataatggccacgtggtcctcattgcccctgctctcctccttctgctcaatggaggatatgatcctccacgaagccctcctcgcaccaatcacgttcttgtaagccacagagaggagattcctctcctccaccgtcaactcctcaacctccacagtctttgcaaccttctccatgaactcaaccatctcctcgtaacgctcggcctgctccgccaatttcgccatgtaaacgttctcctcccgagaagaatccgccatttctcagattcgcaaattcctcgcaccaatcacgttcttgtaagccacagagaggagatttctctcctccaccgtcaactcctcaacctccacagtctttgctaccttctccatgaactcaaccatctcctcgtaacgctcggcctgctccgccaatttcgccatgtaaacattctcctcccgagaagaatccgccatttctcagattcacgaatctcaccgcttaatcctaaaaaatggaagatgcagatctggaaaggagaaacaaaaaggaaaccctaaaaggagaagaaagtgggacgatgaacctgctcagaacttggtaagcctcacctaaaacctgaaaattttgtgcagcaagagggtcatttgggtttttatctggatgcacttgccgtgccttaatgtaataagctttcttaatctcggcttcggatgccgtagggctgacacccagcacgtcatagtattcggtctccttcaccatttcaaagcccagttgattgatagtggatgacgtattccaagccaaaaccaaatggcgttatccttctcactaaggcctaaactctctctccgcctgttgtggttggtatggacgtgggaatcccgggcgttgactgctgcaaccgcgtaattctctgtgtgaagccctcctctccggtggttccgactttttgccctcccccttctgtcgtccaggcgtagaattattagacaagcaaaacaacactgcacaatgcggtccccgccgacaagatgcgatctccagcacatacaggcacattccacacgagcgatacatacaatacaccccctcaaaaaccaacaaacaatcaaataaactacaaaccggatatcaaactcaatccttgctggttgaagtaggtctctgggcacccgggggggcggttggcctagggaaattataatcaaattgcatgccagcaaagcgcggggcctccacataggggctctgagacgaaaaatcaggacttgaagatttgggtgatgtactaggagaagtatcattgccagtttcacttccattcaacttgtgtactgccttatttggacactttcattctcgtttccattggctgatttaaccctctggaagattttaccaagagtttttaaccctttagctcgagcgcggagttcttctttcttggcaccgttgtcttgaagaaccatttgacaaacgcgggaaagagtggcttcaatgtctgccacattaagcttccacaatgagtcaatcattaatttcttgtgattttgcatgtattcttcaagctcttcttcagtatagtccccttctgaactgagttgctttttcatatcctcctgcaattggattaaagcaattgcccctgttgctgctgtaacttgagatttaatagagtgccctttgtttctaaaccactcagcaataaaaggcacacccaaataaattgctttcttccctagctcttttgctgcctgccttgcgtatatgtagccaatggtattcaacatatcaaccccataagctgcattagatagccgggctacttcagcttctgcatcattaacaaaaccctctttgtttccttgaacatattggttgagtctatttttcagtatctctgcaagcttttcttctctctccttctgaacaaccctcattttctcttgcaactttttactatcaaattgttctccttcagtaaagatgtccattgaagccattgatgccatggctaactgacctatatattcctcaaaaagctcactaccaaaaagcatggcaaagattgctgcaggatcaataattgcttcagttgaaattcctgattttccatgagcatcataagcttgtctttgagctgggtcactcagaacttggtaagcctcacctaaaacctgaaaattttgtgcagcaagagggtcatttgggtttttatctggatgcacttgccgtgccttaatgtaataagctttcttaatctcggcttcggatgccgtagggctgacacccagcacgtcatagtattcggtctccttcaccatttcaaagcccagttgattgatagtggatgacgtattccaagccaaaaccaaatggcgttatccttctcactaaggcctaaactctctctccgcctgttgtggttggtatggacgtgggaatcccgggcgttgactgctgcaaccgcgtaattctctgtgtgaagccctcctctccggtggttccgactttttgccctccgcgttccgtcgtccag

SEQ ID NO: 26413 - DNA, 329 bp, Glycine max
  Clone ID: TF_jC-gmst024131g06a1
ggctcgagctaagatgtagcatccatcttagatggttttgtcgcacaacaagaaagggttatttgcactatcgcgcggtcactccacgcgaagagatcatgtacatggcgaagctcgtggtcccggcccagcgctacgaggagatggtggggtacaaggaaataggactccgccttaaactagagcgaggaactgaccgtggaggagcgcaacctcctcttcgtggactcaggaacgtaatctgggctcgtcgtgccttctggcgcatcatcacctccactgtccagaagggggagagccgtggggacgaggaacctcttctgcaactt

SEQ ID NO: 26414 - DNA, 246 bp, Glycine max
  Clone ID: TF_700746076H1
cggctcgagctttctctctgtgtctctctcgccgaggtcttgtggcggtggcgagcgctgccactccgcgcgaagagtgcgagtgcgtggcgaagtggcggacaggccgagcgctgcgaggagatggtggagttcgtggagaaggtctccgcctccgccgagagcgaggagctgaccgtggaggagcgtgacctcctctccgtcgcctgcgagggttgtgtttcggcgctcgccgcgcctcctggc

SEQ ID NO: 26415 - DNA, 402 bp, Glycine max
  Clone ID: TF_uC-gmroLIB3259P220d12a1
aatacgctgaccatagtcgcctcttttggatggacatgctaaagttgcccagcacatccacagtttttaacgaagatcacgaacgcccaaaacctcggtcacactgtgatgagcatcctacaccttcgcggtttgcaaacagtacataatggaaggtcaaagactaaagagcggtctatgagatggttaatggcgcgcccacccacctgtgggcgcggcatctctaatggcatgggcaccatcctcctgcctgtgggcaggtccagagggtgaggctatcaccgagcagttgcctgaccacagcgcaacccagggatgactcctctcacaaaggatccaatccagcaatgccctcaacaaaagcctgttttgccaggctgcaagcccgatcaggggaggcaa

SEQ ID NO: 26416 - DNA, 784 bp, Glycine max
  Clone ID: TF_GmC1228_4
ggctcgaggtctttttctacaaaatgaagggggactattaccggtacctcgcggagttcaagtccggtgatgagagaaaagaggctgctgatcattccatgaaggcgtatcagtcggcttccactactgcagaggctgagttaccacccacacatcccatccgtttgggcctggctttgaacttctctgtcttttattatgaaattttgaactctcctgaaagggcctgtcaccttgctaagcaggcatttgatgaagccatctctgagttggatactctgagcgaggagtcttacaaagacaggccaccctaattatgcagcttctgagggacaatctcaccctgtggacttctgacatccctgaagaaggagctgaggaacaaaaggtggattctgcccgagctgctggaggtgacgatgcataggtaggttatatacccatttagctgatggtatttgggttttactttttaccttaaagttacattttgcaatgaagtgaagcaggtattggccaaggaatttgtggagtgcatacgagaaggctagtctctctcttgatagtttaccattaggatgttgtaatagaacatggaattggtctctagaaaatcaccataaggctttgtgagccttttattctatgcgtgtgctttctgttactggagactggagttgagatttgcatggtgtttggctgtaatttagtgaatttcttcattttgactttctttctaagaggatgctaccttgcattcttttatcagtttacatagataata

SEQ ID NO: 26417 - DNA, 412 bp, Glycine max
  Clone ID: TF_9902456
ggcaagcgctaccactccacgcgaagagttcgtgtacatggcgaatctggcggagcaggccgagcgctacgacgagatggtggagttcatggagaaggtctccggcaacgccgagaactaggagctgaccgtggaggagcataaccagctctgcgtcacctacaagaacaggatcaggacatcgcgcgcctgctggcgcataatatcctgaatcgagcagaatgaggagagccagggcaacgaggaccacggtcccgtcatccgcagctaccgatcacagatcaaggccgagctctgacacatcgtggacggtatcctgtaactcattgaacgcacctagatcactacatccgctacgggacattagggtaatataccgtttatgaagggacactactacaggtcattgtca

SEQ ID NO: 26418 - DNA, 402 bp, Glycine max
  Clone ID: TF_LIB4200-007-Q1-N1-E11
aaaagggaaattccagggcccttttgaaaataggcggttcaaaacccccccccaaggggaggcccaactaaaatagcccagtccctccccatttcataacgaaaaacatgaatccccaaaatctcagtacccccgagattagcattcaaccccttctccctttgaaaaccttccccaggggaaggccaacccccaattaaaagggtggggtgtttaattttggccccccccccctttgggggcggcttttttaatttaatttgccccattatcctgcttgtaaaaggccccaagggtaagggtatcacaaaaaaattgcatgaccaaagggctatccttggatgattcccctcccaacggatccaattcaacaatagcctcataaaaagcctgttttgcaag

SEQ ID NO: 26419 - DNA, 511 bp, Glycine max
  Clone ID: TF_11274056
cttttctgtattttactacgaaatccttaattctccggatcgtgcctgcaaccttgcaaaacaggttagattcagagatagtgaatatcatggcctttgttttgctctgtttatttgtgttttactatattttgagcaaagttttggatgtttaacgtgaaaagaggaaggaattcggccatatacagtgaaatttgcagctattgttgtccattgatttgaataactttatggctactgcatgttgcatttcgttaatgtcgaagcaataatgatgttactggttggattctagcggctaaatatgaatttgtaatatggtttgtacagttgttcctcctttacctgtagcttaaatgagttgtcaaatatttattgggtttcacagtaggtgtttggaattctaatagttatagctagcaaacaataatcaatcaatatttgacttcttaatctagatactggtatagatgggaatctgaccttgaggaatacccgttgaataaattct

SEQ ID NO: 26420 - DNA, 296 bp, Glycine max
  Clone ID: TF_GmC566258_1
ctcgagctcgcgccctccccttcccgccgcctcactgatgtcgtcgctgcctctcgttcgtcgccctgtgctctccactctgcaaccatgtcgcgtcgtagtaactacgacagatacggcccagcgtttactcacccactatctcgccccagtcatgccgagacgtacgacgaaatggttcagtgtatgaagatagtagcacaacttgatcttggtctgactgtggatggcaggttacttctctcagtgggatacgttactgtgattggttcacgacgggcctcttggcgcgtaat

SEQ ID NO: 26421 - DNA, 644 bp, Glycine max
  Clone ID: TF_uC-gmflLIB3275P131g01b1
attagcttggactgctttaaatggtgcaactacagcacatgcacatcataagcacattatttgatcttaattactcgtctgtatttgacaggatatgacactttttgtgcggttaataagatcaaataacatgctaatttctagaaagcacaacacgttacaaggcactttactatatggttgtgaagagccataatatggaggcctaatgtgtttcatggactaaatacagcttctgaccatccttgatcatgtccacatcagtaactttaccagcatcttctgataaaatacaagcatcgccagaaaattctatttgttctgccgctgatttgattagctcttgtatggagtgtggaatccataatacaattccatgtcttctattatctttcggatcccacgggtggtaagggaacactgtgcacttctttggatgcattttgtctgtatattcttgggatgggaattctgacagttgagcagattttgcatcttccagaagcttgatcaggttcttatttccacacatccgagcttcatcaagcggcgtatttccccatctgtctttggtaaaaacactagctcctccttctaatagcaactttgccatgaaatataaaccttcagctgcagcaatgtga

SEQ ID NO: 26422 - DNA, 1521 bp, Glycine max
  Clone ID: TF_GmC27269_1
cacgagggcgcggagacgaatgaaggggccccattacgcgatcgcccacgcgtccgcccacgcgtccgtacggctgcgagaagacgacagaaggggggagaaatgaattgatcccaggggctctgtgatttgatcagcagatagagattgaacatttgcagcgaaaagggaaagaaagagaaaatcatgtcaacagcagaagctcctccttctttccaagaagcagcgcgatgcgttgtctgcaattgcagtttcaacactttcagaagaaggcaccactgtcgatcctgtgggagaacattgtgtaatgaacattcatcaaatcaaatggctttaccacaatttggcctttactcaaatgtccgagtatgtgctgattgtttcaacaacttgcggtctgggaaggatgaaccacagacttcttcagacggagtaaacagtgtgacagatacaatttctaaattagatatcaacgcaaatgttgattcaaaatccatactaactgcagagactaagcttttgtcaggcattaaagagtgtaaatgtggaatgccactttgcatttgtgaagctccaaccccttcctctgatgcattcccccagcagaaacccaatccagttattgcagctccatcaaatcctaaacctaagaagacagatactgttccgaaaattagaagctccatttcaactagtaaatttagttctatgtttaacgttggtcatgtaactaatggtacctcagacagaccccagattgattatgaagttactggagagggtttaagagaagcaataaaaaatagtgacgttgctgctgttaagaaacttcttaatgagggtgtggatgcaaattacagggacaagcaaggactgtctttattacatttggctgcagtcttcaatcaaactgatatagttttcattcttatggattcgggggcatagcctggagtacaacaatggaccaaggagaaacacctatagattgtgtttatctgtcattgcaatacaaaatgcgaaagaagatggaagaaggtggaacagtggaccaaagcatttgaacaatctattacttttatctgtgttctttttatgcagtgcccccaatactaccactgtctaaaggtcctccgttaccagaacaaaaatttccggcttctgtataattgtgacagagatggagttcaattcatctttcgaatggcagactaagtatgcagacctttattagacatatctttgtcagccacgcaacttaggcagtattactattcagtttgtaaatttctttggtctatgacataataagagcatttttaagtatgcatctatgtattgttgagttgagcagctgtcttactttcttccaccacatgcagtcataaatgtggaattctaaattaaaaagggtttaagaaaaagaaaaaatgatgtggtataaaaatcccgtttcatgtcccggtcatttttttctctcttctgttgcaagcaatgagtcatagttgactatgatactct

SEQ ID NO: 26423 - DNA, 464 bp, Glycine max
  Clone ID: TF_GmC133757_1
gaaagcacaggagtgagttatgtcagactcaggtgcagttaccttgccagctgtagatgacattcccaagcatgggaattgtagcgaactgggtattgttgtggctgaagctgagcatctacagtcactggaacccgaaagttctttttttggagctagacagaacgcataaaaggcaaatatatatagcagcaagttcaggaaattggagtgaggctttatcctatttcaaaattcatcctcattggtggcgaattccattgacttctcgtggagttacagctctacacgttgcagttagcatgagaaaaactagttttgtggaaaagttggtggatcgtgtggatcgtatgaacatgcaagatttggaaattcgcatggcagatgggaacacagccttttgtttggctgcgataacaggaaatgtgaaatgtgctaaaattctgttgggcaagaatccgggg

SEQ ID NO: 26424 - DNA, 455 bp, Glycine max
  Clone ID: TF_uC-gmropic020c12b1
cccatgcgttcggaaactttagagaaagtgaatagtgatatggaggcaaagggtgtgcggttcttagcgtatcaatcaatattttcgagcgttggatctggggacttcgatggggtgaagaaactggtggaggaagcgaagaaggaagaagggtcatcgctctctgatgtgatgtctcttcagaacgatgctggagagactgcgctatacatcgctgcagagaataatctgcaagagatgttcagcttcttgctcagcatctgtcactttgaggtcgacaagattcgctccaaggctgatatgaacgcctttcatgtggctgccaagcgtggcaatctagatattgtgagggagcttttgaatatttggcctgaggtctgcaagttatgtgacttctcaaacaccagtcctctatattctgctgcaactcaagatcacttggatgtggtggatgc

SEQ ID NO: 26425 - DNA, 1472 bp, Glycine max
  Clone ID: TF_GmC4222_2
ggctcgaggtcggactaggaaagttttcaaagccaagcaaatacgagctttacccaattttcttgctgttgaattttccactgttcaatcttcaaaatcacatttttctcgatcttcaccttctgggttgctttttttttttcttcttcttcttcttcttcttttgttttcgctatggaatcgaaaaaccctgcgaggtttacgctggggaagcagtcgtcgcttgccccagaacgccataacaaagaagcagagctccaaaaagatggggaagctgttgatcagggtgtgaggttgatgtattcggcattcgaaggcgatgtggatggaattcgcgaggcgttggagtctggtgtgagtgtgaattacaaggatattgataatcgcactgctcttcatgttgcggcgtgtgagggcttcactgatgttgttgatttattgcgacagaaggggacggaatatcttcccaagggagatcttcgtgatttcttgaaaagaaaaggagctttgaaaccatcgacagctgtgagatttgcacttgatattgctaggggagtgggttatttgcatgaaaataagccatcacccattattcaccgtgatcttgagccttctaatatattgcgggatgattctgggcacctaaaagttgcagactttggggttagcaagttgctggcagttaaagaagacaagcctctaacttgccacgatacttcctgccgctatgtggctcctgaagttttcagacaagaatatgacactaaagtggatgtattttcatttgcactaattctgcaagagatgattgaaggctgccctcctttttctgcaaagcaagacgatgaagttcctaaggtatatgctgcaaaagagcgtccacctttccaagcaccagccaagcgttactcccatggaattcgagaattgattgaagagtgctggaatgagaatccagcaaagcggccaacatttaggcaaataataacaaagctggagtccatctacaacacaattggtcacaaaagacattggaaggttaggccattgaaatgcttccaaaatctggaggccttgttgaagagagatcattcaaatggaagtagtcgtggcggttcatctcgctccacatcaagcagaatatgaaggagaacattggtcttatcctgtaactaaaatattggtataaagataaaagatagcaaccaaatttgacttcttgagttggagctttgcaacgttttctcgtgtgtattcattcacaggttcatggttgttttcgtctttcaagattctttatactcgatgatttatttccaattacatttatgtctggtgacagaattagtatttgtatgtaacatatacacgtattctaaggaatttgctccctgtcatgtacattattatgtaacaagacatttttgttgggtatatatcatgcaatagatttttagctgaagaacttcacc

SEQ ID NO: 26426 - DNA, 710 bp, Glycine max
  unsure (1)..(710): unsure at all n locations
  Clone ID: TF_LIB4164-057-R1-N1-B9
ttgatgcctgcgttaatttagagatgctataagctcattcggtccaaaagtgtccaacattattatatgaatgcaacaattttcaaaacatgtagtaaatatcaatgaggaagttttcaaaacacatcaccatatattacaatttacaagcaaaactgacaaggatttgcaaataataataataataataataataataataataataataaattaatgaatgaataaatgaacatactagtgcattgtagcacatgcatgatacaagatccacaatttaattatttgaattgaccataaacttgtctaggaaataaaaaaatggaaaaagaaaaggccaagatccataataaaaatcaagatagaagagaagaggacccttatgctaatccgaagaagaagaaagaaaaaatgaattgaatcaatttaaaacaagttttccaaatttcatttatattattatgttaatagagcaatgaaattgaaacctttacattagctccggcttgaagaagcttctccacacaggcgatgttcccatgcattgttgccaacataagcggagtctaaagcattcccgttttttctttcttccatattaagtgcaagaagtataaacccatatggaaacaaacattgaaaatatgtttgcaaattaataatgaacatcaattntaaaaagccaaaatatgtttgcaaatatgggagct

SEQ ID NO: 26427 - DNA, 749 bp, Glycine max
  Clone ID: TF_GmC238964_1
cggaattaccggcccgacccacgcgtccgtttctctttgtgtgtgggttttttctttatcctcagtttgatcgcaatttgcaaatagaaatggcgaaatcgagcaaagatccgacaacgtcgtatccggcgataaagtcagagcagtacttacacagccccgttcactacgcggtggcgattcgcgaccacacaaagctttccagaatcatttcttcgcttccccgagttcccgacccggcccgagtcatcaccgagtccgactcgctcactcaggagcgagtcgccgagaaaatctctgccgtgctcgaccgccgcgacgtcccattccgggagacgcctctccacctcgctgtccgcctcaacgacgtctccgccgcgcgggccatcgcctccgccggcgccgacatctccctccacaacgccgccggctggaacccgctccaggaggcgctctgccggcgcgcctccgaaatcgcgcaggtgctcgtccggctccaccaccgcgccgcctgggcgaagtggcgccgccgcctgcctcgcctcgtggcggctctccgccgcatgcgtgatttctacatggagatctcgtttcactttgagagctccgtgattcccttcgtcggaaaaatcgctccctccgacacctacaaaatctggaagagcgacgggaacctccgcgccgacaccaccctcgccggcttcgacggcctcaaaatccaccgcgccgaccagagtttcctcttcctc

SEQ ID NO: 26428 - DNA, 603 bp, Glycine max
  Clone ID: TF_uC-gmflLIB3275P093b11b1
aagggagtctccgcttatggtgcaacgacgacgcggtgttgagaagattgtgcaatggggtaggcgatcatggatcataaccaccatcatcgtcatcacaatcacaatcatgctcttcacaccacccctctctccgagcccaccacccccaccacccctcgccccaccctcttcctctccacctccggcaaggccctcctcctctccaactccaacaagcgcctcgacacccccaggaagaaatatgtcaagcaggtcaccggccgccacaacgacaccgagctccacctcgcctcgcagcgcggcgacgtggactctgtccgccacgtcctcgccgagatcgactccatcatgatggggagcttggagttcgatgcggagttggcggacatcaggtccgccatcttcaacgaggtgaatgatctgggagaaaccgccctcttcaccgtcgcggaaaagggccacctcgacgtcgtccgggagctcctcccttacaccaccgatgatgcgctttcctccaaaaaccggtccgggtttgacaccttgcacatcgccgctagcaatggtcatcttgccattgtgcaggcgctactaaaccatgac

SEQ ID NO: 26429 - DNA, 774 bp, Glycine max
  unsure (1)..(774): unsure at all n locations
  Clone ID: TF_GmC60497_1
gactctcttgtaagcgagtgaacataattaccaagtgcacatatagatatatgggcatgatgagaatgagtggacttacatggtcagtgctaaagagtgagctgtgaaatagaggggagagaaagagagagaatggaacaaattccattgtttaatgagaaaatgaaattggctcagaaagcagccatggctaaacgatgggaagacttcaagaaaataatgaaggacgaccaggagaacttgctcaagcagtttgatctgtttgagaacagtgccatccatgttgcaactcgctctaacagcccacgactcctcagagaattgatagagatgttaccaaaagaagaaaggtggcaagctttgtgcaaggaaaatcgcgaagggaacacggttttacacgaggttgtgttttgtaagaagaagaaaatggctgatgttgtgtttgagattgaagatgagttgttattgcaacaacaatcatcatcactagaggaaaagagaacattgctagatatgagaaaccaccgaggtgaaacccctttgttcatggctgcaatgcatggaaagctgaagatgctcaagcatatggccaaccgtacaggcacacgaaatatggaagattttcgaaaacatttgcatcgatctgacaaatattctgctcttcatgccagtgtcatggggcaacattntgatgttgcaatttggctagtaagaatgaatagagaacttgctatgganaaggatgagaaggaattaacttgtcttcaattactt

SEQ ID NO: 26430 - DNA, 694 bp, Glycine max
  Clone ID: TF_GmC1132_2
aaagcaaggactaaaacgttgactccaaagatccccaatgatacaactgcaatccaaattgccatggcagaaaatcatgtggacatggttcatttgcttgtcatgaatggtgcagatgtctctgatgtgcataaccatgaattttgttcatccaccttagatgaaatgctgcagaagcgtgaaattgggcatctaattaatgtaactgaggtcatgcgcagtggagttgtattaaaggggaaacatcaagaacaggagctcaatggaggaagatctaatggactaaagtttccaagggtaagcatatatagaggtcaccctgtagttagaagagaaaaaggttcggtggaagctgggaagctaataaggttgcctgattcattagaggaactcaaaactattgcaggtgaaaaatttgggtttgatgcaaaagatgcaatggtgacaaatgaagaaggagcagaaatagattccattgatgtgatcagagataatgacaaacttttttttgttgaataatctgagatgcgaaaatgtcaagtgtaaatatataatctcgcacaacagaattacttacaagtttcttttgtgttagtaattttgtcttcttcctgtagccataaagaagtggcttgattggaaacatttttcagttgacttttggtttataattcatagttttttacttccaata

SEQ ID NO: 26431 - DNA, 1221 bp, Glycine max
  Clone ID: TF_GmC252_1
caagcgtccggaacatttatgccggctctcggcaccgtgttcaagcgattagggtttcctcccatcgaacttgataaccctcacgtgcccctccctcgccgccacgtggatcgccgtcctcccctcggagtacaccgcatccacttccaactcctcgccgtcgttgccgtagcgctccaactgaaacttcatcgtgtcgattcggtccattgccgcggcctcgtgaagaaccgattcgtcgattttgcagccggaggcttccagaagcttcaccgcttggaggctcccaaccctaattgcgagcggcatgagggattccgccgtcgcgcagcaaatccgcgacgacgtcggcgctgccgcattccatggcgacgtgggggccgacgagggagacgtgggggccgggtttggagaatagttggcggaggtgttcgacggtggcctttcgggtggggagcatggtggctcggtcggttatggcgtcgggagggtcggagagagggtgttgatcagagggctgagagagttgtagtgtgtaagaaacagaagagagtgggggaattgtggagaagggtttgtggtggttaaagacactgccactgacatggtgtgcatgaggctggtgagcttgaaggaggagctgcacttttggcccttttggaatatcaactcaacttcctttgtttctgctttcactaacctgtccatgatcaacctgattgattctttgattattgattgattgattctgactttgaactttaaagggtgcttgattacttgaaggaggatgattgattgattctttggctgtttgtttgtttagtttatgttttttttttaatttattagtagacttgtgtgattaattaatactatgtgtagcatgcttgttggttggggtgtgactgtgacagggtaggtgggagacattgaccatgactcctccttgaaagaatggagaaggatatgaaacagtcgcttttgaatttgatgaagcattttcagcgagactcgagactcaagaatgctattactactagtcaattgcacaggactcggacaaggtaaagaaggtgtaagagttgccttattccaaaaggatttgtttttgctgactgattttctagttagacctaccattctggttgcaagtttcattcactttttactgaccaattcaatttcaacatataaatgtgaaggttggaaatgcttttc

SEQ ID NO: 26432 - DNA, 471 bp, Glycine max
  Clone ID: TF_GmC77836_1
atcgattccaacaaagtcttctaaaaatattagtgttgttgggaaccaaggtgtccacaacacaactattcacaaagccacactcacaatcaaagccaagaagtactctcaacataatgagttctgacgcgttgaaagttgctgccgaagggaataacatagacggtctctaccaagagattcagcaggatccacgtattttggagtccatagattcaatcccatttgttgaaactcctttgcatgttgctgcaactcttggtcattttgagtttgctactgagatcatgacactgaaaccttcatttgctcagaaactaaatccagaaggcttcactcccatccaccttgctttacaatgcaaccatgacgaaatggtccttcgccttgtagaaatgaacaaagatctcgtccgagtcaaagggagggaaggccttactcccctacatttggccagttaagaaattaaac

SEQ ID NO: 26433 - DNA, 255 bp, Glycine max
  Clone ID: TF_GmC673008_1
tagcaaggcgatgatgacattggttgacgagctggagacattggttgacgagctggatgcattggacttggggtcgtcggtggtgccggtgaagaaggtcccatacggcgacgtgttcgaggcgtcccgcgctggcgacgtcgagcggctccggtaccttctggaggcaggcgtgaacgtgaacgctcgtgaccagtgggactccgttgccctctactacgcctgcctcgccggccacctcgacgccgcccgcac

SEQ ID NO: 26434 - DNA, 3583 bp, Glycine max
  Clone ID: TF_GmC84_2
ggctcgagtttcatttggcatttacatttgcatttgatttccgcgttcgcaagttgtaatcaaaatcaagccatagcgaccgaggaaggcggtgatcggcaatgagcagcggcggcggaggcgaaggagaaggagaaggcgcgtgtgagtcgaacgtcgctgattctgtggcacgcgcaccaaaacgacgccgcggcggtgcggaagcttctggaggaggatccgtccctggtgaaggcgagggattacgatagccgcacgccgctgcacgtgaagtcactccacggatgggtcgaagtgtcgaagtgcttgatcgaattcgatgctgacgtcaacgctcaggatcgttggaaaaacactcctctggctgatgcagaaagagctaaaagaactgccatgattgagcttttgaagtcacatggtggcttgtcgtatctggtcaggacttcaggcatgaggttaatttactagtgaagctttcgacaccctaatgtcgttcaatttcttggagctgttactgacaagaagccccttatgttaattactgagtatctgagaggaggtgatctttataagtacctcaaggacaaaggtgcacttagtccttcaacagccatcaactttggcttggatattgctagagggatggcctatcttcacaatgaaccaaatgttatcattcattgagacctaaagccaaggaatgttcttttagtcctctggtgctgaccatttaaaagttggtgaatttggacttagtaagctcattaaggtccaaagtgctcatgacgggtgaaactggaagctactgccacatggctcctgaagttttgaaataccggagatatgataagaaggttgatgtgttctcctttgcaatgagtgagatgcttgaaggtgaacccccgttttcaatttaagaaccttatgatggagccaaatatgtggcagaaggacaaaggccttcttttagggcaaagggttatatcctgaactgcaagactgttgttgttgttggcggctggggttagtctctgtggaggtttgggtgttttttgaggcagagcttattctcattttgctccaatggagatgcaggaccaaatagaaagcacaagatcaaccatatttggctcagctagtaacatccattccaatgctgaaaagcaggccgaaaatgttgctcccaaggtgaggaaaccatataccattactaaacaaagggagaagtggacagaggaagagcatcaaaagttccttgaagctttgaaattgtatggtcgtggctggcgccaaattgaagagcatataggtaccaaaactgctgttcagattcgaagccatgctcaaaagtttttctctaaggttgtgagggaatctgaggtcagtgatgagggttctatacaaccaattaacatacctcctcctcggcctaagaggaaacccctgcatccatatccccgtaaatcagttaattctttccgtccgcccacgcgtccaatgaaacagaaatatctccatctacaaacctgttagttgcagagaaagacaccccatctccaacctcggtgctatctacggttggttcggaagcatttgggtctcaattttcagagcagactaacagatgcctttcaccaaactcttgcaccactgatattcactcagtcagcttatcacctgctgaaaaggaaaatgattgcatgacatccaaagcatccgaggaggaagagaaagcatcaccagcttcacttcctttatccactgtttctaacccaaacatgtgcatgaagcctgagtttagttccaaggacactttcatagaagatgctgccaatatgccacaaaccactagtattaagctttttggaagaacggtctctatggtaggtaatcagaagtcactgaacatagatgatgatgatggtaagccaataactgtgaagtctgatgaagtagatgatgttgagaatgagaagcttggccaatcaggagaatccaagcaagtagatacacaattatcactcggcgtggttagtggtaactggcctataacacccgatgctgatggagctaatgtgaccagcatagagcccccaaaggagaaccaatgcttcagtgaatctgcacctgatgcattttttccgcagtggagtttgtcccaaggccttccacctttctacctgaggccatgcaatcaggtcctaaatcccttgcctcttaggccctcctctttgaaagtaagaacaagagaggaggaaagttgttgcactggttccaacactgaatcagtctgtgacatggaaaaccaaggcaagaactcagatgctgttgattctaagtttcaaaaatatcacgaggaaggagctgcaccccagaagaagcctgcaaggggatttgtaccatataaaagatgtttagctgaaagagatggacattcttttattgttgccatggaagagagggaggggcaacgagcacgtgtgtgctcatagccttacattctatttttacatgattcataatcatggtgttaatcagagaaaaaactgagaaataaggacctgatttaggtagttgtgatctaattgtctaattgacaagcatctgatttccaattcttttttcccatattttctttctttctcctgaaaacacttcatgtccaataattcaagcgggggcttgtggcattgtttgttctggctcgtatcatgttacagttactttaaccaaatagagacatatagcagcaagtctgtcattactgttttatttctactcttggcttctgtgtgtctttttagttgtatgattgcatcagtgatgggggtgttctagggaagcgaggacaagcacagcatgtcactagacatcatatatgtcataacaattggctctggaaaacaaatgatgtcaatgaattaaagcttaaagagtgccatgtggtgatgactaccttaccaatttgtatatctggattttctttctgtatcatatttttaataatagattttaaacattgtttcttcaaaaaggttatatccctgaactgcgagagttaactgagcagtgttgggatgctgacatgaagcaaagaccttcattcatagagatcattaaacaccttgaaaagatcaaggaaaatttgccttcagatcatcactggcacttgttcacttcatgatttttaggagcattggtgccgtgaaattcagatgattatctgctattaccattccagcgggttgccttatctactgtcgcgggtttttgaacagagccgacttggaaaacctagctaaggtcatgagcattgctttgaactgttagattcaaatgagcataacaggtttatgctgattgcctttatctggtgtttacattcaattactgttttttgtctcattaaaattcttggcgaattctattcagctatttaagtgagcagatactagttgttgcttgagtgtaatatgtagggtacaaaacccattgaggaaaaatataacacatcatgcaatctagtgtttaatattttatcttatgattaaaaattaatagcggttttcatttcttccaa

SEQ ID NO: 26435 - DNA, 1078 bp, Glycine max
  Clone ID: TF_GmC39086_1
cggtccggattcccgcttcgacccacgcgtccggggcgcgggatgttggggaagaccgagttctgaccgattccttttgagtggcgttgtcatttgtcagcattaatggtcccatccatcctcacccttggatctcatctttcccattccattctcaccgtccgatcttcctctttctcttccatttcaatttcaattcgcgagtgcgcgagtgggtttgaacgaagaaccctaaccatctccgcagcgcaagctgctcattgcaaccctccaaactatcaactgggatcgtaaccgctctctcgccctcgccagatttgattggatcggcttcctgcattcttggactcgggaatttggaccaaaaacagttccccaaatcttgctttttgtcttgttcttgtttctaagtcgttaatgtcagtgcagcgaagtaatctctggcaagttgattgtggcaggggagaggagggttcaaaattgggcagcatataaacttggattacccattttggtggttttccctttgtcattggaaccatggaaattgttgatttgagtgtctaaggtaagtccgaggtatgagtgcagcctatgctgtatctgctttgtaactcaagatttacggaccatggaagccaatggaatcgctcatgatagtagtagcctaggagcggggagaagggataagagagaggtgggagacaaaatggtggaagatttaagtaaatatgcacacagccctgctcacttggcagttgccaggcgcgaccatgcttccctaaggcgcattgtttccgccctacctaggcttgctaaggctggtgaagtccacacagaagcagaatctattgctgctgaacttcaagctgatgaggtatctacttttattgatcggcgtgacgttcctggcagggagactcctcttcaccttgctgtgcgtctccgggatccagtctctgctgagattttgatggctgctggtgcggattggagtctgcagaatgaacatggttggagtgctctccaagaagcagtgtgcaccagagaggaagcgattgccatgattattgcacgg

SEQ ID NO: 26436 - DNA, 1104 bp, Glycine max
  Clone ID: TF_GmC124507_1
caaaaacgtgttacagattgttgaacgagcgtccgggcagctacaaacaatctcagccagtggaatagttctggaaacactcacaagagacaactacgacaactggagtgctcttgtgaggaactatctaataggtcaaggtctttgggaagctgtcaattctgtttctgaaattagtgtgcaacccaaagaggtttctgattcttggaagaagaacaatgccaaggctttgcatataattcagctagcatgtgggatggagattcggctcgagattagaggcgttgaaacagccaaagaagcttggaacagattgggcgcgttatatagctcacaattaaaagcggatccagatattgagcaaggtgtggtggatgatagtctccatgaatataaaccgctgcacagatatgtggagagtggtgattggaaaaatgcaaaatcaatgatcaataaagatgtcaaggccatattttccacctcctctacggggaggaccgttcttcacgttgcagtgattgctgggtacgaaaacattgtgaggaatttggtgaagatagggaaagagaaactagttaaaatgcaagacaactatgattacactgcccttgctctcgctgctgaatataccggaaacgtgaacatggcaaagtgcatggtggatcagaagaagggagggaaggatctgctactgataaagacaaaaggtggtgaaatccctgttcttctttctgctgctaagggctacaaagacatgactcgctatctttactctcagactcagcttgaagcgttcatcgacaaaaattcccacattggggttttgcttcttgcacgatgcatcaccgctgaaatatttgatgtggctttgagtttaatccatcgcattccaaagctgcctctaacccatgaatccgatggccaacggcctttatacgcattggcacacatgccttgtgcattccctagtggcagtggatttggacgtctccaacaactcctttatgacagaaggttctgtgatatggctttgaattttccgcctgtaaagctcttgggtcgattgctcatattcctttatctgtgatttcaaaattatatact

SEQ ID NO: 26437 - DNA, 453 bp, Glycine max
  Clone ID: TF_22541747
agagatctagctctactcactaacgccaagggagaaacaccccttcacatcgctgcagtatggacactccaatatcacaaacttattggttgaacatgtcaaagcttttccagcagcaaacaagtttatgagggctagaaatgatgagaaggacactgcattacatgaggctgtgcgcaatcatcacattgaagtagtgaagaccttgttagaaatggatcctgattactcctatgagactccactttatctgccttcagaaagacaatatcagcaagtggtggctcagatatcaaacaaagtgaaagcaccggcatatgttggccccaataatcagtagcattcatggtatcaaacactatagcaatgtttctggcagcttctatacatattgatcgcactagcaacaatgattgtcgcattcgctacagccacgaatgccgtattggatct

SEQ ID NO: 26438 - DNA, 707 bp, Glycine max
  unsure (1)..(707): unsure at all n locations
  Clone ID: TF_GmC88220_1
cggaattcccggctcgcccacgcgtccgaggaaatggaaaagaagaagagaaggtcctctctagctcctcttttatcgcgatcgtatttgttttgtttttctctctctgtcaaacagtttccctctccgagtcccagtttttctcggtgtgcccaaacacgccctttgtctgaagctcctttcagctgagatctaccctctctttctctcatggcttttgcttttgcactgaacaagaactgttaaaactactgcaaatgaaagcatttggagaggttaaagccagtgctgtatccaactctattttctattctgataagcgcatctcaacccaaaagcctcatgatgaacaacttgaccattgagactgaggattcttttgcaagcttgcttgagcttgcagctaataacgatgttgaaggtttcaagcgaatgattgagagggatccttcctgtgtagatgaggtaggactatggtacagtcgtcaaaagggatctaggcggatggtcaatgagctcagaaccccattgatggttgctgctacttatggtagcattgatattctggatctgattctctcactttctggctgtgatattaataaccctgtggcctttgacaagagcactgcccttcattgtgctgcttcgggtgggtctgaaaatgtngtggatgttgntatattgcttctaccagcgggggctga

SEQ ID NO: 26439 - DNA, 2415 bp, Glycine max
  Clone ID: TF_GmC1245_1
ggcgggaattgatgctacaaagtatggtcatagtcctgtgcacaaggccttagttttgaaggatcatggtgaactcaggaggatacttgctggcctcccacggcttcgtaacagcggccgagtttcgcactgaagcggtttcgattttagaggaagagaaggctgatgtcatcgcgtctgagattaaccagcgtgatgtgcctaaccatgatacccctcttcacttggctgtgaaattcggggatgaagtggccaccgagttgcttaaggttgctggggcaaatgggagtttgcagaatgagcagagttggagtgttcatcaggaagcttgttgcatcatcgaagaaggtatgggtaaccaattaaggaatcattaccaacctctaagataggcaaaatttttcggaagggtgactggattggtgattattacacgtaagaagttggccttatacttggaaagtatttggctatttaaaaaacttgggatatttgtcatcacatggatctctcctttatctatcaagtaaatttgaaagagggattcaactaggagtgcagacatgaccttggctggtttttgatggaatcaaaagtcagatttcagttcatgccattcttttccttggtgatggttcggaagatgggaaagtcccacctgggtcactctgcatgatctcacacaaggaaaaggaggtactcaatgctctagacgatgctggctttccagcaaatgatgaggaggttcagcaagaagtggttgcaatgtctaaaacaaatatatttaggcccgggattgatgttacacaggcagttctgttgcctcagttgacttggaggcgacaggagaaaacagaaatggtagggccttggaaagctaaggtctatgatatgcacaatgtagttgtgagcataaaatctagaggagttcctggagccatgacagatgatgaactcttttcttcttgcaatgaaaatgaaacagagagtgaagagctcaatgatattttgactgaggatgaaagaaggcaattggaagatgcactaaggttggagtcgacagacttgaacaatgagagtgatgaggtgatcattgggcatcgtcacagctgttatgaagaaagagaaattcctattgaagatggaaattgtaacaaaagtggagaaaataagcaagaaaagaaaggatggtttggtggatggaggaaaaaggattctaaacctgaagcatcaaagaagattgctccaccgagaagttctctctgcgtagaagaaaaggtgagtgatttattgggggattctccttcaagaaatcagagtaagccaggaagacattctgttgagatagctgtgaagggtgatgagtcacggaggagaaaagatgccaaagcttcttctgcaaattctgatagcagaagtcgtcacaaggatggaaatcgtgaaaatgaatataagaaagggttgagacctattctttggctttccccaaactttccactaaaaactgaagaactcttgccattgcttgacattgttgcaaacaaagttaaagcaattcgacgtttaagagaactccttacaacgaaacttccaatgggaacttttcctgttaaggttgccatccctgtggttcccaccatcagagtattggttacttttacaaagtttgaagaactagagccagtagacgaatttgcaacaccaccatcaagcccatctgcagctgagcaagagagccctgcagtgcctcacttctcggcatcgtcttggtttcaatggataaaggctccttatcgctctagtacatctgctccaggatccagcagtaggatagaaaatattgaagacccttttgcaattccatctgactatacttgggttactgctgaagcaaagaaaaagaagatgcaagagaagaacaagtcaaagaaaggaaaaagtcataactgattatgccacttcataagtaagctccacacttggaaggactttggttgtttagagaacttgggccatttgtctggaaattgaattcgaagctatctttcatgtaggagtgagtgagtgattctccaaggagttgtgcgttgaccatttggggcttgtggcataaggaaaagacacattgtgattcttgcaataattgctggagttttcaactttgcaccaaagaatttgttgattgtgtttcaatatatgtggaaaaccattatctcttgatagttgcaatcacagtgagcaacttttatattcatgattgcagtttaaattcacctatgtttggttatataattctttcccatgattttattcatgtaaataaattgaagaatttgtttactagctttgggggctttatcatagtacgttctattatattttcagtaatgatattgatgaaatttggtatcgttt

SEQ ID NO: 26440 - DNA, 2790 bp, Glycine max
  Clone ID: TF_GmC335_1
aacgacgatcgagtttgagtcggaatgtgattgggaaacaaaaaaggcgagtgtttaaaatcaatcaaagactaagttgaagacttgaagccatgagatgaatcacttatctcttgacactgaagattctcttgcaagcttgctgctggagcttgcagccaacaacgatgtttcgggtttcaaaagattaatcgagtgtgaaccttcctccatagacgaggttgggttgtggtatggccgccacaaagagtcaaagaagatggtcaacgagcaaagaactcctttgatggttgctgccacctacggtagcattgatgtcatgacgttgattctttctctatcagaagctgatgtgaaccgatcatctagccaggacaaaagcacttgacttcactgtgcagcttcaggtgggtctgatatcgtggttgatgctgcgtaattgcgactaaccagatgccgttataggaatacttgcaatcacaatgttcaatgttccaggagcagcagctggatcctccagtggcggattaatgtggagcagagaatggaagtgcttctttgaacctgctattggaggcgcctggcggtgataaatgccacatgatcatcgtgtgccgcagcagaattgaaattggtttctgctgaacctgacgaaatgaaaaaaaaacctgtctcagtgaacataaataaaaaatcgatgatgaaattctctgatggaagatggctacaataaccaaagaacgtacgcagtactaagataaataaccctcacggaagattcatattcaggtttagtgttacaaaagtaacttagcagggtaagaaaaccagaaggtggcgttaacagaattaatgccatcgtaaatttcttaagcgggctttcacgagaggggatatgtgtgagtatgctcatggggtttttgagtgctggctgcaccctgcacaatatagaacccggctttgcaaggatgggactaattgtgcaagaagagtttgcttctttgcccacaccaatgaagagcttagaccgctctatgtttcaaccggttctgctgttccttctccccgttccagtgcctcctctgctatggattttgttgcagccatctctccttcctctatgtcggtcatgtctccctcgccgttcactccgcccatgtcgccttccagtgcttcaattgcttggcctcagcctaacatcccagcattgcatcttccaggaagtaattttcattccagtagattgagatcttcactcaatgctagagatttttctgtggatgattttgatttgttattacctgattatgatcatcatcatcatcagcagcagcagcaacagttccttaatgagttatcatgcctatctccacatgctatgaattgtaataccatgaaccgctctggtcgaatgaaacccttgactccttcaaatcttgatgatctgttttcagctgagagttcttctcctagatatgctgatccagcattggcttcagctgtattttctccaactcacaaatcagctgtcttcaatcaatttcagcaccagcaaagcatgttggcacccctgaatactaattttgcctctaaaaattttgagcatcctttattgcaggcctcgttgggaatgtctccgcgaaatgtggaacctatttctccaatgggttctaggatttctatgctagctcagcgcgagaagcaacaatttcgcagcttaagcttccgagaactcggctccaactctgctgctgcctctgccgattcttggtcaaaatggggatcacctaatgttaaattggattggccagttggtgctggtgaagttggtaagctaagaaggtcatcatcatttgagcttgggaacaatggtgaggagcctgatttatcttgggtgcagtcacttgttaaggaatcaccagctgaagttaaagataaattggcaaccactgtctcatatgttgcagcagcagctgctggatcctccagtgagggatcaaacattagcacgcaaatggagtctgttgttgatcatgctgtactgggagcatggcttgaacagatgcagcttgatcatcttgtggctcagcaaaactgaaatgagtttctgctgaccctgaggtagttaacaacagaaatgtttcagtaaataataatcatatatattcgtttatgaattttgttgatggaagaaggttacagtaactaagaaaggaagcagtactaagaaaaagaaccacatcactgagcaaaattcattttgaggtttagtgttgcaaaagtaacttagaagggtcaggaaaccactgggtggcgttcacagaattaatgccagtgaagggttttttggctgcctatctcttcaaattttaggtccacattcctgtcaatttttccttccttgaggagcaaatgttgtatcacaatgaagtcctattcctaagtttgatctatcttttgattttgtttctttatattttggggtagaaaccaaagttacagaagggtcattggagtaattccttgtgtctctattttgttccaattttggggatgaaaacacaggttgctggatagtatatggtatttcttttgtaatctggaatcaataattgtcgatgccagggagtgggtaaattaggaatatttgaacattgatcctttgggcatgtaacattcaattgaagtttattgctatattgtttttaaaacctttgtctctattctaaatatcgcagcgttagtagtttctatttgcattgataaataactaaattgtatcatcaaaaa

SEQ ID NO: 26441 - DNA, 409 bp, Glycine max
  Clone ID: TF_LIB3242-347-Q1-J1-H4
gtgcattggcatcacaactcactatggtttggtttgtggactgttttatctaaaaagaagcaaatgggtaatccagtaaaaccaagtactgccgaccgtcttcacatttccccaatttcctactatctcatcccctaataacttaattttggcttcaaaaccttttgccggcaattccagatataagcattccaaaacacctttacatttaacaacgttttctgggcaatcaaaagtaatcacttatctttccaagcacaaagctgatgttggtgcttctgcaatggattacatggctgcaatacacttttcttcacataaagggcattttgaagttgttctcgcgctactttcaacttgtgcctttctcaaaaccgtcaccctcaaaagcatgacttcattacactat

SEQ ID NO: 26442 - DNA, 185 bp, Glycine max
  Clone ID: TF_LIB4164-051-R1-K1-G4
attcgagctctgtacccggggatcctctagagtcgacctgcaggtggaaaagctttgacacgttgaaccaataatttggcgatattggagtgtccataccttgcagcgatatgaaggagtgtttctcccttggcgttagggagtaggactagatttctgcacttctcaagaatctgatacacaaa

SEQ ID NO: 26443 - DNA, 460 bp, Glycine max
  Clone ID: TF_LIB3242-687-P3-J1-C12
agactcggctcgaggtcggagcaacttgcttgcactatgccgcttattacggacatactaactgccttacggccattctttctgctgctcattccacacctcgttgcagagacttggggaggggcatgatttgccgacataagacatggaaaccgagccacccctatgcatcttgcagctcgccatagatgggcggactgtctgcatgcccttatagacaatggggctcttggacgtgcttcaactggtggatacggataccctgccagcacgccacttcatatggctgaccgaggagcgaccattgatctgagtcccggccgggttggaatcaaaagcatcaccaccactttatcattgctttgcatcagaaatattccctgaattgcggccggcaaatccttccaaaagagccccatgccgacaagctcttgaagctgctgctcccttcactgaaatt

SEQ ID NO: 26444 - DNA, 744 bp, Glycine max
  unsure (1)..(744): unsure at all n locations
  Clone ID: TF_GmC167955_1
gcacgcctacctaagcttctcttcggctctcgctgcctgtgtagatgaaattggcaatttcagagtaaaaaccaattatgctgcagagataacaaaggaaatttggaaatattctgaacatatttctgttgagtgagatcagtgtaatcgtggttcgtgatttgatctggaacaacgcttacttaaaaggactcttattttctctgttctctgctctctcggtctgtcagaaatggctgtagcagactcaatatctttccaagaacaactacttcagagggttgcttcagctcagtttaggaagcctctccttcatcttgtgtccactcaagaagacaagggcagatacctcacccaatgtgtcccacttcacaaagcatcactcaaaggtgactggaaagaagctagaaaactattggatcaagatgggtcacttctcaaaacggccataacaaagggggggtgggccacactcctccacatagccgtgggagcaaaccgtgttcactttgtggaggagctgctaaagttgatgcaaccagaagaattggaattgcaagaccacaagggcaacactgcattctgctttgctgcagcagttgggaatgtgcaaattgctgagatgatggagagaataaatgcatcgttgccaaccataaggggtggnaggaggactcacccctcttcacttggctgttttacaagggaagaaaagaaatggcatggcatctgttccctaaaact

SEQ ID NO: 26445 - DNA, 631 bp, Glycine max
  unsure (1)..(631): unsure at all n locations
  Clone ID: TF_LIB4167-039-R1-K1-A1
ccacgccgtccgccaaactattgcaattgtagctgggtaaagaagagcttccaactttgcgttgtcctcacgaaaagcatctccaactcatatatgtggaagtgcagaaatgaacctgcttgtgcatgcagtcactaccatccgttgcatttagcgtttccattcaccttctgcagcttctgattaaccattgaatcagcttgcaaaacacaagagagtttttcagcaagaggcattggcagaatcaagttcactaatgtctttcgaagatgttaacgctgctgttagtgagtttgctaggagatttaatccaatattaaaaggagattgggaatctacaaaggcttttcttgacaatgacccaagtgcattgacagcaaaggtcactgcaattggtgggactgcacttcatgctgcagctgtaggagggcagtggcaaattattgagaagttggtgcaacatgtgcctgcacaagtactttcagatctggacttgatgggttgtacttgcctgcactatgttgcaatgggcgaaagcacaagtgctgccaaggcattggntggctaaaatccttccttgacacaacttactgacaagaaaggattcacaccactttatctatagtattac

SEQ ID NO: 26446 - DNA, 335 bp, Glycine max
  Clone ID: TF_LIB3028-044-Q1-B1-F5
caacggcacagcaggtggtggaagcatcattgccaatgacaagaaagcagtgtacaggcacattgtgaagtcagaagtgaatctcaatgctattattaatgggaaagcaggcttttcttccaacacgccttcttcaattaatccagacatatcatgtgaaagtaagactccacaagtagaggatatacacgatggttctagtgtgcttcacctggcatgcataattagtgattctgcaatggtagagctgcaccgacagtagggtgcagacgtgaatgctattgattctagagggaggacacctctacattacagcactatgagagggaagaatg

SEQ ID NO: 26447 - DNA, 2379 bp, Glycine max
  unsure (1)..(2379): unsure at all n locations
  Clone ID: TF_GmC64_1
atcgnctactcgtccgacttaacctgtgttttgtttctactttcttcgatcatatgaactctcttttgtcttctctaaaactcaatatcaaaccaacgagctcaaagaaaatcgaggcaagtgtaagctagcaagaggaaattaaaaacctccgtttagttgtgttttcagggaaatgattgcacagaatatagactcagcaactccagaaccacaggacgcagtagtcattgacattgaggactcaacaacaacaaatacagaactacaactcacatcactacaaaatggggtaccaataaatgccaaaccacagcttaaaagggtcgacacagctacttactacaaaatggggtaccaataaatgccaaaccacagcttaaaagggtcgacacagctacttacaaaaggccttcacttgattttctacaggatacgagtgattaagtcattttttgtgttgcttctgctattcagaggatgcaatggaggttttcttctcccaatgtgtgccactttacaagcatgcattagatggcaattggcaagcagcaaagcacatcttagatgcaaaccctgcactgaagactgctgccatagcacctgggtggcccacagtgctgcatgttgctgcaggcacaaaccattatcactttgtggaggagttgctcaacatattagacaatgatgcaattcaattgcaggataaaaagggcaacactgccttttgctttgttgctgcggctggcaattggcgcattgctgagttaatgcagaaaagaaatatacttctgccaacagtcaagggtggagatggaatgacccctcttcactttgctgctttgcaaggaagatgcccaatggcatgcaagctataccctatgaccaaagagatgtttgatgatgaggattgggaattattgttcttcacttgcatcaaaacttgcaactatcacttggccttaaaaatggtaagagataggaaagaactagcttttgcacgagatgggaataacggtgaggagaaaaagggcggcatagctttgcatctcttggctcaaaatcaaaagcctttggattcttgttgtcattgccaccaacatcaaattcccgtcaagataaaccctggcatgaaacaacacgtgtttcttcaattggttaattttctctggaatacccttttggaaaacatagactccaagagcaagatacttgacatcataagtgaaccttctcatctattatttgatgctgcagaagttggtaattttgggtttttgtctgagcttattagtgcttatcccagcttgatatgggaagtggatagcagaaacagaagtataattcacacagctgttttgaatcgacatgctagcatctacaacctcatacacgaaatagggtctataaaagatattatagtgacatttgccggagaagaagacgagaacactttattgcatttggctgcaaaattagctccacctagtcaacttgagttagtctcaggagcagctttccaaatgagccttgagatatcatggtttgaggaggtgaacaagataatgccaccatcattcagatggatgaaaaattccgaaggcttaactgctcgagaattattcacaaaggagcatgcagatttgcggaaaaatgcagaatcatggatgaaacgcacagctgagtcatgcatgcttatttcaaccgttattgccacgggagtgttctctgccgcaattagcacaccaggtggcatgaatgacgaatcaaaagaaccaaactatttggacaaaacatcgtttctgatatttgctgtatcagatgcaacttcactgatctcatctgcaactgcaatactcatattcttatcgattctcatctcgcgttatgctgagtatgacttccacaagtcactgccattgaagcttatatttggactgataagtttgttcatctccataacaagcatgatggttgcatttggttgttccttcttcataacttattactatggcatgaagtgggttcctagtttcatctcagtacttgcatgtctacctatacttctctttataggtctgcaattttcgctgtggtcagttattatctactcgacctactactgcaaagctctctttaagccaggtaaaaagatgctctacgtggtagagagaaaaggatacaatgtttaagataaatgaaggatcatataatgtttcgttgaagtttgtaatatagtagttggcaacaatttgtattgtaagggtattttaaataaatttgaaatgtgaataatatatttgcacaatgattattttattgatacaaaatacatgttaaacaacaacaacaaacttttatcccttttatataattttt

SEQ ID NO: 26448 - DNA, 954 bp, Glycine max
  Clone ID: TF_GmC78648_1
cggacgcgtggggttcaactgaaatgctgcgtcatttgagactggaggattttctttctttaaagccagtggacccttcaaatcattcttttgagggtgatatggagaaaagaaacttaatttttaagctcatttcactgagagaggaggaggaatattcaattaaggatgaagtgactacagaattggatatatcccaacacatggtgaaggagcatctgtttcacaagcagtttaaagagaagctgtactcatggcttcttcacaaagtaactgagagtggtaaagggccaaatgtattagatgaggatgggcaaggtgtgctacatttagcagcttttcttggctatgattgggccataaatccaattatatctgctggagttaatatcaacttccgagatgtgaatggatggacagctcttcattgggctgcatcctgtggcagagagcgcacagttgctgtccttgtctccatgggtgcagattgtggagcattgacagatccatctccctcatctccagcaggtagaacagctgcagatcttgcctctagctatgggcacaaaggaatttctggttttcttgccgagtcttcattaactcaccacctcgaaaccctcacaatggatgatcaaaaaggtggtcggcaagaaatttcaggaatgaaagcggtgcagacagtttcagaacgatctgcaacacccgtgcactttggtgatatgccagatctctgcctcaaggattcgcttactgctgtgcgtaatgcaacacaagctgctgatcgtatacatcaagtatacagaatgcagtcattccagaggaagcagttaactcagtatgaaagtgatgagcttggattgtcagatcagcaagcactttcccttctagcttccagagcatgcaaatctggacaaggagatggtttagccaatgctgctgcagtacagattc

SEQ ID NO: 26449 - DNA, 2012 bp, Glycine max
  Clone ID: TF_GmC797_1
tcgatgcacgcgcgcgtacagctgggaatgcggctcgaggaggagtgcaacagagaagaatcacattcgcattctcaatcacatccattcattcactcatccatatcccttctttccactaacttctctctctagttgatacaaataaaaaacaaagtttcatactttacgacacccttttctgcaactgatgatggaaggaagctgaaacagtgaaaaacagcaacaacgaccaccctgtctttgttttttgtttgttgagttgaaactttagagaaagtgaatagtgatatggaggcaaagggtgtgcggttcttagcgtatcaatcaatattttcgagcgttggatctggggacttcgatggggtgaagaaactggtggaggaagtgaagaaggaagaagggtcatcgctctctgatgtgatgtctcttcagaacgatgctggagagactgcgctatacatcgctgcagagaataatctgcaagagatgtcgcctcgcatgtgtgacgtcaagatcgatatagatgtgcagctgcttgctcagctgtcgatgtcagttccatgttcatagttaggaaaaacggcaaatcttcactgcacaatgctgctaggtatggtgtccatcgtattgtaaaaacacttattgctctggatccaggaatagtatgcatcaaagataaaaaaggtcaaactgcactcaataaggcggttaaaggacagtgtacttcagtggtggaggagatattactagctgatccttctattttgaatgagcgagataagaagggtaatacagctcttcacatggctacaaggaaatgccgttcacagatagtgggccttttgctaagctattctgctgtggatgttaatgccatcaacaagcagcaggaaacagccttggatttggcagataaactgccatatggagattcagctttggaaataaaggaagcccttgcagaatatggtgctaagcatgccaggtatgttggcaaagaagatgacgcaatggaacttaaaagaactgttagtgatataaagcatgaggtgcagtcacaacttatacaaaatgaaacgacacgacgacgggtttctggtattgccaaggagttgaagaaacttcatagagaagcagttcaaaacaccattaattctgtcacattggttgctgtactttttgcctcaatagcattcttagccatcttcaatttgccgggtcaatatataacggacgaaggaaaagagattgggaaagctaaaatagccgatcatgttagtttccaagtcttctgccttctgaattctacatctcttttcatttctcttgccgttgttgtagttcaaattactttggtagcctgggacacaagggctcaaaagcagattgtgtcggtggttaacaagttgatgtgggctgcatgtgcttgcacttgtggtgcttttctagcaatagcttttgaggttgttggaaagaaaacatggatggctatcaccatcacccttttgggggtacctgttctagttggcactctagcaagcatgtgctactttgtttttcgacaacatttcggcattttccgcagtgattcccagagacgcatcaagagagcaagtggaagcaaatctttctcatggtcttactctgcaaatatatcagatttggatgaatacaattctgacattgagaagatctatgccctgtgagtcaagaatcaagagaaatgtttcaaccttttaactgaaactgttatactactgccaagtgataatgttagctcaccgggatttcatcattcatcttgagtttgcagtttttggtttcaggctgtatgtgattataattaataatcaaaacttgtagatttatgtatatgtaataaaaataatatgaaagggaagtccactacttaagtttgatattggaatgagcattttcattacaatacgaaattaaattttcatctgcaccgtgcaagaaaatagagcttcctatcttaaaaaaaaaaa

SEQ ID NO: 26450 - DNA, 1526 bp, Glycine max
  Clone ID: TF_GmC42_23
tgcctcttcctctcagattcaggttccaactcttctctctctctcgccgtctaggtttttctctcaaaatttcgaaaccccgattttctctcaattcgaatctgcgatacatcgtaacctaaattattagatagttatattatctctctgcgtttctttcagcaattttctattttctcctctcatggcttcagattccaaaaaggatttccctgctgatgacaaagctggaacagaagagagtaaaacatccaaagatgagacttcatctaaagattctccagcagaacaaagagcgacagctacttttggacctagacctggacctgctgggcttccaggcaacccttttgatctctcagcaatgtctggtctgctcaatgatccaagtatcaaggaattggctgaacagatagcaaaagatccatcgttcaatcagatggctgagcagcttcagaaaacttttcaaggagctccacaagatgctatccctagcttcgataatcaacaatatttttcaaccatgcaacaggttatgcagaatcctaattttatgaccatggctgagcgcctgggtaatgcattgatgcaggatccgtctatgtctgccatgcttgaaagtttttctaatccatcaaataaagaccagcttgaagaaagaatggcacgcatcaaagaggatccatctctgaaacatattttggaggagatagagactggcggtcctgctgctatgatgaggtactggaataatgaggaggttttgcagaagttgggacaagccatgggtcttgccaattcgggagatgcaggtgcctctgctgaaaattctggggcagatgagaccgaagatttgggaaatgaagatgaatcaattgttcatcatactgctagtgttggtgatgtggagggcttgaaaaatgcactagcctctggtgctgacaaggatgaagaagattcagagggaagaactgctttgcattttgcctgtggatatggcgaggtaaaatgtgctcaagttctcctcgaggctggagcaaaagtggatgctttggataagaataagaacactgctctccattatgcagctggttatggcagaaaggaatgtgtggcccttctccttgaaaatggtgctgcagttactctccagaatatggatggtaaaactccaatcgatgttgcgaagctaaacaatcaaaatgaagtcctaaagctacttgagaaagatgcttttctgtagttgtaatgcatgatgccatgctgtcaccaacaagcaaagggggaaactgaggggaagaaggcatggtgacttcgttattttctcttttggtttcttccagccatttagtgtgttaaactaaattgattagcgttgttggatgagttaccatagaatttgttatctatggtcttgtaatgcatttattgttacactgcatgattttgaagattagtgccgtcatgattttattaatgtttcaattttacttataatacattgcttcgtgggcaaattctggttc

SEQ ID NO: 26451 - DNA, 1370 bp, Glycine max
  Clone ID: TF_GmC265_1
tggcatttggcaaaactgcgaagaagagcagaagaaataccggagaaaagagagttgttgagcagaagagtgttgtgttgtgcattcgcggaagaagaaggagcagatgggtaatccacggaaaccgagtaccgccgacgagcttcacacggcggcaaggtccggtgatctcatcgccgttaactcaattttggcttcaaatcctttggccgttaattccagagataagcattccagaacacctctgcatttagctgcattttctgggcaagcagaggtagtcacttatctctgcaagcagaaggctgatgttggtgcttctgcaatggatgacatggctgcaatacactttgcttcacagaagggacatttagaagttgtccgcgctctactttcagctggggcctctctcaaagccaccacccgcaaaggcatgacttcattacactatgctgttcaaggttcccatatggaactcgtcaagtacttggccaagaaaggggcaaaccttggtgccaagacaaaggcaggaaagacccctttggatcttgctaccaatgaagaaatccgctcctttctggaggaatatgagaagtcagcaaagaatggagaattgggaaagaaagacaaagataaagctgaagaatctgatccaaagacatccacattgggatctgaaggtgatttgagttctgaacctgctgcagctgctattgatgaagaagacaatgtgggagagaagaggaagaagggtaatgaagatggcacaagagaagaagagtcatcacaaccaaaaaaggctagagttaacttaagtcatctccaaagttccgacgatacccaagaagaagaaaacctgtagtttggtattttcatagtagaactaaaattttgttattgtaatgtagtatgtaattgtatctgatttggaatccctttgttgggttagttggctggactatctgttgactgttaagtaacgaccgattctggattaatacaattttctctttctttgaagttggatcgctagggaatattgttgggaggttggtgaggtccaaacatcgaaggcgtgtctcttgctcagtggctattgattcccacaacatcgaacccatcaaacttaaagagaatgcatgcacatacaattgagaggttttggtcttagcagtaaccagtttcttgtgtgccttttcaattcattctgctggcttttagatttcccgtgatacaggtaaaatggtgaaagaaatactattatagagttaatattgtagaggttttacaagtataatttttggagacatgagaaatgaaaattagttataatgtaatggtataattctatttccccttcttcctaaaaa

SEQ ID NO: 26452 - DNA, 1276 bp, Glycine max
  Clone ID: TF_GmC5728_1
gaacccttctacatttcccgtcaaagagaaccttccataacctcacttcaatggcggaagattgcgcgggaagtggagttcaacagcaaggttgaaaagaagagaagaggcttgattccccttagggatatgaatttggatgactacaaggcttataaggaagccaaattggcgcagatgaagcttctcgattactcttctagttttccggtggacgaaaatgtccctgaacctcaattgaatcgcggagaaaagtttgaggctgaagctgaattggatggtggtgaacgtgttgcgcctaagaaccctaggtgggctgtttatgggaggggtttggaggatgtcactgagtttttcaatagtgacaactatgaccctactgctaaaacccctggaggtcgccggaagttgtttaataaggaggagaaggttttgttgaataagaggataccagacttggcagctgctacttcagataaatggcttcccctgcacactctcgctgcttgtggagaatttcaccttctagattctttgttgaagcataatgttgatatcaatgctgtggataaggatggtttgactgcccttcacagagcaacaattggaaaaaagcaggtcataatcaattatctcctgagaaactcagctaatccctttgtacaggataatgagggagccacattgatgcactatgctgtactaacagcttctacccagacaattaaaatactcttattgtataatgtggatataaatctccaggacaattatggctggacaccattacatcttgctgttcaagctcagaggacagatttagtgaggcttttgctaatcaaaggtgctgataagacattaaaaaatgaggatggtttaactcctcttgacctttgcctttacaatggtcaaagtgccagaacatatgagctaatcaagttgtttaagcagcctcaaagacgtcttagtcatgtatcagtatgacagacggggctaagaaacaatacgacttctgaaagatttggaccaacaaatgaagattaaccgttgccaaattttgcatgacaattagcatcccttggtcacatggaaattttgggacaactacggtattgtactatattaaaattaaaatgtatattttaaatgtgataggaaggaaaataggaatattttcatgaaaagaaagaaaaatggtctgccatttttaaattgcgtctttcttgaactccgggcaaagcttttcttttctctatcaagtgtcaaaaaaaaaaaa

SEQ ID NO: 26453 - DNA, 438 bp, Glycine max
  Clone ID: TF_LIB3093-017-Q1-K1-A6
cccacgcgtccggtgagtgtgtgctttgcggcagcaagaggagatgacttgttgttacatcaattactcaaacggggcatggatccaaatgaatccgacaacaatcgaaggacagctttgcatatagcggcatctcaaggaaaagagaactgtgtttcgcttctgttagattatggggcggatcccaacattagaggttgttctacgtgcagatttggaaggtaatgtgccactatgggaggctatagtggaaggacatgagtcaatgagcaagctgttatcagagaatggagcaaacttgcaatgcggggatgtgggtcaatttgcatgtaatgccgttgaacaaaacagtctcaacttgctgaaggaaataatgcgctatggaggagatatcacgcttccaaacagcaacacatggaccacagccttgcacgttgc

SEQ ID NO: 26454 - DNA, 1379 bp, Glycine max
  Clone ID: TF_GmC312_1
tcgtctcccgaaatacactggatttaggactgataagaaaggtcaaactgccctacacatggctgtgaaagggcaaaatgaagaaattttgctggaattggtaaaacctgacccagcagttttgagtctggaagataataaaggaaatacagcattgcatattgccacaaagaagggccgtactcagaatgttcgctgcttgttatcaatggagtgtatcaacatcaatgctacaaacaaggctggagagactcctcttgatgttgcagaaaaatttggaagtccagaactcgtctccatattgagggatgctggggctgccaattctactgaccaaaggaaacctccaaatccatcaaagcaactcaagcagactgtcagtgacataaagcatgacgtacaatcccaactccaacagacacgtcagactggcatgagggtccagaaaattgcaaagaagctgaaaaagctccacattagtggcctgaacaatgcgataaactctgctactgttgttgccgttcttattgctacagttgcttttgcagccatcttcacagtccctggtcaatacgttgaagacaaaacacatggattttcacttggacaagcaaatatagcaaacaatgcagctttcctaatattttttgtgtttgacagcctggcattgttcatctctctggcagttgtggtggttcaaacctctgtcgttgtgattgagcaaaaggcaaagaagcagctcgtttttgtcattaacaagctcatgtggatggcttgccttttcatttccattgccttcatttctcttacatacgtggtggtgggatcacactccagatggcttgcaatatatgctactgtgattggaagcttgataatgctctctacaattggctccatgtgctattgtgtaattttgcataggatggaggagacaaaattgagggccgagagtcgatcgttctctatgtctcatgcatcagaccaagagattttaaacagtgaatacaagagaatgtacgcactgtagtctgtaggatagttgatatatcagaatggaatggcttttatcctccagcatattcttgaagtgatatgtagtttctactatcagtatcagattttaccaagacaagctgtctatgttagactacaggtaccgtgagaaaagagggaaaagaagaaaatgggtggggaattctcgtcacatccactcgtaattataaatgatgtcaaatttagcatcatgtcagtgaaatgattgtggtgttgaagaatgaagacttatatccatttgtatttactctagtattctattataaactaaacttcataaaagaatctaattcaattggtttaagagagtctctgaatattat

SEQ ID NO: 26455 - DNA, 1261 bp, Glycine max
  Clone ID: TF_GmC1132_1
gactctcacacagctcctgagactcaagaccaatactcttctagaagcaatgcagattaaaagagaagataacatacaaatactcaaaaattttcttcagcatttcaagcaggttaaggatctgagtatcaaagatttgatggtggagaacgtagaagaagaggaccctaacatggctgtgaacttgctaactgtggcaagcactggcaatgctgcttttcttgaggagcttctaagagcaggtttggatcctgacattggagactccaaagggaaaactccattgcacatagcagcatcaaatgggcatgaagggtgtgttaaagtcttactcaagcatgcatgcaacatgcatataaaagacatgaatggtaacactgcactatgggatgctatagcatcaaaacattactcaatattccggatcctcttccagctttctgctctctctgatccaaacacagcaggcgatctcatgtgtacagcagcaaaaagaaatgaactaacagtgatgaccgatcttctaaggcaaggactaaacgttgactccaaagatcaccgtgatacaactgcaatccaaattgccatggccgaaaatcatgttgacatggttcagttgcttgtcatgaatggtgctgatgtctctgatgtgcataaccatgaattttgttcatccaccttaaatgaaatgctgcagaagcgtgaaattgggcatctaattaatgtaactgaggtcatgctcagtgaagttgtattaaaagggagacatcaagagcaggagcacaatggaggaagatctaatagtggactaaagtttccaagggtaagcatatatagaggtcaccctgtagttagaagagaaaaatgttccatggaagctgggaagctaataaggttgcctgattcaatagaggaactaaaaactattgcaggtgaaaaatttgggtttgatgcaaaagatgcaatggtgacaaatgaagaaggagctgaaatagactccgttgatgtgatcagagataatgacaaactttttttttgttggataagctgagatgcgaaaatgtcaagtgtaaatatatatataatctcgcacaacagatttacttagatgtttcttttgtgttagtaattttgtcttcttcctgtagccataaagaagtggtttggttggaaactagttttttttttttacttccaataactgaaaatccatttcctattacacaaaaaactgaaaatatagttgacattttttcttttt

SEQ ID NO: 26456 - DNA, 1716 bp, Glycine max
  Clone ID: TF_GmC67_1
tcgcgatctctttcaattggtgtcagagatgaaagcagaatattttccacccaaagaagatgttatcttgcaaaacgaagcccccactgacttttatatactggtcactggtgccgtggaactactagttcttaaaaatggggttgaacaggttgttggagaggccaacgcgtccgtacggctcgtgatctttacagaagggggtgagattggtgtgctttgttataagccacagcttttcacagttcgaacgaagcgactaagtcagttgctcaggctaaaccgtactacgttcttgaatattgttcaggccaacgtgggagatggaaccataataatgaataatctccttcagcatttgaaagagatcaacgatccaatcatggagggagttttggtggatattgagaacatgttagctcgtggtaggatggacctaccagtgagtgtgtgctttgcggcagcaagaggagatgacttgttgttgcatcaattactcaaacgaggcatggatccaaatgaatccgacaacaatcgaaggacagctttgcatatagcggcatctcaaggaaaacagaactgtgttttgcttctgttagactatggggcggatcccaacattagagatttggaaggtaatgtgccactatgggaggctatagtgggaggacatgaatcaatgagcaagctgttatcagagaatggagcaaatttgcaatgcggggatgtgggccaatttgcatgtactgccgctgaacaaaacagcctcaacttgctgaaggaaataatgcgctacggaggagatatcacgcttccaaacagcagcaacacagggaccacagctttgcacgttgcagtctctgaaggcaacgttgagactgtcaaattccttttggatcacggggcgagtattgacatgccagacaagcatggctggaccccaagagatcttgcagatcagcaggcacatacagaaatcaaagccctttttgattccattggggagcctaaggtccattcttccgtcgctattccggtgaggaatagcaagatcaagtaccttggtaggttcacaagtgagccaaccatgacattgcctcttgatggatcgtttcatggaactgatggctcttggagccagaaccagagccaaaaccagagccggccgaggcgtcggagcaacaactaccataactctctgttcgggatattgtcagcagcacacaatggggaaaagtacctgctttcagctgttgacatgaataacaatgcaaggaatggtatgaagagtagtagtgcagttggtccaactagagttataattagttgtcctgagaagggtgaggttgttgggaagcttgttttactgcctggaagctttcaagagctagttgagattggagccaagaaatttggtttctatcctaataaggttgtatgcaaagatggaggtgaaattgaagatatagagataattagggatggtgaccatcttgtttttcttggtgcaagtggagggtgctagaatccaatcgtgcagctccagcaacaccactaaccaatggcgtgcatatataaaatgcatataaggaacgtctttactgttattgtaattgttttatttttcctgtctcatctgtgttctcattctcaattgtaaatctttagccttcttctcatggttaatgtgaaataatatatttctgcctacgtccc

SEQ ID NO: 26457 - DNA, 3218 bp, Glycine max
  Clone ID: TF_GmC60185_1
cacgcgtccgttcagttccgacttaccgttgatgtctttgctgacttcttgttaaggttgtcggtgatgcaattgttgttggttttgtgctaagagaagaagctgttgggaaggtttctttcgtcttttgatgatgatgtcacacaacttaacggggcagcttgtgggtgcagagatacatggctttcacacgttggatgatttggatgttagtaatactatggaggaagcaaaaagcagatggcttcgtcccaatgagattcatgccatactctgtaatcacaaatatttcaagatcaatgccaagccagtaaatttgcccaaaagtggtactattgtactatttgaccgcaagatgcttaggaacttcagaaaagatgggcacaattggaaaaagaaaaccgatggaaaaactgtcaaagaagcccatgaacacttaaaagttggcaatgaagaaaggatccccgaatattatgcacatggccaagataacccaacctttgttcgtagatgttattggttgcttgataagaatctggagcacatagtccttgttcattatcgtgacacacaagagttacaattgcaaggttctcctgctacacccgtaaattcaaattcaagttctgcctctgatccagctgcatcttggattccatcagaagacttggattctggggtgaacagtgcttatgctgttgagcttaatgacaatttaactgccaaaagtcatgagcagaggcttcatgagattaatacacttgaatgggatgacctagtggttccaaatgtcaacacttctactacatctaatggaggcaacgtcccatattcatttcaagaaaatcaaagtttactgagtggaagatttggcaatgtatccagtaatccttcagcagaaattccttcttttggtaatttaactcagccagtttctgggagcaatagtgccccttacagtttcccagatagtgctattcttctgaaaaatagtcctatatcatcgggaggcgttgacaccttgggcactttggtcaacgaaggcttgcaaagtcaggacagctttggaacgtggatgaacatcatatcggatacaccatgttccatagatgaatcagctcttaaagcatcaatttcttctgttcatgtaccatattcatcactggtggcagataatctgcaatcttctctgccagaacaagtatttaatctcactgaggtgtcccctacatgggcatcttccactgagaaaacaaaggtcctggtaactggatattttcataataactatgaaaaccttgcaaagtccaacctactgtgtgtctgtggtgatgtaagtgttcctgtagaaattgttcaggttggagtttaccggtgctgcgtaccaccacactcgcctggattggtcaatctctatttgagctttgatggccataagcccatcagccaagttgttaattttgagtatcgtactcctattttgcatgagccaactgcttcaatggaagagaaatacaactggaatgagtttcgacttcagatgaggcttgctcatttgctctttgcttcagacacgagccttaacattttctcaagtaaagtatcaactaatgcactgaaagaggctagaagattttccttcaaaacatcatatatctccaaaagttggcaatacttgatgaagtcaattgatgacaatacaattccattttcaaaagtaaaagattccttgtttgaaactgcattgaaaaacaaattaaaggaatggcttttggaacgaattatcttaggcagaaagagtactgaatatgatgcgcaagggcaaggtgtaattcatttgtgtgcaatgctaggatatagttgggcaatctccttattttcttggtcgggcttgtcgctggatttccgtgacaaatttggatggacagctcttcattgggcagcatcttatggaatagagaaaatggttgcaactttgttatcttgtggggcaaggccaaacttggtcacagatccaactcctcaatatccaggtggatgtactgctgctgatcttgcttatgtgaagggatgtgatggcttagctgcttacctttctgagaagtctctggttgagcagttcaatgacatgagcttggctggaaatatcagtggctcactggaaactagctcaactgatccagtaaatgctgcgaaccttaccgaggaccaactttacctaaaggagactttggaagcttaccgtacagctgccgaggcagcagcacgtattcaagctgcatttagggagcattcatttaaattacgatatcaagcagttgaaattatgagcccagaggaagaagcacgtcagatagtagcagcaatgaggattcaacatgcctttcgcaactatgagtcaaagaaaaagatggcagccgctgctcggattcagcttagattccgtacatggaagtaccgtagagaatttctcaatatgcggcgtcaggctattaaaattcaagctgctttcaggggctttcaagcacggaagcaatatcggaaaatcgtatggtctgttggggtgcttgagaaagtgatcctgcgttggcttttaaagagaaaaggcttccgtggtctccaggttaatcctgccgaggaggagacacaggaaagtgatacaattgcagaggaggatttctttcgcaccagccggaaacaagccgaagaacgtgttgagaggtctgtcatacgtgtgcaggccatgttccgttctaagaaagcacaagaagaatatagaaggatgaagctgacacataatcaagcaatgctggatgaattagaagaattcctaaattctgaagatgacatgttacccaagacatagcttggtgccttttccaaaacaaggtttccccatatttgggatgtagccaactcctgtgacaaactagtgtgtagtgatagcttggtgtcttcttttatataggaagcagatcctgtaaattacctagtgtagattttgaacccatgaccctttcatattgctttaatgtcttgaatgggtcgtccgtgtgtaattaagcttccctatgagggatgcttctaatgcaagatcaagtttgtaactttgtttttggtgaaaaatcaagtttgtaacttaaataacaagccttcttagatttgaattgacataattgttgttggaactcttctatgtaataaattaagagtccatt

SEQ ID NO: 26458 - DNA, 1853 bp, Glycine max
  unsure (1)..(1853): unsure at all n locations
  Clone ID: TF_GmC506_1
acctgattgcgattatagtgatgctgaccttgttgtcgagggaattccggttagtgttcatcgatgtattctggcctctaggagtaagtttttccatgaattattcaagagggagaaggagtcatcagaaaaagaagggaaattgaagtataacatgaatgatttgttgccttatggcaaggttggatatgaagccttcctcatattccttggctatgtatatactggtaaactcaagccctctccaatggaggtgtctacttgtgttgacaatgtttgtgctcatgatgcgtgtagacctgccattaactttgctgttgagttaatgtatgcctcttccatttttcaaataccagagttggtatcacttttccagagacgtctacttaactttataggaaaggcccttgtggaagatgtcatcccaatcctcactgttgctttccattgtcaatcaaatcaacttgtcaatcaatgtattgatagggtggccagatcagaccttgaccagatttcaattgaccaagagcttccgcatgaactctcacaaaaagttaaattgctccgccgcaaacctcagcaagatgttgaaaatgatgcttctgtagtggatgctttgtctctaaaaagaatcactagaatacacaaggcgttggactcagatgatgttgagcttgttaaacttcttttgaatgaatcagacattactttggatgaagccaatgctctccattatgctgcagcctactgtgaccccaaggttgtttctgaggtacttggtttgggactggctaatgtcaatcttcgaaattctagggggtacacagtgcttcacattgctgccatgcgtaaagagccttccattatagtatccctacttacgaaaggggcttgtgcatcagatttgacttttgatggtcagagtgctgttagtatttgtaggaggttgacaaggccaaaggattatcatgcaaaaacagagcaggggaaagaaacaaacaaagatcggatatgcatcgatgttcttgaaagagaaatgaggaggaatccaatggctggggatgcctgtatgtcttcccataccatggctgatgatctccacatgaaactactgtaccttgagaacagagtggcatttgcaagacttttcttcccttcagaagccaaactagccatggacattgcgcatgctgagacaacatctgagtttgctggtctttctgcgtcaaactcaaaaggttcaaatggaaacttaagggaggttgatctcaatgagactcctatagtgcaaaataaaagacttctttctagaatggaagcccttacgaaaacagtggagatggggcggcgctacttcccacattgctcggaagtgctggacaagttcatggaggatgacctgcctgacttgttttaccttgaaaagggtactcatgaagagcagagaatcaaaaggacgcgtttcatggagcttaaagatgacgtccacaaggctttcaacaaggacaaggccgagtttagccgctctgggatttcatcttcatcatcctcatcatccctcagagattctgttgtacattacaaggctaggaaagtgtaattttaaaaccatacatagtgtttttgattttgacatacatattatatatagtgcaaattttaaaggtgaagcccaccaactcatctgtaaaattctcgaagcaggaaagttgatgtaaacaacctgcgcatatatttttgaaaatgttttcatatgctttttggtggagaaatttacggtaatttttttttgaagataaatatataagatgtacctttaatctcccnnanaaaaaaaaaaaaaaaaaaaaaaa

SEQ ID NO: 26459 - DNA, 936 bp, Glycine max
  unsure (1)..(936): unsure at all n locations
  Clone ID: TF_GmC231432_1
ccacgcgtccgcattctctcccatacccaaaaccctcgccgccgcaatggaaaccaagaagctccaccctcgcttctcgctcggccgccaatcctccctcgcgccggagcgcgccggcgccggcgactcgtcggaggccctggacccggcggtccggttgatgtatctggccaacgaaggtgactcggacgggattaaggagcttttggacgccgggagtaacgtcaatttcaccgacatcgacggccgcacctcgctccacgtcgccgcttgccagggccgcaccgacgtcgttgacttgctgctccgacgaggcgcccacgtcgatccacaagaccgctggggcagcacccctctagttgatgcaatgtactacaagaatcaccaagttgtcaagcttttggagaaacacggtgcaagaccccctatggctcccatgcatgtgcagaatgctcgtgaagtacctgagtatgagattgatccttctgaacttgattttactaatagtgtttgcataacaaagggaactttcaggattgcattatggcgtggaattcaggttgctgtcaagacacttggggaggaattgttcactgatgatgacaaagtaaaggcatttcattatgagcttacattacttgagaaaataaggcatccaaatgtagtccagtttttgggtgctgtaacacaaagcacaccaatgatgattgtcacagaatatctaccccagggggatctcggtgcctacttgaagcggaaaggtgcattaaaaccagtaaccgccgtaaagtttgcacttgatattgctaggggtatgaactatttgcatgaacataaaccagaagccattatacacagagatcttgagccttcanatatactgcgggatgattctgggcatctgaaagttgcagactttggagttagcaagttgct

SEQ ID NO: 26460 - DNA, 1895 bp, Glycine max
  Clone ID: TF_GmC798_1
gagactgtgagcgagactcggtagtaatagtatagtctacaaggtttcgtattctactacttgaaacctaactcttccttcttcttctacattactcctatggctcccgatgcttccgacgcacttgcagtaaggcagaaagttcaattatttctgaacgcggctcgtactggttcaattgatctcttgaagaaattggcgttgcagctggacgagggcaaggatttggcgaaatcggtggaagcaataaaggacgccaacaagagaggagcactgcattttgccgcgcgagaaggccaaacctctgtttgcgagtacctcttaaccgatttgaagctctctgtcgattctcaagatgatgatggcgagactgcactcattcatgctgctcgtcagggacataccgccaccgctaaatatctgattgaccacggtgctgatcctactgtggctagcaatttaggggccacggcattacaccattctgcggggataggagatgctgagctgctcaagtacttgctgtccaggggagttaatcctgatctagaaagtgatgcgggaacacctttggtttgggctgctggtcatgcccaaccagctgctgtcagtgtactgttggaacatggtgcaaatccgcatgccgaaactgatgatggtattaccccactcctttcagctgtggcagccggttctctagcatgcttagagctgttaattcaggcaggtgctaaagcaaatataagtggtcaagctgagcatgctttagctgatgcaaagataatggaagtcttgaactatgattttgccaaaagcttgttatagggaatgggcagctctctgacgaggatggtgtcaagctgaagcagcaagttgctgcaaggggctatccaaaagctgttgagatattgttccccttgacgtccaaagtagatactattcctacttggactgttgatgggatacttgagtatatgcaatctgaaactagaaagcaacaggatgaatcgataaatgcaaaagaaactaatcagcccaaggaagctgattttccggagcaaaatgtccctgaggtggcacctgaagccaaaaagagagcagcagaagcaaagtcaagaggggatggggcttttaaaaggaatgaccatcatatggctatagatttttatacccaagcaattgatctgaaccccattgatgctactttgctatccaatagaagtctttgttggattaagttgggtcaagctgagcatgctttagctgatgcaaaggcttgtagagctttaagaccagattggccaaaagcttgttatagggaaggagcagctctgcgtttgttgcagaaatttgatgaagctgcaaatgctttttatgagggagtaaagcttgatcctgaaaataaggagcttgtaaatgcgttcagggaagctgtcgaggctgggaggaaatttcatggaacggctgaaaataaatcatagtttagccttttgttaataccatgtttcagagagaagagatcaaaatattgcgggtggtgcagccttattcacttgatccttttttccccaatgtgtgtgtgcgtgttttctttaactagttactgtcgtataggaagagtcagctagtaatctgtttcattaaattgttttagtaattataaaggttatgcttatttgacatgttccaaaattgttgcagaattagtacacattatgaaaatggcaatgcaggttcatgggtatttctcccatactgttgtaggattcatttgtttaaagttcagaattttttttatagaattaattttgaattgtcgaactcaattaagatgagtatttgaagatttgcattgaaacttatttttggttagcaagggttaatatgtttatggt

SEQ ID NO: 26461 - DNA, 539 bp, Glycine max
  Clone ID: TF_17022045
ttgactttgcttctgtaatgtatgcatccagctcttcatatggctgcagctaatggacatattgatattgtggagtatttaatcagtagaggggtggtaagtagttttttttacctatattcttcatttgatcttggaactttatgatctgaataagtcattgtttttttttttatcagcaaaaataatattatatatattataataaaagcagtacaagtggtactagtatatatacaagtcagcccttctataatgcaggaatatggtttcataatacagactatacagcacgaattaaggaaccatataactgaccgtatagttaccatagattagcccatcagctaagacactagaccccccttcttacaaatccctccctaatgttacttgacctgtggtggaaaggcacttcaaatcctttttcgagattggttagccaagtccagcatactaatatggcatcctccatcagttagcgttgaagctgtctgatagcaaatcatttcattgaccattaccagctttttccttga

SEQ ID NO: 26462 - DNA, 433 bp, Glycine max
  Clone ID: TF_LIB3087-005-Q1-K1-G2
ccggcccggaattcccgggtcgacccacgcgtgcgcccacgcgtccgcccacgcgtccggaggttaagaacaataacataaaccattcttcaccgctcctgtctcccaccatagtaatgggtcagagcctaagttgcagtggcaactatgaccacggtctcttcaccggcgggcagcacggtgaccttgaaattgtcacaactgtgttggactccgacccctctgtcttgcaccaaaccactctctacgatcgccactctcctgttcatattggcgctaccaatgaccagatcgagattctgtctaagctcttagatggatctctcaacccagatgttttaaatcgccacaaacagactccgcttatgctggcagcaatgcatgggaacatcgcgtgtgttgagaagcttcttcaagccggagctaatgtttt

SEQ ID NO: 26463 - DNA, 1421 bp, Glycine max
  Clone ID: TF_GmC6832_1
attggatcaaactgccttggaacgaaacaagaagggccatcttcccgttcatcttgcttgcaaaaggggttgtgttgagatggtaaaagaattctttgaacctggatccggatggcccattaatccttatgttctcctcaatcaaaagggtcaaaacattcttcacattgcggcaaagaatggaagagataatgtggtagaatacctactaggaaattgcaacactggtcatctacatataaaccagaaagactatgatgggaacactccattgcatttggcttccaaaaatttatttcagcaagttatcagcttgatcacagaggataagaggactgatctgaatctcacgaatgaagacggtttaacggctggtgatatcagtaagacctttgaacatccaatgttacgtggaagagagattttatccatggagttatcaaaaggagctggagtccctgtaaatcacatgttgcattctcaacgccaaccacagcctgaaaaagacacctctgattttcaacgcaaatcactgtctgaaaaagacacccgtgaggcatttttgattgttgcagcgttgttgatgacagtgtcatttgcagctggttttactgtaccgggaggtctatatagctctgatgacccaaaccctaaaattagaggaactgcagtttttgctggtaattcaggattctggatattcatcatcttcaataccataactatgtatagctctgcaatggcatgtggacttctgtctgtgggaatagttaatcggtctaaattaagtcgtttttcggacttgtttttgacatgtgcctttctcgcagcatcagtggcctttttggctgctgtacttctagttgtggccaataaccgtttactcgcaggtgctacaatcctcattggagccttgcactatatcctctacttttttgtaataaaataatctcgagcaaatgaaactttgatgactgatgaaattaaatctaagtcatcacttccacttatttattccagtttgaggagttttttctcgagaaatataggtggtaagcccaaaaatcttcttcattctcagaaagcaaacaaggacaaggacaatggattagaagagcatgtgcaacaaggcaattgagtagaagtttttattgtttttactgggatagaataagaaagacaattcagatcttgttcatttaactttcctttatctatgacatgaaacttgggatttgtttgtcaaattgaatctgaaaaatttagtttaaaattaaggtaatgtttgatttgatggcttattttctgttttttatttcttaaaaaagatttttattttcaattttttataacattttaaaaatatatatcgagaaaaaaatattgttaggtgtcatcacgtacgttttgactttatcagg

SEQ ID NO: 26464 - DNA, 1690 bp, Glycine max
  Clone ID: TF_GmC269_1
tttttatctctaacataggtagatagttaaaatgcaactagatttacacagaattcaaattatataaactaataaagataaaatctaagtaatagagccacaaattcattggatgattccttttccagttttccggatatatgcacaaaaattgttcctcgaaaaagttgtggctagaattgttacattgaattaaaataataggaaaagaagaggctccagttaggcaattaggctttggtcccatccaatcgcaaccaggaaatggatgtggttccttatccagtaacacccccaaacctcatttctctgccacatgaaccctcccaaacacagaaaccatagcaaaaagaaacccagattattgattattaataatggaagccatattcgtcaccaaacccgcttcccattctctcctcttaactaaactctctccgaatcccaaacacttgttccctccacaccaacaatcctttcacaacatccgccacaaacccacgcgcttccgccccgtcatcgctgttttccaaaaccaacatcaacaagatgcagctgcagcttccaaccacaccgaagatgagtcctacggcgaagtcaaaggcatcattggaagcagagccttggaagccgccaccggaatggagtacctcatcgagtggaacgacggccacgcgccgtcctgggttcccgccgacttcatagccaaagacgtcgtcgccgagtacgaaactccctggtggactgccgccaagaaagccgacgagtccgcgttgaaaaacttaatcgaatccgacgacggccgcgacgtcgacgccgttgacgccgacggccgcactgcgctcctcttcgtcgccggactcggctcggagtcctgcgtgaagctgctagcggaggccggcgctaatctggaccaccgagaccggagcggcggcctcgcggctctgcacatggcggcggggtacgtcaggcccggcgtggcgaaggttctcttggatctcggcgcggatcccgaggtggcggacgaccgcgggagaacggcgttggatctggcgagggagattctgaaggtgacgccgaaggggaatccgatgcagttcggacgcaggattggactggaaggtgtgattagggttttggaaggggcagtgttcgagtacgcggaggtgcaggagattctggaacggagaggaaagggtgagaatttggagtatcttgtgcggtggaaggacggtggtgccaacgagtgggtgaaggcgaagtttgtggcggaggatttggtgaaagactacgaggctggcctcgagtacgccgtcgctgaggcggtgctcgcgaaaagggtagcggatgaagggacgccggagtttttggttaaatgggccgatttggaggagcccacatgggagcccgaggagaatgtggacccagagcttgtcaaagctttcgagggaagtaacaaccaggcccagcccagtagtaatgggcccgctgtggtcttttccaatcaggatagccctagcctgtgatttttcatagtttgtttggactgggattttgttgcaaaatttcgggagcaaattaattaataattgttttgtaccaaatcaagttgtggacatgaaaaagctaatcaaatccaatacatattttcctcctggttttagatcgtactttgaatgttttaggaaag

SEQ ID NO: 26465 - DNA, 1406 bp, Glycine max
  Clone ID: TF_GmC1249_2
acggctgggagaagaaaacaaaaaaggggttttccttattccaatagcgaggcgagacatcgattccaaaggtgcgtttctgctgtgctagggtttctgcatcttccacctccgtcgcgatgaaaccaggcttcatctgattccgatttcccttcgctccttctcctccttaacattcatcttcttcgattcctctacaaattatgattattattatgatgaactccatcttcgcctcgcataaccttcgcgtcttcggtcccggcttgaatcccttcgcaccttattgcatcgccaatcactcccttttcctttccctttcctctcgctaaattacaattccctttctttttcctctccaacttctccttctccgtttctccgaacatgtaaattcggaggacaccgtctttgattcggtctatttttttgggggttactttacttcggttacgcgtcgtcgttttgcttttctttgtcgtcgtttttgcgttgcgttgattgctgagaaagaaagaaagaaagaaagatgctggaggaacagcctgttgttttgttcaggaagagcccttccaggaggcgcttgagatctgcttttgctaccgatgataggggttggacctcgcttcatgttttcgctcgaaaaggcgatctcaaattggttaaaaaacttctcaatgaaggaatggatgtcaatgtgtctgcatggggccccaaatcaaaaggggtgacccctctccaccttgctgccgaaggtggtcacattggagtgatggatgtactacttgagtgtggtgctgacattgatgccagaactaagggtgcttgtggctggacgccgctccacattgcagccaaggaaaggaggagggatgctgtgaaattcttgatagagaatggagccttcatgccacctgatatcagtgatagcagatttaacccaccgcttcattactgccccggactggaatgggcctatgaggagatgaagcgacttcgtcaggaagacttgtctgctggagagacatgttacagctctgaaagttaatttgcttttcagggatttggttggtgtttgatagtgtgtttggatgccattcagaggagatcaaagttaatataactagcttttgcgtcacctttacaaatttgacatgaaaatatgctgatacgtacattcagaaagcgtatccagacatgcactgtatctgtattgtatgaataaatgtacaattgaaataaaactactatgtagtgtatggggatgttttactattttagcatcttggatgcccttgtttatggaaacaattatgtacgattattaatgtgatatgctgtgattgttgatgttttcaaatacgtgttgtagactatgttcaaagtattgctattgttattctgtt

SEQ ID NO: 26466 - DNA, 356 bp, Glycine max
  Clone ID: TF_GmC265_4
gtgcattggcatcacaactcactagggtttggtttgtggactgtggtagcgaagaagaagcagatgggtaatccacgaaaaccaagtactgccgacgagcttcacatggcggcaaggtccggtgatctcatcgccgttaactcaattttggcttcaaatcctttggccgttaattccagagataagcattccagaacacctctacatttagcagcgttttctgggcaagcagaggtagtcacttatctctccaagcacaaggctgatgttggtgcttctgcaatggatgacatggctgcaatacactttgcttcacagaaggggcatttggaaggtgttcgcgcgctactttcagc

SEQ ID NO: 26467 - DNA, 3463 bp, Glycine max
  Clone ID: TF_GmC74695_1
cccggggtcgacccacgcgtccggtttaatattttcacagttcagtatgaaaaatcccctttttatttaatgttctatcttcatttgcctgattctgctctatctttttctctcacctcctcctaactttctgccttccctcattctcggtctcacaaacttaaagtaatatccagaaaggaatgaagaaaacctgggctcttcttcttatgtgttttttcttgtttgaggatggtgtgctttaaactagaactaatgagatatatcctgtaaatgttgatcacactctattggtttaaactaattataataaccttctagaaattgctaatttggttctatggttcttatctgtggaataagctcctgttctcaccctttttattctacattgcggggatttaaactctcacataattctcagggaatatcgacacaagatgggaaccaaggcgaagtttacaagtgctaaagaaaatgaagaatctcttaaacagagcaaaggttgcaaaaagccctagctagggtgaagtcaatggttcagtatccagaggcaagagaccaataccataggctgttgaatgttgtaactgagatccaaaaaaatcaggtaaagcatgagagcagttataacaattcagaagaaccgagagaattcggtgacctcaacgatcttgaagcattgttggacgaagatattttcatgcctacagcaacttagaagttagctttcattgttcattgtatgactttgaatttctcatcaagagaagttacctattattcctggggtgaattatatctcactcactcaagacaataaaaccaaagacattcttaatgctggattgacatatgaatccccaaaaccccttggcttttcctcatgggaaggtatcttagaaaataatgctggaagtcaacatgtgcattttcagcctttatttcctggaacacagcctgataacatgggaatcaatagcaatttttctcaaggagaagagataatggtgccatatttgaccaccagcattgctaagcagcatgagaatggaagtatcattaaagctgaaggaaattggcaggtttatgatgttgattctttacgcatgtccagttggcctatagatagtgcttattcaggctcaacatgtgaggtaagttgtagcaactgtgagcaggaagttaatgatgttgattttcagaaatccttggaacagtgtcttctacattcacacaaacaaaacaaggttctcatgcaaaatgatcttcaagaaaaacttttgaatgaaaaagaaaagataaaatcaaatctagaggcctatggaatagaagacacatatttatcttttaaaaggactctgttagatggacctccagctgaagagggtctgaagaagcttgacagtttcaaccaatggatgagtaaagagcttggagatgtggaagaatcaaataaaccatccacttctggtggttattgggatacagttgaaactgaaaatgaggttggcaacacaactattccttcccaagggcacctggacacctatgtattggatccatctgtttcccatgatcagctttttagcattattgactattccccaagctgggcatttgaagggtcagaaattaaggttatcatttctggagaattcctaagaagtcaacatgaagcagaacaatgtaagtggtcatgcatgtttggtgaggtagaagtgccagcagtgatcattgcaaaaggtgttctttgttgtcatacacctccacacaaggctgggagggtacctttctatgtaacttgttccaataggttagcatgtagtgaagtgagagaatttgatttccaagtccactatactccagaagacactacaggtgagaatagaggaagcacttttgatacttttagtatccgatttggagaacttttgtccctggggcatgcctttcctcagaattcagattcaattagtgtaagtgagaaatctcaactgagaagtaaaatcaattctttactgagggaggaggaggatgattgggacaagctactgaaacttactcaagaggaagatttttctccagaaaatttacaggagcagctgcttcaaaatcttctgaaagataagttacatgcatggctccttcagaaaataacagaagaggggaaaggccctaatatattagatgagggtggccaaggtgtgcttcattttgcatctgctcttggctatgattgggccctagaacccacaatagttgctggtgtgaatgtgaactttcgtgatgtaaatggatggacttctcttcattgggcagcattttgtggcagggagcgcacagttgctttcctcatctctctcggcgcagcacccggagcactgactgatccatgtccagaacatccttctggtagaacaccagctgacctagcttctgcaaatggacacaaaggaattgcagggtatcttgctgagtcttcactaagtgcacacctcacaactctcgatttgaacagggacgcgggagaaaattccggagcaaaagtagtccaaagactccaaaacattgctcaagttaatgatcttgatggtttatcatatgaactgtcattgaaagattcactggctgcagtgtgtaatgccacccacgctgcagctcgtattcatcaagttttcagaatgcaatcatttcagagaaaacaactgaaggaatatgatgatgacaaacttggattatctgatgagcgtgctctttcactcataaaaatgaatgtaaaatcacacaagtctggaccacgtgacgagcctgtccatgctgctgcagtacgaatccaaaacaaattccgcagttggaagggaagaagagaatttttaatgattcgacaacgcatagtaaaaattcaggctcacgtgagaggtcaccaggtcaggaaaagctgtgggaagataatttggtccgttggaatcttggagaaggttattttacgttggcgtcgaaaaggtagtggtttgcgtggatttaaaccggaggccaattctgagggaactatgatacaagatgtatcttcaacagatgatgactatgatgtcttaaaagaaggcaggaagcaaacagagcaaaggttgcagaaagccctagctagggtgaagtcaatggttcagtatccagaggcaagagaccaataccataggctgttgaatgttgtaactgagatccaagaaaatcaggtaaagcatgagagcagttataacaattcagaagaaccgagagaattcggtgacctcaacgatcttgaagcattgttggacgaagatattttcatgcctacagcaacttaaaagttagctttcattgttcattgtatgactttgaatttcacagcagagttaggtgatcaactgtctcactttgattgttatagtaaattagtaatcttaattctcattcttttgttgtt

SEQ ID NO: 26468 - DNA, 500 bp, Glycine max
  unsure (1)..(500): unsure at all n locations
  Clone ID: TF_jC-gmXLIB3564P099ba06b1
cccacgcgtccgtacggctgcgagaagacgacagaagggggtgtgtgtttaaattcaataagagactaagttgaagacttgaagccatgagatgaatcacttatctcttgacactgaagattctcttgcaagcttgctgctggagcttgcagccaacaacgatgtttcgggtttcaaaagattaatcgagtgtgaaccttcctccatagacgaggttgggttgtggtatggccgccacanagagtcaaagaagatggtcaacgagcaaagaactcctttgatggttgctgccacctacggtagcattgatgtcatgacgttgattctttctctatcagaagctgatgtgaaccgatcatctggccttgacanaagcactgcacttcactgtgcagcttcaggtgggtctgaaaacgccgtcgatgctgtgaaactgcttctagaagcaggcgctgatncgaattctgttgatgccaatggtcgccgacccggggatgtta

SEQ ID NO: 26469 - DNA, 682 bp, Glycine max
  Clone ID: TF_GmC1587_1
caacggcacagcaggtggtggaagcatcagtgccaatgacaagaaagcagtgtacaggcacattgtccgtacggcgagaagacgacagaagggaatctcaatgctattattagtgggaaagcaggcttttcttccaacacgccttcttcaattaatccaaacatatcatgtgaaagtaagactccacaagtagaggatatacaagatggttctagtgtgcttcacctggcatgcataattagtgattctgcaatggtagagctgctcctacagtatggtgcagacataaatgctattgattctagagggaggacacctctacattacagcactatgagagggaagaatgcaactgcaagagtgcttattacaaggggggccaatccacttgccgtagacaaagaaggcaacactccttttaagcctgcaacggaacctgacactgcaggcaaagaaactcttgctctaaaccagcaaatcgcatgccctcaaaacttaatagaaaaatgattcatggggtcaccttgtgttcgagatagaaatttggcaagagagcaattgacaatgtgtacaggaccaactttgttttatagagcaatagataatagaagagaagaatggaagatgcgactttttccctaaaagaaaagaaagaaagaaaataaacatttcttataacagt

SEQ ID NO: 26470 - DNA, 3202 bp, Glycine max
  Clone ID: TF_GmC516_8
atgtccccggcttatctaattcttctgctatcagaaggttacgagtatgatattaatgatctgcatcaagaggctcaagccagatggttgaagcctgcagaagtgatgtacattttacagaatcatgaaaagttccagttcacccaagaggtcccacaacagccaaccagtggatccctgtttctgtttaacaaaagaatcctgcgatacttccgtagagatggtcataactggcataagaaaagtggtggaagaactgtgggagaagcacacgaaaggctgaaggttctaaatgttgaagccttaaattgttactatgcacgcggagagcagaaccctgctttccagaggcggagctattggatgttggatccggcatatgagcatattgttcttgtgcattataggaacacaagtgagggaaagctaagttctggagctggggcacaattgtcaccaagttcttctgtctatactcagagtcctagcccatattctactcagaatccagggtcaacatccatacttggtgattcatatgaacctaatcagagtttctccagtcctgggtctacaaaagttacatctgagatattcgttctgaacaataaaatgggtcacatggattgggcagatacagaatcaggaacctcatctgaactcgaggttactcaagctttgcgccgattggaggtacagttaagtttgaatgaggacaactttgaagatattgtttccttcggcagtaagcatgaaactgttcatgattcaaatcccaagcacgatcaaagggtgatcagcaatcaagagcaatctgcagctttctctagacccgatgatcaagggctattttatgatggatgtaatggaaggcaagtttttttgtcctcttcattatggaagcatcaaatgggaagagaggaagatcatggttaccctgatgcaaatgaaaaggctttatggacagagcagctggaatcacataagtcctcatctgcagtcaagttacctcagaaaaatgtatacatgccagctgaaaatgaaaattcagtatcttctgcaagaagggtaccagtttccaaccaggaaaacagtcactggctcaacttcaactgtaataattctgaaaactgtatgatttactttcacctggttaacttaacaacctttttggtatattttggtgtttcttcaacttctgattcccctcccatgttagcagctgttttctcacaacctcaaggtgttgatgaagtcaaatttcctgcctattcttctatgttggaaacacaagtaattaattctgactactatgaaacattgtttgaccaaagccaaattggagcaccaccagatgcaaattcaagcttgactgttgcacaaaaacagaaatttactattaagactatctccccagaatggggttatgccaccgagactaccaaggtcattgttgttgggtcttttctctgtcatccctcggattctgcatgggcttgtatgtttggtgatgttgaagttcctattgagataattcaggatggtgtaatctcttgtgaagctccatctcaccttcctggaaaggttactctgtgcattacttctggaaactgggagtcctgcagtgaagtcagagagtttgaatatcatgataagaccaatagttgcactcgatgtactcaatccgaaacagaagccactagaagtccagaagagctgttattacttgttagattagggcagatgcttctttctgcatcaacaataaagaatgacaacatagaatctggaattcctctaataaaaccgaaagctgatgatgattcatggagccatattatagatgctcttctagttggcagtggaacgtcgagtggtactgttgattggcttcttgaagagcttctaaaggataagtttcaacagtggctttctttcagatcacgggaaaaagatgaagagacaggctgctctttgtccaagaaagagcaagggattattcacatggttgctgggttaggttttgagtgggccttgaaccctattctcacgtgtggagttaatataaatttccgtgacatcaatggatggactgcccttcattgggctgcacgttttggaagggaaaaaatggttgcttcacttatagcttctggagcatctgctggagctgtgacagatccaaatgcacaagatccaactggtaaaactgctgcatctattgcagccagcagtgggcacaagggactggcagggtatctttcagagatagctgtaacaagccatttgtcatcgcttacactggaagagagtgaatcatctaaaagttctgcttatcttcaggcggataggactgttaacagtgtctccaaggaaaatcttactgccaatgaggatcaggcgtcactcaaagataccttggctgctatcagaaatgtaactcaggcagctgcgcggatacaatctgcttttcgctcacattcttttagaaaacggagagcaagagaagcaactgctagtacaggtggcattggtaccatttcagagatttctgctatgtcaaaacttgcgtttcggaactcacacgaatataattcagctgctttatccattcagaagaaatatcgaggttggaaaggtcgtagagatttcttagcattgcgccaaaaagtagtgaagatacaggctcatgtgaggggttaccaggttaggaagcattacaaggtaatatgggcagttggaatcttggacaaggttgtcctacgatggaggagaaaaggagctggtttacgaggtttccgacaagagatggacatcaatgaaaatgaagatgaagatattctcaaggtgttccgaaaacagaaattagatgtagaaattgaagaggctgtttcaagggtgctgtccatggttgactcaccggatgctcgtgagcaatatcatcgcatgcttgagaaatatcgtcaagctaaggctgaacttgcgggtacgagtgacgaagcatcattatcaacttctgtaggagatgacttatttatggatgatttttatccatttccctaagagcaaacgctagcctagataatcttcattattatgaatgaacagtttgtggaacaagctgacttattagtttaacacaatatatattctatagtgataatagcgatggacaatgtcactttgaacagaataaaatggt

SEQ ID NO: 26471 - DNA, 2187 bp, Glycine max
  Clone ID: TF_GmC1240_1
ccacgcgtccggtggcagagaatcgaggaggcgcaagagtaggacgcggggaatcctgaacgccaaagactgaggcgaatatttagctgaaaataaattcacaccacaacccaacacaaacactttctctttctttctctcttcaatcttgatcccattttttttcttctctcttccttcctttggaattgaattcagcatcagcatgaacagcaggtctcaggatcaacgctcaagacctgccaagccagccacaatccatggctgcgccctctccggcgacctcgttggactccagaggctacttcgagacaacccttctcttctcaacgagagaaaccctgttatggcacagacaccacttcatgtctctgctggtcacaataggactgagatagttaaatttcttcttgattggcaagggacagataaggttgagatggaggccaagaatatgtatggagaaactccattgcacatggcagctaagaatgggtgcaatgaagccgcacaattacttcttgcttgtggtgctactgttgaagccagagcaaataacggtatgacacctttacatcttgctgtttggtactcactacgagcagaagaattcttaactgtgaaaacattgcttgagtacaatgctgattgcagtgccaaggacgatgagggaatgactcctttaaatcatctatcccaaggcccgggaactgagaaacttagggaactattactctggcatcttgaagaacaaaggaagcagcgagccattgaggcatgcagtgaaaccaaagctaaaatggatgagcttgagaaggaactatcaaatattgtcggtcttaatgatctaaaagtacaacttcgcaagtgggcaaagggcatgcttttggatgagaaacgtagatctcttggtctgcatgttggcaggagaagaccacctcatatggcctttctaggcaaccctggaacaggtaaaactatggtagcacggattcttggaaaattactccatatggtgggaattctacccactgataaagtgacagaagtacagcggactgatttagttggtgaatttgttgggcacactggtccaaaaacaaggaggaagatcaaggaagcagaggggggaattctttttgttgatgaagcctatagattgataccaatgcaaaagtccgacgataaggactacgggttggaagccttagaggagattatgtctgtcatggacagtggaaagattgtcgtaatatttgctggctacagcaagccaatgaagcgagtcattgcttctaacgaaggtttctgtagacgggtgaccaagttttttcaatttaatgatttcaactcagaagaactagcgcaaatccttcacatcaagatgaataatttagctgaagatagtttgctatatggatttatgttgcatcccgattgctgtataaaagccttagcagcattgatagagagggaaacaacagaaaagcaacgtaaagagacaaatggaggtttggtagataccatgttggttaatgctagagaaaatttagacctaaggctcagctttgactgtatggatacagaagaacttcttaccatcacattggtagatttagaagcaggccttcagcaattaacacagtaatcattctttgcaatctagtagatattttggagagattcatttcagcttacctcaattttcacacaagtttgacatctgcacaatgaggaacatatcatgaataagtttggtacaataggttgattcttttgggagttcttttccttgtattttgtaattgataatattatataggcttcattcatgtactttgctatatttttttttatctgaataatgatttgtagacacctaatgcaaatctataccttgagagaaagaactagaagagagagaagtgattatttgatgagtgatatgatgtgattaagaagggagaggaagatagggagaaatgaagggtcaaatgaaatgagtgtttaggtagctatgtatcattgttgtttttatctgcctttcatttgtattcattgtatgttattattcattattgtgggggagtaacgaaatcttcttttatttgtggctgtcccaaaatattttcattattattaaccattaatgttaattggtgatgctttttaaaaaaagggaaaaca

SEQ ID NO: 26472 - DNA, 674 bp, Glycine max
  Clone ID: TF_uC-gmflLIB3275P054d03a1
gtcatgcaaaacttggcaacgactaatattcatttgttggtccaaatctttcagaagttgtatcttagccccatctgtcacactgatacatgtctaagacgtctttgaggctgcttaaacaacttgattagttcatatgttctggcacattgaccattgtaaaggcaaaggtcaagaggagttaaaccatcctcgttttttaatgtcttatcagcacctttaatcagcaaaagcctcactaaatctgtcctctgagcttgaacagcaagatgcaatggtgtccagccataattgtccgggagatttatatccacattatacaataagagtattttaactgtctgggtagaagctgttagtacagcatagtgcatcaatgtggctccctcattatcctgtacaaagggattagctgagtttctcaggagataattggttatggcctgcttttttccaattattgctctgtgaagggcagtcaaaccatccctatccacagcattgatatcaacattgtgcttcaacagagaatctaaaaggtaaaattctccacatgcagcaagagtgtgcagaggaagccatttatcctgaaaataatagtagtattgaccattaaaaaaagcattgaaagtattcacccaagactaagtgaatcagaacccttttccctccct

SEQ ID NO: 26473 - DNA, 2559 bp, Glycine max
  unsure (1)..(2559): unsure at all n locations
  Clone ID: TF_GmC16_1
agggagccaaacaggcttacgcggaatctgactgctgcccgaagtcattctcagtaactgctaatcactgacacggtcagctaagctaagctaccccttctctctctaaaacctttgccattgtctcccacaacaccttacaacttacaactccaatcaggcacacgcgggtgagagtcaagattcattcatttatttataaccaccggttcaggtggcgcagcaaaaccaaacccacaagaggtgaagaacaataacataaaccattcttcacctctcctctctcccaccatagtaatgggtcagagcctaagttgcagtggcaactatgaccacggcctcttcaccgccgtgcagcacggtgaccttgaaattgtcacaactctcttggactccgacccctctctcttgcaccaaaccactctctacgatcgccactctcctcttcatattgccgctaccaatgaccagatcgagattctgtctaagctcttagatggatctctcaacccagatgttttaaatcgccacaaacagactccgcttatgctggcagcaatgcatgggaacatcgcgtgtgtggagaagcttcttcaagccggagctaatgttttgatgtttgatactagttacgggagaacctgcttacactatgccgcatactacggccattcttcttgccttaaggctattctttcttctgctcaatctagtccagtatctgcttcttgggggttttctcggtttgtgaatattagagatggaaaaggtgcaacgccattgcacttggcagctcgtcagagacggtctgaatgtgtacatattctattagacagtggtgctcttgtttgtgcttcaactggtggatatggctgtcctgggagcactcctctacatctagcagctagagggggatctatagattgcattcgtgaattgttggcatggggtgctgatcgtcttcaacgcgatgcatctgggcggataccatatatggttgctctgaaacacaaacatggagcctgtgcatcattgctaaatcctacatctgcagaacctcttgtctggccgtctccattgaagttcatcagtgagcttaatcctgaagccaaagctttattagagcaggcattgatggatgcaaacagagaaagagagaaaaacatattgaaagggagttcttactctctgccatctccatcacattctgatggggtagctgataatatgtctgaggttagtgagtccgaattatgttgcatctgctttgagcaggtgtgcacaattgaagttcagaactgtggccaccagatgtgtgcacaatgcacactagccctgtgttgccacaacaagcccaaccctgccactgcctgtcttactccaccagtttgtccattttgtcggagcacgataacaagactcgttgttgtgaagacagaatgccacgatgaaactgatcaagacagtgctgatatcaactgttccaagctgagcaagtcatcaaggaaactcagacacttgaatgacagtggtagcagcagcttcaagggactatctagtgttagttcattcgggaagttgggtagccgcagctctggaaggattgctgctgagtggcttgataaacagtgatggcaaattacttgtggtaatcaatgattccatattggcaagatacggtaactacagaggtgcttaaccggcaaggcaaaaatcaaagttgaaaacaggtgaaggaatattatgtaattttgggaaataagcaaaagtgagttgaagtgaagtgaagttcgcggtaggtaccaagtgttgttgggaaaaagagaaggggatgtcatgttgttgtagtattattgttacttgagaatgaagaagcatcacctgcgtcgatcgatgattttgggcatcgtcaataattttattttatcatacgtatcccagtaaagtgggaataatttctctcaaaagtataaatcaataatattaagggaaagtgtattgcttatttgcattatttatttctttgtatcgataagatataagaaataagatacaaaagagaaagacagagcctttttgttgcttgtcaaaaaatcaataatattatgggaaactgtattgcttatttgcatctgatttatttctttgtaccgatatgttatatgctatacgtttcttaagagaaaaaaaaaagccttttgtaaaaaaaaaaaaaaaaaaaaaaagaaaaaaaataataaataagagagaaaaaataaaaaagtgcggtggatnatgtagggaggatncgaggttagtgtgttttgaatgntantnnttttttntnanagagagggaaannaatttnaanngggcggggnnnntgaaangnnnggagttggngaagngtggggnnggnnaaanaatagggnttgtggaagagnagncgttnnggnnnnaggggggagtaggnacgagggtggcggcgcngctcgncgcgcaaanggcacngagccngcgcggcgagggggagcggccggcccgggagccgcgcagtggcgccgcgcncggcggaggcgc

SEQ ID NO: 26474 - DNA, 961 bp, Glycine max
  Clone ID: TF_GmC88213_1
cacatgttcttctcttatctctatctcttctgctttggaaccaaaacacaaacacaataacaacatatcaagctttaagtgcaagtaaacaaacacaacacaaccaaggttgacaagaattgaaagttgaatcctgtgtgttgctggtgcagatatggactcaaactcaaaggctgtgtgcttcataacccaccaagccattttcaacgcggttcgatgtggggaccttgaagggctgaaggagcagctgaagaacaagggtgaagagggggtttctgaggtgatgtctatgcagaacgatgcaggggaaaccatgttctacatagctgctgagattggtcttcgtgaggtgttcagcttcttgtttggtttatgtgacatggaggtgctgaagatcagggccaaatcggatttgaacccctttcacgttgcagccaaaggtggttgtttggatattgtaagggaaattttgagtacttggcctgaggtttgcacgttatgcgactcctctaacactagtcccctatattttgctgctattggagatcatttggatgtagtgaatgcaatattggatgttgatgtgagttcaatgatgatagtaaggaaaaatggcaaaactgcattgcacaatgctgctaggtatggcatccttcgcattgtaaaagcactgattgcccgggatcccggaatagtctgcatcaaagatagaaagggtcaaactgcactgcatatggctgtgaaaggacaaagtacttcagtggtggatgagatattacaagctgatcttaccatattgaatgaacgagataagaagggtaacacagctcttcacatggctaccaggaaatgccgtcctcaggtagtaagcattttgttaacctacacagctctgaatgtcaatgccatcaataatcagaaggaaacagccttggattttgccagataactacgatatgga

SEQ ID NO: 26475 - DNA, 2033 bp, Glycine max
  Clone ID: TF_GmC1882_1
ggctcgagacccccaccatcttggtcgttggtgcgggcgatcatggatcatcatcgtcaccctcatcacaccacccctctctccgagcccaccacccccaccacccctcgccccaccctcttcctctccacctccggcaaggccctcctcctctccaactccaacaaatccctcctcctctccaactccagcaaacgcctcgacaccccgaggaaaaaatatgtcaagcaagtcaccggccgccataacgacaccgagctccacctcgccgcgcagcgcggcgacgcggcctccgtccgccagatcctcgccgagatcgactccatcatgatggggagcttcgagttcgacgccgaggttgccagtgtcaggtccgccatctttaatgaggtgaatgagctgggagaaaccgccctcttcaccgcagctgaaaagggccacctcgacgtcgtaaaggagctcctccctcacaccagccacgacgcgctttcctctaaaaaccgctccggctttgacaccttgcacattgccgctagcaaaggtcatcttgccattgtgcaggcgctactagaccatgatcccggtttgattaagacgtttgcgcagtcaaatgcaactcctctaatctctgcggctacacgagggcatgcagatgtcgttgaagagttgttgtctagggatcctactcagttggagatgactaggtccaacgggaaaaatgcgctacatttagctgcacgccagggacatgtgagtgttgtaaagatactactacggaaggatcaacaacttgctcgaaggactgataagaaaggacaaactgcgctacacatggctgtcaaaggggttagttgtgaagtggtgaagctgattcttgctgcggatgcagccattgtcatgcttcctgacaaatttggcaatactgcgttgcatgtagccacaaggaaaaagaggacagagatagtgcatgagctgttacttctacctgacaccaatgtaaataccttgacaagagaccacaagacagctcttgacttggcggaggggcttccaatatcagaggaaattctggagatcaaagagtgtctcattcgttatggtgcagttaaagccaatgatctcaaccaaccaagggacgagctaaggaaaaccatgacacaaatcaagaaagatgtgtattttcaactggaacaagctcgaaaaacaaacaagaacgtgagtgggattgccaatgagctacgaaagctgcacagagctggaatcaacaatgctgcaaactcagtaacggtggttgctgtgctatttgcagcggttgcatttgcagcaatgttcacagttcctggtggggacaatgatcaaggggtggcagtgatggcacacactgcgtctttcaaggccttcttcatatccaatgcaatagcactctttacatcattaagtgtggtggtggttcaaatcacgattgttagaggggagataaaggctgaaagaagggttgtggaggtgatcaacaagatgatgtggttagcctctgtctgcacctctgtttcgttcatttcagcatcttatatagtagttggtcgacgcagccagtgggctgcaatacttgttaccattgtaggggccattgtaatgggtggtgttcttggtaccatgacatactatgtggtgaaatccaaacgctcccgaaggatgaggaggaagaaagggaagttctctaagacaggaacacaatcgtggcgcctttcgagttcggatgattcggaaataaatccaatctatgccatttgatgttacttaatttgggacttcaatgtaagtttgatgcttctgttcaatgcttttgtatttatttatttgtcaagcattgagaaggactcttagcttaatttggaggtttcatttgttcatagagagtggcttttatgtaagtaaaatggttccttgttactcagtgtttcaaagggaacaatataaggaagccaaagtggtcagttacactgtttcttatgaaggttgatttcacatcacac

SEQ ID NO: 26476 - DNA, 1433 bp, Glycine max
  Clone ID: TF_GmC2979_136
gtaagcaaaccccaggaatcctgaaagctttattaatattttcatactatagtttcagagttgatcttccagaagtgctaatttgaatccacaagtacatatgaaatttaacttattcacaaagtcctatgtgggattatgattcttctagtatagacatttctctgtatgcatttctagctgaaaattttcattttttaaacaaacatgtgtactgctacttatgccacacgcgtgaacacgcctaactccttcacaccgtctcaaatctcaaacatgatatagctttatgacttgatctatcttagctcgacatacagggcaaccccatttctttgatttcacctcgttcaagcaagacatgcatccagcaacatggccacagggtatgcatgccccttctgctggagcatctaaacatatcacgcatgatgaactacttccaccggcacttttttgtccttctttaagaagcttctcagcatctggagatgccatatcaactgggcttaaatcaattgatggatactgaatggggccatctcctggaatctcattggtgattggcggagcggatggattcaaatccaaagcactaggattcacacagctttggaggtgctgagtattgccatccgggttagcttcttgtaccaactcactatcacttgtattgggatttggtgtgccaagaaaaccatgattgtctgtgttcactgcactgcttgaagagcttgcatcaaagcttggctgtgtatcaggaaagggtggtctctcctgcatggcagactgaagggatgcactgatggccatagccaactctgtgtcttctgcatctggtggtgctgtgggtggacctgtaggcacattgttttgcaagaatgcaggacttgcctgtggaattcctttgcaagcattagaaaaccatgtaagttgttgcttgtcattctcacttgcaggcccaagtttaatgcgtgttttagtagtgtgattaacaactgtcactgacggatcagactggtgaagctttggttcttgtaaatcggcgttccacagtccaataacagtatgtggttgtgcatcctgcaacctagaatatatggcaagctccaacttgtaaggtttggcaagagtacgggagccaactggtaaaacaaccacccaaactttctttgataccaactgaggagctactacttctagaaacccaggaccatgaaactcgcgcaaccaaccggagaacaagcatagatgactctcaattgtacgaacaacattgctgtgtcctttggccctggcaacctcaagagcagttagacaatcatcattcaagactaaaggattggctccatgcaaaagaagtaagttaacaatactatcaaagtcccttttagctgcatgatgcaatggagtcccaccatgacgaccaggac

SEQ ID NO: 26477 - DNA, 1647 bp, Glycine max
  Clone ID: TF_GmC311_2
agcgcatggtcctttctgaaaattcctccgcaatgttcctcaatttctccgccaatactcccaagttggttcctctcgcgctagggttttagtctacagctcattctcacacacaaccctaacaacacaaatttcccactttctagggtttcctttcgtcatccaccatggccgagtggcagtccctcctccaatcgattctcgtcggcctcattttctcttaccttctagccaagctcatctccatcgtcgtttccttcaaagacgacaatctcaccgtcacgcgcgcctccgccgccgaaaccaccgccacgcgcgcggaacaattcgaggatgctctgaagcgcgacgacgccgtttcctccgatgcgcgccccttcgaggaggagtcggtcgtggccgagcacggcagcgtgaggatcgacagcgatggcgactacgacgacgactgggagggcgtggagagcaccgaattggacgaggcgttcagcgccgcgacggctttcgtggccgccgccgccgccgatcggctatcgcagaaggtgtcgagcgacgtgcagctacagctttacggtctttacaagattgccaccgaaggtccctgcagcacgccccagccttcgcccctcaaaatgaccgcacgtgccaaatggcaagcgtggcagaaattgggtgctatgcctcctgaagatgcaatgcagaagtacattgatattgtgaccgagatctatcctacttggcttgatggttcatctttgaggaataaaagcggcgacagtggtggacatggttcagaggctaagggaccaatgggccccgtattcagcacttttgtttatgaagaggaatatggcagtgactcacaaatggaagccattcatggatttgccagggaaggagatatggctaatctgctcaagtgtattgaaaatggtgtttcaatgaatttaaagggacaatgatggacaaactcccttgcattacgctgttacatgtgagagggaagccatagctgagtatttagtgaagcataatgcagacatatattcaaaagataatgatgggagttcaccacgtgacatctgtgagtcaaactggccatgcatgcagcatgtgggggaagaagtaaattgattgattgattgtttgcttgttgcagcttctggccaatacaaccttttagccaaatcccaagaggatgttcgtgtctatataacttgattttttttgtccttactcatgatggtgtatacacccttttcagtctagtgtacgcctatgcaccgcttaggtaatggttagttaattaggttgtattctgttctattattgtttcctctgctcagctctttaaatctggctctcatttcttatatatttcatggataaagatatacacggaaactagaaatagtaacagggaaagggaatcttaaacgatattctttcctcggaaaaccttctacccttctattgaaggcgatatagattttacagggttattttaggtcttcaaatggtgttaagattatccgcagtgaaatctttgattgataatgatgtcgtgattatgttgaatctgatgttttaattaataatgtaatttaaatttgtgtcaaatattataaatcatatttttttcatatt

SEQ ID NO: 26478 - DNA, 830 bp, Glycine max
  unsure (1)..(830): unsure at all n locations
  Clone ID: TF_GmC190413_1
tctatctgtctgtctcggctcgtcgttctagatcgcgatctagaactctctctctctctctctctctctctctctctcatgaacgacgcacttcccatgtttcctcggttctatagatggagatggaagctctgaatctcgctttcgccgaatctcgtcttctgtgttcagatttcgctattctccgtttggattgatgaaaaaaaaagccttttctcttcccgttatttttttctcgtcggatttggaattcgatcttcacctcatccactcgtaatcgctatccgaagcatgtgcggtggtccagagaaatcaaagtctctttcaactccatcttcatctgcggtagaaggttcaactaacggcaaagacatgaacaaattaacagttcatgctgcagattctttttcctgcttactcgagcttgcttctaacaatgattttgaagattttaagctagctttagttagggatgtttctctaataagtgaagttggcctctggtatgttcgccagattgggtccaaacaaattgttcttgagcaccgaactcctttaatggttgctgctatgtatgggagtatagatgttctaaaacttatactctcatgtccggagactgatgtcaatttctcctgcgggacagataaaagcactgcccttcactgtgctgcatcgggtggttctgttaatgcagttgatattgtcaaattgctcttatcagccggtgctgatatcagntgtgtggatgctaatggaaatcgtccagttgatgttattggtgttcctcctaagcttgaaggtctgaaagcacccttgaagatctactt

SEQ ID NO: 26479 - DNA, 2626 bp, Glycine max
  Clone ID: TF_GmC26_1
cggctcgagcattcgtccgatcgaggtcttctcgatttccttctctacaacacaacgctctcttctcttgcaaccaaagtacttgttccagtgtctactctactcaaaaaggatttgggacatcatgtgcagtgattcgaaaagtaaactttcttccccaaccctcgtcgtcatggagaatagtaacattcagaagcagaatctggatggtctctacaactcggttttgcttgaattgtctgcatctgatgattatgaagctttcaaaagagaggtggaggaaaaaggcttagatgtgaacgaggcaggcttttggtacggtagaagaattgggtcaaagaagatgggatctgaaacgaggacccctctgatgattgcttctttgtttggaagcgctaaggtgctcaattatattcttcttcagaaaggaggaggtgttgatgtgaacagggtctgtggttctgatagggccactgctctacattgtgctgttgctggtggctctgaatcctcacttgagattgtcaagctcttgcttgatgctggggctgatgctgagtgccttgatgccagtggcaacaagccggtcaatctgattgctcctgcctttgattctttgtcaaaatcgcgaaggaaggccatggagatgttcctcaggggtggtggggaaagagacgatgaactcatgagccaggagattcaagagagaaaagaagcaattagtgataataagaaagaataccctgttgatatatcactgccagacataaacaacggtgtatatggaacagatgattttaggatgtacaacttcaaggtgaagccttgctcaagggcttactcccatgactggactgagtgtccattcgttcacccaggggagaacgctaggaggagagacccacggaaatacccttacagctgtgttccttgccctgagttccgcaaagggacctgccagaagggtgattcctgcgagtatgctcatggtgtttttgagtcctggctacatcccgcccaataccggacaaggctttgcaaggatgagacgggctgtgctagaaaagtatgcttctttgctcacaaacctgaagagctacgccctgtgtatgcttccactgggtcggctatgccatcaccaaaatcctattcagctagtggacttgacatgacagcgatgagtccattggctcttagttccacatctttgccgatgccaactgtttcaaccccacccatgtctcccttggcagcagcttcatctcccaagagtggaagcatgtggcagaacaaaataaaccttactccaccatcgttgcagctccctggtagccgactgaaggctgctttgagtgccagggatctggagatggagatggaactgctcggtctagaaagccctgctcgccaacaacagcagcagcagcaacaattgatcgaagagattgccaggatctcttccccatctttccggagcaaggaattcaataggattgttgatttgaatcctactaaccttgatgacctgttagcatctgctgacccttctgtattttctcaactacatggactttctgtgcaaccttcaacacccacacaaagtgggcttcagatgcgccaaaacatgaaccacctccgtgcgagttatccatccaacatcccttcctctcctgtgaggaagccctcagcttttgggtttgactcatcagctgctgtggcaactgcagtgatgaattctaggtctgctgccttcgcaaagcgaagccaaagtttcattgatcgtggagctgcaacccaccatcttgggctgtcttcagcttccaactcttcttgcagggtatcctctaccctttcagattggagttcccctaccgggaaactggattggggtgtaaacggagacaagctgaacaagctgaggaaatctacttcctttggattcagaaacagtggggtaactgcatcccccatagcacagcctgaatttggtgctgagccggatgtctcatgggttcattcattggttaaagatgttccctccgagaggtctgagatatttggtgctgagaagcaacaatatgatctcagtaaagagatgcttccaccatggatggagcagctgtatatagagcaggagcagatggtagcatgagctagggctgccatggcaatgcttcttggttattctgacaaagtttatttatttatttaattattttattcatttgaaatgcttctactatccaatattacacaatattattagggataggatgacatatgttgcaaagaacaaagttcaggttaatccagagattcaaacgggagttccaacttctagatcagggaagacttggagaaacgttgaacaaaggatgctgaattttttttattgtataatataaatttattccccccttttctctacgggatggatgtattttctctagcaagtggacctcaaagtatttgccattgattaagcagcacaattcttttttatataaaattgttatgccattttatcaatgcttatccatcattattagaagtactttcaaggaaatttctcgtgtgactgcttattggctattctttcttatttaaatacttgatttcttgtgac

SEQ ID NO: 26480 - DNA, 2504 bp, Glycine max
  Clone ID: TF_GmC26_2
ccacgcgtccggtcttctcgatttccttctctataacacaacgctctcttctcttgcaaccaaagtacttgttccagtgtctactctactcaaaaaggatttgggacatgtgcagtgattcgaaaagtaaactttcttccccaaccctcgtcgtcatggagaatagtaacattcagaagcagaatctggatggtctctacaactcggttttgcttgaattgtctgcatctgatgattatgaagctttcaaaagagaggtggaggaaaaaggcttagatgtgaacgaggcaggcttttggtacggtagaagaattgggtcaaagaagatgggatctgaaacgaggacccctctgatgattgcttctttgtttggaagcgccaaggtgctcaattatattcttcttcagaaaggaggaggtgttgatgtgaacagggtctgtggttctgatagggccactgctctccattgtgctgttgctggtggctccgaatcctcacttgagattgtcaagctcttgcttgatgctggggctgatgctgagtgccttgatgcgagtggcaacaagccggttaatctgattgctcctgcctttgattctttgtccaaatcgcgaaggaaggctttggagatgttcctcaggggtggtggggaaagagatgaactcatgagccaggagatggagctacagatgttttctgttccagagaaaaaagaaggaagtgataataagaaagaataccctgttgatatatcgctgcctgacatcaacaacggtgtatatggaacagatgagtttaggatgtacaacttcaaggtgaagccttgctcaagggcttactcccatgactggactgagtgtccattcgttcatccaggggagaatgcgaggaggagagacccacggaaatacccttacagctgtgttccttgccctgagttccgcaaagggacctgccagaagggtgattcctgcgagtatgctcatggtgtttttgagtcctggctacatcccgcccaataccggacaaggctttgcaaggatgagacgggctgtgctagaaaagtatgcttctttgctcacaaacctgaagagctaccccctgtgtatgcttccactgggtcggctatgccatcaccaaaatcctattcagctagtggacttgacatgacagcgatgagtccattggctcttagttccacatctttgccgatgccaactgtttcaaccccacccatgtctcccttggcagcagcttcatctcccaagagtggaagcatgtggcagaacaaaataaaccttactccaccatcgttgcagctccctggtagccgactgaaggctgctttgagtgccagggatctggagatggagatggaactgctcggtctagaaagccctgctcgccaacaacagcagcagcagcaacaattgatcgaagagattgccaggatctcttccccatctttccggagcaaggaattcaataggattgttgatttgaatcctactaaccttgatgacctgttagcatctgctgacccttctgtattttctcaactacatggactttctgtgcaaccttcaacacccacacaaagtgggcttcagatgcgccaaaacatgaaccacctccgtgcgagttatccatccaacatcccttcctctcctgtgaggaagccctcagcttttgggtttgactcatcagctgctgtggcaactgcagtgatgaattctaggtctgctgccttcgcaaagcgaagccaaagtttcattgatcgtggagctgcaacccaccatcttgggctgtcttcagcttccaactcttcttgcagggtatcctctaccctttcagattggagttcccctaccgggaaactggattggggtgtaaacggagacaagctgaacaagctgaggaaatctacttcctttggattcagaaacagtggggtaactgcatcccccatagcacagcctgaatttggtgctgagccggatgtctcatgggttcattcattggttaaagatgttccctccgagaggtctgagatatttggtgctgagaagcaacaatatgatctcagtaaagagatgcttccaccatggatggagcagctgtatatagagcaggagcagatggtagcatgagctagggctgccatggcaatgcttcttggttattctgacaaagtttatttatttatttaattattttattcatttggactgcttttactatccccaacattacccaatattatagttagggatgggattaaatatgatattgcaaagaccaaagttcaggttaatccagagatttgaacggagagttccaatttttaggtcagggaagacttggagaaacgttgaatgaaaaaggatgctgaattttattttattttattgaataaaagaaaaatttattccccccttttctctacgggtggatggatgtaaaaaaaaaaaaaaaaaaaaaaaaaaaaaaaaaaaaaaggagaa

SEQ ID NO: 26481 - DNA, 2517 bp, Glycine max
  unsure (1)..(2517): unsure at all n locations
  Clone ID: TF_GmC275_1
ctcgagcgtttttgcttttgccacccttcagccagaacactgtttaagttcatgtcatgttggccaacttcggattccaacttttgtttccttgtacttcactgtttacaaggttaattaatctcagttcctagaatctcattttttcatttttcaacaacttctagtccaagagaataagcatatattctgttagtggtgtgtgctttcactttttgcttttatgaggggtcttaaaggcatctttacagtgctgcttgcaactactagaattgaacaaagtggtagtgagtctcctttgttgtaaaagggtcatctctaatttggactactactactatgcctccttcaaacttccctcttcgttgggagagcacaggagaccgatggtggtatgcatctccaattgattatgctgctgcaaatggcctctatgatctggtcactgagcttctccaccttgacaccaacctcctcattaagctcacttcccttcgccgaattcgccgccttgaagccgtgtgggacgatgagtccaagtttgaggatgttgccaggtgccggtccaaggttgcaaggaatcttatgattgagtgtgagacaggaagagggcataagcataactctctcatccttgcaggctatggtggatggcttctctacactgctgcttcggctggggatgtagactttgttcttgagttgttggggagagaccctcttttggtgtttggtgagggagagtatggtgtcactgacatgttttatgctgcagccaggggcaagaactgtgaggtctttaagctcctgcttcattctgctctttcaagaaaggagtgccttggtggcagtgaagcagaattggaagagaagttggatgaaggttctaaggttttcaagagggatgtgatgaatagggccattcatgctgctgccaggggagggaattgggaaatactgaagcagattctagcaagtgtttctgtttctcaggttttgtcttatagagattcccaaggatgtactgtcttgcatgcagcagctgcaagaggccaagttgaggtggtgagaaatctaattgaatcctatgatatcatcaactcagctaatgctcaaggcaatacagcattacatgtggcctcttacagaggttacttacccgtggtagagattctgattggagcatctcactcgttagcaacgttaaccaatcactatggagatacttttcttcacatggcagtggttggtttcagaagccctggtttctgtagactggacaagcacactgagctcatgaagcaactgacaagtgaaaaaattgtgaaaatgaaggatatcatcaatgtcaggaacaatgatggaagaacagctcttcatgttgctgtggttcataatatccaatttgatgtagtggaattactgatgtctgttccatcaattgatttgaacatttgcgatgctgatgggatgacccctttggatcatcttagacaaaaatcacgatcagtgtcttctgaaatcttaatcaagcaattaatttcagctggagggatctctaattatcaggactatgtgacgagaaatgcccttgttaagcatcttaggactcatggtattggaggcagtcccggaacatcatttagaataccagattctgagatattgttgtacacaggcattgagaattcatgtgatgacaattatgatcaggcaagtgtagaatcaaattcatggtcaagtgaaataaacaattatgacacagccaattccccatgtaacagcaagtctagttctgtcaattatggtgcaaggcacttaaagtttctgctccaaagttctagaagaagagacacaaaagaagcagcctcagatttagaagatgatgtttctgtgaattccttcggttcaaggaacaacttggaagactttccaatcccattgaggcaaagatactcaaaaatgtgttctcttccaaacaacaaaagaacactatctataaggacttatcttcctagtccttcagccaaaaaacattttcatgcaggtctagtacaaggtgtgattaaggtaaagccacaaatgcctctacctgttcattcaacatctaatctttttcaagaactatctatctcttctcattcttcgaataataagcaaaaacgtgttgatataatgggaccctcttgctccaatcgaccaatggatggtgatggcacactacaattgagctataagcagggctctttcaataagaaactgatgaatcgatatttttcttttggagcacatggccaggctttggaggatgcaaatagctgcacgatgtcaaatggcagttccaagcattttagttctttagttgcataaatgttaaataggagctttgaaaaagtttgtgctgatcacgtttaaaaagttcatgtggaatatgcaacaataataattaatattaatgatactgataatatatgttcggcgctccnnnnnannnnnnnnaannnaagggcggccgcc

SEQ ID NO: 26482 - DNA, 3708 bp, Glycine max
  unsure (1)..(3708): unsure at all n locations
  Clone ID: TF_GmC6578_1
agaaatgctaatgtgcggtcacgattgagagatggttttggcccatcagtagctcacgtttgtgcctatcatggtcaaccagattgtatgcgggaattactattagctggagctgatcccaatgcagtggatgatgaaggtgaatctgttctgcatagagcaattgccaagaagtacacagactgtgctcttgtgatattggagaatggaggctgtagatcaatggccatcttgaattcaaagaatctgacaccgttgcaccattgtgtggcaatatggaatgttgctgttgtgaagagatgggtggaagttgctacttctgatgagattgctgaagcaattgacataccaagccctattggcactgccttgtgcatggcagctgcttctaagaaagaccatgaaaatgaggggagagaactggtgcggatattgcttgcagcaggagctgatccatctgctcaagattcccagaatgggaggacagctttgcatacagctgctatgactaatgacgtggacttggttaaggttattttaggtgctggggttgatgtgaacattcgcaatgtgcacaacagtatacctcttcacttggccttagctaggggtgcaaaggcatgtgttggactgcttcttgatgctggagcagattataatttgaaggatgatgatggtgacaatgctttccatatagcagcagagacagcaaaaatgattcgtgaaaatcttgactggcttattgttatgctaatgaagcctgatgctgacattgaagttagaaaccacagtggcaagacactacgtgacattttagaggctctcccccgagaatggttatctgaagatctgatggaagcactcgtgaataagggagttcatttgtttcctacaatatttaaagtgggagactgggtgaagtttaaaagatctgtcacaactccaacacatggatggcaaggtgctaaaccaaagagtgttggttttgtgcaaagtgttccagacagagataatctcattgtttcattttgttctggagaggttcatgttcttgcaaatgaagtcataaaagttgttccattggataggggacaacatgtacacctgaaagaagatgtaaaagagcctagatttggttggcgtgggcagtcacgtgacagcattgggacagtattatgtgttgacgatgatggaatcctccgtgttggatttcctggagcatccagaggatggaaagctgacccagctgagatggaacgtgttgaggaattcaaggttggagactgggttcgtattcgtccgactcttacatctgcaaagcatggactaggatctgtgacaccaggaagcattggcattgtatattgtatccgaccagacagtagtctgttaatagaactgagctatcttccaaatccatggcattgtgaaccagaggaggttgagcacgttgctccttttaggattggggaccaggtatgtgttaaacgatctgttgcagaacctagatatgcttggggtggtgagacacatcatagtgttggaagaataagcgagattgagaatgacggtctcttaataatagagataccaaatagacccataccatggcaagctgatccatcagatatggagaaggtggaagatttcaaggttggagattgggtaagagtgaaagcttcggtgtcttctccaaaatatggatgggaggatgttaccaggactagtattggggtaattcatagcttggaggaggatggcgatatgggtgttgctttttgtttcagaagtaagcccttttcttgctcagtcactgatatggagaaggttcctccatttgaggtgggccaagaaattcatgtgatgccatctgttactcagccacggcttgggtggtcaaatgaatcaccagtccgctgttggaaaaatattgagaattgacatggatggtgctctcaatgtgagggtcactggtaggcagaacttgtggaaagtttctcctggagatgcagaacggcttccgggatttgaagttggggattgggtacggtcaaaaccaagcctgggaaccagaccaagctatgactggaatagtgttgggagagaaagtttagctgttgtgcatagtgtacaggattctggatacttggagttggcttgctgttttcgcaaagggaagtggatcactcattatacagatgttgaaaaggttcctagctttaaagttgggcaatatgttaggttccgaactggtttggttgagccaaggtggggttggagaggagctgagcctgaatctcatggggttataactagtattcatgctgatggagaagtcagggtcgcatttttcggtctgccaggactgtggagaggagatccttcagaccttgagattgaacaaatgtttgaagtgggagagtgggtgaggttgaactacaatgcaaataattggaaatcaattgggccaggtagtgttggtgttgttcaaggaatagggtatgaaggagatgaattggacagaagcatttttgttggattttgtggggagcaagaaaagtgggtaggaccaagttcccatcttgaaagatttgacaaactctttgttggacagaaggttagagtaaaacaatatgtaaagcaaccaagatttggatggtcagggcatacacatgctagtattgggactatacaagcaattgatgctgatggaaagctccggatatatacaccagcaggatccaaaacatgggtcttggacccatcagaagtggaggtggtagaagagaaggagctctgtattggagactgggttagggttaaagcatcaatttcaaccccaacccaccattggggggaagtgagtcattcaagcataggggtggtgcatcggatggaagacgaggatctgtgggtgtcattctgttttacggagaggctatggctttgtaaggcatgggaaatggaatgggttaggccatttaaagtgggggacaaggtaaggatcagagacggactggtgaccccacgatggggatggggaatggagacacatgcaagcaagggacaggttgtaggggtagatgcaaatggaaaactgagaataaaattccggtggagggaagggaggccctggataggagaccctgctgatcttgcccttgatgaggactgatatgttattttaggaacatggaaggttgtatcataagtaaattttctcattcagctctttagcctatgtttttctgggctgagcttgtgcaaagtggaaagctatatatgcggtctgctacttgatgtgctctaaaccataactcctttatgaaggttgaaatgcagtttggccatacatgtattgatgttaataaacagaaggggtggaagaatggaagctgtggagataggaaaactgtcttgctgaccgagtggtggagatttaaaggcagctaaaataaatatattggcagttggcccatttatatattcattactcacaagtttgtagtcccagattttgaggtttatatcgtatgtatgtttatttcatattgtacaaattgtattcaactgtcaacttaatgcatttttttgactcgattatgcagttgcataattcttgaaatagaattgattccattatacaaaaaaaaaaactaaaaaaaaaaaaaaaaatnnnnnnnnnnnnnnnnnnnnnnnnnnnnnnnn

SEQ ID NO: 26483 - DNA, 2755 bp, Glycine max
  Clone ID: TF_GmC6455_1
cggacgcgtgggcggacgcgtgggcgctcgcgcaaggcacggtcacgaaatcacactttggccaattcgatgccggccgttcacattcgaacccacgacatgctgaacccgttggagcgtcaattcctcgatgcagccgaaaaaggcaatcggccggtgctggaagcgtgtttggccaagcaattgagaaaagcgccgctgaatatcaatgcggtggacacaatgggacggacggcgatcgaaatagcggtggacaacgaaaatttggaaattgtgcaacttttgctgcgacagcccgacgttcgcatcggaaacgcccttttgtgtgccattcgcgagggtgtctatgaattggtcgaagtactcgtcaaccacccgtccatcacaagggatatgctcggcgaagggtgggccaaatatttggatccgacggagacggccacttcggagtactcgagtgacatttcgcccgttattatggctgcccatttgaaccaattcgaaattctgcaaatgcttctccgaaaggatgccaacattgagaagccgcacaagcattactgcgcttgtgaaatgtgcgactctgaacggatcaacgacggactgcaccggtcgttgaagcgaatcaacaagtacagggctttggcgagtccggcatggatttcgctgacgagttcggacccaattctgtccgcatttaagctgagcagagagctgcaaaagcgagcgaaagtggaggacgagttcaaggaccaatacttgcagttggccgagcaatgcaagcagtacgcgtgcgatttgctcagtcagtgccgaagcaccgaagaagtgatggcggtgctgaacaaagaggacaacttctgcaacgaggaggtcgacctgaacgcggcaaagtgttcattggcacgactgaaattggccatcaaatacgaacagaaaacgttcgttgctcacccccattgccaacaactgctcacttccatttggtacgaaggctttcccctgaagcgtcaccgttcctcctcccttcgcactttgctcatcgctcttttgctggtgctcgggtggcctttgatggccatttgttacattgcctttcccaaaagtcgcgtgggcgaaatcgtccggtcgcccttcatgaaattcctttactacagcacttcctttggctgttttcttgctcttcttacgatggtcacttttgaggtgcaccgtgaacaaaccggcgaagtgaaaggcggcacggcgacgcgtgccgctgaccgtggcccaacgcccacactgatcgaatggttggtgttcatttgggtaattgggatgttgtggtccgaaatcaaacaaatgtggttggagggcttcaccaaatacatccaccagtggtggaattggctcgacttcgtcatggtctgtctgtacttgtgcaccatttccattcgattttctgcctattcgatttacgtgatgcacaacgttggcgagcagttcacaccccgccacgtcatccgcacgcattggaatgcgtttgagcccgtgttggtcagtgaggcgctgttcgctgtcggcaacgtgttcagaccaatccctacttgggacccttgcagatctccttgggctgcatgctggtcgatgtggccaagttctgcttcattttcgtgctgatcatctccagcttctcgatcggattggctcagctttattggtattacgactcgcagacgccggtctgtttgagttccgatcggtgtaaaatcgtgccgaatgccttttcgtccattgcctcctcctacatgacccttctgtggtctttgttttccatcacaaaagtggaggacaccgaggtggtcgaagcgcatcacttcaccgtttgggtgggcagaggtctgttcatcctttatcacatgacgtcaatcattgttctgctcaacatgttaatcgcaatgatgtcgcactccttcgaaaggatcaatgaccatgccgacttggaatggaagttccaccggtccaaactgtggatggcacattttgacgagggctccactctgccgcctccgttcaacatcttcccaactccgaaggcatttatccacacgtgccgtgccatcattaacgttgtcaattggtgtttcggacggtataattatatggcggcaaaggaaggcacgcgggcgaccattcggaggcccggctacagcaaaagatggcacgacatggagggcggcttaagcggtgccccaaacggcgccggagggacagagccacggaagccaatcacttacacggagatcatccaacgccttgtgtcccgcttcatccacgaacagaaaaagtcgatgaaaatggacggcgtcaacgaggacgacctgctggagatcaagcaggacatcagcagtcttcgctatgagttgcgggacgaccgccgcaaggaaattgtgcgttcgttgtctcatattgacgcggtcaaacgggagattatgcgaagtatgagcacaacgacacgaatcttcgggaacacaccgcgacggcaactgtccgtaaaagagcgaagcgtcgcggaagaggccgactcggagttgggcgactcgtccgcaacggaggaaggcggcaccgagtcgatcaggagttcgttgccgttcttcgattcgcttcgctccgccactctctcgccccatccgtttataacaatcgcagcgagcggagacaaacagttccaatacgcggaacgagacgcagtcgcggaacccttgcgctaccgcac

SEQ ID NO: 26484 - DNA, 624 bp, Glycine max
  Clone ID: TF_LIB4281-018-R1-K1-C4
atttaaccttgccttcacccaatcatatgaaaatgactgaagaggtaaaacatgatcaacagtccattacaaaagaaagggaagaatacacgagtatggacaactttcgagggatagtagtggaaggaaatagggatgatgttctagctataagtgcagctgaaggtgaagattttcacgggtcagtagtgcaaggaaattgggatgatgttattcatatgtgtgagaataagggtatgctttgcaagataatgatcaacgcaagcagaggcactgcactccacgtggcagtgagtgaaggcaacgaagttgttgttaatcgtcttgtggaatcaatgataaaccacaacatggtggaggctttggaattgaaagatgagaaaggtgacactcctttgcaccttgcagcatcaaggggactcaagcatatatgtgagtgcatcatagggccaaattatgaaaggaagtatttgattaccattcataacgaggagggtgagactccattgtttcaggctgcactctcatggcaaaaacaagcttttatgtaccttagttccctcatgcccgatgatgaaaactattcagttcttaattcgaggaatggggatagcatccttcatg

SEQ ID NO: 26485 - DNA, 842 bp, Glycine max
  Clone ID: TF_GmC1577_1
ctccctcgaaacccggccacttcgccatgtccgagcaaccatgcttgccatcgggaaggccacctccgtcgacatctgccgcttcttctccaaacctggcccctacgtgtcctgcgacacgatggagtttctattagcgcgctacgacggcgagctagacgtggatgcggtggactccgaggggaggacgacgatccacgtggtggtgagggaggggcacacgagggttatccggttctgcgtcacgatggggggaaaccctaatcgcgtggattcgaaggggtggaccccactctactacgcagcgtggaaggggcacgtgaaggctgcggagtgtttgttggaatgctccaacgtgaagtgcgtgagggacagggaagggagaagaacattttctgttgtcgcggagagtgagcacgaacattctgttattgacaaagtccagaaagaaacaaagagccgcgctggtttttaattagattggattctggctgtttatgggtattttggtccaattctgctgggggaagaaattgaagtggtgaagactaaagacaaatattgttacgggaacaaacggcgaagagcatgaaggatctggggtaaagtgatcaaaattcaaggctaagtattcattttatgctattcatttagagcattacatcttcattcttctccatcttcctccattttattccacttcctttgtctttttttgtatttgtaagtctttcttgacaatgagaaactaaaccttctattgttgggagctcacccaccaaacactcttgatgtaatgattttaactatctatttaatattatttcgatattattatctca

SEQ ID NO: 26486 - DNA, 1562 bp, Glycine max
  Clone ID: TF_GmC1240_3
tcggttggagggtcacaataggactgagatagttaaatttcttcttgattggcaaggggcagataaggttgagatggaggccaagaatatggtgggtacaacgtccattttttactgaagttattctttgaatataaatatgtataatctagacttccagttattgtcttgtaattctgaaaaggtttctttgtatactattgcagtatggagaaactccattgcacatggcagctaagaatgggtgcaataaagccgcacaattgcttcttgctcgtggtgctattgttgaagccagagcaaatgtgattatttttgtcatttcatctttcatttaatcttgtttaaatctagcaagaattgtttttattgttttataatgcatataaaagtttgttcccaactttttcttgcagaacggtatgacacctttacatcttgctgtttggtactcactacgagcagaagagttcttaactgtgaaaacattgcttgagtacaatgctgattgcagtgctaaggatgatgtaatgaacttaatttcctgttttttttcctgttattttaacattttcggtgaaattgtcatagatgctcaagactatgaattgcaggagggaatgactcctttaaatcatctatcccaaggccctggaactgagaaacttagggaactattactttggcatcttgaagagcaaaggaagcagcgagccattgaggcatgcagtgaaaccaaagctaaaatggatgagcttgagaagcaactatcaaatattgtgggtcttaatgatctaaaagtacaactacgcaagtgggcaaagggcatgcttttggatgagaaacgtagatctcttggtctgcatgttggaaggagaagaccacctcatatggcctttcttggcaaccctggaacaggtttttagaatatcttgctcatattaatgattgattgttttagaatatctcatttatactatcttgcaatcaatattggaaagatatcttattgtgcagttaatttcattgcctccattcaccattccatgttatactatttttattgaattgtcatgtttctgtctgagcatcttggcttgatctttggattgtatatacacatttccatgaacacctaattggtatactggaatcgtatttagttctgaaattaatttatatttgacttgtgtatttaataggtaaaactatggtagcaacggattcttggaaaattactccatacggtgggaattctacctactgataaagtgacagaagtacagcggaccgatttagtcggtgagtttgttggtcacactggtccaaaaaccaggaggaaggtatgttattgactttgaaatccttcgcctattacagaaaccaaattttttgtgttgcttaacgagttcaaacttcaaacactgcctacagatcaaggaagcagaggggggaattctttttgttgatgaagcttatagattgataccaatgcaaaagtccgatgataaggactacgggttggaagccttagaggagattatgtctgtcatggacagtgg

SEQ ID NO: 26487 - DNA, 994 bp, Glycine max
  Clone ID: TF_GmC311_3
ccctcctactcgtccgagaagtacattgatattgtgactgagacatatcctacttggcttgatggttcgtctttggtgagccaaaaagctgtttcttcttgtgccctcgatggatgaataactactttcatcaaaaggaggaaaaattatttatagaatgaaagtaaggaataaaagtggggacagtggtggccatggttcagaggctaagggacctatgggcccagtattcagtacttttgtttatgaagaggaatatggcagtgactcacaaatggaagccattcatggatttgccagggaaggagatatggctaatctgctcaagtgtattgaaaatggtgtttccatgaatttaaaggacagtgagggccggacaccattacactgggctgtggatcgtggccaccttaatgtcacagagttgcttgttggcaagaatgctgatgtgaatgccaaggataatgatggacaaactcccttgcattatgctgttacatgtgagagagaagccatagccgagtatttattgaagcataatgcagacatatattcaaaagataatgatgggagttcaccacgtgacatctgtgagtcaaactggccctgtatgcagcatgtggggggagaagtaaattgattgattgattgtttgcttgttgctgcttctggccaatacaaccttttacccaaatccctataggatgttcgtgtctatataacttgattttttttgtccttactcatggtgtatacacccttttcagtctagtgtacgctgtacgcctatgcaccgcttaggaggttagttaattaggttgtattctgttctattattgtttcctctgcttaactctttaattctggctctcatttcttatatatttcatggataaactagaaatagtgacagggaaagggtatcttcaacgatatcctttcctcggaaaaccttctacccttctattgaaggtgatatagattttacagggtt

SEQ ID NO: 26488 - DNA, 2116 bp, Glycine max
  Clone ID: TF_GmC178_1
cccacacgtccccaagtaacatttattgcattcgagaagcaaaaccaaccatctctatccaagatgggaaactttcatcactttttttcttgcataatgaattcttatggctcactcccttctctttctcctcttctctaccttctcttccgttatgttacttttgcagatttagtttgttggagctaggccatagtactctcatggagaacattatccaagaataggtgtgctgaaatttctggcgtgcagaagaccaataatcagaccataaagtttttaccgttttcaaatgataggcgtaaaaatggccttaacacattcaacatctttcccacaaatgtttcagagggctgcttcagctcagtttaggaggcctctccttcatcttgtgtccactcaagaatccaggcacaggtacctcacccaatgtgttccacttcacaaagcagcactaaaaggagactggaaagaggccaagaaaatactagaccaagaccccacgctagagctcaactccgccataacaaaaggatgggcaacagtgctccacattgcggtcggagcaaaccacgaaagcttcgtggaggagttgctgaaactaatgtcgcgcgaagacttagaactgcaagatatcaagggtaacactgcattctgctttgctgcagctgttgggaacgtgcacattgctgagagaatgcgcataaaaaatgcatcattgccaatgataaggggtggagaaggagtcactcctcttcacttggcagtgttacaaggaagaagtgaaatggctcggtatctgtttgataaaactagagaaacactgtacgatgatgattggtttcaactgtttctcatttgtgtaaactctcggctttatgaactggccctggaaatgctaaatcagaaggaatcgctagcttttgctcggggtgataacgatgagacagctttgcatgttttggctcgaaagcctttggattgtggttgccgaagtccgctacgatatccaaaacacgtcctgcatttgtgcaagaacatgaaggaccctccggtcctcaaacttacaagacgcgtgtgggatatatttcttaccctcgatgactctaagatgatgactgcaattagagaaccatctcaagtaacatttattgccgcagaagttggcaatttcgagtttctatctgtgattatgagcacttatccggatttgatttgggaattgaatacgatgggtcagagtataattcacgttgctgccttgcaccgccacgctagcatattcaatttgatacacgaaattggcccaagcaaagatctcctgttaacattttgggatgatgaaggcagcacgttactccattctgtcgcagaaatagcaccaacagatcgacttaatgtagtttctggagcagctcttcaaatgatgcttgagttgacatggtttgaggaggtaaaaaagaacatgcaaccatcatatatagagaggccaaatcatgaaggaattgttcctagagaactattcaccgagaagcataaggagttgttgaaaaagggagaatcttggatgaagcgaacagcaagttcttgcatggttgtttcaaccctaattgccacaggagtgttttctgccgccttcagcgtcccaggtggtaccaaagacgattcaggatctcccaattatttgaagaaacatttgttcacggtatttgcaatatcagatgccttggcattaactctttctaccgcctcaaccctaattttcttgtccatactcatctcaagatatgctgaggaagattttcttaggtcattgccattcaagttgatatttggactagtgtcactatttctctcaatagtcagcatgatgggagcattcagtagtgctttcttcataacatattaccatgctaaaacgtgggttgttcctatcaccattgctgtatttgtgttgttcccaatattgttatttatatatctacagtttcgtctctggcacgacatagtgtattctcactacatgtgtggttctttgtttagaccaaggaaacgcatgattcattagaaagattgagtacaagctcaataattattttttttttcttttgtctgc

SEQ ID NO: 26489 - DNA, 1474 bp, Glycine max
  Clone ID: TF_GmC42_22
agagagagaattagtctcgagttttgttttcatttcgttcttttttttccttccaaactcactcatctcacacttcctcttcctctctcactcagattcagcaattttctattttcttctctcatggcttcagattccaaaaaggatttccctgctgatgacaaagctggaacagcagagaataaagcatccaaagatgaaacgtcatctaaagattctccagcagcacaaagagctactacagctacttctggacctgcaactggttttccaggcaacccttttgatttctctgcaatgtctggcctgctcaatgatccaagtatcaaggaattggctgaacagatagcaaaagatccatcattcaaccagatggctgagcagcttcagaaaacttttcaaggagctccacaggatgctatgcctagctttgataatcaacaatatttttcaaccatgcaacaggttatgcagaatcctaattttatgaccatggctgagcgcctgggtaatgcattgatgcaggatccatctatgtctgccatgcttgaaagtttttctaatccatcaaataaagaccagcttgaagaaagaatgacacgcatcaaggaggatccatctctgaaacatattttggaggagatagagactggtggtcctgctgctatgatgaggtactggaatgatgaggaggttttgcggaagttgggacaagccatgggtcttgcaaattctggagatgtaggtgcctctgctgaaaattctggggcagatgagacagaagatttgggaaatgaagatgaatcaattgttcatcatactgctagtgttggtgatgtggagggcttgaaaaatgcactagccgctggtgctgacaaggatgaagaagattcagagggaagaactgctttgcattttgcctgtggatatggtgaggtgaaatgtgctcaagttctccttgaggctggagcaaaagtggatgctttggataagaataagaacactgctctccattatgcagctggttatggcagaaaggaatgtgtggcccttctccttgaaaatggtgctgcagttactctccagaatatggatggtaaaactccaatagatgttgcgaagctaaacaatcaaaatgaagtcctgaagctacttgagaaagatgcttttctgtaattgcaatgcatgatgccatgctgtcaccaacaagcaaaggggaaactgaggggaagaaggcacgactttgttatttatcttttggtttcttccaaccgttgtgtgttaaactaaattgattaacgttgttggatgtgagtcaccatagaatttgttatctatgttcttgtaatgcatttattgtcacactgcatgattttgaagattagtgccgtcatgattttattcatgcttcaattttacttgtactacattgcttcgtggcaaaattctggttcaaatggtttcgtccaagaat

SEQ ID NO: 26490 - DNA, 2369 bp, Glycine max
  Clone ID: TF_GmC1451_1
gcgaggcgtggtctctctcgtttttgtctttcaccgcgttatggcaatcgccgttgctgtttgccactcttgtttctttttattcgtctctcctcccttcatttttttagtaaccaagacacttactaagtttggtagcttagctctgcctctgattttgatccttgtaaagttggtacttacatggatctatattctgttatatcttgttcattactttcgaccgccttcgcttatgttttatcttttgcccttctaagttctagataatcattattctgttcacattctaaatattcattgccctgaaccaaatcactttctttttttcattctctgtccttaaagttcgttgctttacattacagggtgtccaaccaaagctaccctcaaatctcaatgctttctaccaacaacaacacaacaagtgcaatgattctggagggttgcaggaggataaaaagtttctgatatttttatttttttgggtattgatttggatgatcctctcctttgagttgctgcttcaaggagagagagaattatttgggatgaaagatgctagtgttgatctgggtttttgctggaaggaagaaaagaaggttctgaattctgatatatagtaatcaagagtcaaaactgaggattcgttaggttggtgttgaatccagttccaatggacacaccaaatgcacagccgcaagctgcatcagcaagcacgccaaggaaaaaaatgacaaagcaattgacaggtaaaagggatgatacacctttgcactctgcagcaagagcagggaatatgactgttctgaaagacacggttggtggcactgaagagggtgaactacgtgtgttgctgacaaagcagaaccatgccggagaaacggttctttatgttgctgctgaatatggttatgttgatatggttagagagctgattcaatattatgatcttgctggggcgggaattaaggccaggaatgggtttgatgcactccacattgctgccaaacaaggggatttagatattgtgaagatcttaatggaggctcatcctgaattgtcaatgactgtggatccatccaacaccacagcagtgcacaccgctgcattacaagggcatactgagatagtgaagcttctattggaagcaggtagtaatctggcaaccatttctagaagtaatgggaaaacagctttgcattctgctgcgagaaatggacatttggaggttgtgaaagcgcttctggggaaggagccttcagttgcaacacggactgataagaagggacaaacagcaattcacatggcagtgaagggacagagtcttgaggtggtggaggagttgataaaagctgatccctcaacaataaacatggttgataataagggtaacacagcattgcatatagcaaccaggaagggcagggctcggattattaagttgcttcttgggcagacagaaaccaatgccttggtagttaacagatctggcgaaactgcactagacacagctgagaaaactgggaattctgaaattaaagacattctccttgaacacggtgttcgaagcgccaaagccataaaggctcaaccaggaacagctacagcccgagagttgaaacaaactgtgagtgacataaagcatgaagtccactaccagttggaacacacacgccaaactcgaagaggtgttcaaggcatagccaagcgcatcaacaaaacgcatgctcagggactcaacaatgcaataaactccacaactgtggttgcagtcctcattgccacagttgcctttgcagcaatcttcacagtccccggccaatttgctgatgaaccaaaagacatccctgcaggttcaggaatgaccattggtgaagcaaacatagccccacaagctgcatttctcattttcttcgtctttgattccatcgccctcttcatttctctggccgtggtggtggtgcaaacctcggttgtgatcatagaaagcaaagcaaagaagcagatgatggccatcattaacaagctaatgtggttggcttgtgtgcttatttctgtggccttcttggcactgtcatttgtagtggtggggaaggatcagaagtggcttgcaattggagtcactatcatagggacaactataatggccacaactttgggcaccatgagttactgggtcattaggcatcgcattgaggcctcaaacttaaggagcattcggaaatcttcaatgggaagcaggtcaaggtctttttcagtatcagttatgtcagattctgagctactaaacaatgaccgcaagatattgtatgccatatagaatcactaataaagccttgttgccctttcatttactctcttttttc

SEQ ID NO: 26491 - DNA, 2192 bp, Glycine max
  Clone ID: TF_GmC611_1
aggtaaggcgtagcttattgatggttttttatgggttttttttcccccccatttggggtgtttgagacaaagacaaaagacaagaacaagaagcaccgaacagaacagaacagaacacaacacaagttgcttgaaccttacacgtcaccatcgttgcgtgttgagtgttgagagatgggaaattcgttcggatgttcggcctccggcgaaaggctggtgtcggcggcgagggacggcgacttggtggaagcgaagatgcttctgaactgcaacccgtgtctcgccaaattgtggcattgttgctggagaatggagctgatgtgaattccagaaattattgtggccagaccgcattgatgcaagcttgtagatatgggcattgggaggttgcacagacacttttactcttcagatgcaatgttataagagctgattatcttagtgggaggaccacttttcactttgcagctgtgcatggtcatgtaagcagtattagacttgttgtggctgactttgtaccaagtgcactttatcaagctatacatgctggcacagatgttgacaggggtggtggatcaaatgcgaaagggaaacatgagcaaagtgccctgtccaagtttataaataaaaccgctgatggaggtatcactgcccttcatatggctgcactaaatgggtactttgattgtgtacaactgctgcttgatcttaatgcaaatgtgaatgctgtgacttatcattatggaacatcaatggatttaataggggctggaagtactccattgcattatggtgcttgtggaggcaatttaaaatgttgtcagatccttgttgcacacggtgcaagtcggctggctttaaattgcaatgggtggcttcctcttgatattgctaggatgtgggggcgtcattggcttgaacaattgctggcacccagttctgatgccacaatgcctacattctctcattcaaattacttgtccttgccccttatgagtgtgctcaacatagctagagagtatggattgcaatcatctacagcctcctctgatgagattgacttttgtgctgtatgcctggagaggccatgttcagtggctgcagaaggatgtgggcatgagctttgtgtaagatgtgcactctatctttgctcaacaaacaatgtttcttctgaaatggttggccctcctggctctatcccttgccccctatgtagacatggagttgtctcttttgttaagttgccaggttcccaagcaaaagaaaataaactacatgtgtctcttggcctgtgtaccccatgcatgctacatccacgtgacctagacaagccatccctttctcatacaccagaggttggaagaaatcgtgtagcttctgttccttcggagatactctgccccgtcacttgtagtccatttccatctatggcaattcccttatgtacctgcaatgatggtccatgtccatcatttgaacccagagaagtagaaacacaggatggattacctcatcactctcaagcatcaacagtggatcaggataaaattgaagggccaagactagataaaacaacctgctctagcatgttttggggtagaagaagttgcagcagggagcaccaatgcaattcagaaataaatgcttgactcgcaccatgcttgtacgacacatacaagtgtcgtggatactgggtacactatagatcaacaggatcagtccacaattttcttattaaccagcctcaaatagtgaaactcgggatctctctagaagagaaaaaactgctctgcagatcctcttggctgctcaggttgtatggtaggtgatagacacaattctggcgtttcagcaacacaaccaccctctggatatgtcctttttctgatatttagggagcgtgtgtgaaattagtttcagtttcgtgagatttttattgtgatttattgtaattggatttcattttatccaggaaagtgtcttctttaaggggaaaagaatatcgtatgctttttataacatgtatgaagttaggggcatctgtatattatgcttgtcataaattttataggtttacaaagcacaaatttggggactgaaactagctgatatagttataaatacttgttttttgtggatgatgaggtcgagaccaattatgtcacggctgctgcctcggatgatctgggtat

SEQ ID NO: 26492 - DNA, 558 bp, Glycine max
  Clone ID: TF_LIB5118-026-A1-PF1-G11
ccctttccaccaaaccaaaccaccctccacatcatcgctacaccaccacgtacctgcctacgcgagcatcccagggagggttgtgctctgcagggcccgctgctggtccgccatgacagatcgccccccatgattgacccttcgatccgtctgcgacgggccatccacgccgccgacgcgccgctcgtcaagcgcatcctcaagtcgcacccgtcgctcctccacaacccggacgccgcgcctgccggccagtccaactccaacctgcacctcgccgcgtcgctcggccaccgcgatatctgcgaggccctccttgccgccggccacgaagacccctgcccggccctcaacgaggctcatcagacggcactcatgctcgccgccgccgccggccacgtcgacgtcgtccacctgctctgcgaccacgacgcctcgtgcatcctgcgacgcgacgcccgcggccgcgatgccgtcatggaggccagccgcggcggccacgacaccatcctccagctgctgctgacctacgtccccggcgaaccccacgtcgccggtcag

SEQ ID NO: 26493 - DNA, 3314 bp, Glycine max
  unsure (1)..(3314): unsure at all n locations
  Clone ID: TF_GmC1462_1
gtgagagtagttcttttgaaagttcagattttgatcactctgctgttgaagaatgtgcagcagatagaagttttacttctgcgtatctggagcgcccctcaagaagtttgcaacagcagcgatcctgcactaaaagtgagaagccaatagatgtactgcgaagagtttgtgggaatgataaatgtgccgattgtggagctcctgaacctgattgggcatcgctaaatcttggtgttcttgtttgcattgagtgttctggtgtacatcgtaaccttggtgtccacatatcaaaggtcaggtctcttacattggatgttaaagtgtgggaaccttctgtcataagtttatttcagtctcttgggaatacctcggccaactccgcccgggtcctaggttcgcatccaagtagtgcctttcaggttgatcttgtccctacaggcttaagcaagtctgataaaccaatgatgttcttcatcaccaaaccttgtcaatctgattctctatctgtgaaggaaaagttcatccatgcaaagtatgctgagaagctttttgttcgcaagccaaaggacaatcaataccgtctcttagtagcacaacaaatctgggaggctgttcatgctaacgataaaaaagctgtataccgttacattgttaattctgatgttgatgttaatgctgtttatgagccaacatgcagcagctccttaacccttgccaaagtaatgctattacaagagcagactagccatgatcacagctctactttagcagggaacacattggactggtcctccactaaagaaggccaggtcatggacaatctagatgggtgcaccctacttcatctcgcatgtgaaactgcagatattggcatggtggagctcctcctacagtatggtgcaaatgttaatgcaactgattcgagaggtcaaacacctctacatcgctgtattctcaaaggaagatctacatttgcaagattattgctttctaggggagccgatcctcgagctgtggatgagcagggaagaacccctattgagcttgctgctgagtcaaatgctggcggtgacagagaagtccatgctccatcgactgattctaatggatgagagtgataggcaaaaacctcggagtataatacatatataaaatatggaagattggattatgtaaatttgtatttcataaattgaaaagctggttttttttttttttttttttaagtaaatgtcactagtgtgagggattaagggagagaggtaggttgaaatgcctgccccttagtcatgtgcaaaatagtgctaagatctgtattgtaaaatggccacattggtcttagtaaaagagttatgcatatgctgcactggtagcacccagcctgcacttcgtaatatgatgattgtgtatttttgtttacttttgaggtgaagctgcgatgcattaggctagggatttgtgtatgttgtgtacattggtttttgtgaaggtgttgttgtggctgtaatttatcagatttgaggttttgcttccggatcatttcacctacaaagaactacactttgcaganagtgcgctggaccaaatggactggattgaaaaaatcactggtgttattgcttcattactgagttctcaaattcctgaaaggatgttgcctgcaagcccaatgggaagtggtcatcataggtctaccagtgagagtagttcttttgaaagttcagattttagatcactatgctggtgaagaatgtgcagcagatagaagttttacttctgcgcatctggagcgcccctcaagaagtttgcaacagcagcgatcctgcactaaaagtgagaagccaatagatgtgctgcgaagagtttgtgggaatgataaatgtgctgattgtggagctcctgaacctgattgggcatcactaaatcttggtgttcttgtttgcattgagtgttctggtgtacatcgtaaccttggtgtgcacatatcaaaggtcaggtctcttacattggatgttaaagtgtgggaaccttctgtcataagtttatttcagtcacttggaaatacttttgccaactcagtctgggaggaattattacaatcaagaagtgcctttcaggttgatcttgtccctacaggcttaagcacgtctgataaaccaatgatgttcttcatcaccaaaccttgtcaatctgattctctatctgtgaaggaaaagttcatccatgcaaagtatgctgagaagctttttgttcgcaagccaaaggacaatcaatactgtctcttggtagcacaacaaatctgggaggctgttcatgctaacgataaaaaagctgtataccgttacattgttaattctgatgttgatgttaatgctgtttatgagccaacatgcagcagctccttaacccttgctaaagtaatgctattacaagagcaaactagccatgatcacggctctactttagcagggaacacattggactggtcctccactaaagaaggccaggtcatggacaatctagaagggtgcaccctacttcatctcgcatgtgaaactgcagatattggcatggtgtacggctgcgagaagacgacagcaaatgttaatgcaagtgattcgagaggtcaaacaccactacatcgctgtattctcaaaggaagatctacatttgctagattattgctttctaggggagccgatcctcgggctgtggatgagcagggaagaacccctattgagcttgctgcagagtcaaatgctggtggtgacagggaagtccatgctccattgactgattctagtggatgagagtgataggcaaaaatctcggagtataatacatatataaaatatggaagattggattatgtaaatttgtatttcataaattgaaaagctggtttttttgaaatgtcactagtgtgaaggattaagggagagaggtaggttgaaatgcctgccccttagtcattttgtgcaaaatagtgctaagatctgtaatgaaaaatggccacattggtcttagtaaaagagttatgcctctgctgcactggtagcacccagccagcactttgtaatatgatgtttgtgtaattttgtttacttttgaggtgaagctgcgatgcattaggctagggatttgtgtatgttgtgtacattggtttttgtgaaggtgttgtggctgtaattttccatttttgtatttttgggattacttggtgccttggtgggacaggtgctgaggatgtcatgtccctagttctctaatattctgatgtatttatttatatgataaaaaaattatatattttc

SEQ ID NO: 26494 - DNA, 714 bp, Glycine max
  Clone ID: TF_GmC156986_1
ccacgcgtccgcttgaaactctgttttttttttcttgttgccaagaaaggctctaaaagttttgaagttttaaagagcaggggaaaaccagagcctgacttccttgttttgtgtgtctgtgtctcccaagattctgctgaggccttaagggagtatattacatatctccatgtgcggtgtttccaaggggaaaccttctcaaattgatttgatcatggaggagaagtatgcaaaagaagggatgcatcataagatttctgctttgcttgagttttcagcgacggatgatctaattggtttcaaagatgctgtggaaaaggagggtcatgatgttgatggggtggggttttggtatggaaggcgtgttggctcgaagaaaataggttatgaagagaggacacctctcatggttgcttccatgtttggaagccttgatgtatcaacttatattcttggaatgggttgtatcgatgttaatcgggctagtaggtcagatggggctactgctcttcattgtgctgttgctgggggttctgccgcttccgttgaggttgtcaagcttttgcttgatgcatctggtgatgttagtgctgttgacgccaatggtaaccggtcaattgacttgattgtctctgtggctaattctatcttcaatcaaaggtcaagtgtgctacaggccctcctgggaggtacaagtgatgctgatcaggcatg

SEQ ID NO: 26495 - DNA, 475 bp, Glycine max
  Clone ID: TF_GmC797_5
tgtggacgcgtgggcggacgcgtgggcggacgcgtgggtgtcgatgtcagttccatgttcatagttaggaaaaacggcaaaacttcactgcacaatgctgctaggtatggtgtccatcgtattgtaaaaacacttattgctcgggatccaggaatagtatgcatcaaagataaaaaaggtcaaactgcactgcatatggcggttaaaggacagtgtacttcagttgtggaggagatattactagctgatccttctattttgaatgagcgagataagaagggtaatacagctcttcacatggctacaaggaaatgccgttcacagatagtgggccttttgctaagctattctgctgtggatgttaatgccatcaacaagcagcaggaaacagccttggatttggcagataaactgccatatggagattcagctttggaaataaaggaagcccttgcagaatatggtgctaagcatg

SEQ ID NO: 26496 - DNA, 720 bp, Glycine max
  unsure (1)..(720): unsure at all n locations
  Clone ID: TF_GmC16_2
atctgggtagcggagccaaacaggcttacgcggaatctgactgctgcccgaagtcattctcagtaactgctaatcactgacacggtcagctaagctaagctaccccttctctctctaaaacctttgccattgtctcccacaacaccttacaacttacaacttcaatgtctgagtcaagactcatttatttataaccaccaccagctcaggtggcgcagccaaaccaaacccacaagaggttaagaacaagtagaataacaaaacccattcttcacctctctcccatcgtaataatgggtcagagcctgagttgcagtggcaaccatgaccacggcctcttcaccgccgtgctgcacggcgaccttcaaattgtcacaactctcttggattccgacccttctctcttgcaccaaacaactctctacgatcgccactctcctcttcatattgctgcagccaatggccagatcgagattctgtctaggctcttagatggatctcttaacccagatgttttaaatcgccacaaacagactccgcttatgttggcagcaatgcacgggaacatcgcctgtgtggagaagcttcttcaagccggagctaatgttttgatgtttgatactatttacgggagaacctgcttacactattccgcttactacggncattcttcttgccttaaggctattctttccgctgctcaatctaatccagtggctg

SEQ ID NO: 26497 - DNA, 2197 bp, Glycine max
  unsure (1)..(2197): unsure at all n locations
  Clone ID: TF_GmC130201_1
tacggctgcgagaagacgacagaagtcggggcgggagtctgtctgacgcctcctcccacgtgtccagtaactgctcaacactgacacactcagctaccactctcctctctctagcttcagtaactagcttgccattttgctcaaactcaaagctcaataaatgtgcaaactttgaattgaaaacgtggaggaatcaatcaaggtggcgcaaagagaggagaagaggtggtagagagaaagtgatgggtcaggggctgagttgcagagggagccatgagcatggcctattccgtgctgtgcagcatggggacctagacactgttgcagctttgctacaaacacacccttctcttatgaaccacaccactgtctatgatcaccactctcctcttcatattgccgctgctaatggccagatccaggttttatcttggcttttggatggatctgtgaatccagatgtgttgaatcgccaaaagcagacaccgcttatgttggctgcaatgcacggaaagatcgcctgtgtggaaaagctccttgaagccggtgcaaatgtactaatgtttgatgcttgttacggaagaacctgcttgcactatgcagcttattatggtcattcttcttgtcttaaggcaattctttctgccgctcaatctagtccagtggctgcttcttggttggtccttttttctgtttttgcataaattttctccactgattgattcatgtggtgatttcttatgttggtttttataaaaaaacataaagaagaaaataaattgaattgattgcagggggtttgctcggtttgtgaatattagagatggtagaggtgcaacacctttgcatttagcagctcgtcaaagacggcctgaatgtgtacatattctattgtacagtggagctcttgtttctgcttcaactggaagatatggatgtcctgggagcactcctcttcatcttgcagccaaagnggggatctttggattgcatccgggaactattggcatggggtgcagatcgccttcaacgtgatgcttctgggcgaataccgtatgtagttgctctgaaacacagacatggagcatgtgcagcattgctgaatctttcgtctgctgagcctcttgtatggccatcatctttgaagataatcagtgagcttaatccagacgccaaagagttattagagcgggccctgatggatgcaaacagggaaagggagaaaaacatattgaaagggagtgattactctcttccatctccatcacattctgatggggtagatgacaatatctctgaggttagtgagacagaattatgctgcatctgctttgagcaagtgtgtacaattgaagtccaagactgtggtcaccagatgtgtgcacaatgcacactagccctgtgttgtcacaacaagcctaacccttgtacttcacgtgttatcccgccagtttgtccattctgcagaagcaccatagcaagattggtagttgtaaaaaaagaaagccctgatgacattgatcaagatggtgttgatatcacttgttccaagcatagcaagtcaaggaaatcacgaaactcaaacgagggcggtagcagcagcattaagggattatcaaatgtgaactcatttggaaaaatgggtggtcgcagctctggaaaaattgctgctgaaaatgagtgggaagatgataaacaacagtgatacgatgctgttacttggtgtggtgcttgcgcttatccataattattgcatattggaaagatacggtaacaatttgcttgatcagcaaggcaaaacgaaagtataagaagtaaagggaaaaagaggttcattttattattggaaactaagcaaagtgagtaagattggagttcagggtagtaggtaccaactatcaagtttggttggggaaagaattaaagagatgcatgtcatgttgtaaattgtaactttgttactattatttgggaaagaagaagcatcgcctgcatcgatggttttgggcgtcgtcattgaaatgagaaattctttttctcaaaaaatatataggagtctaagatcatatgaaaatgtattgtgtatttgcttctggtttgtttctttataccaaaatgagcaataaaatacgaaagggaaaggcctgtggttgttgttaaaaaaaaaaaaaaaaaaaaaactcgagactagttctct

SEQ ID NO: 26498 - DNA, 1898 bp, Glycine max
  Clone ID: TF_GmC6679_1
tcgcctcgcgtgggcgcgaacaaatgtgctcccatatattcccttgcaattagaggggagtggaaagaaactgaagccatgatagacgcagatagaaggttggctacttctgccatctcacagggacgggcaacactgcttcacgtagcagcagaagcaaatcagttgcacttcgtaaaggagcttgtgaaactactgagcgatgaagacttggaattacaagaccgcaaaggcaacactgctttctgtttagccgcagcatcgggaaatgtgagaattgttaaagtaatggcccgaagaaatagcaggttgccaactatcaggcgtggggatggactcaccccacttcacatggctgctttgcagggaaaaaataaaatggcatggcatctctaccatgataccgttcaaacattcaatgatgcagattgggatgcattgttcttcttttgtctcaagactgatatttacgatttagctttgaaggtgttacgagagaaaccaagggtagctttggcaaggaatgagaaccaggagacgggcttgcatgttttggcccgaaagccgtcatcttttagttgtcgatgaggtctaggacaaaggtttctatatatgctcaccaactcaggtaagagtccaactttggccctccaacttgtcaagtgtctctgggagacacttctttctctagatggcacagagatgcagactattataaaagtcataagtgaaccatctcaggtaatatttattgccacagaagttggaaattttgaggttttggcagagctggttagatcttgcccagaactcatgtgggaagttgataccaaaaatcgaagcatcattcacattgctgctttgcaccgccacatagacatatataatctaatacatgaaacaagctctatcaggaattttgtagtaacattagaggatgaggataaaaacaatttactgcactatgctgcaaaattatcaccaccgagcaaacttaacttgttgcctggacctgttcttcagatgaagttcgagttgatgtggtatgaggaggtgaagaagatcatgcaaccttgtttcatagagatgagaaattccaatggtaaaactcctcgagaattattcactgaagagcatttagagttagtgacaaaagcagagtcttggatgaaaagcatgataaattcctgtataactatttcaacggtcactgctacactagtgttggctacagcattcagcattaagcgtgaggataaccataaacccaccattactcgtgacttcatgttatatattggaattgcaatgatatcttcatccatctccagtctgattttcttgtctatccttatcacatcaccttgtgtagaggaagactttttgaagtcactgctgcggaagatatggtggggactggtgacactatatacctccatagcatacttgtcgacgacatttaccattgccttcttcacaacgtaccaagtacgggtgccaaaatcatttttttgggggcctttaataagcctattaataatggaatatcttctgtttccatatgggtcactcgtcaacataaacccacgctattggttacccagtaaatacattttttatactgggaaagctaaaggccgtgtaaattaaccatgactctactaggttaaataagtgctacatacctgctttactacaaatagaaattcgcatttgaagttttgaagaactgtactagtttgtcaagtttattatgcctatcaaatagcttgcaacgtgtaatgtagtgttggctggaaaatacaacttatattaattttcagctaacctgagagaaataaacaccaacgaaatttatgtcaatggatgataaataatcaattagtcaatttgatatc

SEQ ID NO: 26499 - DNA, 1972 bp, Glycine max
  unsure (1)..(1972): unsure at all n locations
  Clone ID: TF_GmC334_1
cccacccggctcgagaccaaatcatattaagccatggccacctccaacttctcaattgttctctctctctccctagccttctttctagtgctactcaccaaggcaaactcaaccaacaccgtttctttcaccgtcagcaagttttccccacgccaacaaaaccttatcttccaaggagatgctgctatctcaccctccggggtgttacgactcaccaaggttgacagcatcgacgtgccaacgacgggatccctaggacgtgccctttatgctaccccaatccagatttgggacagtgaaacaggcaaggtagctagctgggctacatcgtttaaattcaaagttttctcgcccaacaagacggccgacgggcttgccttcttcttggcgcccgtcgggtccaagccccaatccaaaggagggttccttggtcttttcaatagtgactcaaagaacaagtcagtccaaaccgtggcggttgagttcgatacttattataacgcaaagtgggacccggcaaaccgacacattggcatncgacgtgaactccatcaagtccgtcaaacggcgtcgtgggggttggccaacgggcaaatagcacagattctcattacctatgacgccgacacgagcctcttagtcgcttctttgatccacgttattttctgaagtctggtgtgtatttgcggcaaggtttggctccaacaagagaaacgagcaatcatatggtatttgatttttagggtggaagaaaaatcagagtgagagaaaaaatcgatggagatggaagtagacatcgagaagaagcaacaagacgtggtgaaagagaaagacttgttcaaagctgcagaagagggcgaggcatcaacgttcgaagctctctcttctgaaatcctctccaaagccctctctctcagaaacgaagacgctcgttcccttctccacgtcgcagcttcttccggtcactcccaggtagtgaagatagtgttgtcttgtgatgcatctgctggtgtggtgaattgtgctgatgaggaagggtgggcgccgcttcactctgcagccagcattgggagtgtggagatagtggagactctattgagcaaaggagctgatgttaatctgaaaaataatgggggtcgtgctgctctacactatgcggccagcaaaggttgggtgaagattgctgaattgctcatctcacatgatcccacgattactataaagtactatctcgttccactccattgcatcgagtagctcgcactgggaaatctgagctgtgtgaacttttgattgcagaaagagaagaggttcatgctgttgatagcgctggtcacactccactaatgaatactgcgatttgctgtaaaaaacaggtagcccagcttgtgataatacatggggcagatgcggatttggaggacaaggaagggtacacggtgcttggtcgagccacgcatgagtttagaccaatattaattgatgctgccaaggccatgcttgagtgatcattcaattataagaaaatgagaaaattgtcaggacaggaatgtggaaagagagcagaattgtggtagttatttcgcaatgccttaatggtggttacgttcttgacaaattatgttgctcaggcaaaaagttcatctatacccttatgttcttagttgtcaaaccagtttgttttgggtatttttgtgccagctttaaattaaatcaggaagattagaatttttgttttgataatcccctaaattagcaattcagattgtataagtcaaaacattttaattctagagattttaagaactctccgttagttgattttataagaaatggttcattttacttttatatcctctctgagacagtgagcttgaagagtaatcttccagaatgggtgaatatttggttctctgccaccaccgggttgaataaaggcttcgttgaaacccatgacgtgttttcttggtct

SEQ ID NO: 26500 - DNA, 2464 bp, Glycine max
  Clone ID: TF_GmC114164_1
cttgcaaaacggattcaggaatacagaacacaggcagagctggagaatatacgagcttctagcaattatatagaaaccgttctaggttctgatggcacccatgttgtgggtttgaactcttacagaagttttgaagcaggggtgcaacctgcaacaaccaaagggcagatcagtgcaaatcgttaagacaggattaaggtttataatgatctttaagctcatgtggatattggaaacggaggatttttgtacttgagaatcaatggaatttatattattacagaatgacgggtttcaatctcatggtctctcagtcatgtaattattctcgcttgtctgaacaaaatagtggcatgtttggtagattccgttcaagacacaatagggcttcgtctctaaatgaggatatttttggttcatgtatagttgatctgtgcacatccactataaagatggatgaagactatacagatctacgtcttcgcttccgtatagtttctccctcaaaatcttaatgaccacaggctgtatattaagctggtataatggacaggaaaaccaatagaaccggagctttaacatgggtttttaaatgccaatcactccaaaggacttaattatgttgagtaagttccccttatagaaactcagcaactggagagaacacgggcagtccttgagaggatactagcatatcgcaaatgtatagcaaccattccaaggacggatgtagtgtatcttgtatgtttgaactcttacagaagtattgaagcagtgctgagtgcagtgctcctgaaccagagctgggcatctctaaaccttggcatattgctgtgtattgaatgctctggagtgcaccgaaatcttggtgttcatgtctcaaaggttagatctataacgttagatgttagggtttgggaaaataccgttctggagttatttgataacttaggtaatgcttattgtaattctatctgggagggcttgcttctacttgatcatgaaagggtaggtgaaccaaatgtgccaatgaaaccttgctctgcagatgccttccaacacaaggagaagtacatccaagcaaagtatgtagagaaatcactgatcatccgagaagaggatatacccgagaatccttcagtttccataagaatctggcaagcagttcaggctgtaaatgtacgagaagtgtatcgccttattgccacatcaacatcaaatctgataaacacaaaatattatgatgaggctcaccatgctgctgatgcataaaaactcagcagctggtgcttctttggcaagtcaatcagaggatagtcagaaatcattgagggatggcatatattccaaggaagtggttagtgtgtcaaagattttaaggggaattcctgggaatgataaatgtgctgagtgcagtgctcctgatccagactgggcatctctaaaccttggcatattgctgtgtattgaatgctctggagtgcatcgaaatcttggtgttcatgtctcaaaggtgagatctataacattagatgttagggtttgggaaaataccgttctagagttatttgataacttaggtaatgcttattgtaattctgtctgggagggcttgcttctacttgatcatgaaaggttaggtgaatcaaatgtgcctatgaaaccttgctctacagatgccttccaacacaaggagaagtacatccaagcaaagtatgtagagaaatcactgatcatccgagaagaggatatacctgggaatccttcagtttccataagaatctggcaagcagttcaggctgtaaatgtacgagaagtgtatcgccttattgtcacatcaacatcaaatctgataaacacaaagtattatgatgagtctcaccatgctgctgatgccaaagggcatcagcatgatcctgaagcctgtctgagagttgaagagactactgagacagagaggtgtttccgtggatggtcattattacatctggcatgtcattctggcagtgcactgatggttgagttgttgctccaatttggtgctgatgtaaacatgtgtgactatcatgaaagaactcccttgcaccattgcattacaagtgggaaaaatcaattggcaaagtttctattaagaaggggtgcaaggccgtcagttaaagatgccggaggactcactgtacttgaaagagcaatggagaggggagcaataactgacgaagaactatttatcttgcttgctgaatgccagtgaagatggatctggtatatatatatatattaggaatgttgaagatatgctgttgttcattaagaaaaagaaagttcaatttcttaattttgaatgcctaattcatcgaaaggaatttcattaactttttaattcatctggatccatatttgttgcggttactatagaaaacatttaacacgtaactcttaatgaaaattttaaaatatattcatc

SEQ ID NO: 26501 - DNA, 587 bp, Glycine max
  Clone ID: TF_LIB4164-037-R1-N1-H11
aagaaatcgaactttcttttcttaatgaacaaaagcgtatcttcaacattcttaatatatataccagatccatattcactggcattcagcaagcaagataaatagctcttcgtcagttatcgcacccctctccattgctctttcaagtacagtgagtcctccagcatctttaactgacggccttgcaccccttcttaatagaaactttgccagttgatttttcccacttgtaatgcaatggtgcaagggagttctttcatgatagtcacacatgtttacatcagcaccaaattggagcaacaactcaaccatgagtgcactgccagaatgacatgccagatgtaataatgaccatccacggaaacacctctctgtctcagtagtctcttcaactttcagacaggcttcaggaccatgctgatgccctttggcatcagcagcatggtgagcctcatcataatattttgtgtttatcagatttgatgttgatgtggcaataaggcgatacacttctcgtacatttacagcctgaactgcttgccagattcttatggaaactgaaggattctcgggtatatcctcttctc

SEQ ID NO: 26502 - DNA, 1047 bp, Glycine max
  Clone ID: TF_GmC150_1
acggctgcgagaagacgacagagccggaacgagaaataccgtgacactgcaacagagtgagagaaattgcaggcggcggcacagaggggaagtagtagtaaataaggatcaatggcggttcctgggaggcgcaacggcatcaacgacgacgaagaggagttagacgacaatgcccttttcgaagaacaaggtgtcgtcgaagacgacaccgatacccctcctcacctccgcgacctctccgccgccgctcaaatcggcgacgcccacgccctccgtctcgctcttgataacttgactggtagtattgatgagccagtggaggatggggatacggctcttcatttgacatgtttatatggccatttggcttgtgtccagctgctaatagaaagaggagcaaacattgaggctaaggatgaagagggtgctattcctttgcacgatgcttgtgcaggaggatttactgagatagtccagctgctgcttaacagagcaaatgatgcagaacatataaagagaatgctagaatcagttgattctgagggtgatactcctctccatcacgctgcaagaggtgagcatattgatgtaattaggttgctgctgtctaatggcgcatctcccacaaaggcaaacttatacgggaaggcccctgcggatttgcctgaacaggaagatgctcggaggctgcttgaagctgcagctcttgccatggcatgccagtagcatttcagtagaaatatttagttccattttgacagagatgctacactttttggaccataaaatctgtatttcatacactactcttttttcgaagttcaaaaatcaaaatgatttattagaggagcaccataggaagttttaactctggagacagataaaaatgaggattcccggattacttatagtggggcaagcttgtttgttttcgttactttgcttaagtgaaatatatttactcttcaacaatttgaaatgtatttactcttcaacatgtcagtgaactatgactggatagttatacttgtcattcagtttgtgccc

SEQ ID NO: 26503 - DNA, 1385 bp, Glycine max
  unsure (1)..(1385): unsure at all n locations
  Clone ID: TF_GmC1340_1
cggnncgaccaacccttccgacccgccctccggctggaagcaggaggcggtggaaggcgagggtttgaggtgcgcaagcaaacaaagatgaaagaagcggatgagcaactatgcgaggcggccattaaaggtgacacgaagaaagtgaggtctcttatatactccggcgctgacgtcacccactttgacggcgatggcctcaatcctctgatgcacgccgcaaagcacggccatgcacccgtcctcaccctcctcctctccgtcggcgctccctggaacgctctttctccctccaacctctccgccggtgactacgccatgcaagaaggccacaacgaaaccttcgagcttctcctcaacgccgggatccaatctgaactgatactgggaacaattgcgaggaaggcaaacaagaacggcgattccggtcacgattatttggaagatagggtgagttttagcgaagacaagcttatggactctgaaagcaaggctgtgatgatggcatgggagaatccgttgatggaggctcatgctaaggcggtttgttccggtggtggccacgtactcaatattgggtttggtatggggctcgtggattcgggcacttcagcgatatgcacctgcttcacacaccattgttgaggctcatcctggggtttatgaacgcatgcttcgctccggttggggccagtaaggaaaatgtcaagattgtttttggacgatggcaaggatgttctgcctcagcttgaaacatatgatggaatattcttcgacacctatggggagtactacgaagatctgagggagttccatcagcatctcccggcattgttgaagactggtggtatctactcattcttcaatggcctttgtggcagtaatgcatttttccatgttgtttactgccatttggtatctcttgagcttgagaatttggggtattccacacaattgattccattgccggttaaggattgtttgggagaacaagtttgggaaggtgtgaaacaaagatattggcagctcgatacgtactatcttcctgtctgtcaggccatagagaaccctgagtgaggcaggaaatggatctcctgcagcttagaaagaactgcaccctgtgcagttacaaatttcaccatccatgcaagtttttttctctcctttatatattaaaattaaaggaatggttgaaatctcatgcagttttttttttaactgtagaggatcttaatcccagtgatgtatggtttgattttaataacatcgtcaattattctaacacgccatgtgtttttgcttgtgtaacgtatcaaatggaattgtaagaatacagttagagtcatattgaacttttgagctttatttgtaaatttcattannnn

SEQ ID NO: 26504 - DNA, 2880 bp, Glycine max
  Clone ID: TF_GmC557_1
cacaggtctcggttcccgagcatcatctctctctctctctctgttttcccatatcttctgtttcccgtcgttggtcaacctttgttcattggttctctttctctttccatttcaagtcttcgcttctttggttcaaaggacttgagcattcttgatgttaaactagccatcttcttcagttctctgtttctttctctctgtttttctgcagcgttttgaagcctcttccaagagtctcttacttaagatttcctgctgtcgagttcatcttccctcttaagtcttaacgggtaacaccctgtatgtaatatttattcttcttttgctcttaacgtctttcccatgtcagttaagttctgaaagttcaaattttttgttctcacgcctcaatttatttgatggatcatccccagatgaaaaatcatctcagtttttgcttctgggaatctgagttttgttgcttgacttgcaagtgactttggtcttgtggtaggggaaacagtgacctttctcaattttgcttatttaatttgagcttagtttgtttagttatagattatgttagctagcttttcagtttagatgggtacttaaaggggtttaatttcttcttttgcttctaaatttagtcaaacagtgctttgactcaattggaatctcgtatatttggaatcatggataactcatatgattcatcctcatccttgagtttcgtatcatctcacctgtcacatggttctagtaatcacaacgtgtcttccaccaccagcaaagatgcatgacgaaaatattgaaattttgagtctgaataagctcagtggaagcctcgagaagctattgattgaggctgagtatgattattgcgatgctgagattcttgttgaagacatccctgtgggtattcatcgctgtatattggcttcgcgtagtcagtttttccatgagctttttaagaaagggactgatggatcagggaaggaaggaaagccaaggtatctcatgtcagatttgatgccttatggcacagttggatatcaagctttccaagtgttcttgtactatctgtatactggaaggctaaaggcttcaccaacagaagagacaacatgtgttgatgaaacatgtatccatgtagcatgccgccctgctatcaatcatgccctagagctgatgtatgcttctgccacttttcagatgaaagagctagttttactttttcagcggcatctcctaaattttgttgagaaggctcttgtggaagatgtcattcctattcttatggctgctttcaactgccaactagaccagcttctctctcggtgcattcagagagtagcaaggtctgactttgacaacacatctttggaaaaagagctccctcgtgaagttgtgactgaaatcaaattgctccgactcccatttcagccagaatccacacctaatgcaatggaagtggagtccttgaatgaaaagagtataaggagaatccacaaggcattggactctgatgatgttgagctactgaagcttcttctaaatgagtctagtgtcactctagatgatgcacatgccctgcactatgcttgtgcctatagcgattctaaggttattcaagaagttcttagtctaggcatggctgatattcttcgtagaaattcccgaggatacacagttcttcatgtggctgcaaggcgaaaggatccatccattttggtagcactactgaataaaggggcgtgtgcatcagataccactccagatggacaaactgctcttgcaatttgtcagaggttgacgagatacaaggattatcaagagcaaacagtgcagtgtaaggaatctaacaaggacaggctctgtgttgatgtcctggagagggagatgagaagaaattctatgactgtgaatatgtctgtttcatcacagttaacagccgatgatttgcacatgagactggattaccttgaagatagagttgcatttgctcggctgttgtttcctgctgaggctagggtagccattgagaatgctgaagcagattcatcatcactgtatgcaaattcatcggctttgaaggtcacaaatggcaacccgaaagaagtagatctaaatgaatctccctcggctcgaaccagaaaactccagttaagattgcatgcccttatgaaaacagttgagaatggtaggcgcttctttccccattgctctgaagtgcttgataagtttctggaagacgacgaaatgccagatgttttcttcctagagaagggcagtgaagaagagcagagaatcaaaaaagcacgcttcatggagcttaaagatgatgtgcaaaaggcatttcacaaggatatggctgaaaataaccattctggtttttcatctacggtgtcttcctcttcttcctcaactcgtagggaaggtcttaaccatagagtaaggagaaaatgaagtccatgttcttctatgtagagtgttgcaacttgcaagtagaagccgtggaatatttagaaaaaataagatggaatgttaaattagggggttttgctaatgaacttgggagatttttactagcttgatttagtttcttatagttgttggaccaagagaagaagaaaaataaaagaagacgaattggcttatagtaatatctttgttccttttcgaagacccaaaagtgtgtattttttactttgttatctgattatagattgttatataattgaaaatctcacctcctgtaataattactttaaagatgacatgcaagactatttaaaagtcatttctaattgattatccttgcaaaattgtatgtccgttgtacaccaaaataattgtatatattgaaaacatataaatactaaactcttgtttcaaaaa

SEQ ID NO: 26505 - DNA, 2168 bp, Glycine max
  Clone ID: TF_GmC611_3
gttgattagtaaggcgtagcttattgatggttttttatgggttttttttcccccccatttggggtgtttgagacaaagacaaaagacaagaacaagaagcaccgaacagaacagaacagaacacaacacaagttgcttgaaccttacacgtcaccatcgttgcgtgttgagtgttgagagatgggaaattcgttcggatgttcggcctccggcgaaaggctggtgtcggcggcgagggacggcgacttggtggaagcgaagatgcttctgaactgcaacccgtgtctcgccaagtattctactttcggtggcctcaattcccctctccattttgcagctgccaaaggccacaacgaggtccctttatttcactttttttacatctaatccaaccctttaatttatttatttttctctgttggttttctgttagattgtggcattgttgctggagaatggagctgatgtgaattccagaaattattgtggccagaccgcattgatgcaagcttgtagatatgggcattgggaggttgcacagacacttttactcttcagatgcaatgttataagagctgattatcttagtgggaggtcagctcttcactttgcagctgtgcatgggcatgtaagatgtattagacttgttgtggctgactttgtaccaagtgcaccttatcaagctatacatgctggcacagctgttgacaggggtggtggatcaaatgtgaaaggcaaacatgagcatagtgcagtgccctttccaagtttgtaaataagactgctgatggaggaatcactgcccttcatatggctgcgttaaatgggtactttgattgtgtacaactgctgcttgatcttaatgcaaatgtgaatgctgtgacatataattatggcacatcaatggatttaataggggctggaagtactccattgcattatgctgcttgtggaggcaatttaaaatgttgtcagatccttgttgcacacggtgcaagtcggctggctttaaattgcaatgggtggcttcctcttgatattgctaggatgtgggggcgtcattggcttgaacaattgctggcacccagttctgatgccacaatgcctacattctctcattcaaattacttgtccttgccccttatgagtgtgctcaacatagctagagagtatggattgcaatcatctacagcctcctctgatgagattgacttttgtgctgtatgcctggagaggccatgttcagtggctgcagaaggatgtgtgggcatgagctttgtgtaagatgtgcactctatctttgctcaacaaacaatgtttcttctgaaatggttggccctcctggctctatcccttgccccctatgtagacatggagttgtctcttttgttaagttgccaggttcccaagcaaaagaaaataaactacatgtgtctcttggcctgtgtaccccatgcatgctacatccacgtgacctagacaagccatccctttctcatacaccagaggttggaagaaatcgtgtagcttctgttccttcggagatactctgccccgtcacttgtagtccatttccatctatggcaattcccttatgtacctgcaatgatggtccatgtccatcatttgaacccagagaagtagaaacacaggatggattacctcatcactctcaagcatcaacagtggatcaggataaaattgaagggccaagactagataaaacaacctgctctagcatgttttggggtagaagaagttgcagcagggagcaccaatgcaattcagaaataaatgcttgactcgcaccatgcttgtacgacacatacaagtgtcgtggatactgggtacactatagatcaacaggatcagtccacaattttcttattaaccagcctcaaatagtgaaactcgggatctctctagaagagaaaaaactgctctgcagatcctcttggctgctcaggttgtatggtaggtgatagacacaattctggcgtttcagcaacacaaccaccctctggatatgtcctttttctgatatttagggagcgtgtgtgaaattagtttcagtttcgtgagatttttattgtgatttattgtaattggatttcattttatccaggaaagtgtcttctttaaggggaaaagaatatcgtatgcttttt

SEQ ID NO: 26506 - DNA, 1079 bp, Glycine max
  unsure (1)..(1079): unsure at all n locations
  Clone ID: TF_GmC61596_1
ggaagtaaattactctctacttgtaaatggctctcatagtgtcactttcagcagaggttttgttctcaaacttttcattttgacttatgttctagtaattttagatgcacgagacttggcttctgaacagttttaagtcttgagtttgtggaaatcggtctccgagcttccagacttgctgtgtttcgatctgtttatccatccaccttcatcgaccttagcatctagagagatagtaaatttccactcgtatggtaggagattttcaagtgactatggagaaacagagcagttttcgggcatctacaatggaaaaacagaagagttttcgtggatttatggaaaaacagaaaagttttcgcattgttatggagaagcagctcagcttcatgggaagtgaaaggaagaagaacaaggaatcacctgggaaacgtggtgacttaccaattcatttagcagctcgggcagggaacttgagtagagtgaaagagataattcaaaactattctaataatgagacaaaagatttgttggcaaagcagaacctagagggggagacccctctttatgtcgcttcagagaatgggcatgctttggttgttagtgagatacttaactacttggacctgcaaactgcttctattgcagccagaaatggctatgatccattccatattgctgcaaagcagggtcatcttgatagttttgtttaaatttcagccaactaccatgggtgagaagcctggaggtgctgagagaactactgcactcctttcccaacttggccatgaccacagatttgtccaactcaactgctttacacacagctgcgactcaaggtcatattgatgtggttaatcttcttctggaatcagattctaaccttgctaaaatagccaggaataatggtaaaactgtccttcactctgcggctagaatggggcatttggaagttgtgaaagccttactcaaggatcgaacactggattaggatgatagaaggcaactgcctacacatgcttggaaggcaaaatgagaattttgctgaatggaaactgaccacanttggttgagatata

SEQ ID NO: 26507 - DNA, 732 bp, Glycine max
  unsure (1)..(732): unsure at all n locations
  Clone ID: TF_GmC4222_4
ccacgcgtccgggactaggaaagttttcaaagccaagcaaatacgagctttacccaattttcttgctgttgaattttcactgttcaatcttcaaaatcacatttttctcgatcttcaccttctgggttgctttttttttttcttcttcttcttcttcttcttttgttttcgctatggaatcgaaaaaccctgcgaggtttacgctggggaagcagtcgtcgcttgccccagaacgccataacaaagaagcagagctccaaaaagatggggaagctgttgatcagggtgtgaggttgatgtattcggcattcgaaggcgatgtggatggaattcgcgaggcgttggagtctggtgtgagtgtgaattacaaggatattgataatcgcactgctcttcatgttgcggcgtgtgagggcttcactgatgttgttgatttattgctccaaaaaggtgctgaagttgaccccaaagatcgatgggggagcacgccacttgcagatgctattttttataaaaagaaatgacgtgatcaaactattggagaagcatggagcaaagcctttgatggcccctatgcatgttaatcatgcgcgtgaagtcccagagtatgaaatcaatcctaaagagcttgattttaccaacagtgtggagataacgaaggggactttctgtagtgcattggggggcgtggaacaaagggtgcagtaaaaaagctggggnaggatgtaatta

SEQ ID NO: 26508 - DNA, 345 bp, Glycine max
  Clone ID: TF_LIB3107-079-F6-R1A
tggcatgccatatgtagaggggagtgtactggtgcggatattgcttgcagcaggagctggttcatctgcgcagggttcgcaggatgggtggtcagctttgcatacagcagctatggctgatgacgtggacttggttagggttatttgaggtgctggggttgatgtgagcattcgcggtgtgcagatcagtatacctcttcacttggccttagctaggggtgctaaggcgtgtgttggacggcttcttgatgctggagcagagtattgtttgagggatgatgatggtgacaatgctttccatatagctgcagtgtcggcaagtgtgttgtcgagataatcttggct

SEQ ID NO: 26509 - DNA, 793 bp, Glycine max
  Clone ID: TF_GmC1577_2
ccacgcgtccgaaacctaacaacgccatagcattctctaacccaccctccctcgacctccacacaaccccaacactaacaagcaccgtcttccatacccatgtcggaaacagacacctatgcgccaccgcctctgttcctgctccagcgcccgccgcttctgctgtcggaagcaccgatgccattgtggacttactcaacaccggcatggatgtgaccgcaatcgcaacagcggaatctatcatgccgctcacaattagggttgggaacctccacacgatgaagcttctggaagccttcgattgcaaaatcgatggattgtttctgcacgaggccacgacgatggtccgaatcgacgcgatggagtttctgttggcgcgctatgatgacgagctagaggtggatgtggtagactccgaggggaggaaaacgatccacgtggcggcgagggaggggcacgcgagggttatccagttctgcgtcgcgatggaggaaaccctaatcgagtggattcgaaggggtggaccccactccactacgcggcgtggaaagggcacgtgaaggccgcagagtgtttgttggaatgctccaacgtgaagtgcgcgagggacagggaggggagaacggcgttttctgttgcagcggagagtgagcacgaacaatctcacgcgcgcacgcgcctggtcgatttgctgggttggggcgacgcgctgctgcgtgcggtgagagttgacgatgttcacggcgtgaagaaatgtttgggggaaggggttagtgtgaacgggagggaccag

SEQ ID NO: 26510 - DNA, 1689 bp, Glycine max
  Clone ID: TF_GmC643_1
acggtctttttcttctaagctatttgattggatgataaaaagatccaagtatcaatatcaattgatttgattagtggcagttccaacaatggaggttgtggtaactccaactctagagaatgacacaataacaacactctatgaagcatcactaaatggctctgtaagtaccttaaacaccctgatccaaaggaaccctctgattctgcatagagtttcactctctccattcagtgaaaccccattacacatagcctctttgctaggacatttggaattctgtgaggcacttcttaaaaggaaaccaagtctagcaagtgaagttgactctgaaagacgttcccctcttcatttggcttgtgctgaagggcacactgaggttgtgaaagctcttttgcatacaaaccctgatgtttgcttggctatggacaaagatgaaatgcttcctctccacttggctgtgatgagaggacacactggagttattaaggagttgaccagagccagaccaggctcaattcaacagaacactattgatgatggttctgttttgcacttgtgtgttaggtataatcatttggaggccttgatattccttgtgcaatcagcaacaaggaaccaacaacagttcctgcttgccaaagacaaagagggtgacacagttctgcatttagcagtgaggctcaaacaaattaagaccataaaacacctacttatgctacctgaaatgagaacagcgattagtgctttaaacaaggcaggtttaacagctttggagatgttggagcgctgtccaagagattttataagcctaaaaattgaaaagatgctacttgaagctgaagttcaaactggcactgcacaacaagggtcaccatcaccaagaatagctactcaaccatcaaatcaatccaagaggagcaagatatgggaaacattatggttaaaatacttacaataccaaagtaattggatagaagagaaaagaggaacattgatggtagtagccactgtaattgccaccatgacttttcagtcagcaataagtccaccaggtggggtttggcaagaagatacaataactggtggacacaactgcactacttatggcatttgtaaagcaggcactgcagttttagcatatgattggccacatgggtttctgaaattcatgaccttcaacaccacctctttcttctcctctcttgctgtggtgctgcttctcataagcggttttcgccttgagaacaagctcatgatgtggatcttgaccatgggtatgactttggcactcacattcatgggactcacatacttttgggcacagagcttggtcacccctgatcacattgttgataaagttaataggatgggaattcctttgtccatagtttgggtgatcatgcttctagtggctgttttggttcatggggttaacttgttcttgtgggtaaagaagtatgtaaagaagtggaagaagcagaagctgctgcagagctaaaagtcattgctcgcgagagttagtccagtgaatgagaattacaattacccctttgaagtttgcaatataaaataataattcttgcatatccagttgttagttagagaaataggattgtgacaacaactaagataaaataattgtgattggatataatcatcacatggaatctaaaaaaattatgtgtt

SEQ ID NO: 26511 - DNA, 1985 bp, Glycine max
  Clone ID: TF_GmC611_2
ttttcgtccgaaaacaaaaggtaagaacaagaagcacagaacacaggttgcttgaaccttacacgtcagcatcgttccgtgtggagtgttgagagatggggaattcgttcggatgttcggcctccggcgagaggcttgtgtcggcggcgagggacggcgacttggtggaagcgcagatgcttctgaactgcaacccgtgtctcgccaagtattctactttcggtggcctcaattcccctctccattttgcagctgccaaaggccacaacgagattgtggcattgttgctggagaatggagctgatgtgaattccagaaattattgtggccagacggcgttgatgcaagcttgtagatatgggcattgggaggttgtacaaacacttctactcttcagatgcaatgttatgagagctgattatcttagtgggaggacagctcttcactttgcagctgtgcatgggcatgtaagatgtattagacttgttgtggctgactttgtaccaagtgcactttatcaagctatacatgctggcacagatgttgacaggggtggtggatcaaatgcgaaagggaaacatgagcaaagtgccctgtccaagtttataaataaaaccgctgatggaggtatcactgcccttcatatggctgcactaaatgggtactttgattgtgtacaactgctgcttgatcttaatgcaaatgtgaatgctgtgacttatcattatggaacatcaatggatttaataggggctggaagtactccattgcattatggtgcttgtggaggcaatttaaaatgttgtcagatccttgttgcacgaggtgcaagtcgtctggctttaaattgcaatgggtggcttcctcttgatattgctaggatgtgggggcgtcattggcttgaacaattgctggcacccagttctgatgcctcaatacctacattctctcattcaaattacttgtccttgccccttatgagtgtgctcaacatagctagagagtatggattgcaatcatctccaacatcctctgatgagattgacttttgtgctgtatgcctggagaggccgtgttcagtggctgcagaaggatgtgggcatgagctttgtgtaagatgtgcactctatctttgctcaacaaacaatgtttcttctgaaatgcttggccctcctggctctatcccttgccccctatgtagacatggagttgtctcttttgttaagttgccaggttcccaagcaaaagaaaataaattacacgtgtctcttggcctgtgtaccccatgcatattacatccacgtgacctagaccagccatccctttctcatacaccagagattggaagaaatcgtgtagcttctgttccttcggagatacgctgccccgtcacttgcagtccatttccatctatggcaattcccttatgtacctgcaatgatggtccatgtccatcatttgaacctggagaagtagaaacacaagatggatcacctcatcactctcaagcatcaacagtggatcaggataaaatcgaagggccaagactggataaaacaacctgctctagcatgttttggggtagaagaagttgcagcagggagcaccaatgcaattcagaaataaatgcttgactcgtgccatgcttgtacgacacatactcgtgttgtggatactggatacactatatagatcagcaggatcagtccacagttgtcttattaatcagcctcaaatagtggaactcgtgatctctcttgaagagaaaaaactgctcttcggatcctcctcttggctgcacaggctgaatggtaggtgatagacacaattctggcgtttcagcaacacaaccaccctctggatgtcttttttttcctgatatttaaggagcgtgtgtgaaattagtttcgatttcgtgagatttttattgtgattattgtaattggatttcattttatcaaagaaaagttgtcttttttaagggg

SEQ ID NO: 26512 - DNA, 383 bp, Glycine max
  Clone ID: TF_LIB3242-391-P1-J1-F2
gaaggattcttctacgatcaatgaggttgggctctggtatggccggcaaaacggatcaaagcaatttgttcttgagcacagaacccctttgatggttgctgccacttatggtagcattgatgttatgaagatggtacttttgtgccccgaggcagatgtgaatttcgcgtgtggggcgaacaaaaccactgccctccactgtgctgcttctggtgggtctaccaaggctgttgatgccgtcaagcttcttttatcggccggggccgatgtcaattgcgtggatgcaaatgggaatcgccctattgatgtgattgctgttcctcccaagctgcaaggtgcgaaagccgttcttgaggaactttttttcggacaatgcttctgat

SEQ ID NO: 26513 - DNA, 805 bp, Glycine max
  unsure (1)..(805): unsure at all n locations
  Clone ID: TF_LIB4167-006-Q1-K1-B6
cccgcgtccggacaaaacaaaaggtaagaacaagaagcacagaacacaggttgcttgaaccttacacgtcagcatcgttccgtgtggagtgttgagagatggggaattcgttcggatgttcggcctccggcgagaggcttgtgtcggcggcgagggacggcgacttggtggaagcgcagatgcttctgaactgcaacccgtgtctcgccaagtattctactttcggtggcctcaattcccctctccattttgcagctgccaaaggccacaacgaggtccctttatttcactttttatatctaatccaatataatctaatgcaaccctttttacttattcatttatttctgttgggttttctgttagattgtggcattgttgctggagaatggagctgatgtgaattccagaaattattgtggccagacggcgttgatgcaagcttgtagatatgggcattgggaggttgtacaaacacttctactcttcagatgcaatgttatgagagctgattatcttagtgggaggacagctcttcactttgcagctgtgcatgggcatgtaagatgtattagacttgttgtggctgactttgtaccaagtgcactttatcaagctatacatgctggcacagatgttgacaggngtgggtggatcaaatgcgaaagggaaacatgagcaaagtgccctgtccaagtttataatanaccgctgatggaggtatcactgccctttcatatgctgcactaaatgggtactttgattgtgtacaactgctgcttgatcttatgcaaatgtgaatgct

SEQ ID NO: 26514 - DNA, 1600 bp, Glycine max
  unsure (1)..(1600): unsure at all n locations
  Clone ID: TF_GmC1249_1
ttcccgggtcgacccacgcgtccgcccacgcgtccgcccacgcgtccgtacggcatggcaaaagaggagaggatagggtgcctttagattgggatactcgactgaaaatagccttaggtgctgcagtgaggcattgctcgtattcatgttgagaatggtggcaagcttgtacatggcaacatcaaatcctcaaacattttcctcaacaccaaacagtatggacgttcgtctgaccttggtcctgcaaacatttcaagctcacttgccttgcaatcatcattcgcatcggattaccgtggcctctaagttaccaacatgagtgcgttcggcagcttttctcgttgcgtttctgctctgctagggtttcatcttcttccatcacctccgtcgcaatgaaaccaggcttcatctgaatccgattccccttcgccccttctcctccttcactttcaccttctccgaatcctctaccaattattatgatgaactccatcttcgtctctcacaaccttcgcgtctttggtcccggcttgaatcccttcgcaccttattgcatcgccaatcacaccctttcctctcgctaaataccaattcccctctccgattttcggggttactttacttggtcgttttgcttttttctttgtggtcgtttttgctttaattgctgagaaagatagaaacatgctcgaggaacagcctgttgttttgttcaggaagagcccttccaggaggcgcttgagatctgcctttgataccgatgataggggttggacctcgcttcatgttttcgctcgaaaaggcgaactcaaattggttaaaaaacttatcaatgaaggaatggatgtcaatgtgtctgcttggggccccaaatcaaaaggggtgacccctctccaccttgctgccgaaggtggtcacattggagtgatggatgtactacttgagcgtggtgctgacattgatgccagaactaagggtgcctgtggctggacaccgctccacattgcagccaaggaaaggaggagggatgctgtgaaattcttgttagagaatggagccttcatgccacctgatatcagtgatagcagatttaacccaccgcttcattactgtcccgggctggaatgggcctacgaggagatgaagcgacttcgtcaagaagatttgtctgctggagagacatcttacagctccgaaagttaatttgcttttcagggacttggttggtgtttgatagtgtgtgtttggatgccgttcagaggagatcaatgtgtgtcagatcagagttaatatgactagcttctgcgtcacctttataaatttgacatgaaaatttgttgatatgtgcattcagaaagcgtatccagacatgcactgaatctgtattgtgggaataaatgtagaattgaaataaaacaattatgtatgtgtaactattttagcatgttcgatctcttgtttatggaaacaatcatgtacgattttaatgtgatatgttgtgattgctgatgttttcttttacttgtagactatgttcagaattcagagccagttcaaaaaaaaaaaaaaaaaaaaaaaaaaaaagcggccgcntagagga

SEQ ID NO: 26515 - DNA, 494 bp, Glycine max
  Clone ID: TF_GmC140986_1
gtgcttgcaattcaagccatctaaaaggcctacttttagtgcaatgctggcaatatttctccgccatttgcaggaaataccacgcagccctcctgctagccctgataatggcttagataagggctctgtgtcaaatgtgatggagccttccccagtacctgaattggaagttcctcaggaaaacccaaatcatcttcatcgacttgtgtctgaaggagatactgcaggtgttagagatcttcttgcaaaggctgcatcagaaagtggcagcaactacctatcaatgctattggaagctcaaaatgctgatgggcaaacggctcttcacttagcttgtagacgtggtagtgcagaacttgttgagacaattctggagtgtagagaagcaaatgttgatgtattggacaaagatggagatcctcctcttgtttttgcattagcagctgggtccccagaatgtgttcgtagccttatcaaaagaaatgctaatgtgc

SEQ ID NO: 26516 - DNA, 1245 bp, Glycine max
  Clone ID: TF_GmC798_2
cgcgttccggctcgaggctcaagtacttgctgtccaggggagttaatcctgatctagagagtgactcgggaacacctttggtttgggctgctggccatgcccaaccagcttctgtcagtgtactattggaacatggtgcaaatccaaatgctgaaactgatgatggtattactccactcctttcagctgtggcagccagttctctggcatgcttagagctgttaattcaggcaggtgctaaagtaaatataagtgctggtggagcaactcctttgcacatcgcagctgataatggaagtcttgaactattaaattgcttattgaaagcgggagctgatcctaatgtctctgatgaggatggtgtcaagccaatacaagttggtgctgcaaggggctatctaaaagctgttgagatattgttccccttgacatccaaagtagatactattcctacttggactgctgatgggatactcgagtatatgcaatctgaaactagaaagcagctggatgaatcgattaatgaccaagaaactaatcatcccaaggaagctgattttccaaagcaaaatgttcccgaggtggcgcctgaagcccaaatgagagcatgcagaatcaaagtcaagaggggatgaggcttttaaaagatatgactatcatatggctatagattcttatacccaagcgattgatctgaaccccactgatgctactctgctatccaatagaagtctttgttggattaagttgggtcaagctgagcatgctttagctgatgcaaaggcttgtagagctttaagaccagattggccaaaagcttgttatagggaaggggcagctctgcgtttgttgcagaaatttgatgaagctgcaaatgctttttatgagggagtaaagcttgatcctgaaaataaggagcttgtaaatgcgttcagggaagctgtcgaggctgggaggaaatttcatggaactcgtgaaaatatgctattaatacctcgttcctaagcattgcgggaagtgcagccttattcacttgatccttttttcctcagtttgtgtttgtgcgtgttttctttcactaggtacagtcgtacaggaagagtcagccagtaatctaatcagtttcattaaattgttatagtaattagaaagcttatacttatttgaaatgttccaaaattgttgcagaattagtaaattatgaaaatgtttcatgggtatttctcccatactgttgtaggattc

SEQ ID NO: 26517 - DNA, 785 bp, Glycine max
  Clone ID: TF_GmC555_3
gtcgtccgagatcgaggttgtcgaggaggtgcagtcccgcgacgagcaatcggcggcgtctggcggcggcggcgatggcatgggggcggaggagagcctccggaacgacgtgtacacggcggcgtcgtacggggatttggagaaactgcagagattggtggagcaagagggttgccccgtcaccgagcccgacgggttgggatactacgcgcttcagtgggctgctctcaacaatcgcactgccgctgctcagtacatcattgagcatgggggagatgtaaatgcaacggatcatactggccagacagccttacattggagtgcggttcggggtgctattcaggttgcggaacttttactccaggagggtgctcgagtgagtgctgccgatatgaatggatatcagacaacgcatgttgctgcacaatatggtcagacagctttcctttaccacattgtttcaaaatggaatgctgaccctgatgttcctgataatgatggaagaagcccattgcattgggctgcttacaaaggttttgccgattctatacgtcttctgttatttcttgatgcacacaggggacgtcaagataaagagggttgcactcctcttcattgggctgctattaggggcaacttggaggccagtaccgtgttagtacaggctggcaagaaggaagatcttatggtgactgataatacaggcctgactccagcacagcttgcttctgataagaatcacagacaagttgcttttttccttggaaatgcccgaaggttgcttg

SEQ ID NO: 26518 - DNA, 458 bp, Glycine max
  Clone ID: TF_GmC27269_3
aaggactgtctttattacatttggctgcagtcttcaatcaaactgatatagttttcattctcatggattcgggggcaagcctggaatacagaaatgcccaaggagaaacacctttagattgtgcaccagctaccttgcaatacaaaatgcgaaaaaagatggaggaaggtggagcagtggaccaaagcatttgaacaatctattacttttatcagtgttctttttatgcagtcctcccaaagagagcttcaaatattaccactgtctaaagctcctctgttaccagaacaaaaaatttcgccttctgtataattgtgacagaggagttcaattcatcttggcagactaagtatgcagacctatataagacatatctttgtcagctgcgcaacttgggcagtattactattcagcttgtaaatttctttggtctgtgacataagagcattttttaatag

SEQ ID NO: 26519 - DNA, 259 bp, Glycine max
  Clone ID: TF_LIB3242-492-P2-K1-B6
ggaccgccctttggttgaggctcactttgagacatctcatgtatagcatctcgcgtctctgctgacgccacgtctaaaggcgtattgccatcactgtccctcacggatggatcagctcgatgtcggatcaacgtcttatagatgtcgatgttgtcggtgatcgcggcgtaatgtaatggtgtctgaccggcttcatcttgtatgtctatatcggcaccgttgtcaagcagtattttgagcagttgttggtgacctctgt

SEQ ID NO: 26520 - DNA, 2499 bp, Glycine max
  Clone ID: TF_GmC555_1
cttcaatttgattccttcgttgtttcgtcctgagagggtcagccatgacccaaaccctctcattctctctctcaccttcccagaaaaccctagaaattaattaaaaccatccaatcttcttttctccatttccccgatttttttttttttcatttctatttcaatcgcaacctcctcctccttccaagtcaacgcggatttcagaattctcgatccatgtcgtccgagatcgaggttgtcgaggaggtgcagtcccgcgacgagcaatcgggggcggaggagagcctccgtaatgacgtgtacacggcggcggcttacggggatttggagaggctgcagagattggtggagcaagagggttgccccgtctccgagcccgacggtttgggctactacgcgcttcagtgggccgcacttaacaaccgcactgccgctgctcagtacatcattgagcatgggggagatgtaaatgcaacagatcatactggtcagacggccttacattggagtgcggttcggggtgctattcaggctgcagagcttttactccaggagggtgcttgagtgctgccgatatgaatggatatcagacaacacatgttgctgcacaatatggtcagacagctttcctttaccacattgtttcaaaatggaatgctgaccctgatgttcctgataatgatggaagaagccccttgcattgggctgcatagaaaggttttgccgattctatacgtcttctgttatttcttgatgcacacaggggacctcaagatacggggggtagcaatcctattcattgagctggtagtttgggcaactcgtaggcctgtagcgtgcaggagcaggctggtgattagtaagatattagtctcgacgaagatattgagtgcattgaagaattaggtagctcagaggagggtataggaatgatgcacatggcaagaagctcgaacttagcaaatggagactcgcataaccattccgaatatgcaaggggcaatggaaatggccatcatgttattaatgtgaattccaattccaacagtacccactccaaaacaaatcatggtcatgttctttttaccgcattgtagccataattaaaaccagggccaaacctgctttcgacgatgcgcccttgggttttaggtgttggtttgggaatgttttacaggtgttgtcagcaaggattcctggttatttcaggatgaataagcatgattatcacgaaacaaaagatgatgacactctcttgaagattgatataaataatcttgctttgcttgctggaaattggtcccagctttgtgcaacatgcaagattgtcaggcctcttcgagcaaaacactgttccacctgtgatcgttgtgtggaacaatttgatcaccattgtccttgggtatccaattgcatcggcaagaagaacaaatgggatttctttgtttttattgttcttgaagttctggcaatgttggttactggtggagtttgtcttacaagagtgtgaactgatccacttgcacctcattcatttggggcatggattcagtatgttgctaacaatcacattggtgcaatatcatttctaatagccgattttttcctcttctttggtgtgtttactttgacagttgtgcaggctagtcagatatcacgcaatattacaacaaatgaaatggcaaatgcaatgcggtatagttacctcagaggtccaggtggtagatttagaaacccatatgatcatggtatcaagaagaactgttctgatttcttgatcaatggttacaacgaagacgttgagtgcattgaagaattaggtaactcagaggagggtataggaatgatgcatatggcaagaagctcgaacttggcaaatggagactcgcacacccatactgaatatgcaagaggcaatggaaatggccatcatgctattaatgtggattccaattccaacagtaccaactccaaaatacatcatggtcatattaatggtcatgttcattcttcgcattgtagccataataaccatggcaaaaccagaaatgacaacgttcccttgggcttgggtcttggccttggacggaacagatctgttacagcctcatcatgatatttacatacatgtctggtgtttgaacctaacctgtaatgtaacataggcacacatctgggttggtttacgttaattcaatttattgtggctcttttctaccacacccccatgtgcaattttgtgctgttacatttagtcgtcctcttatcgttttttctttctactttttgtaactaatttaagttgcattttaaagatgataagccttgaaatctatgtatgaaattcgaatgtatttgctagagcctagaggtcccgccccccttccttcctatggcggttgctacttgctagtgtgcggatgaaacaaatatatatatatatatatatactggtacaacttattctttttaataaattttcttacatatttaattttt

SEQ ID NO: 26521 - DNA, 1693 bp, Glycine max
  Clone ID: TF_GmC125239_1
gaaaatacaattacattgcatacctatagttctttcggccaggtttcctttttttgcaataagcctcaaacttccatggttgaagctcatgaattttgcaaggttttacgacttgataagaaatcctttactgaaatactgaagatatactttttagatggtcgtattgtcttgaacaatctccttgaggtaaaagacttgagtctacaacgtaagcttttggagtcagatttcaacctgactattggtaacatggaaacagagctggcaataaggatgaattttgctgcccatgatggtcatcttgatcttgtgaaacgtttgattggatttggggcagatcccaataagactgattacgatggcagaacacccttgcatatctcagcatcaaaaggatatgtagatatttcttcctatcttgttgagcaaggtgtaaatatcaactgtgcagataaatttggcaccactcccttgcttgaatgcatcaagaatggacacgaaagaagtagcatctatacttgttaacgcaggagctatctttaccattgatgatgttggcaattttctctgcatgactgttgccaggttgctctcgggcctctttcgcagggtcctgggtcgtggggtccatccatttcccaaaaattatgatcaacgtacacctcttcacatagctgcctctgaaggtttgtttacaatggcggaagtacttctagaagcaggagcgagtgttttatctaaggacagatggggaaatacacctcttcatgaagctcataccggtggggatagaaatatgatcaaaatgcttgaagtggcaaaagcttctcagttggttgagttgtccaataatattcatgaaactcaaggtatctatcttatgtttgcaacaccaacagatgaaggctcgagaaagagatgtatagtatttcctttccacccatgggatgatcagaaagcggatagaaaagagggagtggtcctaacggttccacaaagcattgaagagcttataaaggaggcgacaaaacatttggaaattccaaacgcttcctgtattttgtcagaacaatgtggcaaaattgtttatgtaggcacgattaacaatgatgagaagctatttctagtgagtgaagcacagaatgaatgaggtgaaatgttcagcagtaccaacaccactagctggttaatatactttttctttactccacaaatttttccattccagataagaacaatttttatatgtttgcagttattgtcaattagtactaataaacatcctctcatcactctttcaaccatggtacatgtcaacggatccaagttggtgacagggtatgtgaagttgactttgcaaaaacacctttctttctatgctatctcgatcgtagtcataatcccagtgcacaaggtcattcattgactacacctgccggttctttctcagtcttctccacccaatgttagaataaagggttgctttgtgggatgaatgagtaggatattggtggattgatctttgtcttcgaggtggagcttaattgtataaatatcatttttcctctttaattaagctagctagttttctcacgtgcttcaatcgcatgttccaaagtcgtaagaaccaagtattacattgttaataataataataaaaagtcacaagaacttttatcgtaaaaaaata

SEQ ID NO: 26522 - DNA, 621 bp, Glycine max
  Clone ID: TF_uC-gmroLIB3258P143a05b1
atggaatgtaccttttgacagagaacaagatctctccaacaagcctttttattatttcagaatttaggattgtttaaggtttgatgatttcgtgtcgggggtgtttgtccaaaagggaatttgaggccttttgatgaggctgtgaagagacccactgcttccaatttcccgaatagtgtttttgtcgtgatttctgagggacatgaagtttctgagcctggtggggaattcttttggatgttctgcatctggtgagcgcttagtttctgcagccagagatggggatgttcaagaagccaaggccttattggaatataaccctcgtcttgcaagatagtgtatctgttacttgagtccggagttgatatcaatctcaggaattatcgcggtcagactgcattgatgcaagcttgtcaacatggtcactgggaggtggttcagaccctggttatttttaatgccaatatccataaagctgattacctaaatggaggtactgcccttcacttggctgctttgaatggccatacccggtgcattcggctcatcctcgctgactatatacctagcgtccctaacttttggaatgcattacagacaggtgatcataaatcaatctca

SEQ ID NO: 26523 - DNA, 2071 bp, Glycine max
  Clone ID: TF_GmC37725_1
acgagtccccgtaagtcaaccgatggacgcatcacagcacctcgtctaattgcgggaattcagaagaaagaaaaagaaaagagagagacagagacatttgcgccttctttcttgcaatcgcgtttgaataaaaacaaaagaaattcctcttcttattctccctcgcgcgattcatttcattttctctttggaataacctgcagggttgcttccatttcaacatgtagagcgcgctctttgttgttttcatttctgacaagttctttttttttgttgcgttgcaaaatccttctcctcgaggcggcggcatggaaagcattgccgcgcagctgaagcgcggcatctcgcggcagttctcgtcggggtcgctgcggaggaacctctcgtggcagttcacgcgccaggcctcgctggatcctcgccggaacaaccagcgcttcagcttcggccgccagtcctcgctcgatccgattcgccgcagcccctgctccggcaacgccgagctcaccgtgccggagaacctggactccaccatgcagctcctcttcatggcctgccgcggcgacgtcaagggagttgaggatttgctcaacgaaggcatcgacgtcaacagcatcgacctcgacggccgcaccgccctccacgtcgccgcctgcgaaggccacgtcgaagtcgccaggctacttctcagccgcaaggccaacctcgacgctcgcgatcgctggggcagcacggcggcggccgatgccaaatattatggaaatacagaaatttattacatgttgaaggctcgtggagcaaaagtaccgaaaaccaggaagactccaatgactgttgcgaatcctcgtgaagttccggaatatgaactcaacccggtagaactacaggttcggaagagtgatggtatttcaaagggaacataccaagtagctaaatggaatggcacaaaggttgcagtgaagatacttgacaaggacagttattcagatcctgataccataaatgctttcaaacatgaactcacattattagaaagggtgcgacatccgaatgtggtccagtttgttggagctgtcacccagaatatacctatgatgattgtgcgtgagtaccattctaagggtgacctggcaagctatcttcaaaagaaagggcgtttgtctccatcaaaagttctacgctttgctcttgatattgccaggggcatgaactatcttcacgaatgcaaaccagatccggttattcactgtgatttaaagccaaaaaatattttgctggataatggagggcaattgaagatagctggatttggcactgtgagattttcgctaatctcacctgatgaagcaaagctggtacagccagagcctaacattgatctttcaagcttgtacgtggcaccggagatttacaaagatgaagtttttgatagaagtgtggatgcatattcttttggtctcattatatatgagatgatagagggtacacatcccttccatcccaagtcctcggaggaggcagttagactgatgtgcttggaagggaaaagaccagcattcaagatcaaaacaaaacattatcctccagagttgaaagagttgatcgaggaatgttgggatccaacacctgttgtgaggccaacattttctcaggtcattgcacggttggacaaaatcgttgcaaattgctcaaaacaaggatggtggaaagatacttttaaactcccttggaaataaataacaaagtacatactacgtggcaaggaagacatcaagttcagggttgcatcctcaaaaccaatttgtcagcttcatggtggtgtactgttaatagcccttgcaattaataattttggaattcgaataatattaacttgagcttggattaatttgagcgtgaaaatgaatttgcatggttcgtcctatgttcctgtctactagagggctggaacagctcctctctgtacaatgtaccataaaggagatataacatctcagaaattttcttataaaaatgtttttctataaacgtcttatggataaaaaaaaaaaaaaaaacgagactagttctc

SEQ ID NO: 26524 - DNA, 1948 bp, Glycine max
  unsure (1)..(1948): unsure at all n locations
  Clone ID: TF_GmC6794_1
acgcgtnnacgtaagnctcggnnaattcggcttcgaagcctagaatcaacaatgtggctgtaatggtaataccttgaatttgcggtctgaccattcttggtccctgtttggctggcagcctgacagcttcgttagtctgggcctctttgactggcatgttttgccccaacatcacaggccttactacagaccagtactgaaagtggtgtgaaccgtaatttcgtctaccattttcagataaaatgcgtccaaagtagtgcactgtcttcactgaccccccgggcattcagaaagataatagtcgacatgggattgtattatgcattccacactcttgccatgcgctaatcaaatcagcagctgaacaaatagaaatttctgcacggtccttgcaattgataataagatccaggaggaattatttattccagggggagtaataatggatcaaagaaatgttgtggatcaactatattttgtcggccatggagtactggaggaagtagccacttctgaacatgggactgcataaactgtttcacttctgcagcctaacagttcattagcagaaatatctattctttgctacattctttaaccatatactgaccgtgtttgttaactgagtacactcctgcgactttataaacaatcatttacaaatatcctagacatatacttttatgatggaaggaaagtattaaacaaccttctagagggaaaagaatcttttctggataagcagttggagtcagtaatcacatttcatattggaaagcaagaagctgagcttgcttttgaaggtcaatagtgcagctttcaatggggatatgtatcagctaaaagtttaattcgagcaggagctgatcccaacaaggcagattatgatggaaggtcacctttgcatcttgcagcatctagaggatatgaagatatcacaattttccttattcaagaacgtgtagatgtcaatattatagataacttcgggaacacacccttacttgaagcagttaagaatggacatgatcgggttgcttctttacttgttaaagaaggggcctctatgaagatcgaaaatgctggtagttttttgtgtactgcagttgcaaggggagattcagattatcttaaaagacttttatccaatggcatggatcctaacttaaaggattatgattaccgaagtcctcttcacgttgctgcagctgaaggtttatacttcatggcaaagttgctattagaagccggagctagtgtttttacacgagacagatggggaaataccccgcttgatgaagctcggatgtgtggaaataagaatctgatcaagctactggaagatgcaaaatcttctcaactgtcagaatttccatcccaagaatttacagataaaatgcatccaaagaagtgcacagtgttccctttccacccgtgggatccgaaagataatagaagacatggaattgtattatggattccacactctatcgaagagctaatcaaatcagcagcagaacaaatagaaatttctggcggttcttgtattttatcagaagatgctggtaaaattactgatgtggacatgatcaaggatggtcagaagctgtatttagtccatgaaacacattaggcctccatattatggctctttacaaccatataattaagtgccttgtaatgtgttgtgctttctacaaattagcacgtgatttgatcttgttaaccgttcaaaaactgttttatatatcctgtcaaaatacagacgggtgatgaagatcaatactgcttagtgttgataccgtgatttcaatactgcttagtgttggtcatccattttgctattcagtattggctcggaagatttctttgtttttcttgtctgagcattaatattaattaagagatagttaattgaaacaaaaaagaaaaaaaaattattgtgggc

SEQ ID NO: 26525 - DNA, 961 bp, Glycine max
  Clone ID: TF_GmC262_1
agcttgattaatactaccaactacaggtattgtgagctctcagctgtgcaattacattacaaccttaatcgcttagcatacgtaaatcatggctcgagtgagaattgacgtggatttcccaagtccagatgcagcttcacaagtgggactactgcataaggaaattgttggaaaagctatgatttacaagttgtctgaagctgttgaagaaggagatggtgctaactttgttaaggtgttgaagcaacaatgtgaggaaaataagctacgtttgtctgatgtttttgataaagtcaccctagcaggtcattcactgcttcatgtggcagcagatatggggcaaaaaagtattgtgcaggtgctttgtgatctctttcctttgcttctaattaggagaaatgtaagaggtgacactccacttcatgttgctgcgaggtctaagaaatatgagacagtcaagttgattctctcccaatatgccacaaagaagtcaacatatgatgagatgaaagataaaaagataacaagagaaacaaatgaatgtgggaatactcctttgcacgaggctgtctacagtggggatgttgatgtggttaaagagaatttcgaccaggataaggctgtagcctattgtttgaacaagtcaaagagatcaccactgtgtttggcagtggtgaatggtaatgagcaaattctcgaacttctgttgcaaattccattacctgcggaccagccgctttcacagtgtcgtcgaagttctccactccacacagctgtacagcatctcgaacttctgttgcaaattccattacctgcggaccagccgctttcacagtgtcgtcgaagttctccactccacacagctatacagcatcagaaaagagttatgatactagcgataatagaaataaggcccgagctagtttatttaagggatgaagacggaaatactcccctttca

SEQ ID NO: 26526 - DNA, 5103 bp, Glycine max
  unsure (1)..(5103): unsure at all n locations
  Clone ID: TF_GmC201_1
agacgttactttctctattctcaaagtcacacacagcactttctctctcatcttaactctctcccatgtttcctcagtttcatcgatggagagtgaagccttaactctgcttattccgtgtcccagatctcgttgttgcttccgattctttgattcttcgcttctttcttcttctcacttcacattccgattcgtcgcagattcttttggtttctaaacatcatgatcgtcactgcctccatctgtaatcggtgattttctctcttttctctcagctcatgaatttttcctttttctttattagctgatgaatttacatgatcatcgagtaaatcactttttttccttctatttttatagtttgaattgttttttctattttcagtttctttttacacttgtcttgttattatgtttaatcctgtaaagatgattctagatttaccttagatctgngctctaggtgtggttcattttttacgattaacgggggtccggattcccgggtcgacccacgcgtccgcggagtgggcggacgcgtgggcggacgcgtggggtgaatttcgcgtgtggggcgaacaaaaccactgccctccactgtgctgcttctggtgcatctaccaaggctgttgatgccgtcaagcttcttttatcggccggggccgatgtcaattgcgtggatgcaaatgggaatcgccctattgatgtgattgctgttcctcccaagctgcaaggtgcgaaagccgttcttgaggaacttctttcggacaatgcttctgatgtgtctgttggtgaattctctgtcccggtgtctgttaattcttccagtccgggttctcctgcccattcgtcgaatgggatgccgtacactccttcggtttcaccgccatcccccgtggctgcaaagtttactgatgcagctatttgttctttgtcggagaaggcgagggaatacccgattgatccatcgctgcctgatataaagaacagtatatatgcgactgatgagtttcggatgttttcgttcaaggtgagaccttgttcccgggcatactctcatgattggactgagtgtccttttgttcatcccggagagaatgctcggaggagagaccccaggaagttccattacagctgtgtgccgtgccctgattttagaaaaggggcttgcaggcgtggagacatgtgtgaatatgctcatggggtgtttgagtgctggctgcacccggctcagtatcggacacgcctctgcaaagatggcaccagttgcaatcgaagggtgtgtttttttgctcacactgcagaggagcttcgtccgctgtatgtgtccactggatctgctgccccttcgccccgttcatctgcttcaggtcctaatgtcatggacatggctgctgccatgagcctttttccgggatcgccttcatcgggctcttccatttcactttcaatttctttctctctagacgttactttctctattctcaaagtcacacacagcactttctctctcatcttaactctctcccatgtttcctcagtttcatcgatggagagtgaagccttaactctgcttattccgtgttccagatctcgttgttgcttccgattctttgattcttcgcttctttcttcttctcacttcacattccgattcgtcgcagattcttttggtttctaaacatcatgatcgtcactgcctccatctgtaatcgctaattgaaggcatgggaggtggtccagagaaatcaaaatctccttcaacttcgtcttccctttaggtgtaaaagtcacagctaacgataaagaaatgaaatcgctaactgttaatactgaagattctttttccagtttgactggaacttgcttctaacaatgatattgaaggcttcaaggtgcttttagagaaagattcttcttcgatcaatgaggttgggctctggtatggccggcaaaacggatcgaagcaatttgttcttgagcacagaacccctttgatggttgctgcaacttatggtagcattgatgttatgaagatgatactgttgtgccccgaggcctgtttttgatggccatcagcagcgaacttagaatgacctggctgttaggtaccgccgcggcctggtaccgcttctgtgagtgcatctggtcggtccaagatcctaactccatcaattcttgacgttcgttttagtgctgagatttccactgctcccggctcatctgatccatcagcgggtaccccgtgtccaactagggacctactcatgggtctggaaaagttgattggtcagtaaatggaaatgagttaggtcgattgcagagatcatcatcatttgagcttggaaacactggggaggagcctgatctatcctgggttcaatcccttgtcaaggaatctccgtccgagataaaagagaagttgacaggttctggccctgttgcatctgttgatggaccgagttcaaatccaaagtcaaatccgcaagttgagtctgttgatcattctgttctaggagcctggcttgagcaaatgcagctggatcagcttgtagtctaatcaaatttgacccattccatcttgtgataggtatttaatttcacaacgtattctttttgtcaatttttttgggtggagcaaggagagggaatgtaatgatactgaagcgagggatggctgcaaagtacccgaatgataatctatttttccccccccattattttgtcattcattgttttactaaagagcttcagggggagtggtaagaaaccctctctctggggttgatgatatcccagtaaaaaagaaaatattcttccaaaactctagtttcaggactcttttcttcattttattcctagccatggaaaaaccaagagcctcatatttgtattcaagttcgttttcttggtaggaatctccttgtcgccgtcccactttgggcagccaatgtccccatctgcaaatggcatgccactgtcttctgcttgggctcagccaaatgtgccggctcttcatttaccaggaagcaatcttcaatctagtcgattgaggtcttccctaagtgctcgtgacattccaccagaagacttgaacatgatgtctgatcttgatggccagcagcagcaccatctgaatgacttgagctgttacatacagcctcgccccggtgccagttctgtgagtagatctggtcggtccaagaccctaactccatcaaatctggaagagctcttttctgctgagatttctttgtctccccggtattctgatccagcagccggttctgtgttttcccctactcacaaatcagctgttctcaatcagtttcaacagctccaaagtatgttatcacctataaatactaatttgctgtctcctaagaatgttgagcatcctctttttcaggcttcttttggtgtctctccttctggaaggatgtcaccaagaagtgttgaaccaatctctccaatgagtgctcgtttatctgcatttgctcagcgagagaaacagcagcaacagctgcgcagtgttagttcaagagaccttggtgccaacagtcctgcctcacttgttggctcccctgcaaacccttggtcaaagtggggttctcctattgggaaagctgattggtcagtaaatggagactcccttggtcgtcagatgcgaagatcatcctcgtttgagcgcaagaacaatggggaagagcctgatctctcttgggtccaatctctggtgaaggagtccccacctgagatgatcaaagagaagtttgcatctcctatgcctactgcatctgctgatggaccgaattcaaattcccaaattgaatccattgaccattctgttttaggagcctggcttgagcaaatgcagctggatcagcttgtagtctagtcaaaattgaccctttacatatcttgttgagataggtatttaatttcgtaaggtacatattcttttggtgaaattttttgggaagacaacaaggaaagaagtgtagtaaaaggaatggaggattggttggctgcgaagttacctgaaggatattctattttttcttctttttttaaataataattgtcattcattattttactacagagcttcaagagagttgaagaagctctctctcttggggctgaaattcaatagtaggagaaaaatcctgtcgaggttatctatttttcttccaaaacggccccgtttcaggatttttccccttgctattttacttgatttctgagttcactatcaagcaagctagtttggtttataatggaacaaaaaccattattagcctgcgtttgttttgaaagatttttctgaagttcactaagttaagccaagtcaatgatttgctgttgcctatggttgaagttgtttctttctgagggaataattagagatgatctgcactgttgaatatttacggcagataaatgagatagtgaagtttacattgttcttcctgttaagctgtgttaccttgaattgtactggttatatatatccatttcgtttctaattcaaatcaaatgtaatgtttttcttttaaaaaaaaaaaaaaaaagtggagcaagggggaatgtaatgatacttaagcgagggatggctgcaaagtacccgccacgcgtccgatttttttcccattattttgtcattcattgttttactatagagcttcaggggggaggggtaagaagcccgccctctctctggggtgcgatgatatccccgtaaagaagatgttcttccttaaaaaatctagtttcaggactcttttctttcattttattccgagccaagcaaaaccaagagcctcatttgtattcaagttcgttttcttggtaggaatctgttagtatattgctattgcatgtatagaagactagagcgtgtttcttgttaaggaattagaggtgatctgcgccattaatattcattgctggcagattgtttagatatagtgaaggctactgtgtatgtattggttatttttcaaatttaatgtaacggttcatttatgggtattattcaatggaaattatgaatattgaaaaaaatagtaaaactaaataaattaaattaatgaaaagaag

SEQ ID NO: 26527 - DNA, 2246 bp, Glycine max
  Clone ID: TF_GmC58601_1
cgaggctagatttcaaatttcacatcactctgtctttatcttttatctatggcacctacagcagcaatgcttttgctctctcacaatggcaaaacacacgcaccctcatcatcatcatcatctgcaacaacttattattctagtttgaaagcctctgcattcaaatgggttgccaaatacaaccccgtgcccaaagcaagatcagaaaataagaggatgaagtgagggagagtgggaggaactaactggggaaggaaaaggaacacatgtctgttcaccgtggctctagcattctcattcggctcgacattttcttgccccaatcccaatcccaattccaaaccctaaccaatttccatggcttcctcggagatcgaggtggtttcatcatcatcatcggtctccaaacccaacaacgaccagcctccaatcctcgacgttttcaccgcctctgctcacggcgacttcaacaaattgagaaccttcgtcgaacaagacggtgcctccgtctctcttcccgattttagcggctattacgctcttcagtgggcctcgctcaacaactttcacgacattgcgcactatctcattcagcatggggcggatgtcaatgctaaagacaacatgcaacaaacggcattgcactgggcagcggttcacggttcaactctagctgctgatgtgcttgtggagaacggtgctcgggtcgaagctgcagatgtaaatggataccgggcagttcatgttgctgcacaatttggacagacagctttcttaaatcatattgtagtaaagtaccatgctgattttgatgtgcctgataatgatggatggagtcctcttcattgggctgcatataagggatttgctgacacaataagattgcttctatttagagatgcaagtcaaggaagacaagataaagatggttgtacaccgttgcactgggctgcattaagaggaaatgcagaggcatgcactgtgcttgtacatgcaggcacaaaggaagaactgatggtgaaggacaattctgggaacacacctgtacagcttgcatatgataaaggtcatcggcatgtcgctcctttcctttcaaatcaacaacgggctagtagaaactactggaaagggaaactgtgtagtgggatagtgacagatattggttatgctcccatcttattttgtactataatctttctctcgatcctcttcatcaactcagtcgttgcagctcctaaccttaaaaagattactgccgttgttggactttgggcatggacggcgctttcttcggccgttggttccctgattatgttctacaagtgtagtagtaaagatcctggttatataaaacgaccgggagacttgggtactcaaagtgatactgaggatccgttattgaatattgatctgaatagttcctctgtttggatgggaaattggtctcaactttgccctacctgcaagataataagacctgtccgatctaagcattgcccaacttgtaagcgatgtgtggaacagtttgaccaccactgtccatggatatctaactgtgttgggaagaggaacaaaagggatttctttatttttatctgcctgggaactttgacttcttccctttctggtgccgttgcagttcaaagaatttggacatctaaaccagcattactggcaggagaaacatggatccattatgcgttagtaagacatctaggtttagttgtgtttttggtgatggatgctgttgtttttgttgcgactacgacattaacgataacccaggcttccatgatagctcgaaatgtgaccacaaatgaactagcaaattcctcccgttatgattatcttcgtggtcctgatgggcggttcagaaacccatacaaccacggttgttggaagaattgtgctgacttcttttttctcggctatacaaatgatgatgagattgcttggcctccattacagcaggtggcaacttagaacattctcccatgctgtgtccatgcatcctttgttatattatcacattgttccaattatatgtagatgatagtcattttcagctaggctttcattctctgacacatgtacattttattacagaacccaaagaaataaaacatttttattttgggccatcagaaaatacaaattattttgataccctcctgtaccagttgtgcaattgtttggtgggatacccattactttagaaggaaatgcatttaaaggattggaactag

SEQ ID NO: 26528 - DNA, 2026 bp, Glycine max
  unsure (1)..(2026): unsure at all n locations
  Clone ID: TF_GmC84_1
gaaatttacgaattacgagaagagaaaaagagtttctgagttgacattaaagatatcgttgaggtaaaggaccaacaccaaccaaaaccaaattataatagaacgcggaagaagaagaagaagtaaccgacgcttgaataaaccgaccctattccgttgttttattccaattgacttgattttctcggaaaattcttattttccgagaaagttcgtgtttttactgttgaatcgggaattcccaaatcggggtgtctgaaattttgagctgtcggaaccgttcttcgattcgggttcaagttcgaagaagaaaagcgatgagttcgggtagtagcagcagccacagcagtgagaaggagaaggagaagcagagagtgagtcgcacgtcgctgatactctggcacgcgcaccaaaacgacgccgcagctgtgcggaagctcctccaggaggatccctcgctcgtcaaggccagagactacgacaaccgcacgccgctccacgtggcgtcgctccacggctggatcgacgtcgccacctgtctcatcgagttcggcgccgacgtcaacgcgcaagatcgctggaaaaacacccctctggcggatgcggaaggagctaagaagagtaatgtgatcgagcttttgcaatcgcatggaggcttgtcttttgggcaaaatggaagccatttcgagccgaagccggtggcgccgccgttgccaaacaagtgtgattgggaagtcgagccgaccgagcttgacttctccaactcggtgcgaatcgggaaggggtcttttggtgagattttaaaagcccattggcgtggaacaccagttgctgttaaacgtattcttccatctctttcagaagatagattggtgattcaggacttcaggcatgaggttaatttgttggtgaagcttcggcaccccaatattgttcagtttcttggagctgttactgacaggaaaccccttcatgttattactgagtatctaagagggggtgatcttcatcagtacctcaaggaaaaaggcgcacttagtcctgcaacagctatcaacttttccatggatattgtcagaggaatggcctatcttcacaatgaaccaaatgttataattcatcgagacctaaagccaaggaatgttcttttagtcaattctagtgccgaccatttaaaagttggagattttggatttgagtaagcttatcacggtccagagttctcatgatgtatacaagatgactggtgaaactgggagctaccgctacatggctcctgaagttttcaaacatcggagatatgataagaaggttgatgtgtactcctttgcaatgattttatatgagatgcttgaaggtgaaccaccttttgcaagtcgtgaaccttatgaaggagcaaaatacgctgcagagggacacaggcctcattttcgggcaaagggttatacccctgaattgcaagagttaacggagcagtgttgggctcatgacatgagtcagagaccatccttcatagagatccttaaacggcttgaaaagatcaaggagaatttacctacagagaatcactggcacttgtttacctcataaatgtctaatagcattaatttgttcagaaattaagatgatttatttaacattaccattctctggtttggtgccggatttatggataggttgagcaaacaaacctgcaaagtcaatacttgttttcaactgtttggattaatgagcagaaaaggtgatgttgattgccctgacattagattctgacatgaataaagcctttggttgctattttttatatcatgttacagttactttaaccaaatagagacatatagcagcaaattctgtcgttactgttctatttttctactcttggcatctttgtgtccttttagttgcatgatgattgcttctggctcggggctggcctcaggtaccgtaaccaaatananacatanagcagcaagtctgtcattactgtttnatntctactcttngnctctgcgtgccccttcac

SEQ ID NO: 26529 - DNA, 630 bp, Glycine max
  Clone ID: TF_GmC84_6
ctcgagccgaatcggctcgagtacggctgcgagaagacgacagaaggggggggcagcaaatgcaaagcataaaagtataatataccccacgcgctttaatcccccgacgaaatttacgagcaagaataaaaaaaaataaaaattatgaggtgacattcaaaatatcgttgagcaaaggaccaaccaaaaccaaaaccagaagataacaattaaaccgttcttcttcgattcaagttcgaagaagaagcgatgagttcgggtagcagccacagcagtgagaaggagaaggagaaacagagggtgagtcgcacgtcgctgatactgtggcacgcgcaccaaaacgacgccggatcggtgcgcaagctcctccaggaggatccctcgctcgtcaaggccagggactacgacaaccgaacgccgctccatgtggcgtccctccacggctggatcgacgtcgccacgtgcctcatcgagttcggcgccgacgtcaacgcgcaagatcgctggaaaaacacccctctggcggatgcggaaagagctaagaagagtaatgtgatcgagctcttgcaatcgcatggaagattgtcttttgggcaaaatggaagccatttcgagccgaagccggtagcg

SEQ ID NO: 26530 - DNA, 2960 bp, Glycine max
  Clone ID: TF_GmC201_3
catccgaaacttatcggtcgcatatatgctgttctttatatcaggcagcgatggatcaattgggtattccttcttctccgacaaagagcaaacagctgcatcagtaaactttgccaccacaggagatggcggtgaggaggcggaagaaggagtatacggcatcccattcgaggaatggccaggagaacccagactggaagtattaacagacactgggacagagaattcaccaattgagccttcagaagcactgtccgagagaagttccattacagctgtgtgccatgccctgattttaggaaaggggcttgtaggcgcggggacatgtgtgaatatgctcatggggtgtttgagtgctggctgcacccggctcagtatcggacacgcctctgcaaagatggtaccagttgcaatcgaagggtgtgtttttttgctcacactgcggaggagcttcgtccgctgtatgtgtccactggatctgctgtcccttcgcccaggtcatctgcctcggctcctaatgtcatggacatggctgctgcgatgagccttttgccgggctcgccttcatcggttcttccatgtctccatctccctttgggcaaccaatgtccccatccacaaatggcatttctcattcatctaatgcttggccacagccaaatgttccagctcttcatttaccaggaagcaatattcaaactagccgattgagatcttctcttagtgctcgtgacatgccaccagaagacttggatgtgttgcaagattttgatggccagcaacaccttttgaatgacttgggctgtttctcgcagccccgtcctggtgccatttcagtgagtcgatctggtcggtccaagacactaactccatcaaatcttgatgaactattttctgctgagatttcttcatctccccggtattctgatccagcagcgggttccgtgttttcccctacgcacaaatcagctgttctcaatcagtttcaacagctccaaagtatgttatcacctataaatactaacttgctatctcctaagaatgttgagcatcctcttttacaggcttcctttggtgtatctccttcgggtaggatgtcaccaagaagtgttgaaccaatctctccaatgagctctcgcatatcggcatttgctcagcgcgaaaaacagcagcagcagcagcagcagctgcgcagtctcagttcgagagacctcggtgccaacagtcctgcctcacttgttggctcccctgcaaacccttggtcaaagtggggatctcctaatgggaaagctgattggtcagtaaatggagacacacttggtcgtcagatgcgaagatcatcctcgtttgagctcaagaacaacggggaagagcctgatctctcttgggtccaatctctggtgaaggaatccccacctgagatgatcaaagagaagtttgcatctcctatgcctactgcatctgctgatggaccaaattcaaattcccaaattgaatccattgaccattctgttttaggagcctggcttgagcaaatgcagctggatcagcttgtagtctagtcaaaattgaccctttacatatcttgttgagataggtatttaatttcgtaaggtacatattcttttggtgaaatttttggaaagacaagaaaggaagtgtagtaaaggaatggaggatcggttggctgcagagtcacatgaaggatattctattttttcttttataaaataattgtcattcattattttactacatagcttcaggagagctgaaaaagctctctcccttggggctgatcaattaatagtaggcgaaaaatcctatcgaggttatctatttttcttccaaaacggccccgtttcagggttttcgcccttgctatttcactagagttctgagttcacttcactatcaagcaagctagagttctgagttcactatcaagcaagctagtttggtttataatgcgacaaaaaccattattagcctgcgtttgttctaaagatttttccgaagttcaccaagttaagccaagtgaatgatttgctgtttgcctaaggttgaagaagttgtttctttctgagggaataattagaggtaatctgcactgttgaatatttacagcagataaatgagatagtgaagtttacaatgttcttcttattaagctgtattaccttgaattgtactggttatatatcatttcgtttcaaattcaaatcaaatgcaatgtttttcttttcaccaattgagccttcagaagcactgtccgagagaagttcctcgagaacggcttttgcaccttgcagcttcggaggaacagcaatcacatcaatagggcgattcccatttgcatccacgccattcacatcggccccagccgataaaagaatcttcacagcatcaacagcattggcagacccaccagaagcagcacagtgaagagcagtggttttgttcgccccacacgcgaaatttacatctgcctcggggcacaacagtataatcttcataacatcaatgctaccataagttgcagcaaccatcaaaggggttctgtgctcaagaacaaattgcttcgatccgttttgccggccataccagagcccaacctcattgatcgaagaagaatctttctctaaaagcaccttgaagccttcaatatcattgttagaagcaagttccagcaaactggaaaaagaatcttcagtattaacagttagcgatttcatttctttatcgttagctgacttttacacctaaagggaagacgaagttgaaggagattttgatttctctggaccacctcacgtgacttcaactaacgattacaggtggaggcagtggcgatcatcaagtttagaaactgaaagaatctgcgacgaatcggaatgtgaagtgagaagaaaaaagcgaagaatcaaagaatcggaagcaacaacaacgcggacgcgtgg

SEQ ID NO: 26531 - DNA, 1107 bp, Glycine max
  Clone ID: TF_GmC770_2
aagaaaaggaaaaatccaaaatgaattcctcctagtccaagccctcgtgctgtgtttctttctctgaactttcctctttctttatctgtttccacccattccttcctttatttttctaattctgcatctctctcataataatcatctccaaaacaaactcttgttcttactccactctgctctgctttcttccaccattgccatggcctcccactcaaaccaaccaggacccggagctgaagggcaaggtgagaaggacccattttgtgagatatcgccgtctccttctccatcgtcggcgacggcgccggcgctggtgctgtcgaactcggggaagcgaatcgaccaggcggggaagaagaagtacgtgaagcaggtgacggggcggcacaacgacactgagctccacctggccgcgcagaggggcgacgtgggcgcggtgaggcagatccttgaggatgtggattctcagattatgcgtactctgagtggcggcgacgacgacgttgatctgaacgcggagattgcggaggtgcgtgcttgtctggtgaacgaagagaacgaaccgggtgagacccctctgttcactgctgctgaaaaggacaccttgatgtggtgaaggagttgctcaactattccaacgctcagacggtttctaagaagaaccgatccggatttgatcctttgcatattgcagctagtcaaggccaccactccattgttcaggttttgctagattataaatccgggattgagcaaaactattggtccctccaattctactccgcttataactgcagcgacaagaggacacacagaagtggtgaatgagcttctgtcgaaggattgtagcttgttggagattgctagatccaatggcaaaaatgcgttgcatttagcagctcgtcagggtcatgtggagattgtcaaagccttgctcagtaaagatcctcagttggctcggaggaccgacaagaaagggcaaactgcattgcatatggctgtaaaagggcaaagttgtgatgtggtgaaattgcttcttgaggcagatgctgctattgttatgcttcctcttggtttgaataaattatatttacttttgttatt

SEQ ID NO: 26532 - DNA, 1061 bp, Glycine max
  Clone ID: TF_GmC150_2
cccacgcgtccgtacggctgcgagaagacgacagaagggggtaacaaaaataacgtgacactgctaagagagtgagagaaattggcggcggcggtggcggcggcatagagtggaagtagtaaggatcaatggcagttccagggaggcgcaacggcatgaacgacgacgaagaggaattagacgacaacgcccttttcgaagaacaaggtgccgtcgaagacgacgccgatacccctcctcacctccgcgacctctccgccgccgctcagctaggcgacgtccacgccctccgtatcgctcttgataacttgactggtagtattgatgagccagtggaggatggggatactgctcttcatttgacatgtctatatggccatttggcttgtgtccagctgctactagaaagaggggcgaacattgaggctaatgatgaagatggtgctattcctttgcacgatgcttgtgcaggaggatttactgagattgtccaactgctgcttagcagagctaatgatgctgaacatataaagagaatgctagaatcagttgattctgagggtgatacccctctccatcacgctgctagaggtgagcatgttgaagtaattaggttgttgctgtctaatggtgcatctcccacaaaggctaacttatacggaaaggcccctgcagatttgcctgaacaggaagctgctcggaggctgcttgaagctgcagctcttgccatggcatgccaatagcatatcagtagaaatatttagttccattttgacagagatgctacacttttcggaccataaaaactgtatttcatacacactctttcttcgaagttcaaaaagcaaaatgatttattagaggagcaccatagggagttttaactttcgagagagataaaaatgaggattcccggggattacttatagtggacaaacttgtttgtttcattagtttgcttatttgaaatgtatttactcttcaacatgtcagtgaactatgactggatagttatacttgtcattcagtttgtggcataatgttgctggttagattttgat

SEQ ID NO: 26533 - DNA, 1234 bp, Glycine max
  Clone ID: TF_GmC6697_1
atcatggtgtttttttttcccctaaaaattaattgtcaggttctttccatgttgttggacaggaatatgaacgttgacatagtgaatcacaataatcagaccccgttgatgtatgctgcaaagcagggaaagattgattgtgttaaaaagcttatccaggctggagcaaatgtattcatgattgattctgtacatggaggaggttgcttgcacgatgcagcttctcatggccacgtagattgccttaaagccattctttttgctgctcatttcacagcttttgaagattctcggggatatttaagatttgtcgactcgagagattttaacggttttgccccactgcatcttgcagccctcaaaggacaatctgaatgtgttgatgcccttttagacaatgatgctattctttgtgctagaactagtaactgtggaggcacagcacttcatttggctgcccgcagtggttccttggactgtatccggattttgcttgctcggggagctgatagacttcaatttgattatcatgggaatacaccatacacaattgccctggagcacgggcaggaggaatgtgctgccctgctaggttctacgtcgggatcatcacttgtttggccaaaccatttaaggttcatcagagagcttgataagaaaacaaaggccttactggaaaaggccttggtagaacttaacaaggagaggcagaaagccaaaaataagccacgatcatcacggaattcggagagaaataacaataatattgcctctatggccggcaaaaaggagttatgttccatttgctatgaccgagtgtgcacatttgtggtcagaccctgtggccatgaaatgtgtgctcattgtatcatgaggctatgccaaaagaaaagtgatattgatgcacctcgctcttctaattctaaaccagtttgtccattttgccgtggtgacattgttcggttacttgctaagactaagtaacaagagcagtgaatcaagggaggagtgaggaaccttgaagactaattaactactgtattttttcatgaaggcatcaaggtttcttaataggtggagatttagaatgatacacatgctatgtatttctgctgagagattattaggtcgtatattgaaataaaatttaaatgttatataagcattggctgtgactattaatatagagaacctaacagtattttcttttgtcacatcaatttatattttcaac

SEQ ID NO: 26534 - DNA, 438 bp, Glycine max
  unsure (1)..(438): unsure at all n locations
  Clone ID: TF_jC-gmX3055013C01sg22N19b1
tttggtgaagtttttaactaagttcttagttaaactaaaataccataaatatatatatatagtcattaatgtgcgggaaaaaaaatcaagctagtaatttggtgtgaattagaaggaataccaggattccgtttcagtatagctgcatggagtggagagtttccaaagcacagtggaagcttctgatctgcagagaatggaatatccaatagaagattcacgattgccacattgccactcgcagctgccaaaaacagtggtgaacacctagacttgttcaattcatggaccatatccttatctctatgtaaaatgacttgaagcacacttagatctccattattgacagcctcatgcaaaggagtatccccaagatcatctttctctcttgttatctctttgnctttcatcacatcatgggttgacttcattgatgca

SEQ ID NO: 26535 - DNA, 1620 bp, Glycine max
  Clone ID: TF_GmC157145_1
gcttcaagccacagagaaacagaaactcaactaaatatccgccaaatgcaatatgtaatggcaatgctgcaagcaacacaagatctacccgagggtgcaccgaatctccccgtgatacaaagcatgactattatacgtgtcagtggagtgagaatgcaatagtagcagcgtagcactcttggttgttagagtgggctccacaagatcaacgatatttttatttattttattttcatttttccatcacggtgaattcgttagaaaaagtgaaaaaccatgtcaaattaaaaaccgacacgtggggatgggtcgtaacgatttcagtgtcacgagactatcattttcttttttctcatctatacccccgcaccaccaatccaaatcccacagggttggtagatggaggcactagtggaagtgtgtgaacccgcagaggttcgaattgagttcgcactgaactgcaaatgtcgagccacggttcggattcggtctctaacccaaaccacaccagttgccttcaagatccaaacctcatcaccaaacaaattcctagtcaacccgcccagtggactcattcaacctctatcctccgccaccttccaagtcattctaaagccacagtcccacctccctcactcctaccctcgctccccctcggatcgtttcctagtcaaaacagccgagttctgtgctaactcgtcctgctcaactcaccccgagtcaatcaactcgtggttcgcctagcgcccctacgggttcaagactctggacatcaaactgaaggtggcattcgttggccccatcctcctcaacgacgccgtcacgcgcggagatttagacgcggttaggaacttgattaaacgacagcgttccatgctcgccgagttgtcacccacccaagccgagacgctcctcggagccgccaccaagctgctcaacccggacgacatggttcacctcctcctcgaagccggcttgagaataatccccaatcccaataatgcccctgatcaagtacacgtggcagatacaaatacaaacataaatgagggagaagaaatatttgaggcttcgaggaacggacacgtggcggaagtggaatcgctgttacggagatgtggtgggagtgtgaagtaccgtgaccagtatggtctgacggcggttcacgcggcggcttttaaagggcacaaggatgtgttgatggtgcttagtgaattatcggatttggatttggaatgtgaagaccgggaaggtcacgtgccgcttcacatggctgtggagagtggcgatgtagggaccgtgaaagtgttggttgagaagggagtgaaccttaatgctgtgaataagaggggtgctacccctttgtacatggctaaaatttgggggtatgatgatatatgtcaactgcttgttagcaggggtgccttgtattctctaacttcgacttcgggttgaaaatgtatctgtaatgaaatcttagattgtttaacaagttcagcataatgatgctgcccaatgttgttacttgttattgggacttgggagtttcccatgaataagtttctacttaaattactatttgatagaggtagtaaaaatgtgtaagggtcttcttaaaaa

SEQ ID NO: 26536 - DNA, 1759 bp, Glycine max
  Clone ID: TF_GmC84_3
ccgaggagggcggcgatcggcgatgagcagcggcggcggatcgtcagaggcggcggcggcggcgaaggagaaggagaaggagaaggcgcgtgtgagtcgaacgtcgctgattctgtggcacgcgcaccaagacgacgccgcagcggtgaggaagcttctggaggaggatccatcgctggtgaaggcgagggattacgacagccggacgccgctacatgtggcgtcgctccatggatgggttgaggttgcgaattgcttgatcgaattcggtgctgacgtcaacgctcaggatcgttggaaaaacactcctctggctgatgcagaaggagctaaaagaactgccatgattgagcttttgaagtcacatggtggcttgtcgtatggccagaatggaagccattttgaaccgagtcctgttcttcccccattgcctaacaaatgtgattgggaagttgacccttctgagctggacttctccaattcagtttgcattggaaagggatcttttggtgagattttgaaagcccattggcgtggaacacctgttgctgccaaacgtattcttccatctctgtcagatgatagattggtcattcaggacttcaggcaggaggttaatttacttgtgaagcttcgacaccctaatgttgttcaatttcttggagctgttactgacagaaagcctcttatgttaattactgagtatctgagaggaggtgatcttcataagtacctcaaggacaaaggtgcacttagtccttcaacagccatcaattttggcttggatattgctagagggatggcttatcttcacaatgaaccaaatgttatcattcatcgagacctaaagccaaggaatgttcttttagtcaactccagtgctgaccatttaaaagttggtgattttggacttagtaagctcattaaggtccaaagtgctcatgacgtatacaagatgacgggtgaaactggaagctaccgctacatggctcctgaagttctcaaacaccggagatatgataagaaggttgatgtgttctcctttgcaatgattctgtatgagatgcttgaaggtgaaccccctttttcaaattacgaaccttatgatggagccaaatatgtggcagaaggacacagaccttcttttaggggaaagggttatatccctgaactgcgagagttaactgagcagtgttgggatgctgacatgaagcaaagaccttcattcatagagatcattaaacaccttgaaaagatcaaggaaaatttgccttcagatcatcactggcacttgttcacttcatgatttttaggagcattggtgccgtgaaattcagatgattatctgctattaccattccagcgggttgccttatctactgtcgcgggtttttgaacagagccgacttggaaaacctagctaaggtcatgagcattgctttgaactgttagattcaaatgagcataacaggtttatgctgattgcctttatctggtgtttacattcaattactgttttttgtctcattaaaattcttggcgaattctattcagctatttaagtgagcagatactagttgttgcttgagtgtaatatgtagggtacaaaacccattgaggaaaaatataacacatcatgcaatctagtgtttaatattttatcttatgattaaaaattaatagcggttttcatttcttggatattgtttgaccaattcttctgttcaatgctaccaactactatgagattctctttctc

SEQ ID NO: 26537 - DNA, 568 bp, Glycine max
  Clone ID: TF_GmC411556_1
attcggctcgagctctagccgaatcatattgttcaaatcatggatcttgatcatttgaaaggtcctttcgacgatgatccaagctggaaagagagatgcaacaagaggatggaggaactgaagaacacacaattctcaagtcaagatgcagcttcacaacaggaactgctgcataaggaacttgtgggagagaaaattgttctaattcctgagttgtataaagctgttgaggaaggaaatgtgaacaagtttcttgatgtgttggagcaagaatgtaaacaaaggaaattgaatttgtctgttatctttgaacaagtcactgagacaggagattcattgcttcatgtggcagcagataaggggaaagaaaagattgtagagctgatttgttgtcactttcctgagcttcttattaggagaaatgtaagaggtggcactccacttcatgttgctgtgaggtccaagaactctactatggtcaacctcattctctcccaatatgcatcaatgaagtcaacacatgatgtgatgaatgacacagagatatcatgagagatagatgaccttg

SEQ ID NO: 26538 - DNA, 725 bp, Glycine max
  Clone ID: TF_GmC611_6
cacgcgtccggcttgttacaccaaaaagttgattagtaaggcgtagcttattgatggttttttatgggttttttttcccccccatttggggtgtttgagacaaagacaaaagacaagaacaagaagcaccgaacagaacagaacagaacacaacacaagttgcttgaaccttacacgtcaccatcgttgcgtgttgagtgttgagagatgggaaattcgttcggatgttcggcctccggcgaaaggctggtgtcggcggcgagggacggcgacttggtggaagcgaagatgcttctgaactgcaacccgtgtctcgccaagtattctactttcggtggcctcaattcccctctccattttgcagctgccaaaggccacaacgagattgtggcattgttgctggagaatggagctgatgtgaattccagaaattattgtggccagaccgcattgatgcaagcttgtagatatgggcattgggaggttgcacagacacttttactcttcagatgcaatgttataagagctgattatcttagtgggaggacagctcttcactttgcagctgtgcatgggcatgtaagatgtattagacttgttgtggctgactttgtaccaagtgcaccttatcaagctatacatgctggcacagctgttgacagggggtggtggatcaaatgtgaaaggcaaacatgagcatagtgccctttccaagtttgtaaata

SEQ ID NO: 26539 - DNA, 1187 bp, Glycine max
  Clone ID: TF_GmC311_1
agcccgtggccctcgctgcaagttcctccgcactgttcctcttcttctttttctgttttggttttttcttttcgcatagataatagttacttttttttttctttcttttctgcagcttaatggcatgagactgtgaggaatatcttatgtgctattattgaatattgtatgcaaattggcaaataagctcacttcgtttcctgtctcatctccttttcgtaggcatgcgtggcagaaattgcgtgctatgcctcctgaagatgcaatgcagaagtacattgatattgtgaccgagatctatcctacttggcttgatggttcatctttgaggaataaaagcggcgacagtggtggacatggttcagaggctaagggaccaatgggccccgtattcagcacttttgtttatgaagaggaatatggcagtgactcacaaatggaagccattcatggatttgccagggaaggagatatggctaatctgctcaagtgtattgaaaatggtgtttcaatgaatttaaaggacagtgagggccggacaccattacactgggctgtggatcgtggccaccttaatgtcacagagttgcttgttggcaagaatgctgatgtgaatgccaaggacaatgatggacaaactcccttgcattacgctgttacatgtgagagggaagccatagctgagtatttagtgaagcataatgcagacatatattcaaaagataatgatgggagttcaccacgtgacatctgtgagtcaaactggccatgcatgcagcatgtgggggaagaagtaaattgattgattgattgtttgcttgttgcagcttctggccaatacaaccttttagccaaatcccaagaggatgttcgtgtctatataacttgattttttttgtccttactcatgatggtgtatacacccttttcagtctagtgtacgcctatgcaccgcttaggtaatggttagttaattaggttgtattctgttctattattgtttcctctgctcagctctttaaatctggctctcatttcttatatatttcatggataaagatatacacggaaactagaaatagtaacagggaaagggaatcttaaacgatattctttcctcggaaaaccttctacccttctattgaaggcgatatagattttacagggttattttaggtcttcaaaaa

SEQ ID NO: 26540 - DNA, 913 bp, Glycine max
  Clone ID: TF_GmC180289_1
gccgccctttgttttttttttttttttttttttttttttttttttttttttttagcactgttgtctatcattcaaactttataaacaactttaaactgtaacacttacatagaaaagaaatttatgaactacctctacttaatacaattaattatcactgatagcttattagttgaaataattctacatgtagaaaattcagtggcttgaacagctaatctaaaataagtcagcaatttgccagcattttgtgtctttggatgcctagtattctcaacttataatctgcacagtgtgttgttttgacaagatagtgttgtcaattcgagctatgctgcaaaaacattccaattaatcattggggtagaagataatgaattgttccatcaaaactttcctcattttgaaatagctcagcagaagatcttcaaagatggctgaatgccaaggggacgatttacttgctaattagcagcagctatcaatcaactgaaacttcaatctggttctggccgattgcatctcgaacatcatagataactgtcagctggaaccgtcttcagtaatttggcaaggtcataagacttgaaatctttcccataacataagcttaaatccagggctgtttttccgtccttatttttcctagtcttatcagcaccattgactaacaatatttttgctatatctctatttctgctttgaatggcaatgtgcaaggggggccaaccttcattatcttcaacattgacatcagccttgtacttgatcaataatttcacagtcatcttggcaccaacttgaactgcataatgaagtggagcggctccatccttatccataacatgaggacttgcacctcttcgtaaaagatttctttcctcattttccttttttttttcctcctcttttt

SEQ ID NO: 26541 - DNA, 2369 bp, Glycine max
  Clone ID: TF_GmC317_1
ggctcgaggtttctatctctttttgacgcgcacttgaagatttgaagtacttccacaaagggggtaacctttttcctccgttgaaaacgaggggaagaaggtttctcaactgcccttttcacacctcaacttcccgccttcttcacttgcttctcgaacttcttcccttttgaagctattaatactagttccttattcagtttctagatatcttaggaagaggagcacagaaaaccacccctctctctctaagcacagcctaagatgtcttactcatgatttcctgctatctcaaattgctgctacaagcaagaagaagtggagtctgattgaactctgaagtgggcagaatgcgttttgaaatcaagtggaccttgagtgcttaccgtagtgtacaattttgaattgctttgccaatattgctgggtgaattgatacagtgggaggcaatcaatagttgtaacttggatattcttaaggaaatgtaaacttgataagttggagctccaccaaagtagtaaagatacattccaaagatgatgaagaaacaattgacaggcatacggggtgattctcccctacaatcggcaatccgagttggaaatttagaattggttctggaaatcatctctcagagtccagaggacgaattaaaggagttgctttcaaaacaaaacaactcttttgaaactgccttatatgttgctgctgaaaatggtcatcttgatatactcaaggaattgattagataccatgatattgggttggccagcttcaaagctagaaatggatttgatgcattccacattgctgctaaaaatggacacttggagatattgaaagtcctcatggaggcctttcctgaaatttcaatgactgttgatctgtcgaacactactgtgttgcatactgctgcagcacaaggacacattgaggtagtaaattttctcttggaaaaaggtaatagcctggtaactattgcaaaaagcaatgggaaaactgtgttgcattcttctgcaagaaatggctacttggaggttgtcaaggcccttgttgagcaaagaaccagaaattgcaatgagaattgataaaaaggggcagacagcactccatatggcagttaaaggacagaatcttgagttggtggatgagctcgtgaaattgaatccatctttggcaaatatggtggatgccaaggggaacactgcactgcatatagcaacccggaagggtcgtctacaggttgttcagaagttactagaattgcagagaaataaacacagatgttatcaacaaatctgtagaaactgcattagatactgcagagaaaaatggtcgtttggaaattgccaactttatgcaacatcttggagctcaaagtgccacgtctatcaagtcattgactacagatacggtccttgagcacaaacaaatagtgagtgacataattagtgaggttcataacacagctggaacacacaattaaaacgcaaagacgtatgcaaggtatagcgaagcgaatcaacaaaatgcacactgaggggcttaacaatgcgatcaactccaacattgttgttgctgtccttattgcaacagttgcttttgctgccatatttaatgtcccgggccagtatcctgagaaaccaagtgaactctctcctggaatgtctcctggggaagcatatattgctccagatattggattcatgatattcataatctttgattctactgccctcttcatatcattggctgttgtgattgtccaaacatcagtggttgttattgagaggaaagcaaagagacaaatgatggcagttataaataagttgatgtgggttgcatgtgtgctgatttctgtggcatttattgcaatgtcatacataattgttggggatcataaagagttggctatagcagccacagctctaggaacagtgattatggcagctactttaggaacactctgttattgggtgattgctcatcgccttgaggcctcaagattgcgaagtcttaggacaacaatgagcagtaggcagtcaatgtctatgtcaatgatgtcaggatcagagaatgagtataagacagtgtatgcaatataactttgatttctaccatttcagagttctccctccttttttggccagttacactaacattgtaggtgtttgttgcttagtaaaacaaacattaactactgcaacaaaagcatgcctttgcagaacataggcaaaagatgtaatcatagtccacttgataagtgaatgttattctaaattgaaagtattggatcatcatgcctattttaggtattttcacattagcttcatcagaatttgaatattatacaaatttactgtttaaaa

SEQ ID NO: 26542 - DNA, 910 bp, Glycine max
  Clone ID: TF_GmC315_1
gttttcatgatcccaccgcaccctcaccaatctctaacattagggtacgcacagcgcggcggccaagccatctcaagccggagctgctcttcacccttcctcctactcggtacaacacaacaacatttgttgtggagtgaatgggtgcgacggaggccaacacgacacttcaagctcgtcccgaaacgacgtcggagaatatcgaagcattgcttgatgctgcaagatacgatgacatggatgatgttaagagcttagaagccagtggtgttcctcttgattccaaggatgaacaagggaggacagctcttcatatggctgcagctaatggacatattgatattgtggagtatttaatcagtagaggggtggatcttaattcaccaaatgaggaaaagaatacacctcttcattgggcatgtctcaatgggcatgtggaggctgtgaagaaattaatcatggctggagctaatgttagtgtcttaaacagtcacgagaggactccaatggatgaagcagtgagtgggggaaagccagaagtgatggatgcgattaatgaagcagtggcactagttgaacttcgtggtgctatggtttttgcacaggaaacttgaagtttatgctacactaactagcttgtaatatgagaaatctgtgatggttatacatgttttcctataatgggtattttgttagttcgaacaagatcatgagtgttttggtatcctcctccctcccaagtttccattatggaattcctcttcggaaaatggaattgaaggagttggaatgaagtggatagttttacttttgaagttaattagttattttttttcctggaaaatcaatgaaatgccatacactcgaatatgagaaattaacattttatttatccatttctttaatcctc

SEQ ID NO: 26543 - DNA, 1857 bp, Glycine max
  Clone ID: TF_GmC6409_1
aaacgtgcgagccggtgtttgtgagctgcccgaaagtgtgagcgggcaggtccaaactccaagaagagtccaatactgtcgattatcctatctatcaccctcggggtcggaccagacacacttccacgtcaccaccaccaccgtggaaggtggagcgtgaggctgtttccggtaacctctcccggcggcgctgagtggtgatcaaggaaatgggtcagacgctgagttgcgtgcaacagcacgaggaccatggtgtgctcttccctgcacttgcaagtggagaattggaggttgttgaggccatggtggaggaagaccccactgtgttggaacacaccattggctgtgacaggctttctcctctgcatgtcgctgctgccaatggtcggatcgaggttctttccatgttgttggataggtctttcaatgttgacgtattgaatcgacataaacagaccccgttgatgttggctgtgatgcatggaaagactggttgtgttgagaagcttattcatgccggagcaaatatattgatgtttgattctatacgtcgaagaacttgcttgcactacgctgcttattatgggcatatagactgccttaaggccattctttctgctgctcattccacacctgttgctgattcttggggatttgcaagatttgtcaacataagagatggaaacggtgccacccctctgcatcttgcagctcgccatagacggtcggaatgtcttcatgcccttctagacaatggtgctcttgtttgtgcttcaaccggtggatatggttaccctggaagcacgccacttcatatggctgcacgtggtggttctttggactgtgtccggatgctgcttgcttggggagcggatagacttcaattagattcttctgggaaaataccgttctcagttgctctgaagcacaagcattgcgcatgtgcttgtttggccatccccattaaagttcatcagcgagctcaatcaagaagcaaaggccttactggaaaaggccttgcaagaagctaacagagagagggagaagaccatactaaaggagactgacatgcctccatccccactgaattctgagagtgaagatgataacattgcctctgaggctagcgatatggagttatgttgcatatgctttgaccaagcatgcacaattgaggtaagaccctgtggccatcaaatgtgtgctcattgcaccctagcgctatgctgtcacaaaaagcttgatcctgctactaccggcctttctggaccatgatcttgctacttgcgtggatccattcttcagtttgtgcattttgagattaacacaatttcaagatacggttgctaagattaacaaaatcagtgatacagaagtggaatctggccctatgaagccaaggagatcacggaaatcaaatttcagtgaaggaagcagcagcttcaagagcttgtcggccatgggctcatttggaaggattgctggccgcaattccgggaagattacagatgaaaagcaatgggaggtttcttgaagcttgataactgttgatgattattttaattccaagtcggcaagaaattatatgaatgatggttttaatttctgtggaatagctgcctatattggtatcttatttgtattcattttgtcactattgtccaaagatcactaagatcatgagagacaacagtttgtgatcggtttgagttttttacttctgtaatctgattctcagttggaattggagaatcagaacagttatgtaatttttttcccccaaatatcaaatatagtatgcatgagttaaaggaaaaaaaaaaaaaaaaaaggccggcccctttaaaggacccccgc

SEQ ID NO: 26544 - DNA, 1271 bp, Glycine max
  unsure (1)..(1271): unsure at all n locations
  Clone ID: TF_GmC6409_2
agagatggaaacgggggcctcctagcatnttgccgctcgttatatctggccggaatgtcttcatgcccttctagacaatggtgctcttgtttgtgcttcaactggtggatatggttaccctggaagcacgccacttcatatggctgcccgtggtggttctttggactgtgtccggatgttgcttgcttggggagcagatagacttcaattagattcttctgggaaaataccattctcagttgccctgaagcacaagcataaggcatgtgctgccctgctggatccctcgtctgcagcaccgcttgtttggccatccccattaaagttcatcagcgagctcaatcaagaagcaaaggccttactggaaaaggccttgcaagaagctaacagagagagggagaagaccatactaaaggagactgacatgcctccatccccactgaattctgagagtgaagatgataacattgcctctgaggctagcgatatggagttatgttgcatatgctttgaccaagcatgcacaattgaggtaagaccctgtggccatcaaatgtgtgctcattgcaccctagcgctatgctgtcacaaaaagcttgatcctgctactaccggcctttctggaccagtttgtccattttgccgtggatccattcttcaattactggttgctaagattaacaaaatcagtgatacagaagtggaatctagccctatgaagccaaggagatcacggaaatcaaatttcagtgaagggagcagcagcttcaagagcttgtcggccatgggctcatttggaaggattgccggccgcaattcagggaaaattacagatgaaaagcaatgataaagtggtggtgattattttgattccaagccggcaggaaattatataaatggtggttttaatttctgtttgataactgcctatattggtatcttatttgtattcattttctcacaattgtccaaagatcactacggtcatgagagacagctgcttgtagtcggtttgagttttttacttctgtaatctgattctcagttggaattggagaatcagaacagttatgtattcccccccaaatatcaaacatagtatccatgagttaaaggtagttttcttcactgctttaactttggtaaacatatatggattcacacacacaggtattcgttcttaaccaaaaaaaaaaaaaaaaaaaaaaaagaaaaaaaagaaagaaaaaaaaaatagaaatagcaaaaaaaaaaaagtaaatgattntggg

SEQ ID NO: 26545 - DNA, 3029 bp, Glycine max
  Clone ID: TF_700838909_FLI
agaaatgctaatgtgcggtcacgattgagagatggttttggcccatcagtagctcacgtttgtgcctatcatggtcaaccagattgtatgcgggaattactattagctggagctgatcccaatgcagtggatgatgaaggtgaatctgttctgcatagagcaattgccaagaagtacacagactgtgctcttgtgatattggagaatggaggctgtagatcaatggccatcttgaattcaaagaatctgacaccgttgcaccattgtgtggcaatatggaatgttgctgttgtgaagagatgggtggaagttgctacttctgatgagattgctgaagcaattgacataccaagccctattggcactgccttgtgcatggcagctgcttctaagaaagaccatgaaaatgaggggagagaactggtgcggatattgcttgcagcaggagctgatccatctgctcaagattcccagaatgggaggacagctttgcatacagctgctatgactaatgacgtggacttggttaaggatgatgatggtgacaatgctttccatatagcagcagagacagcaaaaatgattcgtgaaaatcttgactggcttattgttatgctaatgaagcctgatgctgacattgaagttagaaaccacagtggcaagacactacgtgacattttagaggctctcccccgagaatggttatctgaagatctgatggaagcactcgtgaataagggagttcatttgtttcctacaatatttaaagtgggagactgggtgaagtttaaaagatctgtcacaactccaacacatggatggcaaggtgctaaaccaaagagtgttggttttgtgcaaagtgttccagacagagataatctcattgtttcattttgttctggagaggttcatgttcttgcaaatgaagtcataaaagttgttccattggataggggacaacatgtacacctgaaagaagatgtaaaagagcctagatttggttggcgtgggcagtcacgtgacagcattgggacagtattatgtgttgacgatgatggaatcctccgtgttggatttcctggagcatccagaggatggaaagctgacccagctgagatggaacgtgttgaggaattcaaggttggagactgggttcgtattcgtccgactcttacatctgcaaagcatggactaggatctgtgacaccaggaagcattggcattgtatattgtatccgaccagacagtagtctgttaatagaactgagctatcttccaaatccatggcattgtgaaccagaggaggttgagcacgttgctccttttaggattggggaccaggtatgtgttaaacgatctgttgcagaacctagatatgcttggggtggtgagacacatcatagtgttggaagaataagcgagattgagaatgacggtctcttaataatagagataccaaatagacccataccatggcaagctgatccatcagatatggagaaggtggaagatttcaaggttggagattgggtaagagtgaaagcttcggtgtcttctccaaaatatggatgggaggatgttaccaggactagtattggggtaattcatagcttggaggaggatggcgatatgggtgttgctttttgtttcagaagtaagcccttttcttgctcagtcactgatatggagaaggttcctccatttgaggtgggccaagaaattcatgtgatgccatctgttactcagccacggcttgggtggtcaaatgaatcaccagctactgttggaaaaatattgaaaattgacatggatggtgctctcaatgtgagggtcactggtaggcagaacttgtggaaagtttctcctggagatgcagaacgggttccgggatttgaagttggggattgggtacggtcaaaaccaagcctgggaaccagaccaagctatgactggaatagtgttgggagagaaagtttagctgttgtgcatagtgtacaggattctggatacttggagttggcttgctgttttcgcaaagggaagtggatcactcattatacagatgttgaaaaggttcctagctttaaagttgggcaatatgttaggttccgaactggtttggttgagccaaggtggggttggagaggagctgagcctgaatctcatggggttataactagtattcatgctgatggagaagtcaggttcgcattttttggtctgccaggattgtggaggggagatccttcagaccttgagattgaacaaatgtttgaagtgggagagtgggtgaggttgaactacaatgcaaataattggaaatcaattgggccaggtagtgttggtgttgttcaaggaatagggtatgaaggagatgaattggacagaagcatttttgttggattttgtggggagcaagaaaagtgggtaggaccaagttcccatcttgaaagatttgacaaactctttgttggacagaaggttagagtaaaacaatatgtaaagcaaccaagatttggatggtcagggcatacacatgctagtattgggactatacaagcaattgatgctgatggaaagctccggatatatacaccagcaggatccaaaacatgggtcttggacccatcagaagtggaggtggtagaagagaaggagctctgtattggagactgggttagggttaaagcatcaatttcaaccccaacccaccattggggggccatacatgtattgatgttaataaacagaaggggtggaagaatggaagctgtggagataggaaaactgtcttgctgaccgagtggtggagatttaaaggcagctaaaataaatatattggcagttggcccatttatatattcattactcacaagtttgtagtcccagattttgaggtttatatcgtatgtatgtttatttcatattgtacaaattgtattcaactgtcaacttaatgcatttttttgactcgattatgcagttgcataattcttgaaatagaattgattccattatacagcttgtgc

SEQ ID NO: 26546 - DNA, 2498 bp, Glycine max
  Clone ID: TF_GmC770_1
ggaaaaggaaaaatccaaaatatattcttcctaacggcgcatgccgggttctctgatcttgcctcttgctctgtctcaactcgctctccttccacccatccccccctttattttccgcatttctcaactctctccgataatacccacccccaaaacaaactcttcttcttactcttaccccctcttccttacttccactatcgccatggcctcccactcaaaccaaccaggtcccggagctgaagggctaggagagaaggaccccccaacaagtttccagaacccgctttctgagatatccccgtcgccgtctccgtcgtcggcgccggcgccggcgctggtgctgtcgaactcggggaagcgaatcgaccaggcggggaagaagaagtacgtgaagcaggtgacggggcgccacaacgacaccgagctccacctggcggcgcagaggggcgacgtgggcgccgtgaggcagatccttgaggatgttgattctcagattatgggaactctgagtggcgatggcgatgaggatgatctgaacgcggagattgcggaggtgcgtgcttgtcttgccaacgaagagaacgagctcggtgagacccctctgttcacagctgctgaaaagggtcaccttgatgtggtgaaggagttgcttaactattccaccgctcagactgtttccaagaagaaccgatccggatttgatccattgcatattgcagctagtcaaggccaccaccccattgttcatgttttgctagattatgatccaggtttgagcaaaactattggtccctccacctccactccgcttataaccgcagcaagaagaggtcacacggtcttggtgaatgagctactgtcaaaggattgtagttggttcgatattactagatcctatggcaaaaatgcgtggcattgtgcagttcgtcaggttcatgtcggagattgtaaaagccttgattagtatagaaccacagttggctcggaggacagacaagaaaatgcaaattgcattgcatatggctgtgaaagggcagagttgtgatgtggtgaaattgcttcttgaggcagatgctgctattgttatgcttccagacaaatttggtaacacggcgttacatgtggcaaccaggaaaaagcgagtagagatagtgaatgagttattacatctgccagacaccaatgtgaatgcattaactagagaccacaaaacagctcttgacattgctgaagatcttcccctctccgaagaggcatcagatataaaggactgtctttctcgatatggagcacttagagctaacgagctcaaccaaccaagggacgaactgaggaaaactgttactcaaatcaagaaagatgttcacacccaacttgaacaaaccaagagaaccaacaaaaatgttcacaatatttccaaagagctaaggaaactccacagggaaggaattaacaatgccacaaactcagtgacagtggtggctgtgctgtttgctacagttgcttttgctgctatattcaccgtgcctggtggggatgatgatgatggctctgcagtggtagcagcttatgctgcttttaaaatcttctttgtctttaatgctatcgcactttttacatctttggctgttgtggttgttcaaatcactttggttagaggtgaaactaaagcagagaaaagggtggtagtggtgatcaacaagctcatgtggttggcttctgtctgtacttcagtgacgtttattgctgcttcttacatagttgtgggtaagaagaatgagtgggctgcaattttggttacattagttggaggggtgataatatctggagttattggcactatgacttactatgtagtgaggtctaagagaagcagatcaatgaggaagaaggagaagcaagctgccaggaggagtggatctaactcatggcatcattctgaattctccaattccgaggttgatccgatttatgcgctttgagtttgaacttgcaaccttcaggggatcatgaagaacaaattgttgtgaaaaagatgacaggtttttaggtttgctacttgctccatgttaccactttaagagttcttcactgtacaggaaattgttctcttcggcttagctgctgcttttctaggatcttatatacaaattggaatgaagcatgcatcatcattggaatgaagcatgcatcatcccggtctgtgatttttaagaacaaaatccaacattgctttaattctcaattatgtattgatgtattagcaaaatgtctcccttccctgttcgttactgttttttttctatcactagaattgtcttcggggcctaatctacacaattgacccttgataatgctgcatgctgagttctgatagagaatgaaatagtaatacgtgttaattgtatttttttttatttgttgatatattttgtgttgtgaaaactaaggcttgcaatttgcagataagggtacaaattgaaattttgataaaa

SEQ ID NO: 26547 - DNA, 2214 bp, Glycine max
  Clone ID: TF_GmC540_1
agagcgtccggcgaggtggcacagaaactgcttcttgaatctgagtccaagagagggaagaactctctaattcgtgctggatacggtggatggctaatgtataccgctgcctcggccggggacttaggttttgttcaagttcttcttgagaggaactctttgctggtttttggtgagggggagttgcagtgttactgacatactctatgctgctgcaaggagcaagaattgtgaggtttttaggctgctatttgattttgctgtttcaccaaggtttttgagtggcaaaggtgggataatggaggagaatgttggggacattccttctgtttacaggtgggaattgaccaatagggctgttcatgctgctgctagaggaggaaatctgaagattttggaggagcttcttgccaattgctctgatgttttggcttatagagatgctgatggatctactgttttacatgcagctgctggcagagggcaagttgaggtaattaaatatcttacatcatcctttgacatgatcaactccacagaccatcagggtaacactgctttgcatgtggcttcttccaggggccaattaccaacagctgaagctctagtctcagcatttccctcacttatgtctctgagaaacaactctggagaaacttttctccacagggctgtgtccggttttaaatctcatgcattcagaagattggacaagcaggttgaacttttgagaaacatgctgagtgggaagaactttcatgtggcagacattatcaatgtcaagaacaatgatggaagaactgctcttcacatggccatcataggcaacattcacactgatcttgtgcagctcctgatgactgccccatctataaatgtgaatatatgtgatgttgatggcatgaccccactagattaccttaggcaacaccccaaatctgcatcatcagatatactaatcaaaaagttgatctcagctgggggaatgtttggctgccaaggccatagttcaagaaaagcaatagcatcacacttgagaatgcaaagcattggaagcagtccagggacatcattcagagtctcagacactgagatgtttttgtacactggcattgagaatgtgtcagatgctagtggtgatcatggaagtggaggaatgagttcatcttcatctgaacacattccatacgatctgaatgccactgagaatcgcgtaccaatcgcagccaaaaggcctagtactgtgaaccatgcagcagcaagtttgaagagagttcttctgtggcctagggtgaaggacaagaaatctgaagggttcaaaaagtcttctacaacagatgagggttcagtggactcatgccggaagcggaataacagctttgatgaaactccaaccccacttagacaaagattttctaggccatcttcacttcccaacaacaaaagaactctttctgtcaggagtcagcaatcaagtccaaatgccaagaagaggtttgcttcaggaccagtgcatggagtcatacaatccatgccacatgcaaatgtttctggcagatcaaggtctagttccttttcaaagtcgtcaatttcttcacctagatcaatagacaagcaaaagggcattttcattgacaatgacattgccggaccatcttgctcaagtcaaccatcaccaccacctgatgatgatgaatcaccaaagttggtaaagagaacttctgttggaaggaagttgagggaccattatttctgttttggtgcacctggcattaatgtcaaaaactcagttcacaggcagcaagaaagccagagttacaaggctcatgttgttgcagtggcttaatgggatgagcttatataggtaattctcctgaccaggctaattcaacaaataagggatgaagctgattcatcaactttaaactttactgttaagggtcccttgggggttccttagttgcaagcttttatagattatattttgttacttaaggattagctcatcctcaacttcacttgttaatggtaaaatgctgttaaaatatgattatcatattagcatcaaattaactcaatttggtgcttagtaatgtaagaattagtgttgccaatgtactgattaaaccttttggattaagcagtcatctgcatttttgttaaatgattgactactaattccatttataagattaattccattttgaatttggt

SEQ ID NO: 26548 - DNA, 1955 bp, Glycine max
  Clone ID: TF_GmC1240_2
cccacgcgtccgctcttcaatcgttaacctttttttttttttttttcctttctttcgctcttctttcctttggtaattgaattcagcagcatgaacaacatcaacaacaacaggtctcaggatcaacgctcaagacctgccaaggcagccactatccatggctgcgccctctccggcgacctcgttggactccagagactacttcgagacaacccttctcttctcaacgagagaaaccctgttatggcacagacaccacttcatgtctctgctggtcacaataggactgagatagttaaatttcttcttgattggcaaggggcagataaggttgagatggaggccaagaatatgtatggagaaactccattgcacatggcagctaagaatgggtgcaataaagccgcacaattgcttcttgctcgtggtgctattgttgaagccagagcaaataacggtatgacacctttacatcttgctgtttggtactcactacgagcagaagagttcttaactgtgaaaacactgcttgagtacaatgctgattgcagtgctaaggatgatgagggaatgactcctttaaatcatctatcccaaggccctggaactgagaaacttagggaactattactttggcatcttgaagagcaaaggaagcagcgagccattgaggcatgcagtgaaaccaaagctaaaatggatgagcttgagaagcaactatcaaatattgtgggtcttaatgatctaaaagtacaactacgcaagtgggcaaagggcatgcttttggatgagaaacgtagatctcttggtctgcatgttggaaggagaagaccacctcatatggcctttcttggcaaccctggaacaggtaaaactatggtagcacggattcttggaaaattactccatacggtgggaattctacctactgataaagtgacagaagtacagcggaccgatttagtcggtgagtttgttggtcacactggtccaaaaaccaggaggaagatcaaggaagcagaggggggaattctttttgttgatgaagcttatagattgataccaatgcaaaagtccgatgataaggactacgggttggaagccttagaggagattatgtctgtcatggacagtggaaagattgtcgtaatatttgctggctacagcaagccaatgaagcgagtaatcacttctaacgaaggtttctgtagacgtgtgaccaagttttttcaatttaatgatttcaactcagaagaactagcacaaatccttcacattaagatgaataatttagcagaagatagtttgctatatggatttaagttgcataccgattgcagtataaaatccttagcagcattgatagagagggaaacaacagaaaagcagcgccaagagacaaatggaggtttggtagataccatgttggtcaatgctagagaaaatttggacctaaggctaagctttgactgtatggatacagaagaacttcttaccatcacattggtagatttagaagcaggccttcagttattaacacagtaatcattctttggcaatctagtagatattttggagacaagattcatttcaacttacctcaattttcaccattggatacacaggttttacatctgcacaatgagcatgtcatgaataagtttgctacaataggtcgattcttttgggaaaatttttccgtgtattttgtaatcgataatgttatatataggctttattcatgcactttttttttatctgaataatgatttgtagacacctaatgcaaatctataccttgagagagagaaatagaagagagataatttgatgagtgacatgatgttataaagaagagagagagagagagagagggagggagaaatgaggtgtcaaatgaaatgagtgtttataatgtttaagtagttatatatatcattgtttatctgcctttc

SEQ ID NO: 26549 - DNA, 1190 bp, Glycine max
  unsure (1)..(1190): unsure at all n locations
  Clone ID: TF_GmC303801_1
aaccaaacgattgagccaaattctgcgcttgaaccgtactacatttataaatcttgttcattcaaatattggagatggggcaatagttatgaacaattttctccagcatttgcaagaatcaaggtatccggggatggatgttattttggcagaaacggaggccatgcttgctcggggcaaaatggacatgcccattaccacatgctttgcagtaaccagaaatgatgatctattgttgcatcgtttgcttaagaggggttcagatccaaatgaattagataggagtggaaagacagcactggtttgttgattttctctcgaatgaacacatgcattagtatatatgtataataaacacaacactagatgcttacaactttattttctaatgtaacagcatattgcagcttccaaaggcaatgagcattgtgtaaatttccttctagaatatggtgctgatccaaatagcaaagatatggatggaagtgtcccactatgggaagcaatgaagggtaggcatgaatccgtgatgaaaattctcatagacaatggtgcagacatatcttttgccgatgcangccatctagcatgcagtgctgttgagcaaaatggttggaattgcccaggaaattattccatgtggcatggatgtgacacaacctaaaaaaaatggagccacagctcttcatactgcagtagttgaaggaaacactgagatgattaacttccttgtagaccaaggagcagacattgacatgcaagatgttaatgggtggacaccaagggttttggcagaacaaagtgaaagcgaagaaattaaaaatatattccatgacattaaagatagcagaaaaccaggtgttattccaatttcaaagaatgacaacaggagtgggaggtttcaaattgatccaagcatgcttaccataccccaagaaagcatgctactgccaccttatgatgggaggagaaggtcttccagctcttttgataattccatttttggaatgatgtcaactgccaatcgtgctaagaaagatctccaggcatctgaaagcagaagcactagaaggagtgtgaatggattagccagagtgacccttagttgtcctgaaaagggggaacatgctggaaagcttgttttgctgcccaagacccttgaaaaactgctagaatttggtgccagaaaa

SEQ ID NO: 26550 - DNA, 577 bp, Glycine max
  unsure (1)..(577): unsure at all n locations
  Clone ID: TF_GmC465104_1
caatcatggaggagttcgaggatgcagtctcattcgtatctaagaacagcggcatgaagacatcacaagatgataaattgagattctattcgatgtacaaattagccacggtcggcccgaacgatacaccacgtccaggattttttgactttgcaggtcgtgcgaaatgggacgcgtggaaatcgtgtggtgaattatcaccagaagatgccaagactgaatacgtcaaactgctagatcgattagatccgaaatggcgggaaactctgcccaaccttccaaaacattccaaagcacagagcaataatgaagatgtgggaggtcccgtctttagcatgccacagttcgaagaagagatcattccggaagaagacaggacgttagcgtattacgtcagctctggagaggacagtaaggtgctggaattgatcgccactgcacataacaaaacgtcattgatcgataagagagataaagacggtatcgcagccatccattatgcctgcgacagaggtcaccaacaactgctnaaaatactgcttgacaacggggccgatatagacataccagatgaaga

SEQ ID NO: 26551 - DNA, 734 bp, Glycine max
  unsure (1)..(734): unsure at all n locations
  Clone ID: TF_GmC611_5
cggattcccgggtcgacccacgcgtccgctttcccttttgttccgcatcagataataaaaccaccattaacaccgacctcaatcacattcctagctaccaccttcaacccttctttttgttttatccttctctgtctcacaaagttagatagatatagagaggaaggtgccacgtcaccatcacagtttcttcctcaccaaatcctaaagcaaagtttccaaatttcttcacatcataaatacacaccacaccccattgcgttaagattcgcctcctccctctcgttggattttgtttctttgttttttagagcctccattgtgaagatttgatctcacttagtgtgtgtgtgtgtgatggggaattcatttgggtgttcggcttccggcgagaggttggtgtcggcggcgagggacggcgatttggttgaggcgaagatgcttctggaatgcaacccttgtcttgcaaagtactcaactttcgggggtctcaattcccctcttcattttgcagcttccaagggccataacgagattgtggcattgttgcttgaaaatggagctgatgtgaattcgagaaattactgggggcagactgctttgatgcaagcttgtagatatggtcattggggaaggtggtgcagacccttctgctcttcagatgcantgttgggaaagcagattatctcagcggtgggacaaggtttttactttgcggccatcaatggggcatg

SEQ ID NO: 26552 - DNA, 1207 bp, Glycine max
  Clone ID: TF_GmC614_1
ggctcgagagcgtgggatttagaaccttggtattataaaggaaagcttgcgttcccccagtattacatctcccatttcgagtctatcatcttccttctcgtcattcttcgtttcaacctcgcaaaatgagcacatttgctacaagatcccttgtttctgtagaatcaacaacaacaattgaaggaactgaagctgacaatgtggatagtgactcactgttccgagggtgcgtgttggaagggagatgggacttcgttcttacagcatatagaaatgacagtaactatcacaaaataaaaatcaacgaaagcagaggcacagcactacacgtggcagtgaatgatggcaaagtggaacttgttaacacccttgttgttgcaatcttaaaccacgaagggagggaagtgctgagggatgatagtgcactgaaaacaaccaatgagagaggggacacccctttgcaccttgcatcctcaagagggttcattggaatgtgtaagtgcatcataggggagcttaaggaaaggaaggatttgattagggttaggaacaataagggtgaaacacctctcttccgggctgtgctcacatgccatacaaagacctttgtgtacctccatcatgtttccaaagatatagatgttccacttaggaactatgatggggataccatccttcaccatgccatttggagagaattcttggatttagcaattataataattcattgctatcctggacttgttgagatgcgaaacaaagatggagccactcctctcaaagttcttgcctgtaagccttcggccttcaggagtggaatcaatctcccatggtggaagaaaattctttattatggtaagtgttgcgtgcgtggtggctgagctcataagatttttcttcttctgttttttacaaaaatggaattaaatttcaggggtggctcaaccctaaagtaatattccaaacacagaaacacttgctttagtttcctcgacaaaattctcttataattattcccttaaaaaatgtttcatacgtaaaaaatctcttaaaatttaagtccaatttaaattgacttttttttttatcatttacatattaattatcgatcttactattttcttaaaaaaattattttgttgtattgcttccttccatgaatgtaaactagtctacttttccattaatttattctcattatcccact

SEQ ID NO: 26553 - DNA, 4131 bp, Glycine max
  Clone ID: TF_GmC755_1
tagaagagactcacctcctccgaagctcaattataggcatgtcatagttttaggcatcgatggactggtcgatatgaggctcatttgtgggataagaattgctggaatgaatcacagagcaagaaaggaagacaaggttcttcattattttgctctctataatctccatatagttttctgatttccttcacttatatgattatttgatttattgtcatattaattatgttgtgttggttgaaaatggctatggaaaacaactggatgcagtatatctaggtatgatttgagagtattaattaattagcttgcatatataacaaaaaccttcattatttgttccccttaaattggcggatgggggacgatttaatgattgcaataaacttgggtttgctaggggcatatgatgatgaagaagccgcagcacgtgcctatgacttggcagcattgaagtactggggccaagataccattctcaattttccattatcaaattatgaggaaaagctcaaggagatggagggccagtcaaaagaagaatatattggatccttgagaagaaaaagcagtggattctctcgaggagtttcaaaatacagaggcgtagcaagacaccaccataacggaagatgggaagctcgaattggaagggtctttggcaacaaatatctataccttggaacttacggtaatttcattgtctatgatctaatgtaaagaaagcgcatgcatagatggatgctacttcttattgaaattttatgtgaatttcgttaaataaagaataaatttatatcattgagtgtgactcacataaaatttaggattaaatgtaattttagtcaattcataattttaatttttctattttaaaattaaaacatttatttttcttattttaaaaaatttgtaattttggtttttctatttcaaaatataaatatttaatttttatattttaaaaaattgacgattctggtttccttttttagaaaatctataattttaatttaatctttaattttgtatatgctttatttcttttatttcttattttgtaactaattaaatcaaattttgatgataccttaaatgaatatattagatttataattcaattggaccaaaagaaaaaaataaaacattgataaaattgagaatttgatcaaaattacaattttttaaaataagaagactaaatatctattttaaaacgggaaagactaaaattgtatattttttaaaacaaaagtactacatgtttcaattttaaaatatgaataaaataaaatagggaccataattacatttatttctaaaatttatataataaaaaaatgtgtacagaaatatattattaacagttttgaaaagtaattttcctgcattatattattgttattcaaatctcaagatgtctcaaaataagaatattgttagttattttttaaaaaaaaattgaatatgtgattttaaagtgtgcgtctatacatataatttgtcaattatatagttcaggggacgaaatgttttttaaaatcctaatcaaaaggtcattttctatgcatttgatgtacaattctcttagacagaagcatatggccttaccttagcatttgaatgcatttacatggttcatatatagcatttcattatcatcatttatatttggttatatttgctacgaattataaaacatgcatgtgatatgggcctatgtcagcactctaaataatgaacaaattaaattgtatgtttatgtattggttgaatataaacgaaataaagtagctaatataggtgtagcgatgtttaattaattaagagaggatgtacccatacctgaaattttgaaaatgtatttgaccattctttccggttctaacaagaaagtacctacttggtttcaacatggtcccgcggatcaaaatagtaggacaaatataaaggtcaacatatgcaatcagatcatattggttgtgatatagatcaccaaacttcaactgcttaatagagctatttaataatgatatcattcttttctagtcattttaatataaaccaaatcggaagaagaaaaagagaaatcctagaccgacatatgcaaacaataatacaattaaatttgcttacatgtgtgtgtccatatgttattatgtcgtattgtagctacacaagaagaagcagccgcagcatatgacatggcagcaatagaatacagaggacttaacgcggttacaaactttgacctgagccgttatatcaattggccacgtcctaaaacagaagaaaatcatcaaactattcctagcaatgaaaatgtaaactctaatgctgaacttgagctaggttcggctagtgatgagatcacagaagagggtgtagcaccatcttcagaatcaaatccttctcgtcgcacattccctgaagacattcaaacaatttttgaaaatcaagattcaggcatctacactgaaaatgatgatatcatttttggtgacctgggctcctttggtgcaccaatttttcattacgagcttgatgtttagaattggaggacttcttctggccaatacgttatttttcaaaagggggtaatcaaccaaaaaagatgataaagaaattagggggtaagagtaaacattttagagatcgagtggaagattctttaaaagtaacatacaaggggggaagagggattggatcattttatttgcgatagaacaagatgcatggcatacaagtacaactgcctcattttaacaatttagttttattatgtatgtctccacaagcgtgggtagatgtcacaacatttagttattataagcaataagaataatatttttttaaagataaatgttaaattattaaatcatatttaatttgttaagttttaaagattaataaaaatattttttaaatgtttaatgatgatattttgtgtgtcatttaattgtaaattattattgatataatttttaagataattttattaaaattaataatttatcctaaataataattttttattgaatgataatataaaattattttatattattaacatataattattttttttcatttcttaattagtcatatgatcacgattaattttaaatttttgcctcccacaattgtattacaaacacattttgtctttttatgcaaatttgcaacgaaataattgatgtgtttacggaatcaaacccaaaacaaaactaacatagtttcatgtcactttaacattaatttacacacaggcgcactaaagctaacacattttcatgttactttaacattaattttcatttttaactatacttgtttgtctttttttataaaaaaaaacttgtatatgtaattaccaatcataacagcattaatccttattcaagcgacaaattactgtcttttgacgaggtgattgatgtgtttaagggattaaacccccaaacagttttttattttattttatgaaaagctaactcattaatcttcaaaatttacacacaggaagagtcttaactcacgtgattactttttcatattttttatttttattttgtttaaatattatgatttgttggatttacttagattaatggctgagattttgtgtaagtcatgaaacttatacttggtgtgagatgatcttatcctatatatatatatatatataggataagtgtggtaagatgaagccatgaagagccgtgaaaaaggataaaataaaaagaaattaataagtgtggttttttttttcctcttaaattattcaaagacaagttgcgtaggtaggttaatagttgtggagatatattgggctcagcaatgagcagggctccgataataaggacaagtacaactctcccaccggcgaggtattgctttcactgggatcactgacgttgtcaaccaaaatccatccaaaagaaaaaatgaaatttgaataataagttaaacttttaacaagataaagaaaaataagaattaataaaaattgaaaacaaaaaatgtttgtataagaaaataatatatttatataagcttattatatgaaagtaaattgaaatataggaatgagacacagaggattagacgggatgaatatgaaagatgttg

SEQ ID NO: 26554 - DNA, 847 bp, Glycine max
  Clone ID: TF_GmC6107_6
gactggaacaagtacgacgagtgtgtcaatgccactgcctccgtcgataagagcgttaaggtttgggacgtgaggaactatagggttcccctttgtgtgctcaatgggcacgggtatgctgttaggaaggtgaaattctcgccacacgtgcggaatttgatggtgtcttgctcctatgatatgacggtgtgtgtttgggatttcatggtggaggatgctctggtgagtaggtatgatcaccacacggagttcgcggtcggggtggatatgagcgtgcttgttgagggcctcatggctagcactggttgggatgaacttgtttatgtgtggcagcatgggactgaccccagggcaccttgaaggagtgaaaaatgaatagagagttctatagatctttaccacacattcatacaagcttcaagtatacagattatatatataattcaccatagtgaggtgctctggaaggttgaatagtctggttacagtggtgaattatggatggtaacaggtggatatgcaacttctttagctatctatatctacattcttttttaaatccattaccaaaatctgtttcttatcatgtttgaaacgaaaatgtaaactccttttgtccataccatgtcaaatctcctatctgaaatgttagataaccaagatatctgaataatgatcgttcttatgaatatgttggtggatgattgaaatctaatgtgaaccttcgaaaggtctaccacagcgaaatctgtggcattccaagttcgagctgagaaatttgcaaataggaagaggaaaaatcagtatacgggaatccgtcaacgcccttggggaaaatgggcagctg

SEQ ID NO: 26555 - DNA, 609 bp, Glycine max
  Clone ID: TF_GmC1178_4
ggagtatgtgtgtgtgttaattatgtgtatgcatggtggaagctagagtaatagaggcgcaacaagatcactgttgttgtgggggctatagccagctcctcatcataagtggatcaatacataaaaaaggttaattagtaaagtcacacgtgctttctaacggtggcgcaccagaggggtttaggttcaggttcggggaagttcttggcggcggaacaaggcggcgatgaggaaacggaagagagtactgtaggttcggttccgagccatgtggtctctgcagcttcggcccaaaccaataatcagtgggtcccggcaagtggttctccaaggatgtcacgttttatgaatgctccttcctctccaggattgtctcctctgtttggcgttggccacaagagagcccgtgaagacgacacgggtgcgggtgcaagtgtgggtcttggtgttgttgcagcagcttcttcacaaacacaagggaatgaaagtggcggcggcgagaggaggaggagatacagaagagtgaggcagaggccgtgggggaaatgggccgcggagattcgcgatcctcacaaagcggcgagagtgtggcttgggacattcgacact

SEQ ID NO: 26556 - DNA, 602 bp, Glycine max
  Clone ID: TF_701208549_FLI
gggaagttcaatatggctttgctccctctcatcttgaaagcagctttgtcataaggttggtgtgaagagagaaagagaggaagagagtgaaaggaagaacaactatgagaaaagtgagtttaacaacaatagtaatagtaataagcatgtgaagaaagaagagtgccctttgactccatcatgttggaaaggcttttgggacactgatgttatgggaacaatctttagtgtgcctcctttgtcaccactatctccactaatggttgtttgagattttgtggaacttttgctctttcaatgatgttttgaggtaaccaaactaaggggagagagagagatgatgctggtgattgtcctctctgatttaggttgctaatttgcctaaatcaaaatggtagtactaattaatctactaatagattaatttgcaagtgaatatatatatggatttgtataatgtaaatataggatagtactatgaagcaagatctttttgtttgttgaaaaaaaaaacaaaaaacccatgcttatcttcttcctttaggtaaaaaaatgtactgtacttgaagcaatattgaaatttgtttattcgtttattggag

SEQ ID NO: 26557 - DNA, 166 bp, Glycine max
  Clone ID: TF_5760111
aagatacacaggaataaggatgaggtagtgtggcaagtggttcgatgagattagagcacgcaatatgcgttcaatgatttggctcgcttcctattctacccctgtcgcagccgtacgtgcctacgacaccgtcgtctgtgacgttctaggaccctgcgcgcgtcta

SEQ ID NO: 26558 - DNA, 529 bp, Glycine max
  Clone ID: TF_jC-gmXLIB3563P053ac08a2
cctcaatatctcatggcaaactctcttgaagtttctgctctcaatcgcataaaactgcatcttctaggagaactctctccccttccactcacaacctcctctcaatctagctccatctgttcccaatcttcatgttctgactcatccgccacacttgaccaaatcttctccgaattcctctatttcccaacttcttcctcagaaaaccacttttctgcattggagtttgaggcaaaacccgaaataatttacctcgaaacccccaacccacaattggaattcacgtctctaaccacacaggacagtaagaaacctcaatctagtcgaaagccgtcgctgcaaatctctctccccaagaaaacagagtggatccaattcggagatcccgaggttactgaaacggtttcgcagagtaatccaaacgcggaagagaagaagcactacagaggagtgcgacagagaccttgggggaagtttgcggcggagatccgggacccgaacaagcgcggctccagggtgtggctcggga

SEQ ID NO: 26559 - DNA, 118 bp, Glycine max
  Clone ID: TF_7639988
acgtgtcatgcaaaggacttggggaaaatgggctgctgaaattcgggagccaaacataggctatatgctttggctaggtactttccccactgtcattggagctgcccttgcatatgat

SEQ ID NO: 26560 - DNA, 410 bp, Glycine max
  unsure (1)..(410): unsure at all n locations
  Clone ID: TF_7478255
aggaacatgtctaggatgcctgtttcacagaaacagttggcagaggtgtttttgttgttatagagattgcaatgctttcatgcangtatatatatcttgggctattcaacagcgaaatanaaactgcaagggcttataacaaggcanctatcaantgcaatggaagagaggctgtgactaactttaanccaagtacatataaaagcaagatgaaacccaaagctattaatgaaagtggcantcacaaccttaacctcagtctgggcatagcaaccccaagacatggtcccaaaaaaaacanggggcatcttcaattccantccatcccttacaacatacatcctagaaaaagttcaatgatagagactaatattaattccgttattgataatccttctttaaaaagactg

SEQ ID NO: 26561 - DNA, 127 bp, Glycine max
  Clone ID: TF_7326474
acaccccctttttcggggggttcgcaagcgccggtggggcaaatgggtcttccaaattcgggagccgaggaaaaagtcacgcatatgggtcggcttcttcccggcgcccgaaaatgggggcaaaggc

SEQ ID NO: 26562 - DNA, 310 bp, Glycine max
  unsure (1)..(310): unsure at all n locations
  Clone ID: TF_LIB4128-090-Q4-K1-D1
atcccccagcgtccatggggagagggggctgctnagattcccgacccaagagagggggggcctgtgtnggttnggactttcancactgctgagaaagctgcgaaagcttaccatgctnaggcaagggggggccctgggaanagagccaangtgagtttccctgaggagccttcaggggctgcttcctcaaaacgtgtcaaggggagtccagaggggcagccaatgaggaaaaatcccagctctgtgaggcccagaataaaccagaggtgcaattttngggagaatcgtnaggggctactacaggcctata

SEQ ID NO: 26563 - DNA, 295 bp, Glycine max
  Clone ID: TF_19935601
gataacggtacaccctgagaagaacgaggggaatgtttttttttttaaaaagaggcactgggggagatactccgcgaagatcataaatcccggcaataagaaccgcgcctggatcggaaccgtctacactttataagacgcaaagtgtgactacgacgacacagacctagagtttctcggacctaaagacaagacaaacttacctctcccttacgaaaatgttaacaactcgaaccccagacagagaacaaacaaccagacctccagccgccactgcgacataaacaccgataac

SEQ ID NO: 26564 - DNA, 1180 bp, Glycine max
  Clone ID: TF_GmC289_1
ggctcgagcggctcgagcccaaacccaaacccaaacctaaacgaagaaacagaaagaaaaaaaatgaacaaacaaattggggtttgaaaagaagccggtgctgtctccttgttctccatcgtaagatataactaattatttttatatcttcatccgtttgagaagatgcccgagctgtctctttgttctccaacgtaagttattacaacgtgatcatgtatcgtcgtcgaggtgcgccgagggagaaccgccgccgccgctgccgccgttgtggatcccacgccggaccaggccaaggagacgacgcggttccgtggcgtgaggaagcggccgtgggggcgattcgcggcggagattcgagatccgtggaagaagcagcgcgtttgaggccgaaaccaatttcccccccttccccggccccgcagaggcggaccaccactcgcagatttccgctctaccaggcccatgggctttccaccaagttcgagcccgtcgtccaggtgaaccggcccacgagcagcggcatgagcagcaccgtggagtccttcagcgggcctagggttccctcctcctcctctcgcgctaagccccttgttgtggttgttaaccctatcatccctctcaacgacgacgaagacgattgccacagcgattgcgactcttcttcctccgtcgtcgacgacggccaggactgcgtcctcatctcctccttccggcaaccgctgcccttcgatctaaacctcccaccatccgatgccgacgacgacaacgacgacgacctgccggccaccgcgctgtgcctctgatgatgaagaagaagaagaagaagaagaacctcttctcggtataatcatcattttcttcttgttgttgttattgttgttgttgttgttcaccatctctggtttaattaattaattaaaagttgttagattgtgttgtggtgttgtagagtaatattataataggcatgaatgtgttgttgtaagttatttggatccattactgtgtcatagcattggacctgatctcaaaaactggttggtgcttatgctttcttcatggatctgcttcttacccttacccccaattagaacttactcttttcttttttttttgttgttgttgttctgtacaaaaattatggctatcagatcatagaataaattacattctaatc

SEQ ID NO: 26565 - DNA, 1384 bp, Glycine max
  Clone ID: TF_GmC15818_1
ctatactataaaaagactttctctgtccacaaccatcataccattataccttaccaccccttccttccaccaccctttctttctctcctttatacacacacaagacacacacatcacaagaaagagggagaaaaataaaaacaaaaacaaaaacaaaaggtggtagatgcatgagccacaacacaacacacattatctcataccacactcaccaccttgtattccccaaaattcacataattccccttctcttgccttttccctcagatttctcaccccttctctcttctgtgttgctacccttttcaggtactcttcctactaaattgaaggaaaaagttggtattataggaagttaatcactgctttgatgacttggtaagaaaacttgaactaacaatggtaagtttgagaaggcgcagacttttgggactgtgctcaggaaacagttcctttgtcacaccacttcctctatattgtgagaatctatctggttttgaaaattcaaaccagcaagctaaacctaagagtgaacagcctgcgctttctgatgatgcaagcaacccggacagtaataatgctgtgcaagaagaaccgggatcatcaaatgcttctggttctagctcatcgaaagagcagcttattcaacaaattacaggacctcctattaaacgcagaaagcgacatagaagaaagaatttgcacaatcaagaacaatgcataatgaggggtgtctacttcaaaaatatgaagtggcaggcagcaataaaggtggacaagaaacagatccatctagggactctcgggtcacaagaagaagctgctcacttatatgatagggctgcttccatgtgtggaagagagcccaattttgagcttcccgaggaagagaagcgggatttgagcaaatttaaatgggacgaattcttggccatgactcgccaagcaatcacacgcaaaaaacacaagagaaggcttagtcccggaccaggtaatagtcatgatatgcttccactgtccaaagatgattgggacactaagcaaggagtgattgaagatgcagagcaggaaacatcagtgtcgtgaaaattatgattctggaaataacccaagagtgaagatggaaagcctctagtcctaacacttcaactctaatatcatgctagatccatttttattgtagaaaaatgcagcattatgtcagaccttgatagaattgattatccttaatttatgcaaattgctatacctaaacccaataaagagtccattcaatgttagacgtgtcaactaccaactgttgaactctatatcagtttcatcaaactagtgcaacgccattttcttcttccacttggtgggaataaatgaatttttccaaaaa

SEQ ID NO: 26566 - DNA, 510 bp, Glycine max
  Clone ID: TF_GmC5695_1
gacctcctgctctcacactccctattctccgtcaccttctccctcctctgccactccaacaaactctccgacaacctcgtctacagattcatcaacgctctcggccatcgcagcgacatcaggggcaccattcactggttccagaaagccaaaaacctaacaagaggacgatgcgcatattctgcaaggtgattagagacccgtcaaagtatcgaagaaagcgagggtttgaatgggaaccttcgattttgccgaggaagttgctcgagcctacgacgccgccgctcggactctccgaggtcccaagccaaaacaaaaatccctctctgacctttttgctacaaccccaccatcgatcctttcttctacgcgggtttccccacttaccttgaagtctgccacagcggctgccacacttcatctttcgtcaatgacgacgacactatttttaattttcttctgcttgattgttcttattttactctttgttacaaataatttgagttttgc

SEQ ID NO: 26567 - DNA, 374 bp, Glycine max
  Clone ID: TF_LIB3242-503-P1-J1-B10
cacaaacaacgttagttactactaactagtacgtaccactttcttctagtaactactaactaccccttttgcacaccttgtctcattctctcatacaacgaaactttcgaccaggtaacatgttttccatcaatcatttctccgccccagatgcgaactcgccggggtcggggtcaggaacttcccgaccggtaccggcgctgtcggacgaggattattttctggcggcgagcaatcccaagaaacgcgccgggaggaagaagttccgggagacgcgccacccggtgtaccgcggcgtgaggaggagggactcaggcaagtgggtgtgcgaggtgcgcgagcccaacaagaagtccaggatttggctcgggacc

SEQ ID NO: 26568 - DNA, 384 bp, Glycine max
  unsure (1)..(384): unsure at all n locations
  Clone ID: TF_jC-gmX3027002H12sg1M2a1
aaaaaccaattggtgaccgacccngagaagaaaccaacaggcagggtttgtttgaaaacccacgcggaacaacaaagcacggcacnaggnncccacacccaaacacaaacagacgggcgggacccggaacgagaacgaccgacaggacacggacacacaccaagagcgccacgaagccaacgcnagcaccaacacaacacccccgcagcccaccagaaacagaacaaagaagcaccacagaggagcccgccgccgaccacggggaaaagacgccgcngagacgcgcgacacggcgcgccacggcgccaggacagggcacggcaccacccaaaccgcngaagaggcngccanggccnangaccgagccgcgcacaagaagagggg

SEQ ID NO: 26569 - DNA, 678 bp, Glycine max
  unsure (1)..(678): unsure at all n locations
  Clone ID: TF_LIB4167-034-R1-N1-C6
aaaaaagaaaacaaacacaataacttttgataacaataataatacataaacattcttttattttaaatatcttaccaacatcttctatttatttttttctctctttcttctcatgtcaaaaactctatcttgcctgatttattattctcgttgcaggtactgaagaagaggctgctgaagcatacgacatagctgcgataaagttcagaggtctcaacgctgtcacaaactttgacatgagccgctacgacgtgaaagccatccttgaaagcaacactctcccaataggaggaggagctgcaaagcgtctgaaagaagctcaagctctagaatcttcgagaaagcgcgaagagatgattgcactaggatcatccacattccaatatggaaccacaagctctaattctaggctacatgcttaccctctaatgcagcaccaccaccagtttgaacaacctcaacctctgctaactttgcaaaaccatgatatcagttctcacttctctcaccagcaagaccctttgcatcagggttacatccaaacgcagcttcagttgcaccagcagcagagtggtggttcttcttcttatagctntcagaataataatataaataatgctcagttctataatggntataatcttcagaaccaccctgcattgcttcagggaatgatta

SEQ ID NO: 26570 - DNA, 1873 bp, Glycine max
  Clone ID: TF_GmC12225_4
ggtccggaattccccggtcgacccacgcgtccgcaagtttcgaaattgaaaagggtgggagagatacaaagtgttcattgatttaaacccttgctagaacccttggtaaacctatatctgttctttggccatctcttattttctttcccatctttgttttcccttgcaaaatattcatactctatagtttatatctatctgcttctttaatgtattaattagatacacaggtggtttttgattttgtgaaagggaaagcaagcacataagggctcaatgaacaacaactggctttcgttccctctttttcctactcattcttccttaccagctcatgatcttcaagcaactcaatatcatcaattttcccttgggttagtgaacgaaaacatggataaccctttccaaaatcatgattggaatctgattaacacccatagtagcaacgaaaatccaaaagtggctgattttctatgagtgagcaagtctgaaaatcagtcagacctccacgcgtccccccgcccccaaagttttggaagttaaaagggtgggagagatacaaagtgttcattgatttaaacccttgctagaaccctaattggtggtttttgatttggtgaaaggtaaagcaagcaaataagggctcaatgaacaacaactggctttcgttccctctttctcctactcattcttccttaccagctcatgatcttcaagcaactcaatatcatcaattttctcttgggttagtgaacgagaacatggaaaaccctttccaaaatcatgattggagtcttattaacactcatagtagcagcgaagttccaaaagttgctgattttcttggagtgagcaagtctgaaaatgagtcagaccttgctgccagcttgaacgaaattcagtcaaatgattcagattatctattcacaaacaacagtctggtgcctatgcaaaaccctgcggtggacacacctagcaatgagtatcaagaaaatgctaatagtagtttgcaatcattgacattgtccatgggaagtggtaaggattcaacatgcgaaaccagtggtgataatagcacaaacactactactactactactgttgaagctgcacctagaagaacattggatacattcgggcagagaacatccatatatcgtggagtaacgcgacatagatggactggaaggtatgaagctcacctttgggataatagctgtagaaagggaagggcaatcaagaaaaggacgcctacggaacctcagcaagctcttctaggcttcacgcttaccctctaatgcagcaccaccaccagttcgagcaacctcaacctctgctaactcttcaaaaccacgacataagttcttctcacttctctcaccagcaagaccctttgcatcatcagggttacatccaaacgcagcttcagttgcaccagcagagtggcgcttcttcttatagctttcagaataatgctcagttctacaatggttaccttcagaaccaccctgcattgcttcagggaatgatgaacatggggtcttcttcttcttcctcatctgtgttggagaataataatagtaacaataataataataatgttggtgggtttgtgggaagtgggtttggtatggcttcgaatgcaacggcggggaacacggtggggacagcggaggagttagggctggtgaaggtggactatgacatgccggctggaggttacggtggctggtcggcggcggactccatgcagacgtcaaatggtggggtgttcacaatgtggaatgattaaggaagggaagctagttctagtatgggacaacgtactagttagttgccatacaattttgttatgcatttttatttttttgtc

SEQ ID NO: 26571 - DNA, 378 bp, Glycine max
  unsure (1)..(378): unsure at all n locations
  Clone ID: TF_LIB3242-364-Q1-J1-B6
tcaacctcaacccgattcnnctcgattgcttacctacctatttcagaagcatcatcatcagcttccaatgaaaagctctcncattccgtagagggaccnntcccaatgctttcctttggaaagtctgtatcccaaatcctcgagcccaaaaaaaagaaccggatctggctcggcacctttgccaccgccaatatagccactcgtgcacacgacatcatcatctctctccatcaaaagcaactcctccattctcaacttcccctaactcatctcctacctgccccgacccgactccaactcgccaatagacattcattccgccaccgccaaatccacccccattgaagttaacgattctccgacaactccaacttcgtc

SEQ ID NO: 26572 - DNA, 749 bp, Glycine max
  Clone ID: TF_GmC1505_2
cccacgctttggctcgctcgcaaagtgaggccactcaaaaaacaatcacttcttagcttgatccttctcagcaagagatccaggtttttaagtttttagcctcttatttttgttttatcgaaaaagaaaaaaagaaacaatcacttgcaagtctttagttttctcctccctgttctctggttttggaattgagacaggctctacttataatttggaaaagtttttttctttttgtttgggttttcttaacttgttcttcgcatatcgtaaaacatgggaaccgctataggcatgtacagcaacaacaacatcgtaccggatttcctagatccgtatagtgaagaactgatgaaagcacttatgccttttatgaaaagtgattatttctctgcctcttcttcttcttcttcacgcgaatcacacccttctcctcttattccatctaattctctcccctcctccaaccaaatcaggctcaaccaactcacccaagaccaaattctccagattcaggcccaaatccacattcagcagcagcacgtggcccaaggccaagcccacctgggcccaaaacgcgtccctatgaaacacgccggcacggccgcgaaagccgcgaagctctaccgcggggtgcggcaacggcattggggcaagtgggtcgccgaaatcagactccccagaaccgcacgcgcctctggctcggaacattcgacaccgcagaggaagcaacattagcgtacgacaacgct

SEQ ID NO: 26573 - DNA, 998 bp, Glycine max
  Clone ID: TF_GmC92576_1
ctctctctcatcctttttccctttttcctctctcacccactccctcactccaccgttttccctactactcctttcaacgtcaatgctacccccaataatctaacaacatgactgcgccaccatccaagtacactcaccactccaaactactcattccctccgaagaagaccctcccaaacacccctatcccagactcgtcagaataaccgtcacagacaccgaggccacagactcctccagcgacgaagaacagcatacttccacgcgccaccgacacagaaagttcgtcaacgagatttctagatagtcgtcgtgcgccagcgagacccacggcgccgcttgaaattcgaggattcgaggcagaggcaccctgacgcccaggtccggggagataggcactccgtcgctacgcggcgttcggaaatggttcggagtgagcaacactgcagaggaagctgctttggtctacgacaacgcccccactcggcgccgtcggccccgcgcgcgcacctacgtcaccgcgccgctggcggccgtggtgtcccacaacgcagccctcttgccgcccgctcccctcgcgctcacctcggtcattacgccccctgcccgggaggaaactcattgcaatagcaagaatatcttttctcccacttccgtgcttcactgttgctccttgtccgaggaagctgagtccgttacggccaaagacgatgactactcctcggtgtcggagaataaggtcaaagctgagtcagcgtttccgcccgaaatagattttgagtttcgagcttgttcgactgtgccggagagtctgttgttctgcgatgatgattggtctagtgagtttctcaattcttatgaagatttcggtttcaaaagttggcatacggacagaaatcgtgactttttccaagatatcgacgatttgtttgtctcggatcccctccttgctctctgagttcttcacttcttttctataacagactattctcgtcgt

SEQ ID NO: 26574 - DNA, 456 bp, Glycine max
  Clone ID: TF_jC-gmXLIB3564P109bh09b1
cccacgcgttcgtaccaatatgaacagaatctcctctcgacacctttgctttgctgcagatcgcaactgcaacttcccacaaatataaatatatattacttcatggtcacacatagttaattttattaattactactaggtagctgggttttaataggcagtatgtaagtgtaatccttgacttcctgcaaatatggaaaaagcgcgcttaggagattgttgtttctctaatacgactattacgaggaaaagcgagaatcgaaagctgttgcaccaacaacattataagccatacctatgaataaagattatgaaatggggcaagtgggtggccgtcattatataacccaacaagagggcgaggatctggtttggtgtttataccacccccctaaacggcgcaggcgcctattaaaccggacgtttttaacttctagggcctttccctcggcttaa

SEQ ID NO: 26575 - DNA, 575 bp, Glycine max
  Clone ID: TF_GmC144838_1
cacttattcacccttcattaccaaaatggatattcatagtaatcatggtgcaacttctgaagggattcttgagaatgtgtgggccaaaattatgagcagtgatagagcagatggaagaaaaggtgatgccgcagaatgttctaactcttgggaagaacttcctaaccttgatggaagagaagggtccatggaaattctacaaaggcttccaagtttagggaggtggatatcaatgggagctgatttctgggaagaagttttagaaggtattattctacctaacacaagcaatacagaatattccggtagcaataacaacttggaaattggaagcgctaatgaaactcataacaaggtgggagatgctgtgagaatagagaagtcagttacaaaacactaccggggagttaggagaaggccatggggtaaatatgctgcagagattagagactcatcaaagaaaggtgctagagtttggcttggaacatttgacactgctgaagaagcagctttgtcttatgacaaggctgctttgaggattagaggtccaaaggcataccttaatttcccacttg

SEQ ID NO: 26576 - DNA, 1469 bp, Glycine max
  unsure (1)..(1469): unsure at all n locations
  Clone ID: TF_GmC32_1
naatacaacagcaacatgatggtttcagtttcttgagggtactaatatgaacagaatctcctctcaacacctttgccttgctgcagttcgcaactgcaactgcactcaaatataaatatatatacatatatatatatatatatatatatgtattacttcatggtcacacatagttaagtttattaattactaggtagctggttttgaatagggtagttggtagttatagttgttgtcccagatatggaagaagcaggtttaggagattgttgttcctcgaattcgacgattacgaggaagagcgataagcgaaagcagcaacaccaacaacaagagaagccatacagaggaataaggatgaggaagtggggcaagtgggtggcggagattagagaacccaataagcgttcgaggatctggctgggttcttacgccacccccgtcgccgccgcacgcgcctatgacaccgccgtcttccacctccgaggcccttccgctcgcctcaacttccccgaattgctgtcccaggacgacgacgtttcgacccaacaacagggcaacatgtccgccgattcaattcgcaaaaaagccacccaagtcggcgccagagtcgacgcgctccaaaccgcgcttcagcaatcctcgtcctcacactccgctaattccagccacgtcagcagctctgacaaaccagacttgaacgagtatcccaaacctgaagattagtaattttcttccaccttcaagattaatattgatccaccaatcacgcgtcctgatgtgacatatatatagggcttcaacttgccctcttcacctatgctaatttgaagaagaagaaaaaaacctttttatatttgtcatatgattatatatatatcttagtagatatttttcttccagtctatttattttaatattagaacgtgtaggaagaaatatacagacacacctgagaattgagatgaggctaattaacttgtttatgaggcgagtaactcctttaaatatatataaattaaggggtatatatactattacttgctcatcaccacatgaagaacaacgtttgacctttaaccaaatgagatcgtgtaattcatgctgttgacctgattttgctgttgttgctcatctcacgaagaaactcattatagtttttttttttctttcaatatgtgtatgttagctggagtcgtggactggtagctacgtaggttctcgctatgatggggggcatatcatgtggtcttttctcaggtcggtggtgtgttgtaatttgtaacgagatatccgttacacaatcggatcaaattaaccgtgttttgttgttttagattaataaaaatacatatgttctgatgaattcgataatttcacatacatgtggtgaaaatgatttcatatataagttgtatgcatagttcatgtgtgtgaactatattaattcgaccgatcctgtttatgtt

SEQ ID NO: 26577 - DNA, 827 bp, Glycine max
  Clone ID: TF_GmC32_2
cccacgcgtccgtaccaatatgaacagaatctcctctcgacacctttgctttgctgcagctcgcaactgcaacttcccacaaatataaatatatattacttcatggtcacacatagttaattttattaattactactaggtagctggtttttaataggtagtaggtaggtgtaatcgttgtcttcctgcagatatggaagaagcgggtttaggagattgttgttcctctaatacgactattacgaggaaaagcgagaagcgaaagcagcagcaccaacaacaagagaagccatacagaggaataaggatgaggaagtggggcaagtgggtggcggagattagagaacccaacaagaggtcgaggatctggttgggttcttacgccacccccgtcgccgccgcacgcgcctacgacaccgccgtcttccacctccgaggcccttccgctcgccttaacttccccgaattgctgtcccaggacgacgacgtttcgacccaacaacagggcaagatgtccgccgattcaattcgcaaaaaagcgacccaagtcggcgccagagtcgacgcgctccaaaccgcgcttcagcaatcctcgtcgacacactccattagttccagccacgtcagctatgagaaaccagacttgaacgagtatcccaaacctgaagattagtaatttccttcaaccttcaagattaatattgatccaccaatcatgggttctgatgtgacttatatatagggcttcaacttgccctcttcacctatgttaatttgaaaagaaaaaacttttatatttgtcataaaaaaaaaaaaaaaaacataaa

SEQ ID NO: 26578 - DNA, 967 bp, Glycine max
  Clone ID: TF_GmC268_2
cactatctcatttctttctattcatttcttcattccaccatcaccatggtcaaggagaagaagaacgtggtggtcaagaacaagaagccaaacaacaatgccgacgagcttcacttccgcggcgtccggaagcgaccatggggccgctacgccgccgagatccgtgaccccggcaagaagacccgcgtctggctcggcaccttcgacaccgccgaggacgccgcccgcgcctatgacgccgccgcccgcaacttccgcggccccaaagccaaaaccaacttccccgtgccccccgacgacaacaacaacaacaacgttaacgtgaacaaaaacaagagtgttaacgttaaatctcacagtcccagccagagcagcaccgtggagtccgccaccccggagcgtgaagccacgcgccgctccacctccgccgcaatcgaccgtttcccgttcctacccatccagcagcaaatcctcatgacccaccccgtcgcagcacccatgcgcccggttttctttctcgaccgggcccacttcatgacccagtctttcccgctccggttcgaacccggtccggtccagagcgactccgactcctcctccgtcgtcgtcgattgtcagcccaaaagagagctcaatctcgatcttaacttggctccgcctaatgaatattaacccttttttttatctctttattttttcataaaaaaagatagcagaaagaaaggactaaggagattttttttctctctttttttttttggaagattaatcttccattaagaagttaattagtacatcctttgatgtaaataggttgattttctcttcttttttgttttttaggtccttgatagtattatcagaggacatgatctgaaattgtctagatctgatataatttttcatgtaacatctgaatatctgatgtaattctggctaatatcaattaatcttcttttattacaat

SEQ ID NO: 26579 - DNA, 2096 bp, Glycine max
  Clone ID: TF_GmC97_1
gatggttgccaagtgaaccaagggctcgaggcgagaggtacttgctcacagatatatttttttttttgtctccatcattttctcgagagctttcagtttctgtggttcatctttcttcttcttaatctttccccccctctctgtaacatcccgcttctctgaatccctttctgctaatcatctgtctttcaagctaagattttctggggtacttactcacagatatattttttttttttgtctccatcattttctcgagagctttcagtttgtgtggttcatctttcttcttctccttccctcccccctctgtaacaccccgcttctctgaatccctttctgttaatcatctgtctttcaagctaagattttcgggtttgtctattaattcaccaagaagcaaacttagaaggatttttcgaaagccaggtgttttcagaaacgagatccaggttttattgtcgaatttcgctagtcaaattaattttcataattatttttttctttgaaaccagccaagagggttatttttgatccctcaaagctaatttctctctctctttttttatttccgggactgaagaggttgtctatttgaaatctccttcatcctttcctttcttgtagaaaactttttaaatttttttgtcagtgggtgttttaattaaccacctgttcttcaagttttagaaagacgcaggttgaattaattagtatcatggcagctttgatggatttttacagcagcagcccagagtttcaacttcactcagatccattcaggggagaactaatggaagttcttgaaccttttatgaaaagtccttctcccaactatttcccttcctccccctccctccctaatctttactcaaacgggttatccagcaacacccaaagcttaattggcttcgggcaagcgcaacccacatctcttgtgggcctgaaccacctaaccccatctcagatctctcagatccaagcccaaatccagatccaggcccagcagcatcagaatcgcagcaacaccctgagcttccttgggccgaagcccatccccatgaagcacgcgggcatgcctccgaagcccacgaagctttacagaggggtgagacagaggcactggggaaagtgggtggctgagatcagacttcccaagaaccggaccaggctgtggctgggaaccttcgacaccgccgaggaagccgctctggcatacgacaaggccgcgtacaagctccgaggtgacttcgccaggctcaacttcccaaacctgcgacaccagggttcctccgtcggtggtgatttcggggagtacaagcctcttcattccgctgttgacgccaagcttcaggccatttgcgaaggcctggctgagctgcagaaacaggggaagaccgagaagcctccgaggaagtcgcgttccaaactcgcggagaaggttgtttccgacaaggagaacaacaactcttgtaaggtggaagctgcgtcctggtcgtcggaaggttcttcgccgctttcggatctgacgtttgctgacgtgagcgaggctcagtgggaaggtgattcggataattataatctccagaagtacccctcttatgagatcgattgggattctctgtgaagtgtcctattatgtatggtctagtctaggtcttagtgtctcttaggtggctgctactgcaatggagtttttggcaattgcagggctagtactattctgtgtataatctctctaccttgctcacagctggtttttttcttgcttgaccagggagaattagtccgcttaatatgtttttcaagtgcatcgctgtaatctacttcaatttcatcatcttataaaatatattattctactaaaaaaaaaaaaaaaaaactcgaaacaatgtatacactcttcattcttcaacatagcatgcaggtctatacaggaaatacactctgttcaacagctgacattcaatgagctacatgacgtcggtcacttctctacgatgttaatcttttttcccactataacactatgtttggtttggaaaagaaagtggaaggaaagaaagtggaagtaaagaaagtgattcgtgaaggct

SEQ ID NO: 26580 - DNA, 1779 bp, Glycine max
  Clone ID: TF_GmC97_2
ccacgcgtccgccgccacgtgtccggacgcgtgccgagaggtacttgctcacagatatatttttttttttgtctccatcattttctcgagagctttcagtttctgtggttcatctttcttcttcttaatctttccccccctctctgtaacatcccgcttctctgaatccctttctgctaatcatctgtctttcaagctaagattttctggtttgtcttttaattcaccaaaaagcaaacttagaaggatttttcgaaagccaggtgttttcagaaacgagatccaggttttattgtcgaatttcgctagtcatattaatatttcatcattttttttttcctttgaaaccagccaagagggttatttttgatccctcaaagctaatttctcattttcttttccgggactgaagaggttgtctatttgaaatctccttcatcctttcctttcttgttgaaaagtttttgtttttgttttaattaaccagcagttcttcagttttagaaagacgcaggttgaattatcatggcagctatgatggatttttacagcagcagcacagagtttcaatttcactcagatccattcaggggtgaactaatggaagttcttgaaccttttatgaaaagtcctttctcaaccccttctccttcaaattcttgttttctttctacctcttactctccttcccccaacaactactctccctccctatactcaaacgggttatcatccatacccaacaccacccaaaacttaattggtttcgggcaagggcagcccacatctcttgtgggcctgaaccacctaaccccatctcagatctctcagatccaggcccaaatccagatccagaatcacagcaacacgctgagcttcctagggccgaagcccatccctatgaagcacgtgggcatgcctccgaagcccacgaagctatacagaggggttcgacagaggcactgggggaagtgggtggctgagattagactcccgaagaaccggaccaggctatggctgggaaccttcgacaccgccgaggaagccgctctggcgtacgacaaggccgcgtacaagctccgaggtgacttcgccaggctcaacttccccaacctccgacaccagggttcctccgtcggtggtgacttcggggagtataagcctcttcattccgccgttgacgccaagcttcaggccatttgcgagggcctggctgagctgcagaaacaggggaagaccgagaagcctccgaggaaaacgcgatccaaactcgcttctccgccagagaacgacaacaacaacgacaacaactcttgtaaggtcgaagctgcttcctcctcttctgaaggttcttcgccgctttcggttctgactttcgctgacgtcagcgagccgcagtgggaaggtgattcggataattttaatctccagaagtacccctcttatgagatcgactgggattctctgtgaagccgtgttttcttagtgtcctatgttgttatgtaagggtattaatcttcattatgtatggtctagtctaggtcttagtgtcttctcaggtggctgctactgcaatggagtttttggcaattgcagagccagtcttagttaattactagtattctgtgtataatctctctctaccttgggtcatagctggtttttttcttgcttgaccagggagaattagtccacttaatatgtttctcaagtgcatcgctgtaatctactacttttaattataaaaatatggatttattattgtacaaaaaaaacacc

SEQ ID NO: 26581 - DNA, 2829 bp, Glycine max
  Clone ID: TF_GmC307_1
ccctcgcttccggctaaccaaagaggcaaaggtggccctcttcccgtactcttggattggacttttctggaaagagtttccttttacttgtattattctcatttcccttttctgatgccaaactctctctctgccgtggtctcgactcacaataattaatattccaccttcttccccaaatcgccctccctcatcacccctatttactttctttcccacttagtcatggacttggatgcactcctaatactcatctttaaccatcactctacaacgctaacaaaaggttgttctgagtaattatctttcttttggactcctcgcgctgtctatttccttttcgacccagagagagacagatagacaggagatgctttttcgatttcgttaacgtgagaaagttttttaagaaagagatgcttgatgcttattggttttggtctttcctttccttttccccccatttttacccccttgcatttttatttattaattaatcacataaaaacggaaacaataaataacagtacggtgattattttaaacaatatatatataaggagtttcctcctggagaagcaaaacaaaaatagattgtcggctcgagatttatttgagtaatataaaaagaaagagagaagagattgttgaagttgaaggtgggatgctttcggctaagcttgctgaaactggcctcgtctatgctgtattgggcagttaggggaattcaaagatctttgaacacctccttctttattacctttttccaacacctactacctcttctttctctttctcactcgtcctaggtttgattttctcttccttccttctcccaatactcctccattattttattctcaaaatccaaacgaacactctagcttcgttactacttgcctttttctttttcctttttctctgcccagctatatgcttgtgtaagaaggggaactaataagccattctaaagggagctgaagaatgtggaatctgaatgactctcccgatcagagaaaggactatgaatctgaaggctgttcttcttctctgaatgatgataaaggcaagagggtgggatctgtttccaattcaagctcctctgcggtggtagttgaagatggatcggaagaagaagacagtgaaagaggtggaagcagaacattggacaagaaaaccaacaaaatattcggctttgcggtagcccatgatgacagtgaccacccacccgtgacccatcagttttttcctgttgaggactccgaactgcctgtctccgccgccgccgcaggcagtggaggcggtggcggcggaagctccttcccacgtgctcactgggtaggtgtcaaattttgtcaatcggaaacacccggcgccggaaaagcagtgaaagtgtcggagccgatgaagaaaagtcgccgaggaccacgctcgcgtagctcacagtatcgaggagttactttctacagaagaactggtagatgggaatctcatatatgggattgtggaaagcaagtgtatttgggtggatttgacacagcacatgcagctgctcgtgcgtatgatagagcagctattaaattccggggagtggaggcagacatcaacttcaacatcgaagactatgaggaagacttgaagcagatgaccaatttaaccaaggaagagtttgtccacgtacttcgccgacaaagcactggatttcccagaggaagctccaaatatagaggtgtaactttgcacaagtgtggaagatgggaggctcgaatgggccaatttttgggcaaaaagtatgtttatctgggtctgtttgacaccgaaattgaagctgcaagggcatatgataaagcagcaataaaatgtaatggcaaggaggctgtcaccaattttgatcctagcatctatgatagtgagcttaattctgaatcctcaggaggtgtagctgcagatcacaatttggatttgagtttgggcaattccagctctaaacataacaatagtcaaacatcggggaatcacttcgcaaattctgcaaccgatcagcatatgccacctgaatctaattggcggaatgggggaagcaagcctaagctggtaaatatacttccaaaaccatgtggtagaagcaacatagaagcctatgggcacggtgagagtgaaaccttgaggttgctaagccaaactcaccttcaatcccctaccaataaagaaatgcacagatatggtccgtataggtcgccagcagagccacaaaagcctcacaattttgcacatcatcttcaccaaccaagttttcatgttcctagcagcagcagcaatggaggccgtattggaagcgatctttcgttatcaatgtccgatcaacaacaatggcaagccgggcctccacatttgttagcaactgctgcagcatcatcaggattcccacagcaaattagaccctcccaaggttggctgcagaaaaatgggttccactctctcatgagaccctcatgaccatcctcaagattttttctaccatgccattttgcattttgaaaaataatctccccctactatttgttttgtgaacatgtacaagtgaaagtgaatgcagtttagattattattatgtaatgtccaacctcccccttctttaggaagcccatacataactgtaactttactattggggtgaaagacaagaagggatgaaaaaaaaatagggaaagccaatttgggaactcgctctggatttgttataggccagtcaaactaaccaacggacaaaatctttaactagatactaagatattctgggcgctgactaaagtttctgatctgatcttt

SEQ ID NO: 26582 - DNA, 3696 bp, Glycine max
  unsure (1)..(3696): unsure at all n locations
  Clone ID: TF_GmC25_1
tacaagacgacagaagggggttcaaaaccttgagagtttcaagtccaatattttgtacgtcatgctagaaagtgatgcatatgatcccaggtttgagctgtccatttcacttttngatgcatttaagatatggggcttcctgttaaattaggttctgagcatacatgacggcttacgcgtgtatgcctgagccttccttattgcctagcggagcagccaccctgtctcggagccgacaaggttgcgtggagacctcaagcaggatcagctcaaacagcaacaaacgacagagattcttcctcaacacaatcgaaaaaaaaaaagcttccgattctaaaaccagaacaacaaaaaagtaaaacacacacgtcattttaaaacatttcattttttttggttatttatttaaagagcgagtgttgtaacaaatggtgaagccgaagagcgtggagaaacccgcagaggaacaacaacaacgaagatgtttcatcgtgacagaggagtacggaagaggaagtggggggaagtacgtgtcggaaattaggttacccaacagccgtcaaaggatttggttgggttcctatgacagcgccgagaaggcggcacgcgcgttcgacgctgccatgttctgcttacgtggcagcggcgccaaatttaatttcccgagtgacccacccaacatcgccggcggggggaacatgacctcctcccagattcagatcgcggcggcgcgtttcgccaattcggagccccgaaatgagggatcagtcccacccgtggagtctttaacttcggatgaggaaacggcatcgtttccggtcatttcggatacggatacatcatctcctcctctctcagacgtgacgtatccaaaacgactgccgaattagtactgggtcgttccctgatatgttttcggatttcgggtcgggcgattttgtgcccgatttctccgattttccgagcttcgacgatttcagccgggacttcttcttgcatgaacttccgggtttcaatttcggagaagagaacttggatggattgataattcaggactcgttcttgtggaatttctaagcgggtcagggttcggataattttattatatccgaacccgatatcagaatccggatcggatccgggtttgggttgggtcaaattttgcgtgccaagccctccatgtgttagtagttagtgatgattatagttttttttttttaacgtaccaagtagtcaaatgtttcgattttttgggatgcgaatcataattcatttatttgtcatgacttatgtgattaattgtaaagtcgtctgctgaatgatagtgtaatttttttggcctttccgttccaaaaaaaaaaaaaaatgttcgtaaaaaaaaaaaaaattacaaaacagaggttggtggatcggctgagatcacatggaggaagatatatagctctccactgagatatgagaaagatatgctgtctttactggctgtgcatatggtctgacagatgcagacctgaagagcttagaattttgagggagaatacaaattattggaaagtaaaaaagataaattcaacagaacagagaattggaggattttgtccattgactccaaaggaggtgggcatttttcttcatgctcttggttatcccccatctacaccaatatacattgcagcaggagtgatctatggtggtaatactcatctttcagagctctcatcccgcttccctagtataatctttaaggaatcccttgcaactcctgaaaagctgacagatggtgccattgtcatggatgccgatgctacctcagctttgcacaaaaggggcattgtcccaacaaatgatagcttcaaatatgcttggttcaaggaccatgagagtgtggtaaaagcaatatatactggttctgagtttgttgatactgttaacaccggtgatgatattggtgtagttctggagtctacaagcttctatgctgagcaaggtggtcagatttttgatactggatcacttgagggcccacatgctttatttgaagtgcgtaatgttcaagtttatggaggctttgttcttcacattggtaatgggactggtgtctcagttggcgacaaagtagtgtgcaaggttgattatggaagacgcgcccttatagcccctaaccatacctgcacacacatgttaaattttgcccttagggaagtacttggtgatcatgttgaccagaaaggatccattgttcttgctgaaaaattgagatttgacttttctcatggcaagcctattgaagctgacaatttaaggagaattgaatcaattgttaatgagcaaattaaagctgagttggatgtaagtgcaaaagaggcaactcttgctgaagccaagggtatcaatggtttgcgagctgtttttggggaagtctatcctgatcctgttagagttgtgtcaattggacaaaaagttgaggatctccttgctgaccccaagaatgaaaaatggttatctatttcatcagagttatgtggaggtacccatatttcaaacacacgagaggcaaaagcttttgcacttttatctgaggagggaattgcaaaaggaatacgcagaataacagctgttacaactgatcgtgcgtatgacgcaatgaaagtggcagatgaatttgagcagcaagtagatgatgcggctaagttagtaggaactttgctagaagagaaagtttcatcattgaaaagcaatattgaaactttatctattcctgctgccaagaaagctgacatcaagatcaagatagttcgacttcaggatcaagtaagaaaagcacaaaagcaggtcgctgaggaaaacaagcgtaaagctgtaatgattacagcagagaaggctgaacttgctgtttcaaatgggaaaacattttgtatatctcttgttgatgttggtctggatgtagctgcagttcgtgaggctgttacaaaagtcatggaccagaagggcttatctgtgatggtttttagcacggacgaatctacgaacaaggctgtagtgtgtgccggggtgccagagaaaggaggtaaaggtaatctggatgtggcagattggctgagtaatgctttggggcctctaaaagggagatgtggtaaaggaaaaggtggtcttgcaacgggtcagggtacagaggcatcacatgtaaacgaggctatagatctggcagaaaaatttgcgtcgatgaaattgagttaatggtgtatttgcagtatatccttcctggggtgtaagcatgatatggatctttcgtttggtggtataatcataatcatacagaagggaagggcacttgaagtaattattagatccggatgagttgaacaaatttctaatttagtgcctgaatatttttttgctctgatagattatgaagatattttgaaattttaaactgtcaccgttttcgaaagcgtgtttttttattgtttatgtagctttgaattttgacgatttcagcatttcatttcgcagaaatggtctaatacatgttaatgttgggttttagcttcattttttaaacgaataaaaagtaattttatttttaaacatgttagtttttggtttatgtatagatcacaaattgttccacaatacagtagcaactgctctgatagattatggggagaattcgaaattttcaactcaccattttcg

SEQ ID NO: 26583 - DNA, 1704 bp, Glycine max
  Clone ID: TF_GmC326_5
actcacttcacacaaaccaaagttaattaattaccaacacaaaatggatggaggctgtgtcacagacgaaaccaccacatccagcgactctctttccgttccgccgcccactcatctatctttgcttccccttagtcaaacaaagtaacacaccatccatcctctctctcttctcttcttctgttctctagtttcctgctcttgtttcttagaatccgtacggtctaatcaacacaacaaaatggatgcaattagttgcctggatgagagcaccaccaccgagtcactctccataagtcaggcgaagccttcttcgacgattatgtcgtccgagaaggcttctccttccccgccgccgccgaacaggctgtgccgcgtcggtagcggtgctagcgcagtcgtggattccgacggcggcggcgggggtggcagcaccgaggtggagtcgcggaagctcccctcgtccaagtataagggcgtcgtgccccagcccaacggccgctggggctcgcagatttacgagaagcaccagcgcgtgtggctgggaacgttcaacgaggaagacgaggcggcgcgtgcgtacgacgtcgccgtgcagcgattccgcggcaaggacgccgtcacaaacttcaagccgctctccggcaccgacgacgacgacggggaatcggagtttctcaactcgcattcgaaatccgagatcgtcgacatgctgcgtaagcatacgtacaatgacgagctggaacaaagcaagcgcagccgcggcttcgtacgtcggcgcggctccgccgccggcgccggaaacggaaactcaatctccggcgcgtgtgttatgaaggcgcgtgagcagctattccagaaggccgttacgccgagcgacgttgggaaactgaaccgtttggtgataccgaagcagcacgcggagaagcactttcctttacagagcgctgctaacggcgttagcgcgacggcgacggcggcgaagggcgttttgttgaacttcgaagacgttggagggaaagtgtggcggtttcgttactcgtattggaacagtagccagagttacgtcttgaccaaaggttggagccggttcgttaaggagaagaatctgaaagccggtgacacggtttgttttcaacggtccactggaccggacaggcagctttacatcgattggaagacgaggaatgttgttaacgaggtcgcgttgttcggaccggttgtcgaaccgatccagatggttcggctctttggtgttaacattttgaaactacccggttcagattctatcgccaataacaataatgcaagtgggtgctgcaatggcaagagaagagaaatggaactcttttcattagagtgtagcaagaaacctaagattattggtgctttgtagcgttacgttactttttttgagttttttttttttttgagttttgtgactgatgaaagaaagaaggtacaagaagaacggcggtgtagtggcatagtggcatcgcaagttgctgcaaaaggtgaattgtatattacttaatattagatgctgaaatattaggtgtaatgtaacaaaaaactgtacaaggagaagaaaaaaggttctaagaaggggagaagctagaagaaaaaaaatgatgtcatcatgggataactgtttaattgtatatgttgataatattgttgaatgttgattattatgttcacggc

SEQ ID NO: 26584 - DNA, 1525 bp, Glycine max
  Clone ID: TF_GmC194331_1
tcagccatcaaaaatatttttatttaattctatcaagctcattatccacaattaacaattaatactaacaagcactaatctttcagcagcgtcgtagtcttcccgtcactctgttcacaccccttgccatcctccgatctgtgtgccccttccgtcccgtggctccgttcctttgctcttacccatcgctcgtcagtgcacttgacctacacacacgttgtattggcgaagtccccatgctagtttgggctcaccgctctctctggctcgatgcagaacggctccgttgattccctcccccttcccctgcagccatccgcgttcgccctgcacctaattggcgttgtacatccgcgccccatcgcccccaccaacctcatttttttttttttttttattttttttttctaattaattaatcaagcaattttaaactcaaatttctttaaagatcaaagaagaaaggatcattataatcccataaactaccagtgtagtcatcctcgttcgccatggaccaaaaaggcgaaaaagatccaagccccattgtccccaccaacgccagatccggatccaccgaaaaagcatccatagcagacgcaaccgaacccacgacgggggaattattcactccctccaccaccacgccattctgatgttgctgttgctgttgattcaacaaaaccccatgttgcacttgcacatgcacatgattattattactatccagaaaaccatgcctttggtacgaggttgatctaatagaaccatcaacaacaaaaacattattattcacacctaaacccacatcggattccgaattatgttggtacgatgttgatagagtatgtgccacttgcacttgcaccaattcctcgggacaacgatggtgatgaggatgatgaacttgcactatattattattgtgattatcattagggcacagaaccggtggggagtaagtgtaattgtgactattgttataagggtaaggcacggtagcggtgttaaatggaaaattgacagaaaaacctgaagggcgaggaagcaagggtcttagggtttgggtggaagaggaagaggagcgagaagaggaagattgagaagaggaaccggagggttggaggttaagctgtgccctggaaccgtagaggatgatggcggcgcggtcgtaggctctggcggcgtcctcggcggtggcgaaggttccaagccacttacgagttcgcttgcgtggctcgcggatctcggcgacccatttgccccagcttcgttgtctgacgccgcggtacctaaatttgttgttgtcgggcggacgcgtacctttgcacttacgactactgattttgttgttggtgttactgttagatgtttcgctgggagtggtttcagtggtggtggtggcggtgggtttggtttcttggggttgaggaaggcggacgcgccattggttggttgggcccagttagaggggaaagatggttgggaaggtcgttccttcagtgttgatgttgattaggctctg

SEQ ID NO: 26585 - DNA, 1514 bp, Glycine max
  unsure (1)..(1514): unsure at all n locations
  Clone ID: TF_GmC194331_2
aaaaagaaggaaatttttatagacaaactaattaagaacaatattaatcaacccaaaaaaaantaatacagcttttttccaatcattcaatttctcaacttctggtttcacagttaaaactccatgaaaacctccgaattatttgatccaagagaacaatgactacgtacatttacatttaaacatcactgatcagtgcatataacttacacatacattgaattgatgaagtccaaataatagaaagggcttaccgcataatctggcaagatacataacttcatcgttgatttgcttcccaatcaccagcagcaaaatgtatttgcactgcagttaattagtattttacaacagcactaaatctcaaccatgaaaatgattttatttaattctactacgcttattatccacaattaacaattaatactaacaagcactaatctttcagcgtcgtagtctacccagcattttattcacaacagcatcgatcaatctatantgtgatcctcttccatcacgatgaactaatactataagttcaaaccaatcgaacgatataattaacttgaacaacatatgttataattctaattgctaattaaccaagcaattttatactcaaatttctctaaagatcaaagaagaaaggatcattataatcccacaaactaccagtgtaatcatcctcgttcgccatggaccaaaaaggcgaagaagatccaagccccattgtccccaccaacgccagatccggatccaccgaagaagcatccatggaagacgaaaccgaacccacgacggaggaattcactccctccaccacgctattctgatgttgctgctgttgattcgaaaaaaccccatgttgcacttgcacatgcacaggttatgttattattaatattatccaaaaccatgccgctggtacgaggttgatctaatagaaccatcaacaacaatattattattcccacctaaaccccccaaatcagattccgaatgtggcacttgcaccacttcccggacgcgtggatagtgatgtggatgatgaacttgcactgtattaatattgtgattcttactattatcaatagggtacaacacgggtggggtgtaagtgtaattgtgactattgttataagggtaaggcacggtggtggcgggggcggagttgaagggaaaattgaaagtaaaaccagaagggcgaggaagcaagggtcttagggtttgagtggaagaggaagaggagcgagaagaggaagattgagaagaggaaccggagggttgtaggttgagctgtgctctcgaaccgtagaggatgatggcggcgcggtcgtaagctctggcggcgtcctcggcggtggcaaatgttccgagccacttgcgcgtacgcttacgtggctcgcggatctcggcgacccatttgccccagcttcgttgtctgacgccgcggtacctaaatttgttgttgtcggggccaccctttacctttgcacttacgaccggacgcgtgg

SEQ ID NO: 26586 - DNA, 482 bp, Glycine max
  Clone ID: TF_17023892
aaacgaggcatggcatcattattagttgcagtgccaccaaacacttgagaatgttgatcactgagtggcgtcgccgaggcgtggaacaatgatggacgattagtgaggtaaccaaattccttagagaaatgaaccctttctggaaaattaagcttagctttggttcctttgaatctgagagctgcttcatcgtaagcgagtgcagctgcctcagcagtttcaaaggttcccagccaaactctcgctgctttctttgggtctcgaatctccgatgcccacttcccccacggtcgttgtctcactcctctatagtgccttcttacgtttccttcacatacacacacacatgtccatacatttcaacaaaacaatttgctcccatctttgttacactattttttatttttttttaacaagttatgatatttagacatccatttttctcaaacatctatctgatactaatcatttctctttaaaaa

SEQ ID NO: 26587 - DNA, 1191 bp, Glycine max
  Clone ID: TF_GmC104_1
aattaacacaaagcaaacacctccaactacaaacaaacacacttcacaactttgctttttctctctttcaatgtcctcttcttccttctcccccgccactctcaccaccgagcaggagctttccgtcatcgttgccgcccttaccaacgtcgtcgccggctccacctccgcctccagctccttctccctccccgaattccgccttccacagacctctgatcctctcgccgccgcctgcctaatgccgccgccgccgccgccgagcatggacacttgtcgcgagtgcaacatcgcaggatgcctgggatgcaactttttcccggaggagaaaaagaagcagaagagggccaagaagaagtacagaggcgtgaggcagaggccctggggaaagtgggccgcggagattcgtgaccctcgtcgtgctgcccgggtctggctcggcacgttcggaaccgccgaggatgccgcccgggcctacgacaaggccgcgattgagttccgcggcccacgggccaagctcaatttccccttggtggacgagtcgctcactttgcagcagagcgagccagagagggttcaaacagaagaagagcaaataaagacagagaatctcaatcaaggtatggaaatggattcattcgggaacaaggataccgaattctgggacaggattaacgaagctgattttcatcagctcatgatgatgatggattttgctggagattcttccgactctgccactgggaacgctcttagttcttgaaatattcaatgaagcaaaataattagtttttgatagtgtgtgtgtttaaaaattgtacaactcgaccaaacgtatttgttaaattagcatttagctagctccactacactgcatttctgtaatatctttcttccgctaggttttttcgggaggaagctgctgcatagtacaaatcaagagttttaatgtttcatttcaccaccccaagagtaagctctgtataaagattggcgtattattattattatttttttatagcaataatagctagttttaagagcaagttatcactagtcaaaaactttcaatttgtacatttttagtatgatttaggatattaagctttgaattggtcaaattttaatttaaaaaagaacaaaattgtcttttgtttaataaaattgctctaaaagagattctaataaaaa

SEQ ID NO: 26588 - DNA, 579 bp, Glycine max
  Clone ID: TF_LIB4391-059-R1-K1-C1
cgaagatgagtctgagagggttcagaagccgagaagagtaaaaagaagcgtgttggagatgtctcttccccctctccctcaaacattcaccaccactactcctgatactagctcctgtgaggtgaatagcagcaaaaatgcaacattgaaggtttgcactgttttgtaaccccagagcaagaagagggttttgactcacactccatcaacgagaaggagcacttgtgggaaatatagaggtgttaggcagagaaaatggggtaaatgggctgcagaaattcgtgacccgtttcagtgtactcgtatatggcttggcactttcaacactgcagaagaggcttccaaagcctatgaaaccagaaggcttgagtttgaagccatggcaaagactcaaactctaaaaactggttctgaacctttgtctacaacttctgataagagtaactgctgtaactcctctgctgctgccgccgccgatgtgtctgtgtctgaaaagttttctactacttctgatgactcggaagagagtatgttgtcacacaattcaccatcctctgtgcttgagttggatacctcggc

SEQ ID NO: 26589 - DNA, 1375 bp, Glycine max
  Clone ID: TF_GmC91_1
aaatatttatatgtacgtatatacatacatacacacagagacatggagaacaataatcatcatgccatggctgcaggtgctagtagtgattcaaacactagtgatcacaccaccccaatatcttcttcttgtgttaatgataacaacaacaataagttatacaaaggggtgagaaagcgaaagtgggggaaatgggtttctgaaatcaggcttcccaatagccgtgaacgaatatggctagggtcttatgactctcctgaaaaggcagcacgagccttcgatgctgccctttactgtctacgtggccgccatgccaatttcaatttccccaacacaccttgcaacatggacactgctaccaatgctcctcctaaccaatctcttaccccaccagagattcaagaggttgctgctaagttcgcaaatcaggtgtccccgctactacaaaaacctcaagaacaacctcaacctcaacgtagtagtgatggtggtggcggtggtgctaattcttcatcgtttggatcaaagttgttatgtaaatcagacagcatagcagagagtagtactactagtactactactaattgtacccccaccaccactgcctcgtcatgttctgctactatgtacgaatgtgatggaacggagcaagtggaccgtggggacatgatggattggacattcttgaacgtctttgatttctccaatgaggtggtgcttcctgctgttggatccgactataatgatctctataattctgagctacacaagatgcactcagattcaggtgagttattgtattctactccttttgagggttacgaacaattaattgaagctgatcatgatgatgatgatcctttttctcaccaatcattcctttggaattggaacttttgatcatcatatcatcactcgctactgcatgtgctgctagaatatgatgactactagttaaaattacttgccccagcctaaatatataataaagcatccttgatcttttgcatatatgatatgtatatgggggtggctccaagtatataacaataacaagggcaagacaagacacaggctatgtcagaccatatatatattccttaccataattaagtatatgcctagctatatggctagctagtgacctcggtttttctagtgctatctattccatagattagcacaggctaccaactatatagtatcgatcgatagatgttgtcttactatatgtttccccttggcaataaaatatttgtactttataggttgttttatgtatactggttcaagtatatatttatacctaagtatatatatattgatctgtgacatgtatcccttctcctttccgtatttctctgtaaaattaaat

SEQ ID NO: 26590 - DNA, 1551 bp, Glycine max
  Clone ID: TF_GmC1423_2
aaggaaggcaagtttatctagggggttatgatatggaagaaaaagctgcaagagcttatgatatggccgcactcaagtattggggaccctcctcccatataaatttccctttggaaaattatcaaaacgaacttgaggaaatgaagaacatgacgagacaagaatatgtagctcatttacgaaggaaaagcagcggattctcaagaggggcctccatgtacagaggagtaacaaggtctcacaggctagcatttacacagcaccaccaacacggaaggtggcaagctcgaattggaagagtggctggaaacaaagatctatatcttggaaccttcagtacccaagaggaagcagctgaagcctatgacattgctgctattaaattcagaggatttaatgctgttacaaactttgatataacaagatatgacgtggaaagaattatggagagcaataaccttcttagtagtgaacaagctaagcggaaaagagagatggatgatggaactagaagcgaggctacagttaaccaaaaaccttgtactactcaagaaaccgttctgatgcagaaaagatgcagaagccaatcagaatggaagatggttcagtatccatcctcccaacagcttgatcagaatccacaaagaattgagtgtagtagaactgagtccttgtcaactgctttagataacatgtttcatcaccaagttgaggaatcgagtaacatgggaacacacttgtcaaatccttcttctctggtgacaagtttgagtagctcaagagaagagagcccagataagacaagcttgccaatgctctttggaatgccttcaacagtgtccaaattattggctgacgtggattctttggatctatcttccaatctcaggccttcgctttctattcctcagatgccaatttttgctgcttggaccgatgcataatcctatgtttttttacctccatcaaaatggcaaaagcttgttttgaatgcttgtttactaaaccagggtgtgaatttccagctagtacaatagggagcttgtgcccatgtttaaaatgttaactgttacattaaacattttcctcgtacgatgagaggaaaactcctaaagtttagtgtatcgcttagcactccaaattcgcatcatcaatttttcggtgttagaatcttatctaaaggttattttgaccctttgccaatgctttttggaatgccttccattgcatcaaaactattgggttctaatccaaataacgtgaatttttgggacccttccccccatttgaggccagcactttctttgcctcaaattccagtttttgcatctgtccaagctgcaaagttcataactcaatagtccttttaattttttgttctctcaagtgaaatttcaatcctttttattgtctttttttgcatgcatgaacaacacaagaggaaggggttgtagctagtcaaatggagggtctaaatattatatcatcacatcactgtcagcaagtttaatttaaactttcaaatcattacattttagcacacattgctgg

SEQ ID NO: 26591 - DNA, 1620 bp, Glycine max
  unsure (1)..(1620): unsure at all n locations
  Clone ID: TF_GmC1349_1
cacgcgtccgacaaaaactactatttttgtttcctatacagcagggaagaggaaccagttattttcggtgagaagtacaccggaaagtttttgcctaaagaaatcatggagggaatgcgagacacaaagtcacagcttgaaatccaagaccaagagggtactaatattgggtcctctttgtcaaagctcatattagcaagtggcagtggcacaaacacccttgactcaattttctccaattgcccacaaacaacaaatggcagcactagtagcaactccgtgttagatgatttagaaccctttaagtcttcggggtgtgagcctttggggtcttccgtgtacctccgccaaagggacatcctccaaaagttctaccaagaaagccgaggaaatgggtcttataatgttcccacttcctccttgagtaattcgttgacgaacccttgcaagaaaaagctgtacaggggagtgaggcagaggcactggggcaaatgggtggcggaaattagactcccacagaacaggatgagagtgtggttgggaacctacgacaccgccgaagctgctgcctacgcctacgaccgcgccgcgtacaagctccgtggagagtacgcgcgtttgaacttccccaatctcaaggaccccaccaagctaggtttcggtgactccgccagattgaacgccttgaagtcctccgtcgacgccaaaattcaagccatatgccagaaggtcaaaagggagagagccaaaaagaatgccgccaagaagcttcacaatagcactgaccctaaacgcggccagagtgagaagccctcctcctcgtcctcgccgtcgccgtcgccgtcgccgtcgtcgatttttaacgataattgggcgaaccagttgttttctccggccgtttcggaggatgggttttggaagggggagaattcgcattcgccggcctcggttttgacggagtgtcaaacagaggaaacagagttgttgttcgaaggttgttctctggctagattgccttccttcgaccccgagttgatttgggaggttctgaccgtttaattagttgatactgtcttcctttcttaggttactacttacagcgagcgctcatgtcatgtgtatatgaaaaatatatattattagtgtggtcttgttttgtttgtcggaatgggaagaggtcctttagcgttcaactcctcttcttgctcttcgtcatcgctgtcgcagccgttgtcgccaccttcgattttttacgataattgggcgaacgatttgttctcgccggcctcggtttcgacggagtgtcaatcaatggaaacagaggagttgttcgaaggttgttctctggctagattgccttccttcgatcccgagttgatttgggaggttctggccgtttaattcattaatactgtctttctgtctttaattaattaggttacttacagcgaccaccgctgatgtcatgtgtatatatattattattagtgtggtcttgtttttgtttgtcggaatgatgagaggtcctttagcgttttgagtaggattggtatggctgtgggttttttgctcaaggcagttgcttcctattnnncttgttgtgatagacttctccctcct

SEQ ID NO: 26592 - DNA, 1301 bp, Glycine max
  Clone ID: TF_GmC1488_1
aaaaacccttctctcttttctctctctctctctcttttagtaactcccctagtttgttacaaatatttgtccatagtgtgtgcaatgctgaaatcaggcatgggaattcaggagagaaagaaggtgaagaaacctgcacaagccagttccagaaaggggtgtatgagagggaaaggtggccctgagaatgctacttgcacctacaaaggtgtgaggcaaagaacctggggaaaatgggttgctgaaatacgtgaacccaaccgtggtgcaaggctctggcttggaacctttgacaccgctcgtgaggctgctttggcctatgatgctgctgccagaaagctttatggacctgatgcaaaactcaacctcccagaactctctgtgccttatgctgctggagtgatgaatccttctcacatgcaacaacagcaacagcaacagcaacaacctcaggttccccaaatgatgatgcaacaacaacagcctctcgtgcaccctacctttgaccttgtcaatgtcactcctcattctgatttcaacaacaacagcatcaacatcctcaacaacaaccccgtggtctcttccatggcttcttcttttcttgcagatgcagcagcacccgtgtataccagctgcgactctattgtctctcttccgttgtctgcaaccaattacaccaccaacaacacggtgccgatggaaatggacggctactactattcctccatcgctgtggagagcaaggaggacgacatgtttcgccccttctggggtccaacaatggacgacaccatgcctgtgtctgatgagtccatctggactgaagctgctatgtctcttgattatcctattgttggaggaggaggcgggttcgtaacaaccgaaaatctctttggagaagctactgcgtggactccctgcaaactccttctttctgcatgtaaattgtcatcggatgaaagagacagacagtatagcaataaagtattatgtctgtgatagtgaatatcttacatcatcatctggattatcacctttcatcatctcctggacagtctttgatatatacataaaagagatatgtgtatatataaaagtgtgtacaaaactatggggattaattgggggtgtcaagtatatagatttatgattagccagtatatatattacttagatgataatatatatttacatcttatagttaaaaactttgtctggaggacgtcgtggagtagcatggcatggatcatctattgtattgctagaatattattataaaaatatattattagtagtaaaaa

SEQ ID NO: 26593 - DNA, 1202 bp, Glycine max
  Clone ID: TF_GmC1216_1
gacacattcttggaccttcttgaccacatttttccttcactcactcccatcacaataatttcttccctccttccttcccacaatggtcatggaagaatctaaccctttagacaatgaagttcaaccaaccacttcatcatcctctttcaccattactactccctctacctcctcttcctcctccatagaagaagccactaacactactactaaggagaaaaagaagaagagagccattagtaatattgaagggaagcaccctacgtatagaggagtacgtatgcgtcaatggggcaaatgggtatccgaaattagagagccaaggaagaaatcaagaatttggcttggaacttttcccactcccgatatggcggctcgagcccatgatgtggcggctctcacgatcaaaggcagctcggcttacctcaatttccccgaattagccgccaagctgccccgccccgccagcacctcccccaaggacatccaagctgcggcggctaaagcctccgccttggatttcggtcaccaaagccatgaagccgaatccgagctgagccaagccgtttcctcctcaatccaaacacaatcatcatcatcatcatccaattcatcgttgaagggtgtggatgacacattcttggaccttcctgatctctctcttgacttgagccatggagccgatgagtttcattattcatcggcttggcttgtagccggagccgaacatatagagctgggtttccggcttgaggaaccttttctttgggaatcatattaagttaccttcctcaagtaggccaatttccctttttttgatgtttgtgctgcctctcttttttctttgttcctttcacttttgagctacttgcaagaaccttgaagaatccaatatgctctatggcagcatgacgtgggggtgtcaaacttcagtgtccatgacaaataaagaagttttactaaacccactccatagctttttttattcaagaatttatgtaaatattaaaatatcatctgtcattttcagataaggtaattaattaagttgccttgcatcatattcctcaatttgttgtaaatttcctcgcttgtcatctgtatatcctcccctttgtcaaaattcagtttaatttgtgtatgggtgaatgtggaataaagttcagctgggtaaatttgattaaaaaaaaaaaaaaaaaaaa

SEQ ID NO: 26594 - DNA, 1156 bp, Glycine max
  Clone ID: TF_GmC464_2
tccggaattcccggctcgaccccgcgtccggacgcgatcacgctgaagacccattttttgtattatttattaataatttatttttgtgtgtgtagttgaaggagcaccagaagaagaagagaaggtggtaccgccttcaattctctctctccatttctcatcctcatcatcttattatacctcttccatctccataacatccacttgtgaaaaaaacccattaatatatatcacacacacatgtatctctgagctccaatccaatccaagaccacaccttgtcgcgtcggacgaaccttggtgtctgtctttttttttttttttgtttcattagtttctccgaagagatgcggaagggcagaggaggaggagcctcggcggcggcggcggcggcggtgaacggatccgttttaaaggagcctcggtaccggggcgtgcggaagagaccgtgggggagattcgcggcggagatcagagacccgttgaagaaagccagggtttggttgggaaccttcgattctgccgaggatgctgcacgtgcctacgacaccgccgctcggaatctccgaggttccaaggccaaaaccaatttccctctctcacctttttgctatcaacaccccaccacggatcctttcttctacgctggtttccacgaccaccaaaacaacagcaacaacaacaacgacaaccttaacaaccctcaaagaccaacttcaagtggcatgagtagcaccgttgagtccttcagtgggccccgccctcccaccacaaccacaaccaccacgacgccgtttttgaccactacgcggagatacccgcgcactccccctcttgtccccgaagactgccacagtgactgcgactcttcctcctccgtcgttgacgacagcgacgacaacatcgtttcctcgtcgtttcgacctcccttgccgttcgatctcaacgcgctgccgtttgatgatgatgctgccgtcgtggatgatgatctacgctgcaccgcgctttgtctctgatgattatcgtgcgatgatgatttttaatttctcattttttttatctcttcaacttgattttttgttattgctatgagggaaaaaatatattaaaaaaatgatcagatgtaagattatggtaatatgatcttaattctgtc

SEQ ID NO: 26595 - DNA, 1914 bp, Glycine max
  Clone ID: TF_GmC826_11
gaaactcaattatacaaaaccctgaagaaagacacagccattgtttacttttcattgattgagccaaagctttgtattttctgcgataattttccattgggtggaagaaagtctcaacctttattcgaaagagcaaggatctgagttgagttgagtgatcatgtgtggtggtgcgattatctccgacttcataccggcaggtcccgccagcggggcgcggcgcgtgaccgccgacatcctgtggccgagtttgaggaagcgcttctcgaagccgctgctggacgatgatttcgaggctgggttcagagaattcaaggatgattcggaaatcgaggatgttgatgacgaggacgatgaagacgaggaggagttgaagaagaagccctttgggttctctcgctccagcaacaaggctgcttctaagcctctctctcgtggatcagcaactgtggaatcaaaggggcaagctgagaagtgtgccaagagaaagaggaagaaccagtatcgtggaatccgtcagcgtccatggggaaagtgggctgctgagatccgtgacccaagaaagggggttcgtgtttggcttggaactttcagcactgctgaagaagctgcaagagcttatgatgctgaagcaaggaggatccggggcaagaaagccaaggtgaatttcccggatgagccttcaggcgctgctgcttcctcaaaacgcctcaaggtgaatccagaggctcagccaatgaaggaaaatctgaacaccgtgaagccgaaaatgaaccagatgttcaattttggtcacaatctggagggctactacagcccaatagatcaggtggaacagaaaccactggttaaccagtatgttaaccctgccccgttccctggaaacggagttcaagtctcacctgttactccatctgctgatgttactgcttacttcagctctgagcattcgagcaactcgtttgattattctgaccttggatggggtgaacaagtccccaagacccccgagatctcatccttgctttctgctgctcctttggagggtgctgctgatcaggttcagaagaccaacaactcgcaggatgtggtggctgcacaagatgattctgcaaaaaccctttccgaagagcttgcagacattgaatcccagctcaagttctttgagaccccttcttttcttgatgaagcctgggctgatgctacattggcgtctttgctcggcggagacgcaactcatgacgccgccggaaaccctatgaacctttggagcttcgacgacctgccttccatggcaggagtcttctgaacaccctttatctccccttttatgtaaataaagctacaagaattgtgatcgtgatgttggtgatggagtccacagcaagaaacctgcttaaagcttatgtggagtttattttatcttgtagctaatgcagtagtataggactatatataggtttttattatagggtatccttttgtgaactcaaagacctcgttttcaggggattttctgtttgatgtccttaaggattatcaattatgttatatatggtcttggatacagtcttgactgctgatacagtttttttttaacttggttgttttcattttcattattattattatggcaatttgattatgactttgagaccagccatttctcaatgctctgtgtggtggcaatttgatattattctgctttctggtttggtgatttatggacgtggaaaacttttttttttttcttttctttctaaaccaatctttctgcaataattggctttgtttcagagttcaagtgctggaaatctaggtgtgagggaagaagtgttaaatcgatgatttatcatcattggatcgaatctgataagttcataaatcgttttccgaattacttttccagattct

SEQ ID NO: 26596 - DNA, 1889 bp, Glycine max
  Clone ID: TF_GmC826_12
gaaactcaattatacaaaaccctgaagaaagacacagccattgtttgtttactttccattgattgagcgaaagctttgttttttctgcgatcattttccattgggtggaagaaagtctcaacctttagtcgaaagagcaaggatctgagtgagtgagcgatcatgtgtggtggtgcgattatctccgacttcattccagcgggtcccgccggcggggcgcagcgcgtgaccgccgacatcctgtggccgaatttgaggaagcggttctcgaagtcgctgctggacgatgatttcgaggcagggttcagagaattcgaggatgactcggaaatcgaggatgtcgatgatgaggacgatgaagaggaggaggagttgaagaagaagaagccctttgggttctctcgctccaacaacaaggctgcttctaagcctctctctcgtggagcaacaactgtgaaatctgtggaatcaaaggggcaagctgagaagtgtgccaagagaaagaggaagaaccagtatcgcggaatccgccagcgtccatggggaaagtgggctgctgagattcgcgacccaagaaagggggttcgtgtttggcttggaactttcagcactgctgaagaagctgcaagagcttacgatgctgaagcaaggaggatccgtggcaagaaagccaaggtgaatttccctgatgagccttcaggcgctgcttcctcaaaacgtctcaaggcgaatccagaggctcagccaatgaagaaaaatctgaactctgtgaagccgaaaataaaccagatgttcaattttggtgacaatcttgagggctactacagccctatagatcaggtggaacagaaaccactggttaaccagtatgttaaccgtgccccgtttgctggaaatggagttcaagtctcacctgttactccatctgctgatgttactgcttacttcagctctgagcattcgagcagctcgtttgattattctgacctcggatggggtgaacaagtccccaagacacccgagatctcatccatgctttctgctgctcctttggacggtgaatctcagtttgtgcagggtgctgctgatcagaatcagaagaagaacaacctgctggatatggcatctgtgcaagatgattctgcaaaaactctttctgaggagcttgcagacattgaatcccagctgaagttctttgagaccccttcttttcttgatgaagcctgggctgatgctgcattggcgtctttgctcagtgaagatgcatctcaggatgctgctggaaaccctatgaacctttggagcttcgacgacctgccttccatggcaggagtcttctgaacaccttcatatccctttttatgtaaataaagctacaagaattgtgatcgtgatgttggtgatggaatccacagcaagaaaaccaacctgcttaaagcatatgtggagtttatttatcttgtagctaatgcagtataggactatatataggtttttatagggtatcctttgtgtgaaactcaagagacctcgttttcaggggattttctgtttgatgtccataaggattatcaattatgttatatatggtctgggatacagtcttgacttacagtttttaacttggttgttttcattgttatggcaatttgattatgatttgagaccagccatttttcaatgctttgtgtggtggatgattgcatatcgcctctattattttgcttactggttactcaggccatctttaatagatcgtccttggtgtaaagttttagctattaatggatgtggaaaagcttttttttttttctaaaccaatgttctgcaataattggctttgttgcagagattttaagtgttggaaatctagttgagagggaagtttt

SEQ ID NO: 26597 - DNA, 951 bp, Glycine max
  Clone ID: TF_GmC847_1
cacgcgtccgacagacgaaagaagcaagcatgtgtggcggagcaatcatcgcagatttcatacctcggcagcgtccccgcaccctcacagcctccgaactctggcccaagcgcagcgaacctcaacctcaacctcctcctcctccagttaagaggcagaggaaaaacctctacagagggatcaggcagcggccctggggcaaatgggccgcggagattcgcgatccacgtaaaggagttcgtgtctggcttggcaccttcaacaccgccgaagaagccgccagagcctacgacaaagaagcccgaaaaatccgcggcaagaaagccaaagtcaatttccccaacgaggacgaccctctgccgcaatacggatcttgcaagagcctcaacttggagttcggttacgatctcaaccaaacagggcttttcccttcttctaacgctgatgagaattgcgggtcccacgtggcttactccgttacggaagccaacaacaaagtagagaagctttccgaggagcttatggcgtacgagaatttaatgaggttttatcagattccggaaaacgtcgttggggatttgtgggcctttcctgacacctctccacctctctgatttctgtcacatcgtttcttctatcattaattctccaattctgttcttaaaatatgatatgtacaatcagcaatttcaatttgcatgtatttaactttcagactcttaggagatgtttggttcggttgttttctgttttcattttcactgaaaataaaaaacggtgatgaaaatgtatttgattggatttctgaaaacattttcaggaaaaatgaaaacaggaaacaaccagaaaatgaaaacaagaaatcaatataacaaaaaaaaccagtatttttatttcatgaaaataaagaactctaaatcaaatcaaacataatttcagaaaaaaaaaaaa

SEQ ID NO: 26598 - DNA, 808 bp, Glycine max
  unsure (1)..(808): unsure at all n locations
  Clone ID: TF_GmC847_2
cccgggtcgacccacgccgtccgaaagacgaaagaagcaagcatgtgtggcggagcaatcatcgcagatttcatacctcggcagcgtccccgcaccctcacagcctccgaactctggcccaagcgcagcgaacctcaacctcaacctcctcctcctccaggtgagtcaatatcttcttctctttcaacattaatttcccaactaacaaaacaagctcacgtgacgtgacagttaagaggcagaggaaaaacctctacagagggatcaggcagcggccctggggcaaatgggccgcggagattcgcgatccacgtaaaggagttcgtgtctggcttggcaccttcaacaccgccgaagaagccgccagagcctacgacaaagaagcccgaaaaatccgcggcaagaaagccaaagtcaatttccccaacgaggacgaccctctgccgcaatacggatcttgcaagagcctcaacttggagttcggttacgatctcaaccaaacagggcttttcccttcttctaacgctgatgagaattgcgggtcccacgtggcttactccgttacggaagccaacaacaaagtagagaagctttccgaggagcttatggcgtacgagaatttaatgaggttttatcagattccggaaaacgtcgttggggatttgtgggcctttcctgacacctctccacctctctgatttctgtcacatcgtttcttctatcattaattctccaatnnctgtcttaaaatatgatatgtacaatcagcaatttcaaattgcatgtanttaaacttcagactcttagg

SEQ ID NO: 26599 - DNA, 762 bp, Glycine max
  Clone ID: TF_GmC982_1
cgaattcggctcgatattgatgtgcagcatcagtgagaaagccaaaaggaagcgccaatctgcattccgcggagtgcgcaaacgcagctggggacgctacgtctctgagataaggctcccgggccagaaaacacgcatatggctcggctccttcggctcgcctgagatggcggctcgcgcttatgactccgctgctttcttcctcaaaggaacatctgccactcttaatttccccgacctcgtacactccctgcctcgacctctctcatcttcccggagggacatacagtccgccgcagctgaagccgctctccactctccgcctcccaaagaagaacaagaatctattttcacttccaccaccacctcgtcctttcacgatgtcatggaagctcctcttatgagtccccttagggtggactccactttcggagatttctcatgggaccaactcttcgatttcaacgatgacattctcatcgtgggatcaacttctgccactcttgtcccttaacgctgcttttgcaattcgccacccactgcttctagaaactagctggattttctttcactttctgttaataactcttctctgcttttctaagacttgcttctgaactcttgtacaaaggagctctccaagacaaatatatatatatatatatatatatatatatatatatatatatatatatatatatatatatgtttactgagagactgatttcactaagcaccttaattaaataagtgtttctgaat

SEQ ID NO: 26600 - DNA, 1112 bp, Glycine max
  Clone ID: TF_GmC3803_1
gtaagtgtttaacaagtgtttcctgagtctgaacggaatcccacttaaaagtcgttctccttcctcttcgcagctgttatatagtactattttcatttcatatgtttatgcacctctatatatacatagacacatgtaaatggttgcaaaggaagataagataggtaccagctatcacatagtttatttaatccgttatatgccacctgatatataggcatattagctagttaggtaggtatagtagtttaagttaattcaaccatggaagacagggatcactgttgttccaacaattcaacgatgatcacaacaacaaagaaaagaacgggtagaagaagtccaacatcggataagctcaagaatcaacaccgcgagaagcagtcgatgaaaccttaccgtggaataaggatgcggaagtgggggaagtgggtggcggagatcagagaacccaacaaaaggtcgaggatatggttgggttcttacacgacacccgtggccgccgcacgtgcctacgacaccgctgtcttttacctccggggtcccaccgcgcgccttaacttccccgaactcttgttccaggacgacgaccaggagggcagtgattcggtgcagcacggcgcagcagggaacatgtccgctgattccattcgccgaaaagccacgcaagtcggcgccagagtcgacgctctccaaaccgcgcttcaccaccacgcgccaagtaccaactctctcaatctcaagcccgacttgaacgagtttccaaaactcgaagagcttcaagattgatataaatcaaatatcaatatcaatcaatatatttaatttcctaagttctttattaatatatagttttatgtgtgtatatatagatgatgatgcctcggagttggggcttgaaactaattaaccccttcccttccccttaatttagatatatcccttttcttgtttttccgtatcttcaatcataatatcaaatcaaagaagtattattattttctagggtttttgctaattgatatattattatcatatggttttgatacggtgtaacgtaacaattactaacatattaagtggccagtattcgtggtgagatagaaaaaaga

SEQ ID NO: 26601 - DNA, 598 bp, Glycine max
  Clone ID: TF_GmC2485_5
attgacggtgcccttaattggtccctcttttccaaaccccaactgggtatcacaaagtttccaaattgaacgcaaaaacggaaatttcttcttcaaatgccttctgggtcgctcttctttgcatccagattacgaagtttttggtcgccagtctgtgattcaagtgctattttagcatttttttttttttcctggacggtgagggtcaacttgcatgcacatgttagtgaaaaaccacaataagggggatggatctaagtccctcgccgatacactggcgaaatggaaagaatataatgcttggctggagtctaacaatgaagctgagaagccggctaggaaggtccctgccaagggatcaaagaaagggtgtatgaaaggaaaaggagggcccgagaactcacgctgtaactacagaggagttaggcaaaggacttggggaaaatgggttgctgaaatccgagagccaaacagaggaagtaggctctggttgggtacttttcccactgccattagcgctgctctcgcttatgatgaagcagcaagggcaatgtatggttcctgtgcgcgcctcaactttccccacgttcaagtttca

SEQ ID NO: 26602 - DNA, 1233 bp, Glycine max
  Clone ID: TF_GmC464_1
tacggctgcgagaagacgacggagagaggtagttgaaggagcagaagaagaagaagagaaggtggtaccgccttcaattctctttttctctctccatttctcatcctcatcatcttattattcctcttccatctctattctccataacacccaccacaccacttgtgaaaaacctcattaatatcacacactgacatgtatctctgagctccaatccaatacaagaccacaccttgtcgtgtcggacgaaccttggtgtctgtttttttttttttttcattattttctccgaagagatgaggaagggcagaggtggaggcgcctcggcggcggcggtggatgtgaacggatccattttaaaggagcctcggtaccggggcgtgaggaagagaccgtgggggagattcgccgcggagatcagagacccgttgaagaaagccagggtttggttgggaaccttcaattctgccgaggatgctgctcgtgcctacgacgccgccgctcggactctccgaggtcccaaggccaaaacaaatttcccccctctctcacctttttgctatccacaccccaccaccgatcctttcttctacactggtttccacgatcaacaccaccaccacaacaacaacaaccttaacaaccctcaaagacccacttcaagtggcatgagtagcaccgttgagtccttcagtgggccccgccctcccaccaccaccactaccaccacaaccacaactgcgacgccgtttttgactgctacgcggagatacccgcgcactccccctcttgtccctgaagactgccacagtgactgcgactcttcctcctccgtcgttgacgacggcgacgacaacatcgtttcgtcgtcgtttcgacctcccttgccgtttgatctcaacgcgctgccgtttgatgatgctgccgcggatgatgatctacgccgcaccgcgctttgtctctgatgatgattatcgtgcgatgatgatttttaatttctcatttttttacttgatttttttgttattgctatgcagaagaaatatatatttaaaatgatgatcagatgtaagattatggtaatatgatcttaattctgtgagaggaagattccgtgttggttatattttcttctttttattattttttaaaacatttttatttagaaggaaatattgaatgagaagagaaaagagaaagtaattatgatcaaaaaaaaaaaaaaaaaaaaaa

SEQ ID NO: 26603 - DNA, 1136 bp, Glycine max
  unsure (1)..(1136): unsure at all n locations
  Clone ID: TF_GmC1324_1
ggagatcgctcaatcccacacgcttcttactcctctcataacttttctgctccccgttgagaaagatttgccacacgcttcctactcctccctttcaccacttttctgctcccccttgagaaagaatttgaatcatcaaaattaaaaactcgcaccaacaatggccccaagagacagccgagccaccgcgttcgccggaccaggcccaggcccatcaccggcccacaaagagatccgctaccgaggcgtccggaaacgcccctggggccgctacgccgccgagatccgcgaccccggcaagaaaacgcgcgtctggctcggcaccttcgacacagccgaggaagccgctcgagcgtacgacaccgcagcgcgtgagtttcgcggtgccaaggccaagaccaattttccgacaccctcggaactcatccttaacaacaacattcgcagtcccagccagagcagcaccctcgactcttcctctcccccgtcaccgccaccgccgcttgaccttaccctaacccctctctccgtggccgtcaccgtcttcccggtggctcgtccggttctattctttgacgcgttcgcgcgtgcggacgccatgatcgccgtctcccgccgcgagatgtgtggctttgaacgccccgccgctgatttccgccgtaacgactccgattccgattacaaccgccgcgtgctccttgatcttgacctgaacgtgcctcctctcccggaggttgcctgattcatgcagggagatctggttttccgcaatttttttcgtactacttttttaagcatctgggaacactactacgcatttttttgtgacgaaattgccctcgagaaattatagtgttacggagagggagcagcagctaagtgtgagtagtggatgacatgatgctcggaattgttgttgaccattttgtgatgaagatataatcggcacgttatgtaaatacacgttataaccgaaaagcaaacgcgctttttcttgcttttttttgcaactgagaacttaacagagtatctcatggttgtttctgtaatttctcaaaatatataaatatttccatttccatccttttattattaatatttatgttatccctggngaggcaaacatgaaaaaaata

SEQ ID NO: 26604 - DNA, 1002 bp, Glycine max
  Clone ID: TF_GmC1324_2
ccggctcgagcaatcccacacgcttcttactcctctcataacttttctgctccccgttgagaaagatttgaatccaaaggaaaaataacgctaatggctccaagagacagccgagccaccgcgctcattgggcccggcccaagcctatcaccggcccacaaagagatccgctacagaggcgtcaggaaacgcccctggggccgctacgccgccgagatccgcgatcccggcaagaaaacccgcgtctggctcggcactttcgacaccgccgaggaagccgcgcgcgcctacgacaccgccgcgcgtgagtttcgtggcgccaaggccaagaccaatttcccgacaccctcggaactcatccttaacaacaacaacataaacgctcgtagtcccagccagaccagcaccctcgactcatcctctcccccgccaccgccaccgctagaccttaccctcacccctctctcctccgctgtcttcccggtggcgcgtcctgttctattcttcgacgcattcgcgcgtgcggacaccatggtcgccgtctcgcgccgcgagacctgcggcttcgaacgccccgccgccgatttccgccgcggcgactccgactctgattataaccgccgcatactcctggatcttgacctgaacgtacctcctctcccggaggttgcctgattcatgcagggagttctgtttttttcgcaattattgtttttttggttttttaagcatctgggaggtactactacgcatcttttttgacgaaagtgccctcgagggagcagcaaagtgagtagtggatgacatgatgctcggatttgttgaccattttgtgatgatgaagatatataaccggcacgttatgtaaatacacgttataaccgaaagcaaacgtgcttttgcttggttgctttttttttttgcaactgaggactcttattcagagtatctcatggttgtttctgcaatttctcaaaatatataaatattccaatttccatc

SEQ ID NO: 26605 - DNA, 542 bp, Glycine max
  unsure (1)..(542): unsure at all n locations
  Clone ID: TF_uC-gmroLIB3259P226c09a1
cttcctactcctttctttcaccacttttctgctccccgttgagaaagaatttgaatcatcaaaatcaaaaacacgcaccaacaatggccccaagagacagccgagccaccgcgttcgccggcccaggcccatcaccggcccacaaagagatccgctaccgaggcgtccggaaacgcccctggggccgctacgctgccgagatccgtgaccccggcaagaaaacgcgcgtctggctcggcaccttcgacaccgccgaggaagccgctcgcgcatacgacaccgccgcgcgtgagtttcgcggtgccaaggccaagactaattttccgacaccttcggaactcatccttaacaacaacattcgtagtcccagccagagcagcaccctcgactcttcctctcccccgtcaccgccaccgccgcttgaccttaccctaaccnctctctccgtggccgncgccgtcttcccggggctcgtccggttctatttttgacgcgttcgcgcgtgcggacgccatgaatcgcgtctcccgcgcgagacgtgc

SEQ ID NO: 26606 - DNA, 1029 bp, Glycine max
  Clone ID: TF_GmC1702_1
ctacccccctctcttaacatttctaaagctccttctcctctcaatatctcatggcaaacgctcttgaagtctctgctctcaatcgcatcaagctgcatcttttaggagaactctctcccctcacccaatttcaggaaccaaacacaacctccctctgttcccaatcttcaacttccgattcattcaccacagttgaccaaatcttctccgaattcctcgatttcccaactactactacttcttccacagaacaaaaccagttttctgcattcgagtttgagccaaaacccgaaataattgagccacaattggaattcagttttccaaccacacgctgcaaatcgagtcgaaggccgtcgctgcaaatctctctcccgaagaagaccgagtggatccaatttggagagcccgaggttaccgaaacggtgtcgcagagtaacccgaacgcggaagagaagaagcactacagaggagtgcgacagagaccgtgggggaagtttgcagcgggagatccgggacccgaacaagcgcggctccagggtgtggcttgggacgttcgacacggctatcgaagccgccaaagcctacgaccgagccgcgttcaggcttcgcggctccaaagccatcctcaacttccccctcgaagccggcgccgatgaccgcaaacgccaaagggaagagaaggtggagccggtgcttgaagtcgtcaagagagaaaagataggggaatccgacgttagtcttattaagaataatcctttaacgccgtctagttggttagggttctggggtagtgatgcaaacggaatattcaccgtgccgcccttgtcaccgttatctccccacccggcgttgggttttccacagcttatggttgtgtgaaatcatttttttttcttctttccttgtcgaatatggagataatttattcatttatttattatattgaaaaaaaaaaaaaaaaaaaaaaaaaaaaaaaaaaaaaaaaaaaaaaaaaaaaaaaaaaaaaaaaaaaaaaaaaaaaaaaaa

SEQ ID NO: 26607 - DNA, 403 bp, Glycine max
  Clone ID: TF_7591397
agcgatcgactcatgtctgttgctcttgatccttgtgtcacatgtttccacgacatattgttcttgtttggttttggtaccttttctgttgttgacaagattctgaatccgcgaagcgagaggggaatcaagggacacacgtgtgatgaagttggtgcgagtgttggatccacgaaggaggcatgcagcttcatcataagcccttgctgcttcctctgctgtctcatatgtgccaagccacattcttatcttttgtgttgtgtctttgatctcagcaacccatttccctgatgctctttgcctcaccccaacatacttgcttgtggttgtgttgttgttgtatctccctgtgcctccttttgatgtgcttgctctcaagtgcttctttggatgctggaattga

SEQ ID NO: 26608 - DNA, 1124 bp, Glycine max
  Clone ID: TF_GmC751_1
ccgcgcgtatctccctgcgcctccacacaacaaacaacaacctcaccattcttaacttcactcacttacaaatcacaatgacacaacaagcaacaacctcttccgaaacaacaacttcctcttcttcttcttcttcctcctcctcctccacattttcaccctcgcagcattcgggcccaaaggcccaggcccagaaacagagcaagaggcccagggactgcagcaagcacccggtgtaccacggcgtgcggaagcgcaactggggcaaatgggtgtccgaaatccgcgagccacgcaagaagtcccgaatctggctcggaacattcgccactcctgaaatggcggcgcgagcccacgacgtggcggctctcaccatcaagggcgagtcagcaatcctcaatttccccgaaattgcagacctgctccctaggcccgtcacgtgctccccacgtgacatccagaccgcggccacggccgcggcctccatggttaagttcgaccctgtgacacaatcctcagactcggagactccagagtcttcggagctgagcgagattgtcgaacttcccaacattgaagacagcagcgttgactcgacaccggagttcgtcttggtcgatgttgttgacagttgggtgtttcccccaatgggaatgggttcagagggaatcgagttctgtgccgctttttctgatgagttatttccgcaacagagttttattggttccgagatagagatactacccatttgggattgaatggtgagtgggattcatgtgccttttgctcgcttcacgtgggattggcaaatactagcattcatggctgttttgctgtcaatggtccagggccacttcaatttactctctactgtgtctgtgtgcactatatttttcacactgttacttatagttatagttagttagccttagcatttagcaagttccattgtcttcaacttcaatccctttcttccttccttccttccttctaccgagtaatttcctctgttttatacaagtagaaacagaaaatatgtgaatgcctaataaatttttaccacattaccttactgtacagaagaactatagtgttttttaagaatgttcccaaattttccaact

SEQ ID NO: 26609 - DNA, 945 bp, Glycine max
  Clone ID: TF_GmC751_2
caccattcttaacttcactcacttacaaatcacaatgacacaacaagcaacaacctcttccgaaacaacaacttcctcttcttcttcttcttcctcctcctcctccacattttcaccctcgcagcattcgggcccaaaggcccaggcccagaaacagagcaagaggcccagggactgcagcaagcacccggtgtaccacggcgtgcggaagcgcaactggggcaaatgggtgtccgaaatccgcgagccacgcaagaagtcccgaatctggctcggaacattcgccactcctgaaatggcggcgcgagcccacgacgtggcggctctcaccatcaagggcgagtcagcaatcctcaatttccccgaaattgcggacctgctccccaggcccgtcacgtgcgctccacgtgacatccaggctgcggccacggccgcggcctccatggttaaattcgaccccgtgacgcaatcctcggactcggagactccggagtcttcggagctgagcgagattgttgaacttcccaacattgaagacagcagctttgactccgttgactccagaccggagttcgtgttggtcgatgttgttgacggttgggtgtttccgccaatgggaatggggtcagagggaatcgagatctgtgccgctttttctgatgagttgtttccgcaacagagttttgttgatgagatagagatactacccatttgggattgaatggtgagtgggtgcgtctttggtttttttactaaattagacttggcttaatttgggatcaccatcatatgctctcaagtctcaaattgaattcgctcttcacttccaaacatgtgggattggcaaatagcattaatgggtgtttggctatatttgctgtcagtggtccaagggtacttaaatttactctactatgtcagtgtgcactatatttttcacaaaaa

SEQ ID NO: 26610 - DNA, 1104 bp, Glycine max
  Clone ID: TF_GmC289_3
attggggtttgaaaagaagccggtgctgtctccttgttctccatcgtaagatataactaattatttttatatcttcatcaagatgcgccgagggagaaccgccgccgccgctgccgccgttgtggatcccacgccggaccaggccaaggagacgacgcggttccgtggcgtgaggaagcggccgtgggggcgattcgcggcggagattcgagatccgtggaagaagcagcgcgtttggctggggaccttcgattccgccgaggatgccgcgcgggcctacgacaaggctgcccgatccttccgcgggcccaaggccaaaaccaatttcccccccttccccggcccggcagaggcggaccaccactcgcagattccgctctaccaggcccatgggctttccaccaagttcgagcccgtcgtccaggtgaaccggcccacgagcagcggcatgagcagcaccgtggagtccttcagcgggcctagggttccctcctcctcctctcgcgctaagccccttgttgtggttgttaaccctatcatccctctcaacgacgacgaagacgattgccacagcgattgcgactcttcttcctccgtcgtcgacgacggccaggactgcgtcctcatctcctccttccggcaaccgctgcccttcgatctaaacctcccaccatccgatgccgacgacgacaacgacgacgacctgccggccaccgcgctgtgcctctgatgatgaagaagaagaagaagaagaagaacctcttctcggtataatcatcattttcttcttgttgttgttattgttgttgttgttgttcaccatctctggtttaattaattaattaaaagttgttagattgtgttgtggtgttgtagagtaatattataataggcatgaatgtgttgttgtaagttatttggatccattactgtgtcatagcattggacctgatctcaaaaactggttggtgcttatgctttcttcatggatctgcttcttacccttacccccaattagaacttactcttttcttttttttttgttgttgttgttctgtacaaaaattatggctatcagatcatagaataaattacattctaatc

SEQ ID NO: 26611 - DNA, 2116 bp, Glycine max
  Clone ID: TF_GmC88_1
ccacgcgtccgtataaatcaactcatcaccttctctttctctctctcccacgcgcccgctcaaaaccagcaaccccaccttgcatgcattcaagtacttcttctttgtaaccaaactaaaacctcttgatttattgtttcatttaatcaaatagtagtaataatatcaccaccgcaccgacatggagtagaagtagctcttcattcaaagagtaacgcctctccagagactagtacttcattttgcaccattgatatctcaaatggctcgtgcttcgactaactggctatcgttctctctctcccccatggaaatgctccgaacccccgaacctcagttcgttcaatacgacgccgcttccgacacttcctcgcatcactactacctcgacaacttgtacaccaacgggtgggggaacgggagcctcaagtttgagcagaatctgaaccacagcgacgtgagtttcgttgaatcgtcgtcgcagagcgtcagccacgcgccgccgaagctggaggattttctcggcgactcctccgctgttatgcgttactccgacagccagacggagacgcaggactcgtcgctgacgcacatctacgaccaccaccaccaccaccaccaccaccaccaccacggttcttctgcgtacttcggcggtgaccaccaggatctcaaggccattactggattccaagctttttcgactaactctggctccgaggttgatgattctgcatccatcggaaaagcgcaggccagcgagttcgggactcactctattgagtcctccggcaacgagttcgccgcgttctccggtggcacaaccggaaccttgtcgctcgccgttgcactgagctccgagaaggccgttgtcgcggcggagtccaatagctcgaagaagatcgtggataccttcggccagcggacttctatttacagaggtgttactaggcaccgatggacaggaagatatgaagcgcatctatgggacaatagttgcagaagggagggtcaagccagaaaagggcgtcaagtttatttgggtggatatgataaggaagaaaaggccgcgagagcttatgatttggcagctctaaagtactggggtcccactgctaccaccaacttccctgtttccaattattcgaaggaagtggaggagatgaaacatgtaacaaagcaagaatttatcgcatcattgcggaggaaaagtagtggtttctccaggggagcttccatatacagaggtgttacaaggcatcatcaacagggtaggtggcaagcaagaattggccgtgtagctggaaacaaagatttatacttgggaacattcgcaaccgaggaggaagcagcagaggcatatgatattgcagccataaagttcagaggtgcaaacgcggtaaccaactttgagatgaatagatatgatgtggaagctataatgaagagttctcttccagtgggtggggcagcaaaacgcttgaggctttcccttgaatcagagcagaaagctcctcctgtgaacagcagcagtcagcagcagaatccacagtgtggtaacgtgagtggtagcatcaatttctcagccattcatcagccaattgcttcaatcccttgtggaattccgtttgattcaacaacagcatattatcctcacaaccttttccaacattttcaccctaccaacgctggtgcagcagcgtctgctgttacttctgccaatgcaaccgcactaactgcactgccagcatcagcagcaactgagttctttatttggcctcatcagtcttattgatctaatcaaaactagaatcaaaatctttttctaatttcctggttatgctaacaaatcaaacgccatagtctctggcacagtttagctgaccccccctcctctattattaacctaaactaaaaaaggaaaaagaaaaagaaaaaaaagaggaggtttttgagttggctagtcttggttacagtaggaagctggatatgtaactaactgcttaagaaatgagaaatatttcgtgcatcataattttgcacaagaatttcctcaatggcttagcttgcagcattagtatgatcgcttttgtttaaaaaaaaaaaaaaaaaaaaa

SEQ ID NO: 26612 - DNA, 381 bp, Glycine max
  Clone ID: TF_LIB3106-046-Q1-K1-E9
aataggcgtttgaaaagacacttgtgctgtctccttgctctccatcgtaagatgtaagaaggatgaagacatgtctcgtggttattcaattacagagattactaaccatcaataaaataaatgtgaatctcacattaaacatcaccgaagtgataacgctgattccggtcactaagaccaaaccgtgggggcgattcgcggcggagattcgagatccgtggaagaagcagcgcgtttggctggggaccttcgattccgccgaggatgccgcgcgggcctacgacaaggcatcaaggaggctcaccctacccaaggccaaaaccaatttcccccccttccccggcccggcagaggcggaccaccactcgcagattccgttct

SEQ ID NO: 26613 - DNA, 593 bp, Glycine max
  unsure (1)..(593): unsure at all n locations
  Clone ID: TF_6846032
aaccgnngagagganngcatcatacatacgcanngacgatnnncgnnnnaaatgatctttttttttcacagcaatatactaatcaaagcnnntaaccaatattgagtcccctttctttcagcatgcagattggggcatgttgaaggagcctaattcggatattttgtttgaatcattttcaagcaaaggagttgatcatgaccctttccatgattgtctttcctttgatatgattgataactcaagggatccacaggaagaaagtcatcatcaagtgattgaagaagctatgaaaacaaagaagaagtcttatattggggtaagaagaaggccatggggaagatttgcagcggagatcagagacacaacaaggaagggtataagggtttggcttggaacgtttgatagtgctgaggaagctgcattggcttatgaccaggctgcattttccatgagnngctctnntgcagtgctgaattttccggtcaaaagngtcaaagagtctttacaagagatgaactattctggttgcagccgaaggtgctctcctgcattagaactcaaagagaggcacaacataagaagaaaanngt

SEQ ID NO: 26614 - DNA, 1895 bp, Glycine max
  Clone ID: TF_GmC877_1
gtttacttcagtccaaactgaacacactactcagaccgataacgaacaagaactctactattactattaatcaaccaaaatctctcttcactccaaacagaacacactagcgagaaaaaaagtgataagcccaaaaactctgcgttctctcacaaattaaacagcgtcactatcgcatagtgattgagttttgcggtgtactgtgttgcgaagtctgtgtatcagatttgtggacatgggtgcttatgatcaagtttctcttaagccattggattcttctagaaagaggaaaagtaggagcagagggtatgggactagatccgtggctgagactattgcaaagtggaaggaatacaacgaacacctttattctggcaaagatgatagtagaacaactccaaaggcaccggctaaaggttcgaagaaagggtgcatgaaagggaagggaggacctcaaaactctcagtgtaactacagaggagttaggcagaggacatgggggaaatgggttggtgagattagggagcccaatagaggaagcaggctttggttgggtaccttctcttctgcccaggaagctgctcttgcctatgatgaagctgctagagctatgtatggtccttgtgcacgcctcaattttcccggcatcacagattatgcttcttttaaggaatcgttgaaggaatcttcgatggccgcatcgtcctcttgttcttcggcagaaactgcaacatctgacactactactacaacatccaaccaatcggaggtttgtgctgttgaggatgttatcgagaatcctcgacttgtcaatgtgaatgataaggttaacgattgtcataaggcttacgtatctgcctcaccaactagtagaatgaagcaagagcctaaggatgaggctgtggaccacatggacacaggggctggggaaattcaagatgtcggactagaaggaacacatgatactgggcaggttgcagagaatgtaaataaagatcagatggatttgtcatggattgatggctttgactttattgacgattacttgaagagcttttccgcggatgagttatttcaggtggatgaacttttggggcttatagataataacccaattgataactctgtgttgatgcaaggtttggattttggacaaatgggttttcctggagatggtaatcctcaggttgacgatactccttcaagctttatttatcagttgcaaaatccagatgccaagttgttaggaagtttgccccatatggagcagacaccatcgggtgttgattatggattagatttcttgaaaacagtggagtcaggggattataatggtggaggggaagaaccgcgatttcttaatttggatgatgatctgaaccctgattcaaatggcatgcaagcaaggaaggatgactagagaaggcgacgtgcataagtctatcatctgcctcattttcaactggttcgagcatctgctagtaatctgtctcttaggttgttgtcccctttttagctatatacaggtgcataagaggaatacaactatacaactaatacaagaaatttgatttgtttatgttcttttaatatgctaattctctgtaagattttttaaaatggagaatttagctgtgacaatatttgttaattctttttacttacatgttttttgggattcaaattggactgcctttaactacataggtggagctgaggagtagactgtttgaagtcgtttggctgactatagttgagcactgatttggatacaaaatttctttgttatgtaccatggagaactattatatctcgagtatattatatcgttgctcactttttgtgtataaaaactgaacaagtagtggaatgtatatatatataataactattct

SEQ ID NO: 26615 - DNA, 1346 bp, Glycine max
  unsure (1)..(1346): unsure at all n locations
  Clone ID: TF_GmC122477_1
gaacatctctgtctctctctcctctttcccgccaacctcactctataacaacatttctctctcttccttacccctggaataaccaccctagcaaattactaccatcatcttattttttcttcatcatccaccactctatttgtcacttgctttcatgcaattaacacttctaccaccttttttcattttctcactctcttcactaaaatgagtgacacacaccaacctttcatgtccgtacaaccacccatgaagctccaccacccctttaacccacaagcctcaagctcaaattttgacggcgacccaccatgcaaaaccgccggaaaaaccaaaccacctcacacgaagctactccgggtcattctcaccgaccatgacgccaccgattctgactcctccggtgacgacgacgacccaaaaaacccaccgaaacacaaaaaggtgaaaagacaaatcacccacatcaccataaaccttccctctttctcagaagccccaactccagcaccaataccaacaccttcttcgtcttcttctattgatccgacccgtttaaccctacccaagaaacgacccgccgtgcctcgccgccgtagcaagttccgcggggtccggcagcggccatggggacggtggaccgcagaaatccgtgacccgaatcagagaaaacgggtctggctcggaacgttcgacacggcggaggaagccgccgccgtgtacgacgacgccgccttgaagctcaagggccccaacgccgtcactaacttccccctctccgccgccggaaaaacggaacatgataccgcgccgccggaggcggctttctccggcgaaggtttttcatctcccacttccgttctcacttactttgacggagactcgacgccactttacggtttccgttacggcgaggtcgacgcgttcgggtttgacatcgatgcgccgtttagtttgacagacgttaacttaggggtgctgagtcagcggttcgggaaggaagatttcggcgagtttgacccggacgagttcttgacgtggccgagttaaggggcgtatttatcatttcgaaaaaaatacagggaatgtttagtaattctaatgaagtttttttgtcgtattctgcattgaattccgaaactaccctcgtgactaagtttttgtgcagcttagtagagtgttagagagcaatagagtgatccaagtagtagtagagaattttgtcctatgttaatttgtgtaattaattgtattgttatggagaaagaggatatgatggaaagtattagaatgattctcttgtagtttcttatatnnttttataaagtaaagtattagaattaatt

SEQ ID NO: 26616 - DNA, 1316 bp, Glycine max
  Clone ID: TF_GmC280_1
taagaaaagtagaaaactacacttttgaggtccattctcaatcttgttaatatatttttgcgcagatgaagatcaagagaaggaggcgtcatgctaccttccttcaaccacaaaccctctctccctctaccacccattctcttttctctctctttctttccccctccctctctcacctactcaatctcatcaccaccaccatcatcatcatgatcttctccaatctctataaccttcaatcactcaaaacctcaccattaaaccaaatgagttgacccatttgtgagaacaattctccctaagaaaaggtcaaaggctgcaactttttcttaaccaatctcacaacattttgcaacgttttttctggttcggtttggttttctgggtcgtcttggaattcaaaaaagattccaactttgaagatgggtaggggcggaaccgccgcggcggcggtggagatcgccgaacccggttcaaggccggtttttttcaaagaaccgcgttataggggcgtcagaaaaagaccgtggggccggttcgccgccgaaatcagagaccctttgaagaaagccagggtttggctcggaaccttcgacaccgccgaggaggcggcgcgtgcctatgacacggcggcgagaaccctccgggggccgaaagcaaagaccaatttcccactttctccgccgttctaccaccccgatccgttttccgatcaccggtactttgacggcgctggcgccggcgaagatttccaggatcaccggcgacccacctccagtggtatgagcagcaccgtagaatccttcagcggcccacgcgccgccgtgccggcgaaggcgccggtgattgtcaaccggagatatccccggacgccgcccgtcgttcccgaggactgccgcagcgactgcgactcgtcgtcatccgttgtggacgacggagacggcgacaacgtggcgtcgtcgttccggcgagaaccgttgccgtttgatctaaacgtgttaccgttggacgatgctgacgtggcaaccgatgatctgttctgcaccgttctttgcctctgaagagaagaaattgaaaacggcacgaaatgatgtatttggttcgttgaaggaaaggaattattaatttttttctatttttactctttattatctacttgaatatttttttatctttctctttttccccacttattttaactatgcggagaaaaatgaaaaagaaaaatatgattgatgatcagttatgaagattatggtaatatgatcttaatttctgtgaaaagtaaaacttcagggtattgtttcaaaaaaaaa

SEQ ID NO: 26617 - DNA, 1096 bp, Glycine max
  Clone ID: TF_GmC319_1
tacggctgcgagaagacgacagaaggggaacacaatactcctccacccgtcctctctttaccttcttaacgcaccaagcgaagcgaaaagcgctttctaacttaagtgatggcgaacgcagctgaagtttcagccttgaaccgcatcaaactgcatcttttgggtgaactctctccactggccactcccctaaactattttgatgaatcaaaccctagcccctctgaatcttccaattcccaatcttcttctgtttctcttaaccactacttcactgacctcttcgaattcgactccaaaccccaaataatcgacctccaaactcccaaaacactaacttcagctcagaagaaacctcaattgaatcggaaaccgtcgctgctaatcgctgttccaaagaagaccgagtggatccagttcgggagcccggatccgaacccggtgatggctgcgccggagaacctgccgcagaagaatcactacagaggtgtccggcagcggccctggggcaaattcgccgccgagatccgcgacccgaacaagcgcggctctagggtttggctcggaaccttcgacaccgccgtcgaagccgccaaggcctacgaccgagccgccttcagactccgcggctccaaggccatcctcaacttccccctcgaagttagcgccgtggcggagaccgtctccgtcgccgccgccgaaggcaacgtcgagagaaagcgccgccgcgaggaagaggaggtggtggtggaggaagtaaagccggtggtgaagaaggaaaagataacggaacaggatgtgagttgttttagggggatgccgttaacgccgtctatgtggaccgggttctgggacagtgacgtcaaggacattttcaacgttccgccgttgtcgccgttatctccttttggattttcaccgctcgtggcggtgtgaaatttctaatttagcactgcgttttttcgtgtttaagttacagcgtcctgtatggggatgagtacagtgtacatttgacgaatttgttaattcaacaatcttttattcacttttatttgctgaaaaaaaaaaaaaaaaaaaaaaaaaataaaaaaaaaaa

SEQ ID NO: 26618 - DNA, 1206 bp, Glycine max
  Clone ID: TF_GmC286149_1
atgaaattaagtaatatccagctttccatcacattgtgagagctgaaacactttctgctcctcttgtctctttttgatatatcttcatcataatttctccaactcacaccattttgtttaataaaacttgtgatggaaattcaattccaacaaccaaacctgcagcatcagaaatcaggcattgcaatcaccaaaggtggcaagttcaaagggagaagcagaaacaacaacaccaacaaatttgctggggtgagacaaaggccctcagggagatgggtagctgagatcaaagacacaactcagaagataagaatgtggcttggcacatttgagacagctgaggaagcagcaagagcctatgatgaagccgcgtgccttcttcgcggatccaacactcgcaccaacttcatcactcatgtctccttggattcccctcttgcttctcgaattcgaaatcttcttaacaacagaaaaggtatcaaaaaagaggaagatgctaatgctaatgctaataatgcacctgccccaagagttagcactactagcagtgctactagcactggtactagtagtaattcaagcaatggaaatgacaacaatgaccagtctctttctaccgtaacaactcaaagttcaaatctgtttgatgatgcctataaaccagatttgagcaattgcagggaggagtttgagtcaggtcatcagtccaatacttcatggtgttttggacctgtctttgatcgtttccctatggctcaaatattcgatataccaaagattgatgatggcctcactaatgcagctgatttggatctttcagaatttgaaagaatgaaagttgaaagacaaatatcagcttcactctatgcaattaatggggtgcaagagtacatggaaactgttcaggactccaatgaaactctctgggatcttccacccttatgctcattgttctgttaatcttgaaggtttaaatgatcctgcaattattccttctcaatgtcctatttattttactattattgaagatttgaggaaggggtgtgggatctaaggattgattgaaatattacaataacaatatagctttggtgagatataattttgtttttctaactgcttaatgtcagcaggaagatccatgagttgcattttgtgaaagctctttttcaatcattattatgtaaaaagtctaagcagttagtt

SEQ ID NO: 26619 - DNA, 458 bp, Glycine max
  Clone ID: TF_7590215
acgagaacactctatccctcgttctttctctctctctctctctctctctctctagccagctttggttagacaacatagttctgaccaacatggtgcaatcaaggaaattcagaggtgtgaggcaacgccattggggctcttgggtttctgagattcgtcacccattattgaaaaggagggtgtggcttgggacattcgagacagctgaggaagcagcaagagcatatgatgaggcagccattttgatgagtggaagaaatgcaaaaacaaacttcccagttggtgaaaaccaaatagtgggaaatcacagttcaaacacttcctcttcctccactacaacattgtctgcagttctgagtgcgaagctgagaaagtgttgcaagtccccttcaccttccctcacttgcctgaggcttgacactgagaattcccacattggtgtgtggcagaagcgagcg

SEQ ID NO: 26620 - DNA, 646 bp, Glycine max
  Clone ID: TF_LIB5119-054-A1-PF1-G2
atttcacttcacttcagtcaccttttccttttctctgatagaggacgaaacacgtttctctctctctcttttttttcctcatcatcatggccagaccccaacaacgctatcgtggagtccgccaaaggcactggggctcttgggtctctgaaattcgccaccctttattgaagactagaatatggctaggaacttttgaaacggcagatgatgcagcaagagcatatgatgaagcagctaggctcatgtgtgggccaaaagcacgcaccaatttcccatacaaccccaatgagccacattcatcctcatctaagcttctctctgccactttaacagctaagttacataagtgtcacatggcttccctttctcttcaaatggccaagcagaaaccaccacagaacaaagagcctcaaccatcacacgggtccaatccatttgcctctgccaatgccattgctggatcaagcgctgacacgagttttcgatggccagataatagacatgaggaattcaggtggcttgaagggaattgggttggtgttgaaggccaggttgaagtttccaatcaacagtttcagccagttcttgaagatgatcacatagagcagatgatacaggagttgcttgattatggatcaattga

SEQ ID NO: 26621 - DNA, 1424 bp, Glycine max
  Clone ID: TF_GmC1399_2
ggccggagtttaagtttatcttccaagttcacgtaccatcgcttttataaataccctcatccagtttcccttccaagttcgaatattcaattcaacaccttccctcattctcttctccaaacacgacacaaacattaagaagaagaaacataccacgaaatgtacggacaaagtagctatgagtccgatttggcccttttggactccattcgccgccacttacttggcgactccgaggagcacaaattcggagccccgaatgttagttcgggtaacactccagcgtactctcggagctcctgtttcagcaggttgtacccttgcttgagtaacgattggggagaacttcctcttaaggaagacgattcagaagacatgcttctttacggtgttcttcgcgatgcaataaacgcagggtgggtcccatctctcgatgcatcctcaccggagagtttctcgtcgggtttcatcccggcggtgaccgtgaaatccgaaccggatctatttccggcgccagagcctgtctatattcctccggcggctcagaaggctgagccggcggtggttccggcgaaagggaagcactaccggggcgtgcggcagcgaccgtggggaaaattcgcagcggagatccgcgacccggctaaaaatggggctcgggtttggcttgggacttttgagacggctgaggacgccgcgctggcttacgatcgagccgcgtatcgaatgcgcggctcgcgggctttgttgaattttccgctccggattaattcgggcgagcccgaaccggttcgagttacggcgaagcgggcttcagcagaaccgtgttcttcgtcggagagtggatcttgggtgaagaagcggaagaaggtggtgggttgagaacggggcacgtggagagcagttgttggtgaagttagttctttttctttgttttttctttgtctttcgatcgagacgttcggcgcattggtgtagccgaggatgcccttgagctgctgctcggaggcttcatcgccgcgttggattctaaaattggtattgtgtttattaaatacaaaaaatccaatactcttttgtaattatgtaaggtgcgtgtgtagtcctatacccatcatccaactcaatcttgcaacagagaaaaaaaaaaggtgaaagatgagacaggtgattttagtatatcaaatttcaaatggtgagtggtgaacccaccacgggaagaaaaaaattaaaagatgatgatgagtgatgacagaggtgaggatatgtaatttagctttgtgaatactaccaaatttgtttgttcaacattatgaattatgaatgggttaaatgtgacaaatgagttgaggccttaaaatcatgatccttgaggagcaaaagaaaatctaatcatatgtacctgttggaatgaacaaaataaa

SEQ ID NO: 26622 - DNA, 1265 bp, Glycine max
  Clone ID: TF_GmC31_1
ggcatcccggacccaaccacctactgcttcaaaaaattcttaaggatggccacagcagaagaaatttcaactttgaaactgttgcgccaatatctcttgggggatatttcagacccttttctcaccaatctcattccagtaaaacttgaagacccctcatcaggacttgatatgggttcaaacttctcagaacaaagcagcttctgcaagtttctggagtgctttgattttgaagcagaagtggtaggtctcacttctcatcataaggtccaaagctccattgcaacaagtccaccccagaatttcaattttccagaagaaccaatggtgtcaatgaaaaaggaagcaacatgttatgcaacaaggcattacagaggagtgaggagaaggccatgggggaagtttgcggcagagattcgcgaccccaaaaagaaagggagcagggtgtggcttggcacatttgacactgagattgatgctgctaaggcttatgattgtgctgccttcagaatgaggggtcataaagccgtgttgaatttccctctagaggctggaatgtctcatccagagcccaacagcagtggcaggaaaaggagaagagagtacacaacagctgccacaagttcaaggcatgttatgtcatgagaaataattcagtgtgggagaaccatgtttttcttttggcattttttgccagttacacaagttaaagcaaggttttatagttacactacagttgagcatgatgagatctgttatttaaatccttgagttatggttaagggtgaaattgaattaaacccaagaatgaaacagctcataaagaaacctacttctacttttttatacaaggctctcaaagtagaatgtgtgatagtcaccactcaccttagttcattagataatgaggaaaattcttattgcatcttaacttaaaatataatctcaggattactaaccatatcgatagtggcttgttttcatcatttactgtaatagtcagcttttttcacaaggataaggtattatgggatgttcagtggagtatttaagtggcttggctttcccttcttaattggcagctaagttataagggagggtttcccaagtgcttggatatgacaatgatttttgctttcctagttacttaattataattataggatttattagaatttatcatttcctattttttactcaaattttacttgtaaagaatgtacaacgacttgtgaatataaatgaggaaaataatcttgtctcct

SEQ ID NO: 26623 - DNA, 304 bp, Glycine max
  Clone ID: TF_6134020
gctccgagggagaaccgactgcgccgctgccgccgatgtggatcccacgccggaccaggccaaggagacgactcggttccttggcgagaggaatcggccgtgtgggcgattcgcggctgagattagagattcgcggaagaatcaacgcgtttggctggggaccttccattcctccgaggatgccgcgcggtcctactacacggctgcccatatacttgcgcgtgcccaaagccggatgcaattttctgccatcatacggcccgacagaggcgagaccaccactctcagattccgctctaccagg

SEQ ID NO: 26624 - DNA, 2342 bp, Glycine max
  Clone ID: TF_GmC56_1
ttgtctatatattatgggtaacactatctctaacgttttctctctttttggtcagagggagagtggggtgtgtgtgtttttgttgggatttgtgaggaatccattgaaggaggaagagtgggagatttatgtcgtcttggttttatttggaagtagtgattggagctttgttgaagctcgggttcggttacgcttgtatttgctgcatgctactctggctggtgttgaattctgctgaccagatgagtttgattttttaatttacttttgatttttctgttaacccagacacaggtgatagatcggtcataaaaaaatatattttgggacagaaaaatcttggccatagatttgtaatcttttcatctcaaaaaatttctcagtgtgttgtcactcaattcaccatcttctgtgcttgatttggatacatctgctttcaatttcagagggagagtagtgtgtgtgtgtgttttttgtttggatttctatgaggaatccattgaaggaggaagaacaggagatttatgtcgtcttggttttatttggaagtagtgattggagctttgttgaagctcgggttcggttacgcttgtgtttgctgcatgctactctggttggtgttgaattctgctgtttcgatgagtttgaggtcaaaaaggacatgttatggaattctggtttgttatggaggctttcagataaaaaaattctctgctttcttcctcctttggagagtggatctcacttgatgttcttgaaattatgagggattttttttttggtttattaaaaaaaattattttgttttgttgaacaatttttctgggtattttgaggggttttgacccaattttttttaccatggtggagcctcttaatcaatcgactcctaggacgaaaaaaatgaaacacaagcgaaatccgattcatgactcgaaaatgacgaggaaactgcgcatcatttgcaatgatcctgatgctactgactcttcatctgatgaggatgagtattttgggaatgttaggaagatgatcgagccgctcgagccgctcgagcggctcgaggttccggttaaccctgtggttgcagatgaaactagtactgagagcacaaacaatgatgaattgaaccagacgaagagggttatggcgaaaaccccctcagtgaagaggcaatcttgtgggaaatacaaaggtgttcggatgcggaaatggggcaaatgggccgcggagattcgtgaccctttcaagggcacgcgaatctggttgggcactttcagcactgcagaagaggcttctcaagcctatgagaccagaaggcttgagtttgaggtcatggccaaggctctatctgatgagaagagcaacaatggcagcagcaacaacaatgttgttgcttctgctgaaactgaaactgtggctgcccctgaaaataacagttcaaactattatgtttcttctgctgcaggttctgtatcagactccaagtctgcttctatggatgaatcagagagtgtgttgtcactcacatcaccatcttctgtgcttgaattggatacatctgctttcaatttgattgggagtggtaaggtttcaagcaatgaagttgttgagactaaaggattggaggctgaagttgctgagactaaaaatttggcagctgaatttgccgagctggaaatgctggaaatgccggatttgagtatgctgaatgtgccatccccatctgctgtcgctgctactgctgccgctccatctgagtttgaattggatttgttggcatttgttgattccgagtatggatttcatgatgagcatgactttgatgatgatcttgctgccctggaagactttcacatttgcggtttcgatgacaatgagcctagcgagcttcccgattacgattttgacgactttggtgctgatgagtttgctggttggattgaagaacccctcaatataccttgcgtatagattttgcagcttcataggaatgagttctatccaagagactagtactactacaacattacaagttgtgtcattgcttaaaaatgctatagttttttgagatctcaggaaaaaactagttcctgggagagttgttttgtcaggtttgttttaatttatttgtttctttagggatggaagatcaatgagaggttaagagacaatgccttggtttttcttgtgctattagagccgtccaagggtttttcaatttctattatcgtgaaagttgagtgtgtagatgtctatcaaacttgaaatctactatctttatcagaaattctatggtatccttggaaaagtaccccgcagaaaaaaaaaaaaaaaaataa

SEQ ID NO: 26625 - DNA, 752 bp, Glycine max
  Clone ID: TF_GmC1684_2
tcgttctgctgcgagaagacgacagaagggtacggctgcgagaagacgacagaagggtacggctgcgagaagacgacagaagggtacggctgcgagaagacgacagaagggagaacaagaggaacagagaatgtaaagaaggaggagggaaggagaaaatatagaggggtgaggcagaggccgtggggaaaatgggcagcggagataagagacccattcaaagcagcaagagtatggttaggaacatttgagacggtagaggcagcagctagagcctacgatgaagctgcccttcgttttaggggcagcaaggccaaactcaacttccccgagaatgtcactctccgacaacctcaattcactgtttccacatcaacagacccatttcaactctcgggtaccaacctttatgatcataggatgtttctgacttctaataccatggcttctcatcatcttcaatcttctttgccgctgccaccagcaacctcctcttctctaacttctcctcctcagaacatcacttcactttcttccttgtattctgcccagttgcccccatggtcggcctctggtcatagctcttcttcctccccatgatccttttttgtttctttgtttttattgagtctatattttcccgtcttttatcgtatctctccatttttttcaaacactaattaataataataataataattattcctctacaaaaaaaaaaaaaaaaaaaaaaaaaaaaaaacgccgttaga

SEQ ID NO: 26626 - DNA, 845 bp, Glycine max
  Clone ID: TF_GmC78516_1
aattcggctcgagcgaagacgcttcacgaacaagtttgaagcaatctccatccatatcatggctagaccccaacaacgctatcgaggtgtccgccagaggcactggggctcttgggtttctgaaattcgccaccctcttttgaagactagaatatggctgggaacgtttgaaaccgcagaggatgcagctagagcgtacgatgaagcggcaaggttgatgtgtgggccaaaagcacgcaccaatttcccttacaatcccaatgagccactttcatcttcatcgaagctcctctctgctactctgactgcgaagctacacaagtgtcacatggcctctctttcccttcaaatgagcaagcagaaacaatctcagacagagcctcatcaaggatcatccagcgactcaggcaatgccattgcgggaacaagttcagacaacaccggctttagatggccagaagaggaagcacaagttgaagtgccaccagcacaacagcaacaatttcagccagttcttcaagatgatcacattgaacagatgatacaggagctgcttgattatggctcaatggagcttagttttgttgactcagcctaagctctatattataaattaacaatgcagaccccttttcagggagagggattctactatttactaatgcgccatgtaataaaatatagcgagctttagaccttagtaccataggataggagagtttcaccatgagtttcaattaatggtcaagcatgtggaaccagaatgtaatcaatcatacaaaaaacaacgcatgcatatatggtgtggactatattatagtagataccattagtaacatcaaaaa

SEQ ID NO: 26627 - DNA, 1230 bp, Glycine max
  Clone ID: TF_GmC1816_2
tttactacctccacaccccagtttctccacatacaccccctctgcctacttattggaaaaccaagagagaatagagggagttgaggaacaaccaagttcccttctcgggctcaaccacctaagcacgtctcagatttcccagatccaagcccaagcccaagcccagaactcgctctctcttaatttcttgggcccgaagcccgttcctatgaagcacgttggtgggccggcgaagcccacgaagctgtaccggggcgtgaggcagaggcattgggggaagtgggtggcggagataaggctaccgaagaaccgaaccaggctttggctcggaaccttcgacacagccgaggaagccgctttggcttacgacaaagccgcgtacaggctccgaggcgacttggcgaggctgaacttcccgaacctgaaaggctcgtgccccggcgaggagtacaagcctatgcaggctgcggtggacgctaagctcgacgcaatctgcgcgaacttggcggaaatgcagaagcaagggaagaacgagaagggtgccaggtcggggaagaagtcgaagcaaggtccgaacctggaggcgaagcccgaacctgaagcttcgggttccggtgctgctgctctgtctcctgaaagtgagggttctgcggattcttctgctttgtctgatcttacctttgatgtaaccgagccgcaatgggaggatgcttcagcacattttaatttgcaaaagtttccttcttatgagatcgattgggattctctctgaagactctttgtttttttatttttatgtctagtcttgtgggtaattaataatttagttataattaggattgctcttgtggctgctgcaattgagtttttgaagattgcagtgctacttgtaggatttggattatgttagtcttttttctttttcttttttttttttaaatttgcttattggctattcgatggtcaatatgatgtaaatctctctaccttggtcagctggttttttttttcttgcttggccatggagaatgattccgggttaggtctttgtctatgttttagtgttcgtccaagtactattattgatgtaattcaattctatttgtatctcaatttatgaatgtatttgtatttcagcttacatattgtactagtttgtttcacattttggaccatgtggtagttgtgtttggttcttgtatgaacaatcgattttattttctttgtggc

SEQ ID NO: 26628 - DNA, 621 bp, Glycine max
  Clone ID: TF_uC-gmflLIB3275P137g09b1
cccactcggctttgacgcgtgggcctcaggaaggtgggtggctgagatcaaagactcttctcagcacgtgaggttgtggcttggaacctatgatactcctgaagaagctgcaagggcttatgatgaagctgcaagagctctgagaggtgaaaatgctcgaaccaactttgcaccagtgagtcaactagtcaatggccaactgggtcaacaatcagggtttaataataataacaaccttctttcaactgggtctgatattgggaagcatggtttgagctttgcatccttgaaggccaagttgagcaagaatcttcagaacattatggctagggcaagtgatcacaacaacaacaacaacaacaagtcctcaaagagtagggtgagtgaccacttcacctttgccagcatcttccaccgtaggagttaccaaatccctgaaggtgacatgatgaagaacattgagaaagtggtgcagcctagtattattgtgcctcctatggaacaaagtggtggtgattataattcttgtgttgccaactgggaaagtgcttctagtgtctctgattgcagctctgagtgggtagggtttgggaataataattcgaaacctcggttggagtc

SEQ ID NO: 26629 - DNA, 1443 bp, Glycine max
  Clone ID: TF_GmC2485_24
catgattgacggtgcccttaattggtccctcttttccaaaccccaactgggtatcacaaagtttccaaattgaacgcaaaaacggaaatttcttcctcaaatgccttctgggtcgctcttctttgcatccagattacgaagtttttggtcgccagtaaggtctgtgattcaagtgctattttagcattttttttttttcctggacggtgagggtcaacttgcatgcacatgttagtgaaaaaccacaataagggggatggatctaagtccctcgccgatacactggcgaaatggaaagaatataatgcttggctggagtctaacaatgaagctgagaagccggctaggaaggtccctgccaagggatcaaagaaagggtgtatgaaaggaaaaggagggcccgagaactcacgctgtaactacagaggagttaggcaaaggacttggggaaaatgggttgctgaaatccgagagccaaacagaggaagtaggctctggttgggtacttttcccactgccattagcgctgctctcgcttatgatgaagcagcaagggcaatgtatggttcctgtgcgcgcctcaactttcccaacgttcaagtttcaactttgtctgaggaatcgtcgagaaattctccagctgctgctaaccggtcgagaaattctccagctgctagtcaatccggtcatgcgttgatgatattagagagttctgagtgcatgatattgccgaacaactctggtggagacgcagcagaggatgatgacatggaagacctttccttatccttaagtgtgaaacgtgtgaagcacgaggaaggggaggatgaatcagggaccagttcttcctatctttcattgtcttgatgtatgttccacatacactgatttggccgcggctagaaatcttagccttcatagcggtggatggattagcttaggatgaatggatcttgctattagtacctggagattagctgttgtaaaattcacttggttgagaagtgttccattcttctggaattgacctaatgcagctggatatcttgtcatgttgtaagatgtgaaatgtattctgccatgcatgatagatgactagtttcttgtgtctattttactttggataatgttatctagtctttgtttccctgctagtgcgggttattgaaatttctactactttccttgctaatgtaaatttctatttcaagtgctttggattagcaatggatggttaggttgtgctaggattggcaacccaattgcagtcacaacatcaagacttttagtctttgtagctgcattgagttcacaattgtagctgcctcagtcatatttatctgcagttttttgtaacaatgacttacgcatcttgtttaaccgactgagttagactaattcatgtatcttgtttaatcaactaagttagactctcttgacaac

SEQ ID NO: 26630 - DNA, 999 bp, Glycine max
  Clone ID: TF_GmC6701_1
ggctaaccacacaacctacgaaagcaacgaaacatcaaacttgtacggagcaatgagctctcatgctttaaacaccaatgtgaatgctcttgatcactttgagatacccgtaacgacgccgtttcaggacgtttctgcatcggtgccgtccatagcagcgttctgccggagttctagcttccggaacattttcttgacagagaattgggcggagctgccgttgaaggagaacgacaccaatgacatggtcatctacggtgctttgcgtgatgctgctgccaccggatggttccccgccaatggaaatgaggtgagtaatgttagtgtagctgtgaaaatggaaaatgagggtcaaaatagtaaaactacagccgcgcgtggcactcgcacgcctccaaagaaggggttgagctaccgaggcgtgcggaggaggccgtgggggaagtatgcggcggagattagggacactaagaggaatggtgtgagagtgtggcttggaacctacgaaaccgctgaggatgcagctttagcttatgatcgagctgcatttaagatgcggggctcaaaagctaagctgaattttcctcatttaattggctcggatcatgagccaattaaggttacgctaaagaaacattgaaacatttgtcggatgtttctttatagtgtcctttgtcatccacggtagccataaagcggagtaaagatagctccttgacagatttggagctggatatatgattcaaatatgtggcagttttcaatagacacgaggtggcaataataaaagggaatatatatatatatatatatatatatatatatatatatatatatatatatatatgaaatgtattactactatcttgccattcttatggcattgcagaagtgtgaggatagtttgtcatagtattttttttttcctttttctttgtaatatgaatagttgtatctcatgacaatgaaaataatgaagaatatataacaaattgatgg

SEQ ID NO: 26631 - DNA, 1554 bp, Glycine max
  Clone ID: TF_GmC400_1
aattcggctcgagcctctcaattctcaaacttgttacagataaaaaccctttcttgaaacctttctccaaaatttctcacaacccacttctactctactcattccacacccaacttacaaaaacccattcttttgctcactcattttcttaacgtagattaatcattatgtgtggcggtgccatcatcgctgacttcataccccgccgtggaggccgccgcctcacggcctccgagctctggccaaactccttcgccaaagacgatgactttgacttggattactcccacatcgctacccaacaaccctccactctcaaaaggtcccaacctcccaaagttagcgagcaggttgagaataagccggtgaagaggcagaggaagaatctctacagagggattcggcagcgtccgtggggcaaatgggccgcggagattcgcgatcctagaaaaggggttcgtgtctggttgggcacctttaacaccgcagaagaagccgcgagagcctacgatcgtgaagctcgaaaaatccgaggcaaaaaggctaaggtgaatttccccaacgaggacgacgaatattccattcaagctcgtaatccaattccaccccttcctttcgctccacaacaccctcccctgtaccagcaacagtaccgttgcgatctcaacaatgcccctaaaaatctcaactttgagttcggttacgacctgaaccacgcggaggcgttcccatcccgcgtggacgccgtcaacgctgactcggtggttgtctccgttgatgaaaattcggggtcagcgtcgggttcagagggtgcttattcgacaacggagttcatggggtccgttcagaacgggaacggttatttgggtggcacggtaatggagaagaaggagaaagagacagaggttattgaagctgaagaagaaaagaacaaagtgctggagctttctgaggagctgatggcgtacgaaaattacatgaagttttatcagattccgtactatgatggacaatccacgacgaataatgttcaggaaagcttggttggggatctctggagtttcgattagcgaggaatatatcaaggatgttcttttcatgcatgtgttttgtttcttcgtcaatgctgtgaaagcttttgctttctccctccattctgctgactaaactaacatctctggcgttttggcagggatgcacaggaatttaaattgagtgcttcggtagaaatggtctcattagttagtgctatgctatcatctggttttgttgaattgtaattttttgttttggtggtatgttgaacagtaattttactggatatattcaagtctatttgaattccaattccaattattctttcagtgaattttataccttaattcgaattcctagttgtttatgaaaatgtcgtctccatccctaattcgaggatggagaacagtcaagagcatgactcgggcaagcattaccgcgtgaggtcctacaatgggaataatattccaagcatttttggttacgcgccggaaaaaacatttaatatactgtctcgac

SEQ ID NO: 26632 - DNA, 1415 bp, Glycine max
  Clone ID: TF_GmC400_2
taggctgcgagagacgacagaaggggacgtcctatcgctctcagacttgtgttacaaacaaaaacccttcttcaaaaccttttctctaaaatttcccacaacccatttctactctctactcattccacacccaactcacaaaaaacccattctttcttttgctcactcattttcttaatcatgtgtggcggtgccatcatagccgacttcattccccgccgtggaggccgccgcctcacggcctccgagctctggcctaactccttcggcaaagacggtgactttgacttcgattactcccacatcgccgatcaacaacgttccactctcaaaatgtccccacctcccaaagctagcgagcaagtggagaataagccggtgaagaggcagaggaagaatctctacagagggattcggcaacgtccgtggggaaaatgggccgcggagattcgcgatccaagaaaaggggttcgtgtctggttgggcaccttcaacactgcagaagaagccgcaagagcctatgatcgtgaagctcgaaaaatccgcggcaaaaaggccaaggtgaatttccccaacgaggacgacgaatattccattcaagcacgtcatccgattccaccccttcctttcacaccacaaacacaaaaccctcccctgtaccagcaacagtaccgttgcgatctcaacattgcccctaaaaatctcaactttgagttcgggtacgacctgaaccacgcgggggcatttccgtcccacgtggacgccgtcaacgctgactcggtggttgtctccggcgatgaaaattcagggttagcgtcgggttcagagggtgcttattcgacaacggagtttatgggatccagtcaaaacgggaacgggtatctgggtgttaccgcaatggagaagaatgagaaagagacagaggttattgaagctcaagaagaaaagaacaaagtgcaggagctttctgaggagctgatggcgtacgagaattacatgaagttttatcggattccgtactatgatggacaatccacggctccaccgaataatgttcaggaaagcttggtcggggatctctggagttttgattaacgaggaatatatcaaaggatgttcttttcatgcatgtgtttgttccttcgtcaatgctgtgaaagcttctgctgactaatatctttgcgttttagcagggatggacaaaaatgtaaattgggtgcttcggtagaaatggtctcatgattttccgactttttttttttttttttaccaatttatttaatattaatttatttgtttctagaacttagggctatcatctggttttgttgaattgtaatttttcttttggtggtatgtcgaactgtaattttactagatatattcaaccgtgtttgaattccaatttttctttc

SEQ ID NO: 26633 - DNA, 1094 bp, Glycine max
  Clone ID: TF_GmC319_2
ttttacggctgcgagaagacgacagaaggggaacacaatactcttcaaacactttaccttcttcttaagacaacaagctaaaagcgcttctaacttaagtgatggctaacgctgctgaagtttcagcgttgaaacgcatcaagttgcatcttttgggtgaactctctccactggccactccccaaaacaaatttgaccaaacaaaccctagcccctctgaatcttccaattccgaatcttcttctatttctcttaaccactacttcactgacctcctcgaacccgaaattgaatttcctctcttcgaattcgattccaaaccccaagtaatcgacctcgaaaccccgaaaaccctaatttcagctgagaagaagcctcaatttaatcggaaaccgtcgctgctaatcgctgttccgaagaagaccgagtggatccaattcggaaaccctgaggtggcggcgccggagaaccagcctgagaagaagcactacagaggtgtccgtcagcggccgtggggcaagttcgccgccgagatccgcgacccgaacaagcgcgggtctagggtttggctcggaaccttcgacaccgccatcgaagccgccaaggcctacgaccgagccgccttcaggctccgcggctccaaggccatcctcaacttccccctcgaagttaacaccgcggcggagaccgtctccgtcgccgccgtcgacgtcgagaggaagcgccgccgcgaggaggaggaggtggtggtggaggatgtaaaggcggtggtgaagaaggagaaaataacggagcatgatgtgagttgttttagggggatgccgttaacgccgtctatgtggaccgggttctgggacagtgacgtcaaggatattttcaacattccgccgttgtcgccgttatctccttttggattttcaccgctcgtggctgtgtgaaattccaatttaggactgcgttttttcgtgttttagtacttacagcgtcctcctgttcagggatgagtacattgtacatttgacgaatttgtttattcaacaatcttttattcacttttatttgctacatagggccctgaatttttttgaagtttg

SEQ ID NO: 26634 - DNA, 1210 bp, Glycine max
  Clone ID: TF_GmC2485_15
attgacggtgcccttattaattggtccctctcctccaaaccccaactgggtatcgcaaagtttccaaattgaatgcaaaaacagaaacttcttcctcaaatgccttctgggtcgctcttctttctatccagattacgaagatttcggtcgccagtgaggttgtgattcaagtgctattttagcatttttttttacctggacggtaagggtcaacttgcatgcacatgttagtgaaaaaccacaataagggggatggatctaagtccctggccgatacactggcgaaatggaaagaatataatgcctggctggagtctaacaatgaagctgagaagccggttaggaaggtccctgccaagggatcaaagaaaggatgtatgaaaggcaaaggaggacctgagaacttgcgctgtaattacagaggagttaggcaaaggacatggggaaaatgggttgctgaaatccgagagccaaacagaggaagtaggctctggttgggtacttttccccactgccattagcgctgctcttgcttatgatgaagcagcgatggcaatgtatggtttctgtgcacgcctcaactttcccaatgttcaagtttcaactttttccgaggaaccgtctagaaattctccagctgctgcttaccagtcaagaaattctccatctgctaaagaatccggttctgcgttggtgatattagagaggtctgagtgcatgatgttgtggaacaattctggtggagatgcagcagaggatgatggcatggaagacctttccttatccttaagtgtgaaacatgaggaaggggaggatgaatcagggaccagttcttcctatctttcattgtcttgatgtatggtttgcatactctgatttggccgtggctggaaatcatagccttcatagaggtggatgattagcttaggatgaacgaatcttgatattagtacctggagattagctgttgtaaaattgacttggttgagaagtgttccattcttcaggaattgacctaatgcaatctggatatccagtcaagttgtaagatgtgaaatgtattttgccttgcatgatagatgactagtttattgtgtctattttacattggataatgttatctagtctttgtttccctgctagtgtgggttattgattttctactactttccttgctaatataaatttctatttccagcgctttggatta

SEQ ID NO: 26635 - DNA, 1119 bp, Glycine max
  Clone ID: TF_GmC1772_1
tcgactcgagccgaatcggcaacaaaacaactcaactaagcgcaaaccaaaccaacacaaacaaaaacatctctcagcaaatgaatattctcggacaatcactccaccaatcaaacaacggcagctactcttgttcgtcgccggagactgcaaactcctctaaccttccgaccactccgaaagccgttcactccgacgaggaagtgaacacattagcatcggctcatcctaagaaacgtgcggggcgtcgaatttttaaggagacaaggcatcccgtgtacagaggagtgcggcggaggaacaacaacaagtgggtctgcgaggttcgtgttcccaacgacaagtccacgaggatttggctcggaacgtatccaacgcctgagatggccgcacgtgcgcacgacgtcgccgcgctctcgcttcgaggtaagtcggcgtgtctcaacttcgccgactcggcgtggcggttgcccttgccggcgtcgaccaatgcgaaggagattcggcgcgtggcggcggcggctgctgtagcgattgcggcggaagacagccgcggcaagcagttgcggactaatgcgattgatgccgttgctgattgcgaagttagcagcagtgacataggcgtcgatgaaaattgcaataacaataaagcttcgcagaggttttgtgatttggatgaaattacaatgccagatgcaccggtttttgaggacatgcatgagtggcttcagactatggctgctgaaccattaagatcacctacttttgtaacatatgttaatgttagggatgtctggaactttgtggaggatgatgctgaggtttccttgtggagcttcaccgtctgaagagcatgcaatttaggctttaggtgtatttagtgtgtttagctttctttctcttcttttggtttttgtacataattaggaacggaggactacgaaaatgtacaaagaccgaaacgatataaggagatagctatctaggtaggaacataaaagtgtgaaacattgtaacttttctcattcggttgtttttgtaaaataaaaattctattttcatcaatacattatcaaagacactcactgttagcaaaaaaacaaaaaaaagagagagaaa

SEQ ID NO: 26636 - DNA, 1031 bp, Glycine max
  Clone ID: TF_GmC268_1
caggctcgagcgtaactgcgtgcactctctctctctctacaacaagaattcatctattcatttcagcccatcagcatggcgaaggagaagaaaaacttgtccaacaagaacaagaagccaagcaatgcagacgaggttcacttccgcggagtccggaagcgcccctggggccgctatgccgccgagatccgcgaccctggaaagaagacccgcgtctggctcggcaccttcgacaccgccgaggatgccgcccgcgcctacgacgtcgccgcccgaaacttccgtggccccaaagccaaaaccaacttccccttcctccccgacaacaacaccaacgttaacctcaacaagaagaacaacaacgttaacgttaaatctgacagtcccagccagagcagcaccgtggagtcctccaccccggagcgtgaattcacgcgccgcgccgcccccgccgcaatggatcgctttccgttcctacccatccagcagcaaatcctcgtgacccaccccgtcgcacccatgcgcccggtttactttctcgaccgggcccacttcatgacccagcccttcccactccgattcgaaccgggtccggtccagagcgactccgactcgtcctccgtcgtcgtcgattgccagcccaaaagagagctcaatctcgatcttaacttggctccacctaatgaatattaacctttttttttaatcttttaatttttcataaaaaagacagcagaaagaaaggaaaggactaaggagatttttttttctcttttttttttttttggaagattaatcttccattaaattgtcgtgtagattagataagatgttgttaattacatcctttgatgtaaataggttaatttttctgtttttttaggtccttgatagtattaacaaaggacatgatctgaaattgtctagatctggtataattttcatgtaacatcggaatatctgatgtaattctggctaatgttaattttctcttattacaataaaatctgctattctcgagacctcgtgcc

SEQ ID NO: 26637 - DNA, 1002 bp, Glycine max
  Clone ID: TF_GmC28_2
gtcctcatcaaatctaagcaaccgcaaaccctccttgaaaaacatcacaatcccttccataacctctggtcttgcaacagctatgtcacaaacaacagcaacaacaacaacaatagctacaaccatgtataacaacaaccaagtttcttcttcttctttttcttcagatgaaaccaacaataccaaagacgacaagcactatagaggggttagaagaaggccatgggggaagtatgctgcagaaatccgtgaccctaatagaaaaggctcaagggtgtggcttggaacctttgacacagccatagaagctgctaaggcttatgacaaagctgctttcaagatgagagggagcaaagccatattgaacttccctttggagattggatcagatcagtctaaagaagagtcatcatcatcatcatcatcagtttcaagcagcagcatcgtcatcaaggttggtgtgaagagagaaagagaggaagagagtgaaaggaagaacaactatgagaaaagtgagtttaacaacaatagtaatagtaataagcatgtgaagaaagaagagtgccctttgactccatcatgttggaaaggcttttgggacactgatgttatgggaacaatctttagtgtgcctcctttgtcaccactatctccactaatggttgtttgagattttgtggaacttttgctctttcaatgatgttttgaggtaaccaaactaaggggagagagagagatgatgctggtgattgtcctctctgatttaggttgctaatttgcctaaatcaaaatggtagtactaattaatctactaatagattaatttgcaagtgaatatatatatggatttgtataatgtaaatataggatagtactatgaagcaagatctttttgtttgttgaaaaaaaaaacaaaaaacccatgcttatcttcttcctttaggtaaaaaaatgtactgtacttgaagcaatattgaaatttgtttattcgtttattggagg

SEQ ID NO: 26638 - DNA, 1691 bp, Glycine max
  unsure (1)..(1691): unsure at all n locations
  Clone ID: TF_GmC1839_1
ctagagtccggtttccaccgagcaaacccaaacactctcttgtgtttttttttttttatctcactccacccccttcgctcttctagctgcatgaaattccctcctatattgttaggggtttcgttcattcactcgctcactcacacacacacgcgcgcattgaacaaatgatgtgaattcgttgttgttgccgttgcaaattggatcccactctctcgcagactcacttccgttgtaactaacgttacttttccctccaaacggtccctaacagcttctaccaaacaaactcacgccgcgatgttggatctcaacctcaacgccgattccgcctccgacttgcaaatggagagctccggcagcttcaattcctccgtcgtcaatgccgccgacaccgacgactcctgctcctacggcgacgccgttgcctacaactttgccatcctcaacaacgccgccacctccgacgggcttcccctcggcgccgccggagaaccgtccgttcgcaccatccagctctttccggcggccgattcgggagcctcggcgccgctcttgcttgatttctcgtcgaaggtggatcagcacggtgctccgccggagcagaggatcactccccggcaacagcaggtgaagaagagccgaagaggaccgcggtcgcgaagctcgcaatatcgcggcgttactttctatcgcagaaccggaagatgggaatcgcacatttgggactgtgggaaacaagtgtacttgggtggatttgacaccgcgcatgttgcggcaagggcttatgatcgagctgcgatcaagttccgtggcgttgatgcggatatcaattttaacgttagcgattacgatgaagatataaagcagatgagtaacttcacgaaggaggagtttgtgcacattttgcggcgacagagcactggtttttcgaggggaagctccaaatacaggggagttactctgcataagtgcgggcgatgggaagctcgtatggggcagtttcttggtaaaaagtatatatatcttgggctattcgacagtgaattagaggctgcaagagcgtatgataaggcagctataaaatgcaatggaagggaagcagttacaaacttcgagcccagcttgtatgaaggggatgtaagttcctcccgtgccaaattgggcatggcaagtccaaggtccttatggcagggcaactcttgctccacccttctctactgcagcatcatcaggattcccttcaacaataataccatcagctgcggatactcaaattcgttttccaaacatgacattcctccactcgcattttccatcatcaatcactaactccggcaccatatcccctttcttcttcggtagctgaatgcattgctaggtagaccaaagcaattgcaaatcttcttgatttcaccatatggttgacaaactagtaggactagttacaagtagcaattgaatttgcttggttctacagcttttactatttgccattctactagttttcttcaatatatgtaaagaaatgccatgccccgatggcttcttgaactctgcttttactgatttttgagactaagcgtttactttggtatctccaacattcaatctcggtgcttttctatctagaaaatacttgaaaagatgagtttgatctttttgaaaaanaaaaaaaaaaaaaaaaaaaa

SEQ ID NO: 26639 - DNA, 909 bp, Glycine max
  Clone ID: TF_GmC4678_8
agttcctcattcgtcatggaacagattcactctctctctctttagagatttgattgacaaacacaactaattccaaagctaacaactttatagagagagagagagagagagagagagatggagggtgaaggaagaagaagagaaggaggagagagagaaacagcaacagcagcagcaacgaggaaggtggtggagggtgctgatcagagaagatacaaaggaataaggatgaggaagtggggcaagtgggtcgctgaaattagagaacccaataagcgttcaaggatttggctcggttcctattctacccctgtcgcagccgcacgtgcctacgacaccgccgtcttttaccttcgaggaccctccgcgcgtcttaacttcccggagcttctcatcggagaaggcgccgccgccctcaccggcggctgtgacatgtcagcagcttctattaggaagaaggcctccgaggtcggtgctagagtcgatgctcttcaggcaacccttcaccaccatcaccaccatgttgtgccaccacggcagcttctctctgccagctgtggcggtgggtccggtgattttgcagtgcgggttgttgacctgaataagatgcccgaacccgagagctccgactgtgagtggaacgtgaattgaaggaaaaagaaaaaaggtgcatgttttcatattcaggtgatggtggttgttaacgtgcgccggctgaggcaaaatgatgttgttgatgaggcctgtggtggtggtggtggtggtgcggagtactgtactgtatctttttttccttcaaccttctctcttgggtagttttttttaaaatttttagatattacaaaagaatttttggcttgtaaaaatatgttaaatgtaaattaactagtccggtagcagtttcttttt

SEQ ID NO: 26640 - DNA, 428 bp, Glycine max
  unsure (1)..(428): unsure at all n locations
  Clone ID: TF_uC-gmroLIB3259P225d12b1
acccacgcgtccngaataacatattttttatacagccgcaaacgcagtttttgacactgaaggggggagaaccgaagcttaccggcagcgactccacctaaaacaagaaagaggccacagggaagagaccggctgcaactaaccccgtaggcatcatgcccttgggaaacagacaggtcagaaatggttgctgcgcaagaaaaaccgtgggaaactagcactgaacacccagacgtgccgcatataaacgccgtcgctggaacaactcccgtgggccaagagtaacttcaaccggacccatttcaacctgctcaagaccaagaagtgagaaagaagccacactacaaacgcctgaggcagagaccacgggggaaatgggcagcagaaatccgcgacccaaacaaagcagccaaagcgtggctaggaac

SEQ ID NO: 26641 - DNA, 531 bp, Glycine max
  Clone ID: TF_GmC6107_7
gacgtgaggaactatagggttcccctttgtgtgctcaatgggcacgggtatgctgttaggaaggtgaaattctcgccacacgtgcggaatttgatggtgtcttgctcctatgatatgacggtgtgtgtttgggatttcatggtggaggatgctctggtgagtaggtatgatcaccacacggagttcgcggtcggggtggatatgagcgtgcttgttgagggcctcatggctagcactggttgggatgaacttgtttatgtgtggcagcatgggactgaccccagggcaccttgaaggtgaagggtctaccacagcgaaatctgtggcattccaagttcgagctgagaaatttgcaaataggaagaggaaaaatcagtataggggaatccgtcaacgcccttggggaaaatgggcagctgagattcgggatcctagaaagggggttcgtgtctggcttggaaccttcaacactgctgaagaagctgcaagagcttatgatgctgaagcacggaggattcgtggcaagaaagc

SEQ ID NO: 26642 - DNA, 884 bp, Glycine max
  Clone ID: TF_GmC700_2
cggctcgagctcgagccgaatcggctcgagggctgagctacctagctcagaagcatcatcatcagcttccactcgcaagcactcgcattccgtctacagaggggtccgaatgcgggcctgggggaagtgggtatccgaaatccgcgagcccagaaagaagaaccggatctggctcggcacctttgccaccgccgagatggccgcgcgtgcacacgacgtcgcggcgctcgccatcaaaggcaactccgccattctcaacttccccgaactcgcctcctccctgccccgacccgactccaactcgccaagagacgttcaggccgccgccgccaaagccgccgccatggaggttaacgatgctccgacgacgccaacttcgtcgtcgtcggcgtcactgtcgcagtcgtcatcttggtcgtcattggcggttagttcttcctccggcgaagacccgtcgacgccggaggagcttggggagatagtggagctgccgagtctggggacgagttttgaaatacccgacccgagtggggagttggtatttttcgacccgtggccgtattctcaggcgtggagtcacggcatttatgatgagagtgagagttatttttttggggatcagatttcaatgcaggactcagagacagagagcatggttctttgtggctttgcctttgaggcttcattgtggcagcattaatacatgggtgctgttaacatgtgcccttagggcacatgttaatgtgtaataaatgatggttggtccccatttattatattttggaaaaaacagcatcataaatgtgggaccacttattatactttgaaagttaattttctctttgtccaaaataaaataggtgggaccatgagccatttattaa

SEQ ID NO: 26643 - DNA, 1623 bp, Glycine max
  Clone ID: TF_GmC130895_1
gaaatacatgccaaacctaaccagttgaaatgacactccctttataatatatacttatctcccttcaattaatctccatcttaggtttgtgtctatcttacaataatggtgttgatttgttgagacaactagttcggtatttccagtgatcagcaatattttccattggcactttaatttcctaccctagctagttgatgttgtgttttcataaatgacaaattggaccaagccaaaaaaaaatattctgcctaactaaagcatgattggtattatttatttgtatgcaataattaattgatatattgacggctgcgagaagacgacagaagggggatattggtttcgttcaatattctatgacttttctctttaagaaattctagatctgctttatatgaaggcatatatagcttgaagttcaccatcaagcttacacatagagagaaaagaggctaatttattgtgttcatagatacaagacaatgaagaacctttcatagagttgaacaaggtggatcgaaggcatgggaagaggcctctcccttctgatcatgcatcaagggagagaagggaaggtttcaacttttctgttaaccaatctccacctaagagccaagggggagaagcttctcaattctcctttatgcatccaatcaatactggtgatgatagcaccctttcttcaccaattccacaatatgggcaaataagcaattcttgcttgattgagactcaggacccatccctacagcctttaaatcaaggaggaaatgggagaaaaagacattatagaggagttaggcagagaccgtggggcaaatgggctgccgaaatccgcgaccctaaaaaggctgctagagtgtggcttggcacgtttgacacggcagaggctgctgctgctgcttatgatgctgctgctttgaagttcaaaggctccaaagccaagctcaatttccctgaacatgttcttcttcctcctcctccaatatcatcatcatcaccaccttgcaataataataataatcatcatagttattattatggttcttcagctcttgcacctcttgcaccaccaccacaacatgtttatgatcaaacaccaccaccacaacaacaacccttgctatcatcatcagcacaagaagaagggtttccaaatctaatgcagtacgcgcagcttctttggagtagggatgatgatgatctacagcgtattgcttcaggccttcatcaacatcatcatcacaatgaggctttttatgattcaagttcttcaactttgttctcatcaacttccactacttattctatgactgtgtctgatcaacagcagaatattggagatgacacgagtactcccatgggggcagaatataattatggtggctgcttttttagagggagtgattttcatgacaagaattgaacattatgctaagtgtaagtatgatgtgtgtgctgctaaaaacctacctttttctgtattgttttcataattcaaaatttcaaataatgcttcttgaacttcaggtataaactcccatttcttcacatcggaagtgatatatatatatatatatatatatatatatatatataaacatgaaatttttagaaaca

SEQ ID NO: 26644 - DNA, 449 bp, Glycine max
  unsure (1)..(449): unsure at all n locations
  Clone ID: TF_13252405
gatcatgcctcaagggaggagagggaaggtttcaacttttctgttcttccatctccacctaagagccaaggggaagaagcttctttttttcctttntacatcctatcaatggtgctagtgntgatagcaccccttccacaccanttccacantctgggcanataagcaattcttgcttgattgagactcaggacccatcccaacagcctttaattcaaggcattgggagaaaaagacactttataggagttaggcagagaccgtggggnttatgggctgccgaattccgcgaccctaaaaaggctgcttgagtgtggcttggctcgtttgacactgcatangctgctgctgctgcttctgntgctgctgctntgaagttcataggctcttangccaatctcaatttcccagaacacgttcttgttcctcctcctccatttcntccttcc

SEQ ID NO: 26645 - DNA, 511 bp, Glycine max
  Clone ID: TF_GmC1684_4
ccagcgtccgcccacgcgtccgcccacgcgtccgcccacgcgtccggcgagaagacgacagaaggggggggaaatgggcagcagagataagggacccattcaaagcggcaagagtatggttaggaacatttgacacagcagaggcagcagctagagcatacgatgaagctgctcttcgtttcagaggcaacaaagccaaactcaattttcctgagaatgtcactctccgacaacctcaattcactgtttccaatcctccatcttctcttgtatctattacaacatcaatagacccagttgttcacagtactcgacctctccttcttccttctcaggcttcaactgcgaccaatgtttacgagtattttcaactctcgggcttccccaccaacaccaacctttatgatggtaataggatgtttgtgacgtctaatgccatggcttctcatcatcttcaatcttcgtcttcgttgttggcgtcttcttcttctgcgtttggttcttctgtaac

SEQ ID NO: 26646 - DNA, 1746 bp, Glycine max
  Clone ID: TF_GmC152_1
ggaaaagtaatggtaaaagaaaagggaaagtttataactttttaagagtttcttaacttgagaaaagcaaactcataaataagtaaataaaattcattagacagaacaatcaaactcaccctgatcctatcagaccttatcacagtcctcacggtagacacatggacacatatatggcctttcgcggtttccagaaaatcaataatagccattagcaaccatcccatcaaaaaagataaaacattattttctgaagataaaaaagaagtatgtacgtattaataatttcatgtaataattaattattgtgtataaaaagtttataaacttttatttaataatcttaaaagagatatcaatcataatatatgtgactttgtgcggataagtatgtgaaattgattgaaaggtgtcacatgatgatagatggattaacacagtgtttgtatgtggcccacgcgtccgggctcttggtttgtttgtctgtcacgagactcatacattgtgctgccaattatagtaactctctatttctctttccatctctcaagttctgaagaagaaacatgtgtggaggtgctatcatctcagacttcattggtgtgaagcgtggccgcaacctcgccgcgcaggaactatggtctgagcttgaccctttctctgacttccttggcttcgataccaccaattccaaaaaccaaccacccctgcagaaaattccagacaaaaaagtggtgtcatcatgtgagaagaagaagaaaagcgtggtgggtgcagaaaagaagaagagtgatagtgggcgagctcgtaaaaacgtgtacagaggaatcaggcaaaggccatggggcaagtgggccgcggagataagggacccacacaagggtgttcgtgtctggctcggcaccttccccaccgccgaagaagccgcccaagcctacgacgacgccgccatacgcatccgcggcgacaaggccaagctcaacttcccggccaccaccatttccgccgccgccgctccgccaccttccaaaaagcaacgctgcctcagccctgacaccatcactgaacaaagcagcagcagcagctcacaatccaccactggatccaccggcgaacgcagccggaggaaagacgaactcgacctgaaacaaattgaaaggtttctaggtttggagaaagagctaccgaacacaacaacattggtgctgagtgggacaacatggatgacctgtggatgctggacgacgtcgttgtgcccaaccgtcacttaatttactagaagtttaacggtttctagggttggacaacatgggtgctgagtgggacaacatggatgacctgtggatgctggcgacgtcgttgtgcccaaccgtacttatttactagagggagataattaattaattaataaatggcgttttcttaagttatagttttataaaactatgttgaaaactatgttggtgtatgtgttcttagttttctgttttgtcttgtcctctcgctttggtaatttctgttttgtacggtcgaattatttcaaaattaggtgcaacgtatcatgagagggatgattatatgttatcattatgattataaataaaggccaattagggtgtgttagcgtttgggtcgtgcatgtttatatgtagtttatgcgttgtatataatatatttggcatgacattatttggttctacttgttaagcaaatattatatagtatggttctacttgtcgtttttgc

SEQ ID NO: 26647 - DNA, 1132 bp, Glycine max
  Clone ID: TF_GmC152_3
gtttgtttgtctgtcacgagactcatacattgtgctgccaattatagtaactctctatttctctttccatctctcaagttctgaagaagaaacatgtgtggaggtgctatcatctcagacttcattggtgtgaagcgtggccgcaacctcgccgcgcaggaactatggtctgagcttgaccctttctctgacttccttggcttcgataccaccaattccaaaaaccaaccacccctgcagaaaattccagacaaaaaagtggtgtcatcatgtgagaagaagaagaaaagcgtggtgggtgcagaaaagaagaagagtgatagtgggcgagctcgtaaaaacgtgtacagaggaatcaggcaaaggccatggggcaagtgggccgcggagataagggacccacacaagggtgttcgtgtctggctcggcaccttccccaccgccgaagaagccgcccaagcctacgacgacgccgccatacgcatccgcggcgacaaggccaagctcaacttcccggccaccaccatttccgccgccgccgctccgccaccttccaaaaagcaacgctgcctcagccctgacatcatcactgaagaaagcagcagcagcagctcacattccaccactggatccaccggcgaaagcggcggaggaaacgacgaactcgacctgaaacaaattgaatggtttctaggtttggagaatgagctgcctgttagcaacaacattggtgctgagtgggacaacatggatgacctgtggatgctggacgacgtcgttgtgcccaaccgtcacttaatttactagaaggctaataattaataaatggcgttttcttaagttttagttttactttataaattgtagtataaaactatgttggtatttgtgttcttagttttcttctgctgttttgtctcttctctggctttggtaatttctgttttggacggttgaatgatttcaaaattaggtacttgattccaccttttctgttttgtcttgaccactcgctttggtaatttttgttttgtacggtcgaattatttcaaaattaggtgcaacgtttcatgagagggatgattatatgttatcactatgattataaataaaggccaattagggtgtgttt

SEQ ID NO: 26648 - DNA, 1433 bp, Glycine max
  Clone ID: TF_GmC28_1
cggctcgagctgtttggctcaagatcgaagcgctggcccacctctactatcttctcaactttcctaactttagcaaccatccaagaagttgatcagttccttgtctctccttgaattataaaaccattcacagtcttgaacccaatttcactctttgcacctcaaacaccttataagcctcaatttcacaaccaaaaatgcaaagttcaatctcacaatctgagatttgcatcactgattaccttctaccccaagaagttccatctcaatttcaatttccagatatgagcaacaataacataccaatgaaccataccaaccttcaaatgcctcaaatcacatctttctccaagcctccaaggtcctcatcaaatctaagcaaccgcaaaccgtccttgagaaacatcacaatcccttccataacctcaggtcttacaacaactatgtcacaaacaacaacaacaacaacaatagctacaaccatgtataacaacaatcaagttacttcttcttcagatgaaaccaacaacatcaaagagaacaagcactatagaggggttagaagaaggccatggggcaagtatgctgcagaaatccgtgaccctaatagaaaaggctcaagggtgtggcttggaacctttgacacagccatagaagctgccaaggcttatgacaaagctgctttcaagatgagagggagcaaagccatattgaatttccctttggagattggagagtcagaggaatcagtctcaagctgcatcaaggttggtgtgaagagggaaagagaggaagagagtaaaagcaacaactatgagaaaagtgagtttaacaacaataataatagtaataagcatgtgaagaaagaagagtgttctcccaaagctgtttgccctttgactccatcatgttggaaaggcttttgggacactgatgttatgggaactatctttagtgtgcctcctttgtcaccactatctccactaatggttgtttgagattgtggactttcgctatttcaatgatggtttgaggtaaccaaattaaggagagatgatgctggggattgtcctctctgatttaggttggtaatttgcgtaaatcaaaatggtagtactaattaatctactaatagattaatttgcaagtgaagatatatgggtttgtataatgtaaatataggatagtatgaagcaagatttttttgtttgttaaaaaaaaaaaagctctcatgcttatcttcttcccttagttatgtttcatttggtcaagaaatgtactgtacttgaagcaacattgaaatttgtttattcgtttattggagaaaaaacaatattgaaatttgtttattcgtttattggagaaaaaaaaaaaaaaaaaaaaaaaaaaaaaaaaaaaaaaaaaaaaaaaaaaaaaaaaaaaaaaaaaaaaaa

SEQ ID NO: 26649 - DNA, 1410 bp, Glycine max
  Clone ID: TF_GmC1051_1
tcaccatccatctttgttctttctcgtgcatggtgcaaccttctccatggccaaaaaatcacagctgcgtacccagaaaaacaatgttaccaccaatgacgataataatcttaacgtaaccaacactgtgaccaccaaggtgaaacgaacaaggagaagtgtccctagagactccccacctcaacgcagctcaatataccgaggagtcactaggcaccgatggacaggccgatacgaagctcatttgtgggacaaacattgctggaatgaatcacagaacaaaaaagggcgacaagtctaccttggcgcttatgacaatgaagaggcagcagcacatgcttatgatctagcagcactgaaatactggggtcaagataccattcttaattttccgttatcaaactacctgaacgaactgaaagaaatggagggtcaatcacgggaggagtatatcggatcgctgaggaggaaaagcagtggtttttctcggggaatttctaaatacagaggtgttgcaaggcatcatcataacggaaggtgggaggctcggattggcaaagtttttggcaataaatatctttacctcggaacttatgctacccaagaagaagctgctactgcctatgacctggcagccatagaataccgtggactcaatgctgtcaccaatttcgatctcagccgttacattaagtggcttaagcctaacaacaacaccaacaacgttatcgacgaccagattagtattaatctcactaacataaacaataataataattgcactaacagcttcaccccaagtcctgatcaagaacaagaagctagcttcttccacaacaaagattcactcaataatactattgtagaagaagtcacgttggtgccacatcagcctcgtccagcgagtgccacgtcagcattggagcttctacttcagtcatcaaagttcaaggaaatgatggagatgacatctgtggccaatctttcatcaacacagatggaatctgagttgccacagtgcacatttcctgatcacattcagacgtactttgagtatgaagattccaatagatatgaggaaggagatgatctcatgttcaagttcaacgagttcagctccattgtgccgttttaccaatgtgacgagttcgagagttgaagaagtcaggtttatataatgcatggaaaaaagaaactctgatatgtttgtttatttgtttaatttgttgattatgttaaagaccatattcataaatctttagctaattaaggtttaagtttttagaagagagatcatgtcattcacaactattataataagtggacttgttttcaatttgtgaacatgaaagtttattctttttatagcaacgtcgtcattaatcacataaaaatgaatattaatgcggc

SEQ ID NO: 26650 - DNA, 930 bp, Glycine max
  Clone ID: TF_GmC320890_1
aggaacagaatataacgttggatcctagtgatgaaagaattacaaagtaaaaaattgtttacgaacaattcgaaaaacagagaactggaaaacagagaggctgattaagaagtcaaagtcaaaagctgttttaggtactcagcacccaaattcttgaacacaagcacattttgcgaagttctgctgaagtctaattgttccctctgatcaaccttggtcttcttcttagaattggactttgttctcatagtgtgttttctcttaagagccaaaacaggggaggaaccttcttcccatggcttacttggcatgtctttaagggactccctcaccacttcctctgggaaattcagcaccgcaagagaccctcttgtagaaaacgcggcttgatcataagccaaagccgcggcttcggccgtgtcaaaggttccgatccacactcgaacgccgtttcgagtggaatctcttatctcggccgcgaatttcccccacggcctcttcctcactcctctgtacatcctgggctccttggcaacttgttgtgaaggtagtggtggtgatggtggtggtggtcgtacttttttcacttccttgtaagtggtgttagatgagacttcttgtaactcaacgctaccaatacaactggaaacattggacgctgaggatgtttccttggtttgtgattgtgacgaattgtcgctcaagttgttgaagatatcatccaaaacaaagttgtagtcccaagaaaaagtgtctccaaaaatagaggagttttctgggaagaaactaaggttttggtttaggaaaaaagtggaatcaaaatctaaatccatctcaaggaatgccagtgcacacaacaattttgatgtttgaagaaatgtaaaggtagctagttaagtgtcactaaattctcgagccgaattccgggct

SEQ ID NO: 26651 - DNA, 151 bp, Glycine max
  Clone ID: TF_701207375H1
atgccaagacaaagaagaataaccagtatcgcggaatccgtcagcacgcatggggaaagtgggctgctgagattcgcgacccaagatagggggttcgtgtttggactggaactttcagcactgctgaagaagctgcaagatgttgcgatgc

SEQ ID NO: 26652 - DNA, 2147 bp, Glycine max
  Clone ID: TF_GmC1595_1
aattcggctcgaggcagtttccaaagaacccaactcaacttcaaaaccccataataatctctctttgacattcataaaaaacacacaccatggactcttgttcatcaccgccaaacaacaactccctcgctttctctctttccaatcactttcccaacccttcctcctctcccctctcccttttccactccttcacctatccatctctctctctcacaggaagccacacggcggatgcacctcctgagcccatcgccggcggaggagcgaccaacctctccatattcaccggcgcccccaagttcgaggactttctgggcggttcctccgcaacagccaccgccaccacgtgtgcaccgccacagcttccgcagttctccaccgacaacaacaaccacctgtacgattcggagctgaagacaacaatagccgcgtgcttccctcgcgcctttgccgccgaaccaaccaccgaacctcagaaaccctctccaaagaaaaccgtcgacaccttcggccaacgcacctccatctaccgcggcgtcacccgacatagatggacgggaagatacgaagctcatctatgggacaatagttgtagaagagaaggccaaagcaggaaaggaagacaagtttacctgggtggttatgacaaggaagataaggcagccagggcttacgatctcgcagctctcaagtactggggtccaactaccaccaccaactttcccatttccaactatgagaaggaactggaggagatgaagaacatgaccaggcaagagtttgttgcttctctacgaaggaagagcagtggtttctctaggggggcctctatatacagaggagtgacgagacaccaccagcatggccgatggcaggcgagaataggcagagttgccggaaacaaagacctctaccttggaactttcagcacccaagaagaagctgctgaggcctatgacattgctgctatcaaattcaggggattaaatgcagtcacaaactttgacatgagtcgctacgatgtaaagagcattgcaaatagcactcttccaattggaggtttatctggcaagaacaagaactccacagattctgcatctgagagcaagagccacgaggcaagccgatccgacgaacgagatccatcagcggcttcatccgtgacctttgcatcacagcaacagccttcgagctccaccttaagctttgccatacccattaagcaagacccttcagattactggtccatcctggggtaccataattctccccttgacaacactggcatcaggaacactactagtgttactgcaacttcttttccatcctccaacaatggcactactagtagtttgacacccttccacatggaattctcaaatgcccccacaagtaccggcagtgataacgatgccgcgtttttcagtggaggaggcatctttgttcagcaacaaagtggtcatggtaatggtcatggaagtggaagcagtggttcctcctcttcttctttaagctgttcaatcccattcgccacgcccatcttttctctaaatagcaatactagttatgagaacagtgctggttatggaaactggattggacctaccctgcacacattccaatcccatgcaaaaccaagtctctttcaaacgccaatatttggaatggaatgagctcatgcacgaggtgggatgagaatctgtgcatataatgatgaaaggggaagggcaatagtggtgatggtgttttagcatgcaaaagaagcaaggacgaactagtacctttagctgatgcagtatttgaatgagttggactgacagtcataatttcatgagaagcgtagctatacctagcagcagctgacactgtactaactcaaagttcctttgttatgttttggatgaattttcttttttttctttttcgcccctttattagctttttggtcctgttaatatactgacattatatcaaatgaggataatgggaagaaaaaaaaaatccttttgtaatccctttcatctcattttttgttagtatcaacttgccatctatgtgaaaggcattcaatgcctatatatattgatgtacctttggaaaaaaaaaaaaaaaaaaaaaaaaaaaaaaaaaaaagccgattcccc

SEQ ID NO: 26653 - DNA, 699 bp, Glycine max
  unsure (1)..(699): unsure at all n locations
  Clone ID: TF_GmC135444_1
ccggnattcccgggtcgacccacgcgtccgctagccacttcacacatgacacataaaaacaacacaagaagaaggaaccaaactacatgcttcttcaatagcaaaagcacatgaagactaataacaacgtttctggggagaggaaatcgcggaagagacgcaacggtggaagtgattatgtggaagacacacttgaaaagtggaaggagtacaacaggcagcaacaacttggctctagagaaaatggggtggaagtgattcacaaagctcccgcaaaagggtcgagaaaagggtgcatgagaggaaagggagggcctcagaactccgattgcaagttcagaggtgtgaggcagaggatttggggtaaatgggttgctgagattcgcgaacctatcaatggcaagcttgttggtgagaaagcaaataggctttggcttggtactttctccactgcacttgaggctgctcttgcttatgatgaagcggctaaggccttgtatggcccttgtgcccgttttgaatttttccgagtcaatagactctaatggatcatcatcttctagtggaagtgataaaaaatcaccaagtggttcttcggagaatggtggtgatgttgcaatagctgaggagttggaggtgaaccatcgtcggtgtcatgaagacagaccaagattttctaaggttggtgtcttgagaaag

SEQ ID NO: 26654 - DNA, 1155 bp, Glycine max
  Clone ID: TF_GmC289_2
ggctcgagaacgaggaaaaaaaaaatatggaaaagaaacaagattaagaattggggtttgaagaagccggtggtgtctccttgcttgttctcgatcgatcttgttattgtaaaatataataacttttttatatcgtgatcaagatgcgccgagggagagccaccgccgccgtcgtggatccgacggcggagcaggcgaaggagacgcggttccgcggcgtcaggaagcggccgtgggggcgattcgcggcggagattcgagatccgtggaagaagcagcgcgtgtggctggggacgttcgattccgccgaggatgccgcgcgggcttacgacaaggctgcccgatccttccgcgggcccaaggccaagaccaatttcccctccttccccggcccgacggaccaccactcctcgcagcagattccgccgctctaccaggcccacgggctttccaccaagttcgagcccgcccaggtgaaccggcccaccaccagcggcatgagcagcaccgtggagtccttcagcgggcctagggttcccccctcctcctcctcctctcgcaagccccttgtggttgttaaccctatcatccctctcgacgacgacgacgacgattgccacagcgattgcgactcttcttcctccgtcgtcgacgaccaggactgcgtcctcacctcctccttccggcaaccgcttcccttcgatctaaacctcccgccgcccgatgccgcctacgacgacgacgacgacgacgtccccgccaccgcgctgtgcctctgatgaagaagagcctcttctcggtataatcataattttcttgttgttgttgttgttgttgttgttgactatctctggtttaattaattgaagttgttagattgtgttatggtgttgtagagtaatattataatataggcatggagatggatggatggatggaaggttgtgttgttgtaagttatttggatccatagcattggacctcatctggaaaactggttgctgcttctgctttcttcatggatctgcttcttacccttacccttaccccccaattagaacttactctctttttcttacttttctgtacaaaaatcatggcaatcagatcatagaataaattacattctaatcaattactctttccctgcttgct

SEQ ID NO: 26655 - DNA, 1127 bp, Glycine max
  Clone ID: TF_GmC1733_1
aattcggctcgagaacaatcttagaaataaacctacatatccaaccctcatataaatacgccattaccctacaaccatatattatacacatagctagacatggtgaaaccagccatggctagtgttgattcttcttccttttcttcttgtaaaaatgattcattttcctctaactacagcattgatacttgcaagatgtacaaaggggtaaggaagagaaaatggggcaaatgggtgtccgaaattcggcttcccaacagccgtgagcgcatatggttggggtcctatgacacccaagtgaaggcggccagagcatttgatgtcgcactttattgcctacgtggcaaaagtgcgagtttcaactttcctgacacacctcgacacttggaaattaatatggtgttaccatgtgacatacaacaacaacctctctcccatccggagattcaagagatagcctcgaagtttgcgaacaacgaccacgtccctttggaggaggagagtgcttttcaagaacaagaacaagacccctcgatggagtcacaaagtgacgagtctaaatctgccaatacaataacggagatgagcaacttccctaatatttatgatggtggaactcatactaatgtacaagtggatcaattacaaggggattgggacagcatggattggacattttttaacatgttggatgacttgaatggctcggattttggcctctatttggggccagacaagttgcacccgggtgagtttttgtgtcccactcaagctccaatgctttttcatgaggatgaaattgaaggtgatgatgatcatgatgctttttctaaccattccttactttggagttggaacttttgattcacctgcaaattaacttagataccctctactttgcataagtttcaactagtaaataattactagcaagcaagcctctctattatgtttttttgtagccatttatacatggctgtttctcaattataatagttaggctatgactagagtttatgtcaaatggaccataaagacaaaaagaaaaaagaccatataccatgccataaataatattatagaaagtggcccggtttttattgccatctttctgtttttttttaaaa

SEQ ID NO: 26656 - DNA, 1578 bp, Glycine max
  Clone ID: TF_GmC1447_1
tggggaacaaccacaacaacaaattttccaattagccactatgagaaagagttggaagaaatgaagcacatgactaggcaagagtacgttgcgtcattgagaaggaagagtagtgggttttctcgcggtgcatccatttatcgaggagtgacgagacaccaccaacatggaaggtggcaagcgaggattggaagagttgctggcaacaaggatctttacttgggaacttttagcacccaagaagaggcagcggaagcatatgatgtagcagcaatcaaattccgaggactaagtgctgttacaaactttgacatgagcagatatgacgtgaaaagcatacttgagagcaccactttgccaataggtggtgctgcaaagcgtttgaaggatatggagcaggttgaactgagtgtggataatggtcatagagcagatcaagtagatcatagtatcatcatgagttctcacctaactcaaggaatcaataacaactatgcaggagggggaacagcaactcatcataactggcacaatgctcatgcattccaccaacctcaaccttgcaccaccatgcactacccttatggacaaagaattaattggtgcaagcaagaacaacaagacaactctgatgcccctcactctttgtcttattcagatattcatcaacttcagctagggaacaatggaacacataacttctttcacacaaattcagggttgcaccctaatgttgagcatggattctgctttcattgacaatagctattcatcaactacagctagggaacaatggcacacacaacttctttcacacaaattcatgcctatgggaactactactgctgttgttgcaagtgatggtgatcaaaatccaagaagcaatcatggttttggtgataatgagataaaagcacttggttatgaaagtgtgtatggctctgcaactgattcttatcatgcacatgcaaggaacttgtattatcttactcaacagcaatcatcttctgttgatacagtgaaggctagtgcatatgatcaagggtctgcatgcaatacttgggttccaactgctattccaactcatgcacccagatcaactactagtatggctctctgccatggggctactacacccttctctttattgcatgaataggtggaaaactagggagagaaggaagagtcaaaaaggtgatgaagaagatgcatatattgctgacttgtttcttcctcttgtgaagttgctaatttgatagtgtgcacttttgaagatgaggatatataggatttctttcactatctctaacttgcaggatccttatttcactagggtctaagtaatctagcctcaagtttagtcatggcagaagcatttgctgtgaattttgggaattaactttggagaatgtgtggacagatcattgggatgtttttattatcagcggactttttaattctggaataacaacgatcataccaagggtggagttttcctcaatgtatatgcatggcacttgtttttagttttttaaccaaattctttttatacattatgcatggtaatgggtgttagtg

SEQ ID NO: 26657 - DNA, 867 bp, Glycine max
  Clone ID: TF_GmC6851_1
tgttttattttacatctctctctctctctctatatatatatatataatcaacaccatccactactttctcacgcgccattaacaaagatatggtacaaacaaagaagttcagaggagttaggcaacgccagtggggctcctgggtgtcagaaattcgccaccctttactgaagagaagggtgtggctagggacatttgagacagctgaggcagcagcaagggcatatgaccaagcagccattttgatgaatggtcagaatgcaaagaccaatttccccacctcaaagaaccaagctgaagctgatgacaacaacaacactgacactttcttatctccaaaagctctttcagaacttctcagcacaaagctgagaaagtactgcaaagaccctgctccttccctcacttgtctgaggctagatgctgataattcccacattggagtgtggcagaaaggggcaggaccacattctggctccaactgggtcatgaggttagagcttggaaagaaacaaattaccgaggagggtagtgagtcaacggagtcaccacaaagtagtactaatggtgctactgaaaataatgaagtagaagaggaggatagagtggctttgcagatgattgaagaactacttaattggaactagaagaagaagaaaaaaaaaagggaaccttaatccgtgtcatatatagttcttgaatagtagtccttttttcatgctatccttttcaattcgtttacttttgtgctttctgtaaaaaaaatgtttgtcaaagtgctgatatctatatgatgatggccagtttgatagttacttatattatacactttttaagatatattgtgattgatggtaattatgcatc

SEQ ID NO: 26658 - DNA, 924 bp, Glycine max
  Clone ID: TF_GmC320_1
aaataaaaaaaattgttttcgtgtggaaacaaaaaaacaattcaaaaacaaacatatgatggtgaagccgagtagcgaaaagccagaggagcatagggattccaagtactacaaaggggtccgaaagagaaaatggggcaaatgggtatccgaaataagactacccaacagccgtcagaggatttggttgggatccttcgacacccccgagaaggccgcgcgtgccttcgacgccgcaatgttctgcttacgtggccgcaacgccaagttcaatttccccgacaacccacccgacatcgccggcggggaatccatgacgccgtcacagattcaggtcgccgccgcacaattcgccaacgctgggccccacgagggacattcgggtcgacccgaacattctcccatgcaatctctatcgccttctgtttcagaagggaccgttctaacggacagtgacgtcaccacacttaacggttcgctaacggatttgttcactcccgttgggtcgagtggttacgcatccgattacgggattttccccggtgttgatgatttcagtggcggtttttatgtgccggaaatgctgaactttaattatggagaagaaaacggggaagggttcatagttgatgagtctttcttgtggaatttttgaggggcaatcaaatccagtattaaccggcaaaaccggtcacggttgcggatagttttattgtttccggaaccgtggcaatgacccgggtttggattggttattttttagacgaccaaacctataaccaagaaactatgatatccatgcaactgtagcaccaaaagtaatgcaatttgtccagatagttgtgatttcttttttttaaacaagatatttgtaatttgtaaagctcttataacagatattgtgaaaaaaataatttctgattc

SEQ ID NO: 26659 - DNA, 1136 bp, Glycine max
  Clone ID: TF_GmC288383_1
ggctcgagaatctagccgagctccttctccttcacttcagtcacctttcctctctgcgtttgtttcccattctcaaagacacttcacaaacacgtttctcttttttctcatcatcatggccagaccccaacaacgctatcgtggagtacgccaaaggcactggggctcttgggtctctgaaatttgccaccctttgttgaagactagaatatggctaggaacttttgaaacagcagaagatgcagcaagagcatatgatgaagcagctaggctcatgtgtgggtcaaaagcacgcaccaatttcccatacaaccccaatgagccacattcatcatcatccaagcttctctctgccactttaacggccaagttacataagtgtcacatggcttccctttcccttcaaatggccaagcagaaaccaccacagagcaaagagcctcaaccatcacatgggtcatccaatccatttgcctttgccaatgtcattgctggatcaagcgctgacaccggttttcgatggccagataacagacatgaggaattcagatggcttgaagggaattgggttggtgtggaaggccaggttgaagtttcccatcaacagtttcagccagttcttgaagatgatcacatagagcagatgatacaggagttgcttgattatggatcaattgagctttgctctgttggcttaacctagactctaaagtataatagcattcaaggttttaaaaaacggtctgcaactgtgttttcagccgcaacataaaggtttttggagtgtctgctactgcaatgcagtcacaattgtggtgactgcattagttgtatttgtctgcaattttctgtaatatcaaggaacacgataaactgcgatcgcgatcgttttttaaaaccttgatagcatattctcaactggcaagtgcaaacatctctttaggggtactaattcaccatgtaataaataaaggtataagcttcgtttagtaccaatggaaaatcttagtcacctttagtttctgttacttcaccaattagtggacaacaatatgcggaaccagaatgtagccaatgatgcgaatgaaatatcgtgcatatgatggactataatagagaatttgtatcaatagagt

SEQ ID NO: 26660 - DNA, 884 bp, Glycine max
  Clone ID: TF_700943089_FLI
aagcaagcgcatccgcggcgacaaggccaagctcaacttcccggccaccgctccgccaccctccaaaaaagtggtgtcatcatgtgagaagaagaagaagaaaagtgtgagtgcagaaaagaagagtggtgggcgagctcggaagaacgtgtacagaggaatcaggcaaaggccgtggggcaagtgggccgcggaaataagggacccacataagggcgtccgcgtctggctcggcaccttccccaccgccgaggaagccgcccgagcctacgacgacgccgccaagcgcatccgcggcgacaaggccaagctcaacttcccggccaccgctccgccaccctccaaaaaacaacgctgcctcagccctgacaccaccaccgaacaaagcagcagctcacaatccaccactggatccaccggatcgccgccttccgccgccttccacggcggaggagatgaactcgacctgaaacaacttgaacggtttctagggttggacaacatgggtgctgagtgggacaacatggatgacctgtggatgctggacgacgtcgttgtgcccaaccgtcacttaatttactagaagggagataattaattaattaataaatggcgttttcttaagttatagttttataaaactatgttggtgtatgtgttcttagttttctgttttgtcttgtcctctcgctttggtaatttctgttttgtacggtcgaattatttcaaaattaggtgcaacgtatcatgagagggatgattatatgttatcattatgattataaataaaggccaattagggtgtgttagcgtttgggtcgtgcatgtttatatgtagtttatgcgttgtatataatatatttggcatgacattatttggttct

SEQ ID NO: 26661 - DNA, 1390 bp, Glycine max
  Clone ID: TF_GmC152_2
cataagtgaagaaaagtcagcagagctttaagacgatgggaccaatgtgtcatcttgacttatccgagagaaattcgtgaagaaagaaagtgtatcattttcctttggattaataagtttggtcttgtggatagaaatgaagggcaaagcacttcaaaataaggctgtttggattgatgtaaaaaggaacaatactatgttctattgtttgaattgtttacaatagaattttacctcgtaaaaaaaaaaaaaaaaaaaaaaaaaaaaaaacctatgaagaaccccaaagacttacgcaccctagggccggtctctcacgtccccacattaatgtgtgtttgtcacgagacccatagtgctgccaaattatagtaactctctttctctatctgaagaagaagaagttctgaagaagcatgtgtggaggtgctatcatctcagacttcattggtgtgaagcgtggccgcaacctcgccgcgcaggaactgtggtccgagcttgaccctttctctgacctccttggcttcgataccaccaccaccaccaccaaccaaccaccccttccagacaaaaaagtggtgtcatcatgtgagaagaagaagaagaaaagtgtgagtgcagaaaagaagagtggtgggcgagctcggaagaacgtgtacagaggaatcaggcaaaggccgtggggcaagtgggccgcggaaataagggacccacataagggcgtccgcgtctggctcggcaccttccccaccgccgaggaagccgcccgagcctacgacgacgccgccaagcgcatccgcggcgacaaggccaagctcaacttcccggccaccgctccgccaccctccaaaaaacaacgctgcctcagccctgacaccaccaccgaacaaagcagcagctcacaatccaccactggatccaccggatcgccgccttccgccgccttccacggcggaggagatgaactcgacctgaaacaacttgaacggtttctagggttggacaacatgggtgctgagtgggacaacatggatgacctgtggatgctggacgacgtcgttgtgcccaaccgtcacttaatttactagaagggagataattaattaattaataaatggcgttttcttaagttatagttttataaaactatgttggtgtatgtgttcttagttttctgttttgtcttgtcctctcgctttggtaatttctgttttgtacggtcgaatgatttcaaaattatgtgcaacgtatcatgagagggatgattatatgttatgattatgattataaataaaggccaattagggtgtgttagcgtttgggtcgtgcatgtttatatgtagtttatgcgttgtatataatatatttggcatgacattatttggttcta

SEQ ID NO: 26662 - DNA, 840 bp, Glycine max
  Clone ID: TF_GmC5876_1
ggctcgagccaaaaccacttgacacaccttgccaacttgcccttccttcaaaaaccaaagagagacagaacgactccgagaagaaacaaagaaacaaacatgggaagcaacaaaacctacgaggaagaagaaagcacggttctattttcccattcccaaacacaaacagagttgttacccttcaacgagaacgacccgcaggacatggtcatataccaagtcctcaacgaagccaatgctctcaccaacacatttctccctcagaggcttcaccaacctcagttgtgcctcgagcccaccagaaacataacaaagaagcactacagaggagttcggcgccgcccctggggaaaatacgccgctgagattcgcgactctgcccgccacggcgccagaatatggctcggcaccttccaaaccgctgaagaggctgccatggcttatgaccgagccgcgttcaagatgaggggctccaaggctttgctcaatttcccagctgaaattgttgctgcaacggagttatctttcaataatactaatagtaacaatcacgatgctgtttctgattccagtgctggtagctcttgcacgaacaattccgttcagctaaataggaatcagtcagaaagctgcacaagtagcacaggttagctaaatggggttcaacaattaattgtagaaatctttttttttttttttcgcaattgggttggtttgttataattattataattatttgtatctgtctgtcttacaggacaccgaaaattaattcatttaatgtgataccatgttcatgaatgggtttaccatgatcatgcatgggttaaaattataaaa

SEQ ID NO: 26663 - DNA, 518 bp, Glycine max
  Clone ID: TF_GmC5876_2
cttcaaaaaccaaagccagaccgaccctaagaagaaaccaacaaacatgggaagcaagaaaacctacgaggaagaagaaagcacggctctattttcccattcccaaacacaaacagacttgctgttacccttcaacgagaacgacccacaggacatggtcatataccaagtcctccacgaagccaatgctctcaccaacacattcctccctcagcccaccagaaacataacaaagaagcactacagaggagtccgccgccgtccttggggaaaatacgccgctgagattcgcgactcggcgcgccacggcgccaggatatggctcggcaccttccaaaccgctgaagaggctgccatggcttatgaccgagccgcgttcaagatgaggggctccaaggctttgctcaatttcccagctgaaattgttgctgctgctactgcaacagagttatctttcaaaagtagtagtaataataataataataataataataacaatcccgatgctgtttctgatt

SEQ ID NO: 26664 - DNA, 1839 bp, Glycine max
  Clone ID: TF_GmC1763_1
tacgaatgcccaaaaagtaaggccaccgcagaatgaaacttgcaaaaagtgaggccaccccaaaaacaaagtgagattataggaaacaaaaatttctttgcttaatactagttcctcctttctcctagcctggtagtcttttgaaaattctttatcttgatcacataattttcattttgaacttgaagaaagttttagtgtatttttttttccttaaagaaacagaacatatcctgttctttctttctctgtttgcatttttgttcacttctttctttctttcttattatctagttaagcatgacaacatttatggacatgtacaacactactagtagcatcatgacaccggatttcttagaccagtgtagtgatcaagagctgatgaaagcacttgagccttttatgaaaagtgattcatctagcactacttcctcatcaataacaacatacccttcattctcttctttttcttcttctcccaacttgtcctcaacaacatggagcacccaattttgctcctcaagctaccaccaaaagggtccaactccaacccaagctagttccttcaaactgaaccaactcaccccatcacaaatatttcaaattcaagcccaaatccaggttccacgaggccagtttctgagcccaaagcccattcccatgaagcacgtgcgggcttctccttcttcaaagcccacgaagctttaccgtggggtgaggcagagacactggggcaagtgggtcgctgagatcagactccccaagaaccgaacacgtctctggctaggtacatttgacaccgcagaggaagcagcgttggcttacgacaacgcagcgtttaagctaagaggagaaaacgcgaggctcaacttccctcacctacgtcaccatggagcacgtgcgtacggtgagtttgggaactacaagcctctcccctctgcggtcgatgcgaagctccaagccatttgtcaaagcttagggaccaaattgcagaaactcaaaactcaaaaccctattgttctagatacacacaaggcagagacagagacatcggagtttcaggattttaataaggttgagaattaccaaacatcatcatcctcggcgttgtcggatgaatattcttcttcttcttcttcttcttcgcccgaatccgatattactctcttggatttctcggattcttgtgaaacaatagacaatcttgggttggacttggagaagtacccttccgtggagattgattgggcagctttatctgactcatgaataatcagtggttaacggtttagatttgatgtgttttaggttttttttgcatgtttttttcttgttaatcagtgttttagatattgttttggaagttcttctaaatcacagcgcattataatgtcactgtgactgataaattattaagccattaatcgaataaaattttacacaatcacttgctatgctgagtcaggttgctaactttagtgtactgctgtagatggatgggtcacagcggtttggttattatggttttcttggtctgctggtattttttattcctgcatgaccaagctagcttcaactcttttttttctttttaaattgatagaaaacaaggtagcttcaactacttgtttgcagttcgaatgtaatttaagtgccttaatgcaagttttggaagttcttgtaaaaaacagggcatgtgacagtcttttattcataaggaaaataatttaattgaaatttgaaatataatgatcgtgtaatgattttttacacaatcaattaatcattgttatattttttaaaatattgattttattaataatttttaaaaaaaaa

SEQ ID NO: 26665 - DNA, 356 bp, Glycine max
  Clone ID: TF_LIB3056-008-Q1-N1-G5
ctgtgtgcactctctctctgtctacaacaagaatgcatctatccatttcagcccatcagcatggcgaacgagaagaaccacttggacaacacgaacatgatgccatgcaatgcagacgaggctcacttgcgaggagtccagaagcgcccctggggccgatatgccgacgagatccgtgaccctggaaagaagacccgcgtctggctcggcaccttcgacaccgacgaggatgccagaccgcgcctacgacgtcaccgtcagaaacttccgtggccccatgagtcaaaaccaacttccccttactgcccgacaacaacatcaacgttaacctcaacatgaagagcaacaacgtttac

SEQ ID NO: 26666 - DNA, 3075 bp, Glycine max
  Clone ID: TF_GmC326_1
tcgatctttgcttcccctcagtcaaacaaagtaacacaccagaccggtccaccggggacacctatcaatttcgtaggtttgtacatcttttggtttggggcgaaagttcagccttttcagatttgcatcaatttcaacagagaacaacgtgatttgtggattgctgtaaagtgcattatttggccattagctaatggacaagggggtgcctcctagcctcttcgtcaatgatggttctttcatggagaggttcaagcaacttcaacaagagcaggataaagggaagaatgtcaaattggaggattctaaaccaattaaggttatttcagggtctttgtctcccaatccttcctttaccaaaacgcccgtggacttgaaggttaatgacacaaggaaaatatcccagggtggttccagtggaaagctagctttcagtttaaaacaaaagtcaaagctggtgccaccctattctcaagtttctctctgtttcttcctacttcatgctatagcacttacaatactcaacaataacctaaccaaaccaaaccaaaccaaaacccttatctgcactcacttcacacaaaccaaagttaattaattaccaacacaaaatggatggaggctacagaaaccaccacatgcagcgacctgttccaggatctatctttgcttcccctctctttgctacctcttagacaaacaaagtaataaaccattctcccctctcttctcttcttttgttctctagatttcttctctcttgtttcttagaatccgtacaatctaatcaacataacaaaaatggatgcaattagttgcatggatgagagcaccaccactgagtcactctctataagtctttctccgacgtcatcgtcggagaaagcgaagccttcttcgatgattacatcgtcggagaaggtttctctgtccccgccgccgtcaaacagactatgccgtgttggaagcggcgcgagcgcagtcgtggatcctgatggcggcggcagcggcgctgaggtagagtcgcggaaactcccctcgtcgaagtacaagggcgtggtgccccagcccaacggccgctggggtgcgcagatttacgagaagcaccagcgcgtgtggcttggaacgttcaacgaggaagacgaggcggcgcgtgcgtacgacatcgccgcgcagcggttccgcggcaaggacgccgtcacgaacttcaagccgctcgccggcgccgacgacgacgacggagaatcggagtttctcaactcgcattccaaacccgagatcgtcgacatgctgcgaaagcacacgtacaatgacgagctggagcagagcaagcgcagccgcggcgtcgtccggcggcgaggctccgccgccgtcggcaccgcaagctcaatttccggcgcgtgctttactaaggcacgtgagcagctattcgagaaggctgttacgccgagcgacgttgggaaattgaaccgtttggtgataccgaagcagcacgcggagaagcactttccgttacagagctctaacggcgttagcgcgacgacgatagcggcggtgacggcgacgccgacggcggcgaagggcgttttgttgaacttcgaagacgttggagggaaagtgtggcggtttcgttactcgtattggaacagtagccagagttacgtcttaaccaaaggttggagccggttcgttaaggagaagaatctgaaagctggtgacacggtttgttttcaccggtccactggaccggacaagcagctttacatcgattggaagacgaggaatgttgttaacaacgaggtcgcgttgttcggaccggtcggaccggttgtcgaaccgatccagatggttcggctctttggggttaacattttgaaactacccggttcagatactattgttggcaataacaataatgcaagtgggtgctgcaatggcaagagaagagaaatggaactgttctcgttagagtgtagcaagaaacctaagattattggtgctttgtaacgttacgttaggttttttttttcttttttttttttcgggagtttttgtgactgatgaaagaaagaaggtacaagaacggcggtgtagtggcatggcaagttgctgcaaagtgcaaaaggtgaattgtatattacttaatattattagatgttgaaattaggtgtaatgtaacaaaaactgtacaagaagaagaaaaaaggttttaagaaggggagaagaaaaataaaaataaaagatatcatatgaaaactgtttaatggtatatgttgataatattgttgaatgtatgttcatggcctgatgttgtttttttggcaaatttgatttgcagatttaaaaaaaaaaacccctgtaagttgagtgctgatgaggctgatgaagaaacagaagctgggtatgtttcaaacgatgcaccactaaaacggattgccaagacgaaggcattgacatcattaagacaacttgatgttgcagcacctcattccccaagtgatcctacagtgaaggaaagttgctgacaaattggcaagttttgtggctaaaaatggaaggcaatttgaggatgtaacacgtcaaaaaaatcctggggatacacctttcaaatttttgtttgatgagagatgtgctgaatacaagtattatgaatatcggcttgctcaagaagaaaatgctcttgtgcaatcaagggaatcacaggtgcctcgtaatgggggtacaagcacttcatcttccaaacagactaatggtcatcagagatcatctcagcagcatacataccaaattcctgcatctgctttatatgaaagtgctgacaatccaagagcttctggattttcaattcaaacatcatcagtaggaagcagtggtaattgttatattgttgtatctttgtttgttttgttgttttcgaatttgataaatttgattttttcaaattgctgctctaatggagagctacatgaaaaaagctgggcgggaagagaagtataaacctaagcataagcccttggttcgcctcagtcttctaagcaaaaattgtcatcacatgggtgatttcattcctccaaa

SEQ ID NO: 26667 - DNA, 1258 bp, Glycine max
  unsure (1)..(1258): unsure at all n locations
  Clone ID: TF_GmC1209_1
tcccggggtcgacccacgnncgtccggaaaaccaaaaagtcacaaactcatcacaagagtgcacaggagagaaaaacctcttcaacaaaaacacccctttttattcacaccaatcttcactcaacactttcattcagaatgggtaagtcagagaacaagatccacccagaacaaccatcatcatcatcatcaaagccaatgagaccattatcatggtgaagtgacaacaagaagaagaagtacaagggggtgagaatgagaagctgggggtcatgggtgtcagagattagagcaccaaaccaaaagacaaggatatggttgggatcttattcaactgctgaagcagcagcaagagcctatgatgctgcacttctatgcctcaaaggctcctcagccaatctcaacttcccttcttcaagctcctcctcacaacactatatcatccctcaagacactgccatgatgtccccaaaatcaatccaaagagttgctgctgctgctgccaacaatttcttggacaataatgctattgctattaataatgctaccaccccaccttctcctcctcttgcttcaacctcttcttcatttgtatcgtcaccatcaatgtcatcatcatctcctttagaccaaattgatgatgatgtctctcttctgacaccatttggggcctacactactactactgctactactatctgtgacgaaacaaatgaatcaatggccatgatggaatcttggtatgacttggaggggttgcaatccccaaagtatgttgatcaaatgctaagtggggcattctttgacattgattcaacacagttgcttgatgatctgtatgaagaaagtgatattcgcttgtggagtttctgctgagagtgattcattaatttcaagccaaacccatttttgtttttttttgctcacaaattcatattcgtttgtcaggtggtgttatatgaagatatcaatcactgactgaccaaattataattacatattctagggaagaaattcacaaaagggataagacaatttttggtctatcctttgtggatttctacatatgtattattgatgcaatatttgttatgtcgaatttattaatggttttctatgtattattgtgtagtttataaatgaaagggggaaaaagatggtttccaatgtctcagttgctgataaatgctcaaaagataactatcatccttaattttcatttcttttttataatcaaaccgttatatacagaacgcgg

SEQ ID NO: 26668 - DNA, 795 bp, Glycine max
  Clone ID: TF_GmC8074_1
gttcaaggcacacacacattggtgtttccaccaaatacagtgagcaaagttagctgaaaattaaaacatggtttccgccaccgtggattccgattttgcattcttggaatctgttcaacaatacctacttggacatgattccatcaatctcatgtctgaaacccaccaagctgcatctcatgatccattttcagaccctaataaatgtgatggtgattcagggaacattgctttccgaagtgaggatgcaacggctgtggtagcgcgtgatcatgcgccaccaacatggaagcattacagaggggtgaggcgtagaccgtggggaaagtttgcggccgagattagggatccaaagaagaacggagctagggtttggcttggcacgtatgataccgaagagaaggccgctttggcatatgacaaagccgctttcaaaatgcgaggccaaaaggccaagctgaattttcctcatcttattgattccgacaattccgatgaattgtcggagccagtaatgatgacaacttccaagcgaagtttgttagaaatttcatcaccgtcgtcctcgtgttcagatgatagctcagaatcacaagggacaaagaggaggaagagcctggctgaactactgaataaattagccaagaatagaagccaagtcaaggtggaatgttgaagtggctagaggaatatgcatgttgtacaatttgatcaatcattaatatgagacttcaacgattgtaatgtaatctggtgttcatagaattaatgcaattttgttcccaaaaaaaaaaa

SEQ ID NO: 26669 - DNA, 466 bp, Glycine max
  Clone ID: TF_GmC120748_1
taaatttctagcaaataggtggacgaattctaagagcgtcatggattcacagagtgagacccaacaacttgcggtgccaaaaatggaagatttttacttcggtgatcaccagcaagatctgaaggcgatgattgttcctgggttcaaagcgttgtctgggaccaactcggggtccgaggtggatgactcgacctccaacaagacggtgactcgggttgcacccgctgcgttgggcggtgctcactctggcgaatctaattgtaaaggatcagctttgactttatgcgatgttgctgcgaatggttctgatgatagtaataataaggccgttgttgccgtggggtttgatactcggaagaaggttgctcatacgtttggccagcgaacttcaatttacagaggggtcacaaggcaccgatggacgggaagatatgaagcgcatctatgggataacagctgtaggcga

SEQ ID NO: 26670 - DNA, 669 bp, Glycine max
  unsure (1)..(669): unsure at all n locations
  Clone ID: TF_LIB4281-010-R1-K1-F12
cggaattcccgggtcgacccacgcgtccggttttaaattgtggtatgtaattaccaagattttaaattgttgtcacaatccttaatattgtagaatattacagacaaatgtagtagatgtagttgtgattgcggtcgcaatgtgatggcaaagatcccaaaaaccttgacattgtggccacaattgtggttgcttatggtttttcaaaacctttgcaattgttgatgtgatggattttggggtctactgaaaccacgcagtgaccataattgcagtcacattttgcctagaattttgctaactaccatgcaaccataacttaaaaccatgaatgcagtaatcttaattattgtccttgctgtcataattagttgtttggtggtctggtctgggttgacatcattgagtttttgcttttattgaatgcagggattgtgggaagcaggtctatttgggtggatttgacactgctcaagctgctgcaagagcatatgatagggctgcaataaagtttcgtggagtagaggctgatataaactntagtttaagtgattatgaggaggatntgaagcagatgagaggtttgagtaaggaagaagttgtgctcttacttcgtcgacaaatcaatggaagctcgagaagttcaacatacaaaggtgcattagcccc

SEQ ID NO: 26671 - DNA, 1338 bp, Glycine max
  unsure (1)..(1338): unsure at all n locations
  Clone ID: TF_GmC995_9
actgattcatccgaagatgagactgagaaggttcagagcccgagaagagttaaaagaaacgtgtctgagatctctcttccccctcttcctccaccattcaccaccactcctgaaaccagctcctgtgaggtgaatagcggcaaaaatgcaacattgaagggtttcattgaaggtcaaccccagagtaagaagagggttttgactcaccccccatcaacaaggaggaacacttctgggaaattcagaggtgttaggcagagaaaatggggtaaatgggctgcagagattcgtgacccctttcagagtactcgtatatggctcggcactttcaacactgcagaagaggcttcccaagcctacgaggccagaaggcttgagtttgaggctatggcagaggctcaagcttacaaaactagttctgtttctgaacctttggctacaatttctgataataagagtaactgctgtaactcttctgccgctgctatctccgccgctgccgtctccgccgctgatgtgtctgtatctgagaagttttctactacttttgatgacttagaagagagtgtgttgtctcacaattcaccatcctctgtgcttgagctggatacattggcttccaaatcccttgagaagggtaatgtttcaaccgaggaagctattgaggctaatgatttggtggctgaacttgcagggttagaggtaccagatgtcagtctgttaaacttgttaccaccaccatctgattcntggtggtgcagctgctgctgtttcatctgggattgagccaaactttgggcttgattttgattggctatcgtttaatgattatggacaaggttttgatgatttcggtggcttggaagatattcatattggtgggtttgatgacaatgagcctactgagcttcctgattttgattttggtgattttggtgctgatgagtttgctggttggattgaggagcccctgaatataccttgtgcctaagttttgcagaactacgtaggaatatgaggctagatttctacaatattataagttttgttatttataagttagtctttctgtgagatctcaggaatgatgagttagtttttctgtgggatctcaggaatgatgagtgagtgaatggttactatatgcgttttacatttcatttgtttttgatggagttgttagttagagcagtgagatggtgagagaatcctttgggttttcccgtgctgttaaagagccgtccaagggaatctcgaaccatgatactatgtcgtaatttcaaggttcttcaatggcagagtattaatggaatgaaagttaatgttttgcatcgtttt

SEQ ID NO: 26672 - DNA, 440 bp, Glycine max
  Clone ID: TF_jC-gmX3056002C06sg22N22a1
cgcgtgcgtgaagctcggacattcgtgctcgaggaatcgcacaaagtttttttttttatcctattatatatacatatgtctacacattagtgtctcttcgagtccgacggaaaagagagcaagggcggcaccccgcaccgatatggcagaggtgcattgcgagggcaagaactacaaaggggtccgaatgagaaaatggggcaaatggggatgcctaataagactacccaacaggcgtcagaggatttggacgggatcctacaacaccgccgagacggccgcgcgtggctaacacgcggtaatgctctggtcacgtggccgaagcgcccagtttaatttccccgactacccacccgacatggccggtggtacgctcatgacgccgaaacaaagacagatggccgccgaacaattcgccaacacggggccccaccagggac

SEQ ID NO: 26673 - DNA, 468 bp, Glycine max
  Clone ID: TF_GmC6107_8
tcgcgatctagaacttttgttattcttcgagtctctgagagagatgtgtggaggcgctatcatctctgacttcattctcctttttgagacttctaatatcctcagggttttttgggagaattggctaaaaaatggttatatgatccgtgtttgtgctatgatgttatttttattttttctttgtttaatggttctgaatgtctctgttcttactgcgatttttacacttttccaattatattaaagggtctaccacagcgaaatctgtggcattccaagttcgagctgagaaatttgcaaataggaagaggaaaaatcagtataggggaatccgtcaacgcccttggggaaaatgggcagctgagattcgggatcctagaaagggggttcgtgtctggcttggaaccttcaacactgctgaagaagctgcaagagcttatgatgctgaagcacggaagattcgtggca

SEQ ID NO: 26674 - DNA, 871 bp, Glycine max
  Clone ID: TF_GmC112_1
tgggatttttagtccattgaattggatatatttatcctcatacatgatcttaggagacatttgtttttggtaaccactcgtcccaagcctaaataagttaaaacacagaagaaaatgcagaagcggagggcagggaggaagaagttccacgagacacgacacccggtgtacaagggagtgaggcagaggaacgggaagtgggtaagcgagctgcgacaacctaacaacaaaaacgcgcgggtgtggctcggaacattcgcgcaccccgacatggctgctatagcgtacgatgttgccgccttggctttcaagggcgacagtgcttccttaaacttcccgaacgccgccacctcgtttccccgccttaactcgcggacgtgttccgttagggccattcagtttgcggcgacgcaggcggcggagaagcatttttcttgtgtagagtctcaacaactccaaagggagggatcaggctccggaagcttctctttggacgatgattcttcggagttttcgtcccaaggaaggttcttttgggatgaagaggaagtgtttaacatgccggagttgctgaactgcatggcggaagcgctgattatcacaccgccggcgttggaaagagggttcaattgggttggtggcgaaacgactgtggatttgactctgtggtgaaactgatgaccacttaggttctctgcaaaccagagaggaacttgcaatttcgatctgttgcaaaatattatatatactaatagtctaaagatgtagttcatcatatatactagtactgatacattcaaaagttatatagcgtttgctgtatggttgagattttcgtcaaaaacaagctgtatcataaatcttttctgtt

SEQ ID NO: 26675 - DNA, 554 bp, Glycine max
  Clone ID: TF_16347094
cagtggcttccctagcatcttcttctgccagaccaaaatttccaaacttgactttgtttttgccggaaccctccatggtgtactcatcaatatcatcctcaaatataaaaggtggtgaagtcatgtcagctacttcagacccctcatatcatgtgtctcagtttggccaaaaccagcatcaagcaggtagtggggatgcacacaaaatgaacaacaacctaacaaattcgcggtccaagtctttcaacgagaattggttgagtgccactaggactcagcctttgaagtatggtggaagaggcaagctgtttaaaggtgtgaggcagagacactgggggaaatgggtagctgagattagattaccaacaaacaggacaagggtttggctagggactttcgactccgccgaagatgctgccatcgcatatgacacagcagcatacatactacgaggagaatatgctcaattgaacttcccagaactcagcatgtaattcaagcaaattctctgaaaggctaccactgctgcacttgtggaggcaaaatacaagcaa

SEQ ID NO: 26676 - DNA, 1723 bp, Glycine max
  Clone ID: TF_GmC6807_1
caagtttgttcactccacacaaaagcaaccatatttttcagttttcacacctaaatcctttgacccatcatcactattaatctacaagctccatgttttgtttgcaatccgcttagtcaacttgttggtatcatcagagctttgtgaaacataaagttaaagcagggcatattgcagagggagcaaaccgaatatttcaaaacttgttctactttttattatcactgttgcatttatttcagatatttagtatttgcctacaagtttgttctttagtttaaacacagacaagacgactctttatggcggctataaccaatttgaacttttcttccttgtgtaaaaaaaggttttgtgtgcgtttgtgcgtgttggagttggctttttgaagtgggtgcatgctgaagttatatgtgtatgtgaaagatgaagaacaatagagataaagaaaagggtaacgacgttgaccagagttacagacagcatcacacgttgtcaatgccaatgatgttttctggtttgaacagagagaaggagatgtcagccatgatctctgctttgacacatgtggtttgtggagaagatgagcatcatggtgctgattactctcttcttaatcacaatattaataatactaatagtgcagttgttggtgatgatgattttactgtaacatcaaatatggcttctggttctatgccaccttcttctacttgttcatctcaaggtggcaactctgttctcaagagaagacgggaatatgataatacaaatgatttctcacgtggaggttcattccctgctatttcaacaattgctgaaagttcaagcacggtaacaagaagaacggcgaatacagtatacgattacgaatacagaacagagaacgtgaaagtagtggaggaagaaccgaggagaaaatacagaggagtgagacagaggccatggggaaaatgggctgcggaaataagagaccctttcaaagctactagggtgtggttaggaacatttgaaaccgctgaggacgcagccagagcctacgatcaagcttcattgcgtttcagaggcaacaaagccaaactcaacttccctgaaaacgttagactcagacaacaacaagaacctccgttgaacttgaaccctccaccaccacctaatcatggggctattttgtcaattccttcaaccactgttcacactgaggctcttcagggttcacttggttcaagcaatttttatgagcattcttattcgcatcttcatgagtttcccgtgagtctctacgatcagattgcagagtcaacatctactactatggcttctcatcatcttcaatttttgccgccagcttcttcctcaactatgactatgacatctccgcaggcaccaccttcgatttatcctacgcatccagcggcatggtcttctggttatagttataatagctcttcttctgcttcggggtgatgtaaattgcgttttatttcaagtctctctcgtttttgccccttgtattgtatcattgttactctcctctgttttttgcatttgcaccacgaccatttccatccaggagtggttttttgtgaccatgttattatgatcaagcaaatcatataattcacagttaacagtttagtatctgtgtataatagagttttatttatcctcccatcacatttctccaaacaaccatatcaatcttatatctcttccttcttct

SEQ ID NO: 26677 - DNA, 1949 bp, Glycine max
  Clone ID: TF_GmC1423_1
ctgtgttacaagttcacctgctatcactaatactgttgccactgataccaagaaaagggggcttcaaatggtggaccagaatcagaagcaaataggtcataggaaatccatagatacctttgggcaaagaacatctcaatatagaggtgtaacaaggcataggtggactggtagatatgaagctcatctatgggacaacagctgcaagaaagagggccaaggaaggaaaggaaggcaagtttatctagggggttatgatatggaagaaaaagcagcaagagcttatgatatggccgcactcaagtattggggaccctcctctcatataaatttcccattggaaaattatcaaaacgaacttgaggaaatgaagaacatgacgagacaagaatatgttgctcatttacgaaggaaaagcagcggattctcaagaggggcctccatgtacagaggagtaacaaggcaccaccaacatggaaggtggcaagctcgaattggaagggtagccggaaacaaagatctatatcttggaacctttagtacccaagaggaagcagctgaagcctatgacattgctgctattaaattcagaggagttaatgctgtcactaactttgatataacaagatatgacgtggaaaaaattatggagagcaataaccttcttagcagtgaacaagctaagcggaaaagagagatggatgatggaactagaagcgaggctacagttaaccaaaaaccttctactactcaagaaaccgttctgatgcagaaaagatgcagaagccaatcagaatggaagatggttcagtttccatcctcccaacagcttgatcagtatcctcaaagaattgagggttgtagaactcagcccttctcaacagctttagataacatgtttctcaaacaagttgagaggaagagaagaacatgaccagacaagactatgtcgctcattttggaaacaaaagcagcggattctcaagaggggcgtccatgtacaaaggagtaacaagggctcacaggcaagcatttacacatgaccaccttcatggaaggtgtcaagctcgagatggtagagtggaaactaacaaagatctatatcttggcaccggtactcaacatgaggagcagctgaagcctatgatattgctgctattaaattcagaggagcgaatgctgctaccaacttgacataacaagatatgacgtggtaatgaacatggcaagcaaaaaccacccaagtagtgagctggttcagcgtccccgcccccagcacaatgatcctcagtgcagtgatgagagtcatagaactcagcccttctcaacggacttagataacatgtttctcaccaagttgaggaacggagcaacatgggaacacacttgtcaaatccttcttctctggtgacaagtttgagtagctcaagagaagagagcccagataagacaagcatgccaatgctctttggaatgccttcaacagtgtccaaattattggctaacgtggattcttgggatctatcttccaatctcaggactgcgctttctatgcctcagatgccaatttttgctgcttggacagatgcataatcttatgttttttacctctatcaaaatagcaaatgcttgtttactaaaacaggatgttaatgcctagctagtacaatagagagcttgtgcggaattttaaaatgttaactgttacatcaagcattttcctcgtacaatgagaggaaagcctcctaaagttttatatcctaggactccaaattcgtatcatcaatctcaagtgaaatttcaatcctttttattgtctttttttgcatgcatgaacaacacaagaggaaggggttgtagctagtcaaatggagggtctaaatattatatcatcacatcactgtcagcaagtttaatttaaactttcaaatcattacattttagcaaaa

SEQ ID NO: 26678 - DNA, 531 bp, Glycine max
  Clone ID: TF_GmC1388_2
attgcttccatttttcaagcctacatatacaacactactttcagttttttctgtctctgaatctcaaactcttcggaaagattaacattaatggctccaagggatatcaatagatccaacgttgttgttgttgccggagtatccaacccgacccataaagagatccgttaccgcggcgtgaggaagcggccgtggggccgctacgccgccgagatccgcgacccaggcaagaagacacgcgtgtggctaggaacgtttgacacggcggaggaggcggcgcgtgcgtatgacacggcggcgcgtgagttccgcggcacgaaggcgaagaccaatttccccacccacgcggcggcggcgcgtagtcccagccagagcagcacgctggactcctcgtctgcgccgccgctggaccttactcttgccggcccactcaccgccgcgggcgcgttggttttctccggtggcgcgtcccgtggtgttcttcgacgcttttgcgcgtgccgaggtgcgcgcgtcgttcgatcttgccgt

SEQ ID NO: 26679 - DNA, 451 bp, Glycine max
  Clone ID: TF_jC-gmle01810047f08a1
tgcttgtttatcattttcttacttacctatcacgctctgccacacaacttcgtctgcgcaataacggaataaaaaaacaagactgattactattatggcgccgagggatcataccacaagcaacgctaagcgttaacggtaacggcaacagcggcctgaaggaggagcattttcgaggagtgagaaagaggccgtgggggagatacgacgcggagatcagagatcctggcgagaagagccgtgtatgactcggaacatttgagcacagaggactgatgcagccgcgtgtatacgacgccggagcacgagagttatgtggtcatacggccaacgacaacacttccctgaggccttgggaaaatgttaagaactctagccacatccagagcaggaccgaacagtccttcagccgctagcgctacatcgtcgccgatgccttgcactagacctt

SEQ ID NO: 26680 - DNA, 424 bp, Glycine max
  Clone ID: TF_21994429
cctcgtgccgaattcggcacgaggctgtcattcattttcacattcacacatcaaacccaagaactttctattccttaaaacaatggtcgagcctcctgcggcagcagcaacctcagaatcagacacaacaggaaacaccaacactccttcaccgtcttcttcatcctcgtcgtcaagttctaagaagcgagcaagagacaacaacaataatagtaacagcagcagtaacaagcattctgtgtatagaggtgtccgaatgcgcacgtgggggaaatgggtgtcggaaatccgcgagccgcgaaagaagaacagaatctggctccgaaacgtcgcccacacccagatggcggcgcgtgcgcacgacgtgggcgccctgaaaataaaaggctctcccgcattctttaacttcccgaaactgggggca

SEQ ID NO: 26681 - DNA, 968 bp, Glycine max
  Clone ID: TF_GmC945_1
attcggaaactccaaatacctcactccacagttgaacaacaacaccaacaccaacttctggaatgaacattttcaaatccccactggaccatgatttgaactgtggtggaatattccacgactcagcagaagcatcttattcgtctgaaacaaggagcaccccctcagacgaagaagtgattctagcgtcagcgcggccaaagaagcgagcgggaagaagagtcttcaaggagacaaggcaccccgtctaccgaggagtgcgtcgcaggaacaagaacaagtgggtctgcgagatgcgagtccccaacaacaactcacggatttggctcgggacatacccaacgcccgaaatggccgcacgtgcgcacgacgttgcggcgctcgcgctcaggggaaagtccgcgtgcctcaacttcgcggactccaggtggcggctgacggtgccggcgaccaccaacgcggaggagatacggcgagcggcgggggaggctgctgaggcatttgcagttgcagatggggacgacgttaatattgaacaacagcagagtgtgatggccacgaatgatgatgaagttcaagagcctctccagcaggaggaggttcaagacttgcatgatttgcttttgagtattgcgaatgagcctttgatgtctcctccaccctgtgcaagagatggtagggactggaatgacgtggacatatttgatgatgatgaaatctcactatggaacttctcaatttgacgcgtacgtcattaagagtatgactgtatgcatgtttgatgataagcgaaaacacctttttgtgtatgtgattttctatatttttagggacctgttgtgtgtagataaattaagtagcactcgattgattaagttgagtggagttaaacatattgtagttgtatctatgatttgtttcgtgattaaattttaatgacaagtacagttggcaaattcaaaaaaaaa

SEQ ID NO: 26682 - DNA, 1910 bp, Glycine max
  Clone ID: TF_GmC1811_1
ggtacttgtttgtgccttattccctctgattctggaacaagttcccgttctttcttatctttctccactgttttattttctccctgatcttcctctaccttaatttctgtcctatttgttcttctgacagctactcttttaccttcaccagctcattcttcttctatcttcttctgctatatatgctcaacctttaaagggtatttctctctctctctctcaactagtttgagtttcattgtactttgatatcactgcagaagtacatgagactcttaaaagagggtatgctttaaagaccagaatcagaagctgattaaaggagagaacctttccaagacatggctatgtttgatctcaatgttgacatcaaccactgtgatgctgatgctgactcaagctgtgatcaaaagggattggtgctgcaaagtttcccacctgaaatctcagattccaggacctccagctcctctgtgtggaaccctgtagaggaagattcctcaaacaattcctctcccttgatttttgacatactcaagaaagagagggatgagtcagagtttgatgcagccactgaaagggtcaataaggagcaaaacatggcaccacaagaggcagagatagtggcaaggacacttttccctgtgactgctgctgttgataaaggagttagagtgcctgatttcaaattggggctgtgggggaagactgaatgcttgaacttgtccttaccagagcctgatggacaaaatggactcagaaccttacagcagaaggtacctcctgtgaggaaaaataggagaggaccaaggtctcgcagctcgcagtaccggggtgtcaccttctaccgcaggactggtagatgggagtcacatatttgggattgtgggaagcaggtttatttgggtggatttgacactgctcaagctgctgcaagagcatatgatagggctgctataaagtttcgtggagtagatgctgatataaactttagtttgagtgattatgaggaggatttgaagcagatgagaaatttgagtaaggaagagtttgtgctcttacttcgtcgacaaataaatggaatctctaggagaagttcaacatacagaggtgcattagcccttcgcaaagatgctcaaggagaaccacgaatgggaccatttgttggcatgacatgttatcctaagccatccatcaattgtgatgatggaaaagcggaggcaagttttaagccctgttcctataagggagaaataattgtgaattccaacatgacaggcacttgccataatcttgatttgagcctaggaatttctccgtcttctaaaagattgaagaataatgactatagtggagggtattcctttggatgtatgacttgtaagatacccgaggaaagaggaccaatggagaaggtcatggtggacagaataaaaaatgttcctttgcaaaaaatttccaacttggcttggcaactttgcagcaatggcagcattgtcccaaggccattccaaccaaatgcagcatcatcaggattcgtctcttcttctagctgtctcatcacccgcacttccaatcagcacacatattaattatgccaacaatttggcattaattggctcaaccacagtactactactagttgaaaccaccagaaacaaagcatatttaccctgcttttttgaagattagatgagcaagagtacttcataaccacatgtacctatagtataagattctattgatttcatcaagcatgatggtatttaataatattgctaagcattgcttacaatggctacccgatattttctgtattcattatcgtgatgtagaacacaatattgccttgtgtaaaagacccttgttgaagtatgtatatatttgttggttcttgttaatcattagct

SEQ ID NO: 26683 - DNA, 1265 bp, Glycine max
  Clone ID: TF_GmC1707_1
ccagcgtccgcgacaacctcggctcagtgtctctctgcactgcaaaacccctataacccttcccttcctcgcacttcattcttttatttcatttatttatactcttcatgaaaaattaagggaattttcagagagagagagagggagagagtagttatggaaggagaagaaggaggaattgcaacaaagaagagagggaaagagggtgaaactgagacgacgcgctacaaaggaatcagaatgagaaagtggggcaagtgggtcgctgagattcgagaacccaacaagcgttcaaggatttggctcggttcttactccacgcccgtcgcggcggcgcgtgcttacgacaccgccgttttccacctccggggcccctctgcgcgcctcaacttccccgagcttgttgccgcggagggccccgccgccgacatgtccgcagcctccatcaggaagaaggccaccgaggtcggcgccagagtcgacgctctccaccgccagcacccccacgcgctgcctgctggagaattcgccgaccgggttgaccttaataagatgcccgaacccgagaattcggattgtgactactgggacagggattaggagtgttgtttagttgttaatttggagtttttcaaaaacaaatataaaattataaccttgttttaattaattttttttttattggggaaaaggggttagagggcacagcaatggcctatgatgccagggagttgggttgaaaaagagggagtgagccatgttaaccactcaagtaattataatattataatagctactattctactgaagagtaaaaaaagatggatgttaggtgtttttatgagttgtatatgtgaagagaagggaccattggggagggaagacgctgttgtggtcactactctgtttcgatgataacgatgggtgatgcatggggtcggttaatcggttctgcgtctcagatttttgtctagttggagtcaaatctcaaacgacattgtatccaacaaattggaaaatagaaaaccagaaaatatgaaagaaaagcaaccgaaaatgtaagaaagaaagagatgtgtcttcaatgtgaaaccaaaattgtagctcctcaaacctcgatcgttgttccacaattaactattacaaacatctcccccaaaggttgtgttttatatttgttttgtgatccgctgtagatattatttcttattttatttaaaagatgtaggttaaagtataagtaatttaataacagtttggttctg

SEQ ID NO: 26684 - DNA, 280 bp, Glycine max
  Clone ID: TF_LIB4167-012-R1-N1-B8
aaagggaaatctccacaagccattatggggttgtcacaaatacacaaaataaagatatgggtatgcttctttcattcattagcctctgaatagcatattttgttgagcaacataggcacccaagaaaaaactgcgcatgcttatgacataacagccattgagtacagaggaattcatgctgtaacaaactttgatttgagcacttacataaaaaggttaaagccttcaggaggagggaccccaaaagcaaatcttgaatcacatgcggggctagagcatg

SEQ ID NO: 26685 - DNA, 1987 bp, Glycine max
  unsure (1)..(1987): unsure at all n locations
  Clone ID: TF_GmC6107_1
tgccaaaactgaggcttgcgttattcttcgagtctctgagagagatgtgaggaggcgctatcatctctgacttcattctcctttatgagacttctaatctcctcagggttttctgggagaatggactaaaaaatggttatatggacccgtgcancgcgctcttctatggaggggtgtgaccnacttagtctaatggttctgaatgtctctgttcttactgcgatttttacactgttccaattatattaaagggtctgccaaaactaaggctttattgttacaccgtttagctgaggatcgcctatttctgttttcttatagttccatctttcctcccttgggaacggacgcttttgttattcttcgtgtcttgttgtgtttttcatctgagatgtgtggaggagctatcatctctgatttcattccggcggcggcgatcgccgggtctcgccgcctgaccgccgattacctgtggccggatttgaagaagcggaagtctgacttggacgttgacttcgaggctgatttcagggattttaaagacgattctgatatcgacgacgacgacgacgatcaccaagtcaagccctttgctttcgccgcctcttctcgtctgtctacggcagcgaaatctgtggcattccaaggtcgggctgagatatctgcaaatagaaagaggaagaatcagtataggggaatccgtcaacgcccttggggaaaatgggcagctgagattcgggatccaagaaagggggttcgtgtctggcttggaaccttcaacactgctgaagaagctgcaagagcttatgatgctgaagcacggaggattcgtggcaagaaagccaaggtgaattttcctgaggcaccaggtacttcttctgtaaaacgttccaaggtaaatccacaggaaaatcttaagactgttcagcccaatctgggtcaccagagttcagtgctggcaacaatcacatggactcctggtggaacagaaacccctagttagctcagtatgctaacatggcttccttccctggcagtggaaatgggctaagatcccttccttcgtctgatgatgcaaccctttacttcagttcagatcaagggagtaattcatttgattatgctcctgagatctcatccatgctttctgctcctttggattgtgaatctcattttgtgcaaaatgccaaccagcagcagcctaactctcagaatgtggtatctattgaagatgattctgcaaagacactctctgaggagcttgtggatattgaatctgagttgaagttctttcagatgccttatcttgaagggagctggggcgatacttcattggaatccttgctatctggtgacacaactcaggatggtggaaacctcatgaacctttggtgctttgatgacattccttccatggctggtggagttttctgaaccgctttttctttggtctccctgtgtgtaaataaagctacaagttgtttttctctgtttttgatttttgttgcatttgttgttctcttgttggacacatccccccatgtgtctgaaaaaaaaaatgtaatttccatttttgttgctttctggaatggttgtcatccgtgttgaagatggagttaaaacaattaactcgctcaagcatctcttgtatctaaagtatggggctatatagttatttaggtgtcctttgccttgtcaaaggccttagttttggggaaatctcgattgttgttcgagggtgattatatatgatctgtgaaacaatcttggctgctgataatttttaactgggttgtttctctaaaagaacaaaagaagagagaacaggagcacccttctgaaaccaaggtacaagagtggagccatttggttcctccaagatctaaagggccaggctgctagcttgcgtcaatcaaaattaagaccaggatatataatactaatagagattgggtctgagcctaacccgcgaagttatgaatcaagg

SEQ ID NO: 26686 - DNA, 998 bp, Glycine max
  Clone ID: TF_GmC1772_2
cggctcccacgcgtccgctcaacaaatgaatattctcggacaatcattcaacgaatcaaacaacggaagctactcttgttcgtcgccggagactggtagctcctctaacattccaaacacttttcactccgacgaggaagtgcacacactagcttcggcgcgtcctaagaaacgtgcggggcgtcgaatttttaaggagacaagacacccggtgtaccgaggagtacgaaggaggaacaacaacaagtgggtctgcgaggttcgtgttcccaacgacaagtccaccaggatttggcttggaacgtatccagtgcctgagatggccgcacgtgcgcacgacgtcgccgcgctcgcgcttcggggcaagtcggcttgcctcaacttcgccgactcggcgtggcggctgcccttgccggcgtcgacaaatgcgaaggagatacggcgagtggcggcggcggctgctgtagcgattgcggcggaagacagctgcggcgagcagttacagaatagtattgtgaatgatgccgttgctgatgattgtgaagttagcagaagtgacgtcagctttgatgaagattccaatagcaacaaaggtttgagagttttttgtgatttggatgaaattacaatggcagatgcaccggtttttgaggacatgcgtgagtggcttcagagtatggcggatgagcctttaagatcgcctacttttgtaacatatgttaatgttagggatgtctggaactttgtggaggatgatgctgaggtatccttgtggagcttcacaatttagtgcgtttagtttgttctttgtcttctttcgtttttggtttttgtacataattaggaacggaggagtacgaaaatgtaccaagaccgagacgatataaggagctagctatatagggaggatcataaaactgtaagacattgcaaattttctcattcagttgtttttgtaattctcataatcatatagataaaggaaaggtttgtaaaat

SEQ ID NO: 26687 - DNA, 2405 bp, Glycine max
  Clone ID: TF_GmC55_1
acgacagaagggggagtttttggttatctgagttctgaattctgaatcctttccccaaatcacacttgcgagcccactctagtgccccatttcatgtcatgcttgctagattcagctacacagctaagctaagatatatagatatagctcatcacacgctttcaagtttccaaggcacatagacacagacaccctcagaacctgaccaaaatacttactactatatcctactcacattttacattcccacctctttcctttcccccttaccattctcgagattctcgcttttactacattactctctccttcatactgggtttaaggtagggtttatttaactaggaagaaatttttaacaaaataatagagagataggcaaaaacgaaaagacgtggtctttctcattgatatatacatacacagatccctatggaatgaagtgggtgctccccaatcttcgcttgcgataattcattctttttgcttagtttaaagagaccagttttgtggtgttcggagggagacagatttgtgtgttgagcgcatagaacgatgagtttggttggtagaggagcaagttttgcattgtagtagttgtagcaatagccacacaacaaaagaaaacaaaaaaccaagtcttcgtcatcttcgtatgcagagatttttcttcaacatgatgatgatgattagtttatttaccaaacaatgattgccttgccttccttcgtgagatactggtagcaatttcaaaccttttcgagtaaccaaaaagaaaagaaaagaaaaaacaaaagctagaagatgaagcgcatgaatgagagtaacaacaccgatgatggaaacaatcataactggttggggttctctctctcgccccacatgaaaatggaggttacttcggcagccactgtttccgacaacaatgttccgacaaccttctacatgtccccttctcacatgtccaactccggaatgtgttacagtgtcggggaaaatggtaacttccattctcctcttaccgttatgcctctcaagtctgatgggtcacttggtatcttggaagctctcaatagatcacaaacgcaagtgatggtgccaacttcgtctccgaaattggaggacttcttaggtggtgcaactatgggaactcacgaatatgggaaccacgagagaggtttgagcctagacagcatctattataactcacaaaacgcagaggctcaacccaacagaaaccttctttcacatcccttcaggcaacaagggcatgtgaatgtcgaaacacacccttattactctgtatttgcttgtcgaggtttgtatcaggcaccgtcggaggaagaagcaacaaaggaaacgcacgtttcagtaatgcctcaaatgacaggaggaggtttgcaaaactgggtagctccaacaagggagtattcaactcatcagcagattctggagcagcaaatgaactgtggcatttggaatgagagaagtggggtatctgttggaactgtggggtgtggagagttgcaatctctaagcttatctatgagtcctggttctcagtctagttgtgtcactgctccttctggaacagattctgtggctgtggatgcaaagaagagagggcatgctaaacttggtcagaagcagcctgtgcatagaaaatctattgacacatttgggcaaagaacgtcgcagtatagaggcgtcacaaggcatagatggactggtaggtatgaagcgcatttgtgggataatagttgcaagaaggaagggcagactaggaaaggaagacaagtatatttgggaggttatgatatggaagaaaaagctgcaagagcctatgatctcgcggctcttaagtactggggaccttcaacgcacataaacttttcgatagaaaattaccaagttcaaaaaaaaaaaaaaaaaaaaaaaaaaaaaagcggctgcgttgcacacttgagaagaaaaagcagcgggttttctagaggtgcttcaatatacagaggggtcacaaggcatcaccaacatggaagatggcaagcgaggataggcagagttgctgggaacaaagacctttaccttgggacgttcagcacccaagaggaagcagcagaagcatacgatgtagcgccgatcaaatttcgcggcccaatgtcgtcaccaactttcacactttcagcaacgatggtggagagagccagggcagttgcaatctcctcgctggggtgcgggcagggcgtatgttggagatcgagcctagctccacgggcctatggcacccaagaggaagcagcagaagcatacgatgtagcggcgatcaaatttcgcggcgcaaatgcagtcacaaactttgacatttcaagatacgatgtggagagaatcatggccagtagcaatct

SEQ ID NO: 26688 - DNA, 2027 bp, Glycine max
  Clone ID: TF_GmC601_1
gccccctctcactcactcccactcccacacttcactccattccactcccaatcaaaaacaaacaactcatcttcccaaattcaaatcacacacacttttctctctgtctctcagattagagttggggttagtgtttggttcgatcatggcttcgtcttcctccgatccaggaaagtccgcggagacgtcggaggcggcgttggtggtggcgaacgaccagctcttgctctacagaggattgaagaaggccaagaaggagagaggttgcacggccaaagagcgcatcagcaaaatgcctccgtgcgccgccggcaaacgcaggtccatataccgcggcgtcacgaggcacaggtggactggtcgttatgaagcgcatctttgggataagagtacgtggaaccaaaatcagaataagaagggaaagcaagtttatttgggggcgtatgatgacgaggaagcggcggctagagcatatgatcttgctgctctcaaatattggggtcctgggactctcattaactttcctgtgacggattatacaagagatcttgaagaaatgcagaatgtgtcgagagaagagtaccttgcatctttacggcggaagagcagtggtttttcaagaggactagcaaaatatcgtggactctccaggtgcgaatctatcattttttttgctgaaattgtttggcagttaaattattatttgtatccacatctgagtctgtgtggggtatgtgtgtgtggagctagttcttctgtgctctgctacacagcttcagttttttatgatctactttagctgtcataaagtacatcgattccaacatggatttgactgctaacttaaactcttcatttcattttgcatgtgttgctaccaaaactagtcgatgggatccatcgtatggccgtatgtctggatctgattacttcaatagcatgcattatggtgcaggggatgattctgcagcagaaagtgaatatgtaagtggtttctgcatagaaagaaagattgatttaacaagtcacatcaaatggtggggatctaataagagtagacattctgatgttgggacaagattatcagaagaaaagaaacttggttctgctggagatatttgcattgaaattaagcaattggagcagaaagttcaacctacagcaccttaccagatgccacagttaggaaggccccaaaatgagaaaaagcatagaagttcttcagtttctgccttaagtatcttgtcacaatctgctgcttacaagagcttgcaagagaaagcgtcgaagacactggaaaatatcatagataatgatgagaatgaaaacaaaaatacaatcaacaagttggatcatggcaaggcagttgagaaaccatcaaatcatgacggaggcaatgaccggcttgacattgcaacgggaatgagtggaacaatgtctcttcaaagaaatgtttacccattgacaccattcttgtctgcaccacttttaacagcctacaatactgttgatccattggtagatcctgttctctggacatctcttgttcccatgcttcctgctggcctttctcatacagctgaggttacaaagaccgagaccagctcaacgtacacgatgtttcggccagaggaatgaatggttggacatttggatttccaattgaagaagaaaggctcaaaggcaagcatctgaaagctgagcttgtaccgaacaaagaacagaatataggtctgaagtgctcaaccaggtctaagagaattctcccatggcttttttttgccagattacatgggttatagaggtcagagaaaagaaaatatttacatcgatgataaatatagaattagcacgaatcttttcatttcaagtcagatatgtatcagttgacatctctttcatgtatatgcagtcagagttatagataaattttgaatttacgcggaatattctgtacagaataagaggtggaattatgcaaggacgtggtaattaatttaattgattagcgtatggtttttttcaaa

SEQ ID NO: 26689 - DNA, 1201 bp, Glycine max
  Clone ID: TF_GmC90_1
gttattatcaccttcaactgccaactgcaaaaatctatcttctttcgggatcacttgaccgagagtaagagactaatccctcgagatactgatactgaaacctatcgttcttcacatcataaccatgccgttccagcaacggtgcatcaagcagcagagcctccaatgctaacactgggcgccaccctgtgtaccgtaagttactcaccttcaccttcaccttcaactgccaactgcaaacatctaactactttcaggttcacttagccgagaatcagagactaatcactagagataccgagacctacttttcctcacatcaccaccaacatgcgttccagcaacggtacatcaagcagcagggcctccaacggtaacacagggcgccaccctgtttaccgtggagtgaggcgtaggagtagtggtaaatgggtttctgaaatccgtgagcccaaaaaacctaacaggatttggttagggacatttgccacccctgaaatggctgctattgcctatgacgtggcagcgcttgctcttaagggtaaggatgctgagctcaacttccctaactcggcttcctccctccctatccctgcatcatctgcagctcacgacattcagatggctgcagcactagctgcaaccgctgtcggagcagcgaatgatgcactggaaggaagccaaggaggaaatgtttcggtttcattggcggaagagttttcagggggaaacttaaatcactttgtggatgaggacttgatctttgacatgccgaatattctggtcaatatggctgaaggaatgctactcagccctcctcgttttgataattttgctgctaccgactatgaatacatggatgaagatcctaacctctgggggttccctaattactagttactacccatgggataattaaaagactttttatattactaatgcaaaaatcttaagaaggaaaggtaagtaagctgtaataataaattatgggagaactcttacatccagactttgcttagacaccaggaaagggtatggtgtgtgtgtggaaagtgtatctttctttccatatgttttttttccacctagtgtacagtggtaccttctagctatagtgaggtttgctgctgttgcacctcaaactcaaatatgtatgtaatgtttatataatgtgttaattaaataatcttttttggtcatt

SEQ ID NO: 26690 - DNA, 998 bp, Glycine max
  Clone ID: TF_GmC90_2
ctcaccttcaccttcaactgccaactgcaaatatctatcttctttcgggttcacttgaccgagagtaagagactaatccctcgagatactgatactgaaacctatcgttcttcacatcataaccatgcgttccagcaacggtgcatcaagcagcagagcctccaatgctaacacagggcgccaccctgtgtaccgtggagtgaggcgtaggagtagtggcaaatgggtttctgaaatccgtgaacccaaaaaacctaacaggatttggttagggacatttgccacccctgaaatggctgctattgcctatgacgtggcagcgcttgctcttaagggtaaggatgctgaactcaacttccctaactcggcttcctccctccccgtccccacatcatctgctgctcgcgacattcagatggctgcggctagcgccgcagccgctgtcggagctgcgaatgatgcacttgaaggaagccgaggagggaatgcttcggtttcattgacggaagagttttcagggggaaatttgaaccactttgtggatgaggacttgatctttgacatgccgaatattctggtcaatatggctgaaggaatgctactgagtcctcctcgttttgataattttgctgctaccgactatgaatacatggatgaagatcctaacctctgggggttccctaattactagttactacccatgggatgataaaaaaaaactttttatattactaatgcaaaaatcttaataaggaaaggtaagtaagttgtagtaataaattatgggagaactcttacatccagactttgcttagacaccaggaaaggtatagtgtgtgtgtggaaagtgcatctttcttttcatttggttttttttcaccttgtgtacagtactaccttctagctatagtgaggtttgctgctgtatgttgcacctcaaatatgtatgtaatgtctatataagttgttaattttaaataatctttttttggttgttt

SEQ ID NO: 26691 - DNA, 1530 bp, Glycine max
  Clone ID: TF_GmC718_1
cgccgggtcgaaaggtttcgtggcagtggcgagtgaagaagctatgcctgatgagtgagtcatttttttctctttcacttctgctttgagatggcaaagtcgaagaatcacacagcacacaatcagtcctaccaggcctgcaccttcaccttcccttcgagatggcaaagtctaagaatcacacagcgcacaatcagtcctacaaggcccacaaaaacggcatcaagaaacccaagaggcatcgccacacttccaccaaagggatggatcccaagtttctgaggaatcagaggtacgcgaggaagcacaacaagaagagcggcgaaattgccactgaggaagagtgaagtggcactttctaacggaaccattagggtttttttttaagctcggttttttttttgttttattttgtttttaatggttgactttgtttgaaatcaacgttcagtagtataattaaatttgttttcagagaatgcagtgctcttatagcaattattttcctggtttctgctgaagacccttgaattatttatttatcagtgaaatgaatgttaaggtgttttgtgtttcttagtcaagagaccaaaaagaaaagaaactcacagctattgaatttcacttcacttcacttgcatgccaaatgaaaacaacctcttcccagaatcttgtcggtatttaactccctcgatttcacaacaccaataacaatgagagtttcaacagagacagagccggagactaaaaagataaaacgcattcgcggcggcggggactcgagcaagcaccctttgtaccgcggcgtgcggatgcggaactgggggaagtgggtgtcggaaatccgcgagccgaggaagaaatcgcggatatggctaggcacattccccacgccggaaatggcggcgagagcgcacgacgtcgccgctctcagcatcaaaggccccgccgccattctcaacttccctcacttggccaactcgctcccccgcccggcttcgctggcgccgcgcgacgttcaagctgcggcggcgaaggcggcgcacatggacccttcctccctctcctccttggtctccgcaatggacttgtcctctgcctctgacgagttgagccaaatcatagagcttccttctttggaaagcaccgatgatggctctgttgacttaaagaaggagtttgtttttgttgattcccttgatgcttggatgtatcagccaccctttggttttgacaccgaacaagacactggtttcgagggtttgatgtggaattactaggttcgatccaagtttctattctatgtcttatgttgtataaattaatatcgatctcttttatgttttgctttgcgtgtgtgtctataagcagtaagcagccacttgttgtttttctttcgggggctgcccgtgccactcgatcgctgtcgtattcatcatcgagtctatctgtcgtctgtcttttttcctgattcctctgtttttaattgtaaatggctagatgaataaagtaagaggagaaattttcttt

SEQ ID NO: 26692 - DNA, 1497 bp, Glycine max
  Clone ID: TF_GmC718_2
tacggctgcgagaagacgacagaagggtacggctgcgagaagacgacagaagggggctggtcgcaactgcactttcacttttgctttgagatggcaaagtcgaagaatcacacagcacacaatcagtcctacaaggcccacaaaaacggcatcaagaaacccaagaggcatcgccacacttccaccaaagggatggatcccaagtttctgaggaatcagaggtacgcgaggaagcacaacaagaagagtggtgaaacagccaccgaggaagagtgaaatggcactttctaacggaaccattagggtttttttatgctcatttttttggttaaactttgtttgaaatcaacgttcagcagtataattaatttgtttacagagaatgcagtacttttatagcaattttcctggtttctactgaaaacccttcaattactttttatcatcaatggaatgttaatgtgttttgtgttttttagtcctctttaaaaagaaaagaaactcacagctattgaatttcacttcacttcacttgcatgccaaatgaaaacaacctcttcccagaatcttgtcggtatttaactccctcgatttcacaacacccataacaatgagagtttcaacagagacagagccggagactaaaaagataaaacgcattcgcggcggcggggactcgagcaagcaccctttgtaccgcggcgtgcggatgcggaactgggggaagtgggtgtcggaaatccgcgagccgaggaagaaatcgcggatatggctaggcacattccccacgccggaaatggcggcgagagcgcacgacgtcgccgctctcagcatcaaaggccccgccgccattctcaacttccctcacttggccaactcgctcccccgcccggcttcgctggcgccgcgcgacgttcaagccgcggcggcgaaggcggcgcacatggacccttcctccctctcctccttggtctccgcaatggacttgtcctctgcctctgacgagttgagccaaatcatagagcttccttctttggaaagcaccgatgatggctctgttgacttaaagaaggagtttgtttttgttgattcccttgatgcttggatgtatcagccaccctttggttttgacaccgaacaagacactggtttcgagggtttgatgtggaattactaggttcgatccaagtttctattctatgtcttgtgtttgtataaatttatatcgatctcttttatgttttggtttgtgtgtgtctataagcagtaagcagccacttgtggtttttctttcgggggctgccagtgctactgatcactctcgtattcatcatcatgtctctgtgtctttttcttaattcctctgattttaattgtaaatggctagatgaataaagtaagaggagaaattttctgtaacttgttttggtacaaaatgtttttactcttcttaagattgcgtaatccatgaaatggagtttgagatgggaagtacta

SEQ ID NO: 26693 - DNA, 515 bp, Glycine max
  Clone ID: TF_uC-gmroLIB3259P226b12b1
agccgatgagtatgataaatcagactctagcaaattttgcttcaaagtctttgtcaatactcttatcggcttcagaggcgcgtgagaaccaatgaggtgaggaaaatttaacttagctttgctgccacgcatctcaaaagcagctctatcataagctaaacccgcttcttcttcagtttcgtaagtcccaagccatatcctagcaccattcttcttcggatctgttatttccgccgcgaacttgccccaaggtctacgcctcacaccccggtaacgcttccatgctggtggcgcgtgaacttcacgctccaccttagggtgttctcttttgcatgctaacgacccttctgcatcatggacaccttccaagcggaacgtagtagagcttgggaatgaattgtacgttggagaatagcaaatttcgtgattggaagcgttcatgagtgtgttggaatcgtgctcaagctcaagacgacagtggtgaatagattccactgaagagaaatcacaagata

SEQ ID NO: 26694 - DNA, 1331 bp, Glycine max
  Clone ID: TF_GmC55771_1
ctcggtagcagcactgagctcgagccgattcggctcgagttcataacataaagagtatagagcagcaaacgtaaaagtggatccaagaaggctacatggcaagcttccactatcttcacaagcatcagaggagaaagaggacacagtagaagagtttgatgcttataataattatgcatcttggtcttcagaaactgacatgtctgaaatggtttctgctcttgctcaagttatgggaactaccaatcggaacccatacatgccacaatcaacctcctttcctttctcaacttccgtggtcaaagatcaacctcaaccgtacccatctcaacctcctccagatcaagaggtggcaaagaagccacactacagaggagtgaggcagagaccatgggggaaatgggcagcagaaatccgtgacccaaaaaaagcagccagagtgtggctaggaacctttgaaacagcagaggatgcagcacttgcatatgacaaagcagcactcaagttcaaaggcacaaaagctaagctcaatttccctgaaagagttcatcaagatgttccctttatgcaacaacaccaacaacgttcatcaaacagaaacgtttttcccatccatgcaacttccaccactagtagtgctactgggtctgtttcttctgttgatgctgttgctcctccttcgttgtccactcatgatcaacatggccaccaagttttcccaaatctgtatcaatatgcacagattctttcaagtgatgatgcacagttaccttatttcacatcccatcttttcaatcaacaacaacaacagcaacagcaacaacctttcaattctcaattctctagcactttttcttcaacctcatcctacttttacaaccagcaacaacaatatgatcaacaaggacatgatcactcaaaccactagcatgatactattaatctctgtgatttccaaccgtaacattaaagtttttcaagtcttaattaatttgtaatcacagtgttgtaactgcaatattgacaacatgcatgggcattaattagtcgtccccaattttccttttctcaaaagagtaagattttttaggtatgtaacggtggcggcaatttaggggcaaagcaattttaaagcttgaatagctagttagtatatgcatctgtcaattttgttgtagaatattgagtcagggatcaatgtatgtttctttaagcgtgcacaaaacatggatcctacatttaatttccaatttaattatggatatggataaactttttgttggaaaaaaaaaaaaaaaaaaaaaaggggcggccgatttagaggatccaag

SEQ ID NO: 26695 - DNA, 578 bp, Glycine max
  Clone ID: TF_GmC3803_2
ccacgcgtccgatttggttgggttcgtacacgacacccatggccgccgcacgcgcctacgacacagccgttttctacctccgaggtcccaccgcacgccttaacttccccgaactcttgttccaggacgaccaggaggagggcaatgattcggtgcagcacggtgcagcagcagggaacatgtccgctgattccattcgccgaaaagccacgcaagtcggcgccagagtcgacgctctccaaaccgcgcttcaccaccacgcgtcaagtaccaactctctcaaacccgacttgaacgagtttccaaaactcgaatcccttcaagattgatatcgatcaatatttaatttcctgagtcctatatcaatatactatagttttatgtatataggtgatgatgatgatgatgcctcggagttggggcttgaaactaattaaccccttcccttccctttaatttatatatatccttcttcttgtttaaacggatcttcaatcataatatcaaatcaaaaaagtattattattttccaaaaaaaaaaaaaaaataaaaaaaaaaaaaaaaaaaaaaaagaaaaa

SEQ ID NO: 26696 - DNA, 1143 bp, Glycine max
  Clone ID: TF_GmC188491_1
cttgatggcatttgtttatacaattggcggattccttactcattcttctctctctcattactttatgacgacaccggaaaaaacaaatcaccaccaagagagagataacgatgaaaagtggcgaatcccaaatgccaacaacaacaaatttaccaaattaaattaattaatgaacaaaattcaatatgcaggaaattacctaattaattaaattaaactaatcagttattactagcataggaaataatcatcatcagaagaagaagtcaagctgagaagttgctccaagtactcagaacccaaatcctccaacaccagcacattttgtgaaataatattcacattttgtgattccattccatggtcccttttgttttttttgttggtagcctggattttcttctcatggtgtgttttctcttgagtgccaacactggagaggaaccatcttccaatgatattggcttattattactctgcatgtctttgagtgattccctcaccacttcttctgggaaatttagcactgccatggaccctcttgtggacaaagcagcttgatcataagccagtgctgctgcttcagcagtgtcaaatgtgccaatccaaactctaacaccatttctcgttgagtctcttatttctgcagcaaatttcccccatggccttctcctcactcctctaaagggtctcttgtctttgttagtttcctttggtggttgtggttgtggtgatgcatgtgtttctttgagttgatggcttgcatgagttaaattggatgacacttctagttgtgatgactcagtgctgctgaccaaggagcctgaagagttggaataatctgaggatgatgattccttgatttgtgattgtgaggagtggtcagtgatggtgaaggaatcaagggcggtggtggtggtggtggtgttttcttcattgaagaaaagaaagtcttcccaagggaatggttctgcacaaacagaggaatttacaaaggaagagttaaagttttggtattggaagaaagatgaatcaaaatccatctcttgaaatcttaatgtagactgacaccaaaattcagctgttttgtttttgttttctttccctctcctcttatgtgcgtggctctgtggtatgctttca

SEQ ID NO: 26697 - DNA, 857 bp, Glycine max
  Clone ID: TF_GmC768_2
aacgcctgaagagacaacagcagaaaaaacttcaaacttggatctcatacgccaacacctctttggtgaaaacatcatctcagactcctcctcctttgtctccaatctccatcatcatcctgtgaaacttgaacccccctcatcaccagaatttgagtgcacctcatatatcttagataacaacacaagcagcaacttcttcacattccttgaaggctatgatttggtggcagacatgaagtttgtaattgattcagacaacaccaccaccatggtgatcccttcaaaggaggttataaagaaatgcaatattaattctcctgaagaacaaccaatggtgtcatcatcatcagaagagaagccaacaatgaaaaagtcagaacattatgatgaggcaaagcgttataggggagttaggagaaggccatgggggaaatttgctgctgaaatccgtgaccctacaaggaaagggacaagggtttggcttggaacatttgacagtgaaattgatgctgctaaggcctacgattgtgctgctttcaagatgaggggtcagaaggccattctgaacttccctcttgaggctggagagtctgatcctaaacctaataacagttgtggcaggaaaaggagaagagatcagaaccatgatcatgaattcgagcttccataagttcaagttcatcatggtgtttcatgagaaagtgagaagaatattagagttagcttaattagttgtgtggctagcattaagtttgttacttacctaggaaaataattaatatgcctgtgaaagtctgtacatagaaacaatgctaatgtgaaatgtctatatgaatctatgcaaagtatgttat

SEQ ID NO: 26698 - DNA, 1410 bp, Glycine max
  unsure (1)..(1410): unsure at all n locations
  Clone ID: TF_GmC887_1
gttcttttcctccactatgttttttttttttgcaattatctttcttatttaaaagatgaagcaagcaaacagaatcccctcttttgatcttggtttcaatattcatcatatcactggttctcctccttttataatcttagatcagcttttaacacaacaaggttttggtggagaagaagaagcaaagacgacggtgtataaatacaagagtagaagaagaagaagaagcaattagagggagagttagtgagcaaggtggatcgaaggcaagggaagaggtctctccctcctcatgaggagaaaaaagaagctttcaacttttcctattattcatccaacaccatctcaaaatcgaaaggaacaagcttcaccatcacccttttcactcctcatgagtaacaacaaaaacaccaccttcttccccaccccacatggccaaataaggacttctgaatttgttaatagccaaaatccgccccaggctacaaatcaaggcattgatgatattaggaaaaagcactatagaggagttaggcagagaccatggggcaaatgggcagcagaaataagagaccctaagaaagcagctagagtgtggcttggcacctttgacacggcagaggctgcagctatggcttatgatgctgctgcattgaggttcaaaggaaacaaagccaaactcaattttcctgaacgtgttgttatgccaatacaaccacaaacaaataacaataattccacttcttcatcagctcctactacacaatcatcttcttctcttccaccaccacaatctctacataataatagttctctttcagcagaagggtttccaaatcttgaggagtatgcaaggttgctgagttgtagcgatgatgatgattttcaacgtgttgcattggggctctaccagcatcacaataatgaggattttatttgtggttcatcacaaccaccaccagtgccgttttttgtgtcctcttcttcttcttcttctgcaatgacatcgtcatattctgattttttgggccaaggagggagtactggttttgatgaagggaacaagagggggtcgtagttttatgtctctgaattttgagcactgcatgcaggttgcttccacaacaattaaggaagttcaaatctctcatctcttatatgttcttttgtttttattattccaattacaaaataacacctgaggtataaaatctataatactcatctttcgtctttaatctgactctttgatatttttaggcaaactggttagtgcttattaattttatcaatctatcgaaaaatttaactcactatttttaattagttgagtttctcttctcaaaannnaanannnnaaaaaaaaaaaaaaaaaaaaaaaaaaaaaaaaaaaaaaaaaaaaaaaaaaaa

SEQ ID NO: 26699 - DNA, 687 bp, Glycine max
  Clone ID: TF_GmC23803_1
cccacgcgtccgcaaaaacactcatcactctatctctctcaaaagtgaaaatgtgtgggggtgctataatttctgatttcatagacgtgaatttgaacagtggtcggaaattgaccacccacaacacccatcatcagcttcacactttctctgatttccacgccacctcttcttccaaacatcaaccatcctaccaggatccaaacctccctaggcctcctccgcttccaaacaaccaaggagtgaagttgaaggctttgactttgaacactggtcgagtacggaagaacgtgtacagaggaataaggcaaaggccatgggggaagtgggctgcagaaataagggacccacgtaagggtgtgcgtgtgtggctgggtactttcaacactgctgaagaagctgctcgtgcttacgacaatgccgccaagcgcatccgcggagacaaggccaagctcaactttcccgacagcaagaacccatgtcttaatccctttcaactcaaacacctcttttccaacctcgaatccttccttggtttggactcgctctaatcactcccattcttgtctgcttcttttccttaactctttcaaattatcctactgtaatatttataactatgtctacatctttcctcctttttcttgcctcttctttttcactaataatgagtattgtttatataaa

SEQ ID NO: 26700 - DNA, 2397 bp, Glycine max
  Clone ID: TF_GmC1761_1
gtctgggtggatttgagcgtccgcggacgcgtgggcggacgcgtgggcggacgcgtgggcggacgcgtgggcggacgcgtgggcggacgcgtgggttccttctcacaattcccaacctcgcatctcccattattttattctcaaaccacgacaacaaaagcacaaacttggtttctcaatttcttcctctcgatcctacccgagttaaattaaaaacaagaggagagaaaacaaaacagaacaaaataaaggtttggtcttttgaagtgggagtgaggaatcagacatctgggttggttgcttgctaggttcggttaatgttagaatgtgggatctcaacagactcacccgatcagaggattaacaaggacgaggaatccgaagaagggtgttcttccctcaaaataacttccttcgatggagatgacgagaacaacaacaacaaaggcaaaaggctcgagtctgtttccaattcaagctcttcagcagtagtcatcggagacgggtcagaagaagagtacgaggaggaagaagaagatgaagaaggtgttggtgttggtggtggaagaagtatgaagaaacgtagcagcaagattttcgggttctctgtgacccaaaatgaagaagagtccatggacagtgaccatccacctgtgactagacaattttttccggtggaagatgctgacgtggcggttgcaaccggtggtggtggaaccggtgtaagctcaacgttccctcgtgctcactgggtaggtgtgaaattttgccaatcagaaacacttggcaccggaaaatcatcagtggaagtttctcagcctatgaagaagagtcgccgaggaccgaggtcaaggagctctcagtatagaggagtcaccttctacagaagaacgggtcgctgggagtctcatatatgggattgtggaaaacaagtgtgtctaggtggatttgacacagcacatgcggctgctcgtgcttatgatagagcggctattaaattccgaggagtggaggctgacattaacttcaatattgaagactatgaagatgacttgaagcagatgagcaatcttaccaaggaagagttcgtccacgtgcttcgccgacaaagcactggatttccgagaggaagctccaaatatagaggtgtcactttgcacaagtgtggaagatgggaggctcgaatgggccaatttttagggaaaaagtacgtttatttgggtctctttgacactgagatagaagctgcaagggcttatgacaaagccgccataaaatgcaatggcaaagaggctgtaacgaattttgatcccagcatctacaacaatgagctcaataccgaatccacaggtaacgctccagatcacaatctggatttaagtttgggcaatgcaacttcaaagcctggcaataatcaagcgttggggaatcacgccacaaatgctgtaacccatgatcagcacctgccatctgagtctaattggcgtaatgggggaaacaagcctaagctggtgaatatactccccaaaccatgtaatagaagcaacaacaaggactcacatggaagggatgtgcacggggagagtgaaacactgaggatgctaagtcaaacccaccttcattctccagccttcaatgaaatgcaacaaagatatggtccctacaggtctccgggaggagagtctcaaatgcttcaaaattttgcgcacattcacccaccaaattttcattttcccagaagcagcattggaggccgaattgggagtgatctttcattatcagtggctgatcaacaacagtggcaaaccgggccttcacgttatttagcaactgctgcagcatcatcaagtttccaacaagagataagaccctcttctcaaggttggctgcagaaaaatgggctccacagtctcatgagaccctcatgatccctattataaatagagaattttctgcctcgccaagtactagttacattcaaataatcgtaatctgctccctaagtaatattattattgttacccttccagggtttcacccccaaaaaattattattttcttttcttagcatgtaaaataggatgcagtgttagattgtgtccatgtccaacccagacccctcgtcacacaaggccacaactttactattgaggtgaaaaagaaaaggataaaagaaaagaaaaaaaaaagaagagaaaatccaaattgggaacttactactggtctggggtcagtcaaactaacaaacggacgaaatctttaactagatattctgggctctgactaaaattttaggatcttatataactctgattttattgcttttctgcggttgtggtatatttatgacagcacctattcgtttcttgatttgggatgtattgctatcacatataa

SEQ ID NO: 26701 - DNA, 734 bp, Glycine max
  Clone ID: TF_GmC194109_1
cccgggtcgacccagcgtccgaaatttccttcttcattctcccttttttcgtccggttttggtaaaccactttaggtaaccagattgctactactagtactactgctactacatatacaaagatgctatcataaaaagagagaaacttgggaagtgggaacacattcaaaatccttgtttttttgtttgtggtctagtattcatctccaaacacacccattgagtatttttcattttttttgttcttttggggcaataaaggtgggtgtttttggcattgattgagacagaggctccaaatgaagaggtctccagcatcttcttgttcatcatccacttcctctgttgggtttgaagttcatcatcccattgaaaaaagaaggcctaagcatccaaggaggaataatttgaagtcacaaaaatgcaagcagaaccaaaccaccactggtggcagaagaagctctatctatagaggagttacaaggcataggtggacagggaggtttgaagctcacctatgggataagagctcttgggacaacattcagagcaagaagggtaaacaagtttatttgggggcatatgatactgaagaatctgcagcacgtacctatgaccttgcagcccttaagtactggggaaaagatgccaccctgaatttcccgatagaaacttataccaaggacctcgaggaaatggacaagggttcaagagaaggaatattagcttctttg

SEQ ID NO: 26702 - DNA, 983 bp, Glycine max
  unsure (1)..(983): unsure at all n locations
  Clone ID: TF_GmC884_5
cacgcgtccggttcgaaataccggggagtgacacttaccaaatgtggccgttgggaagctcgaatgggacaattccttggcaagaaggcttatgacaaggcagctatcaagtgcaatagaagagaggctgtcactaactttgagccaagtatatatgagagcgagatgaaacctgaagctattaatgaaggtggcagtcacgaccttgacctcaatctgggcatagcaaccccaggacatggtcccaaagaaaataggggccatcttcagttccagtccatcccttacaacatgcatcccggaagaagttcaaggatggagactaatgttaattcggttattggtgatccttctttgaaaaggctggttgtaactgaagagcgtccttctgtatattccactttctttcccaatctggaaagagcagagagaatgggcatagatccttcaaaaggagttccaaactgggcgtggcagacaaatggccaggttaatgccaccccagtaccaccgttctctactgcagcatcatcaggattctcaatttcagctacttttccatcaactgccatctttccaacaaaatccatgaacccaattccccagagcttctgtttcacttcacacagcacaccaggtagcaatgcacctcaattctattacgaggtcaagtcctcgcaggcaccatcccagcctctatcttgtaatacaagtataaatggtagccccccacacaagttctgaagttcaattctcaaaacgacagttaaaactttttttttttttttcctgtttgcatgatttagggatcggtacaatgttgttgctcatggtatgtttgtatgtgatgaaaagatttttttcttcagagagaaagtgaaaagaaaaaatgcatgatgtgttttaaaaaaaaaaaaaaaaaaaaagggcgcgccgctnctagaggactcccaaggcttagcgtacgcgtgccatgcgacgtc

SEQ ID NO: 26703 - DNA, 920 bp, Glycine max
  Clone ID: TF_GmC1366_1
tggtaccacaacaattcggctcaccaccactcaaacatttctcactaaaacacacactttctgaaaagaacaaggatccattttcttttccccaacatggccagaccacaacagcgtataccgaggtgtccgacaaaggcattggggctcttgggtctccgaaattcgccaccccatattgaagactaggatatggcttggtacatttgaaacagctgaggatgctgctagggcctatgatgaagcagctaggctaatgtgtggtgcaagggcaagaacaaacttccctttcaatccaaatgtgtcacactcatcatcttctagttcaaagcttctctcatcaactttgactgcaaaacttcacaggtgctacatggcttctttgcaagtgacaagacaagctttggcatctgagtctcagagaacaccaccctcagtgcaaaatgcaacaacctccacaaccacaccaattagcaacaacttcagtgtgaagagtgagcaaactcatgcagtgttgccacataagagaccagaggaggagcaagagtcagaggcaaataggggtgtgaaaagggttaattctgtggaaaatgttcctctgcaattcaagcctcttgaggaagatcacatagagcaaatgattgaggagcattcttgattatggatctattgaactctgctctgtcatttcaccccaggccctctaattgaatgtgcatgtttttgagctgaatttaaagtcacaattgtaggttgccttgtgattaacaaaattatgggtaaaatttgactgaaattgctgctgtggttgtgaagagcacaaaaagagtggccacaattgcaattacataatgcaatttatatcggacggtctgccggccgcccatgttgaaattgtgcatttgttctgttctcattct

SEQ ID NO: 26704 - DNA, 350 bp, Glycine max
  Clone ID: TF_LIB3242-517-P1-J1-E5
gggcacgctgagaagtgtgccaagagattgatgaagaaccagtatcgcgcaatccgccggcctccatggggaaagggggctgctaacattcgctacccatgatagggggtccgtgtttggcttgcaactttcagctctgctgaagaagctgcaagaccttaccatgcttaatcacggaggatccatggccagaaaccctatgtgaatctacctgatgagccttcttgcgctgtttccttaaaacctatgacggctattccatatgctcaaccaatgaataaatatctgtactctctgaagccgaagataaaccacatgttacattttgcagacattcttgagtgcttcta

SEQ ID NO: 26705 - DNA, 1340 bp, Glycine max
  Clone ID: TF_GmC6807_2
cgaccacgcgtccgcaacttgttggtatcatcaaagcttttggaaacaagttaaagcagggcatgcagagggaacaaaccaaatatttcaaactccttaaactttttattatcactgttgcatttatttcagatatttagtatttgggtacaagtttgttctttagtttaaacaccgacgtctctccgtggcggctatacccaatttgaactttaattttcttccctttgtgtgaaaaggttttgtgttggagttggctttttgaagggcgtgcatggtgaagttatttgtgtatatgaatgatgaagaacgatagagaaaagggtaacgaggttgaccagagttacatacagcagcaccactcgttgtcaatgccaatgatgttttcgggttttaacagagagaaggagatgtcagccatgatcactgctttgacacgtgtggtttgtggagattattctcttgttcatcacaatattgataatactaatagtgcaattgttggtggtggtggtggtgatgatgtttcaaatatggcttctggttctatgccaccttcgtctacttctttatctcatggtggcaactctgttctcaagagaagaagggaagatgataatacaagtgatttcttacgtggaggttcattccctgctattttaacaactgcggaaggttcaagcacgataagaagaagaagagcgaatacggtatacgattacgaatacagaagagagaaggtgaaagttggagaaggaagaagaagcgagcaggaaatacagaggagtgagacagaggccgtgggggaaatgggctgcggaaataagagaccctttgaaagccagaagggtgtggttaggaacatttgaaaccgctgaggacgcagccagagcgtacgatcaagcttccttgcgtttcagaggcaacaaagccaaactcaacttccctgaaaacgttaggctcagacacactgagactcttcagggttcacgtgcttcaagcaatttttatgacaactcttattcgcatgttcatgatttacccgtgagcctctacgatcagactaccatggcttcttcatcaactatatctatgacttctccccaggcaccaccttcgatttatcctacgcatctactaccggcatggtcttctggttatgcttataatagctcctcttcttctgcctgatgtaaattgctttttatttcgagtcgacataggctatacttttatctcacacaacttagtttgtcattatatctacctatgtttgacactaaactgagttttacttggaagcaacatatgaattgcttctaaaaattcatttttcgttg

SEQ ID NO: 26706 - DNA, 807 bp, Glycine max
  Clone ID: TF_GmC243461_1
ggctcgagttttcctcaatgcctgttcacgcgcttccattttcaaaggactctccgccgcccaaacccaaggaggctcatttccggggtgtccgcaagcgtccctggggccgctttgccgctgagatccgtgacccctggaaaaagacccgaaagtggctcggcacctttgacactgccgaggaagccgccagggcttatgacgccgccgccagaacactccgtgggcccaaggccaagaccaacttctcctacatccttgctcccgctttccacctccctcccccggtgctcactactcccgaagcccatgccctggcccaagcccaagcccaggaacaactcgccagacaggtcgagttctgtggcccaccgtttttctttgcaactgatgtagcttccaccgcgccggtgaggtcggagtacaagggttacaagttagagaatatcgcgggttttgtggtgagtaaggaggagcagaaagagaaaaataagcccttcttatttgaccttaacctgccggcgccgctcttctgaagccgccggcggagaatgacggcgccgggggcttagtgtttctatcttaaatgtctttgaatttgtctatatgacttgttttgagggggaattttaggtgctactccgcccttgttttgatgtacagtttagtttattataggttttgagcagcaagcattttggttattacggtggcataggtttaaagttcatttaacgttgtttttgtttgtcgtttgtttcttccttggattctcactgaatctatgttaatacgtacagctgcata

SEQ ID NO: 26707 - DNA, 599 bp, Glycine max
  Clone ID: TF_LIB5118-012-Q1-PF1-H7
aattacacagctcaagtttccaagaccaagccaatggaaaacctttcaccattgatttacaaaaaccccattagaagaacttctaggcgatctacaatgtatcttggtgtgagaaaaaggccatggggaagatatgctgctgagattaggaacccatacaccaaagagagacactggctaggcacatctgacactgctgaagaggctgctatagcttatgatctttcatctatcaagatttgtggcattaatgctcgaactaattttcactacccttttgtgtctcttccaccacttcctatgtcgtcattgcctcctccaccgccaccgccgaccccagagttggatccaagtgttgaagtttgtctagagatgatgaatgctgcttcttacgatggtgatgatgaatctcttgttattgcttccattttgcaaagtttttctaattctggtaactgttctttttagtttttggttccaatgaggctatggcctgcctcttatcaaatcaataattctatttttttttctttgctatattcagtagtcgttaatgtaaggcttctaccaaaatttctacatatttaattacttgtact

SEQ ID NO: 26708 - DNA, 930 bp, Glycine max
  Clone ID: TF_GmC636_1
cggacccttgggcggacccgtgggcggctgcaaaccacgcacagaaggggacgtccgcccaccggtactactgatatgtacattaaaatctacgaataatggagcaagagcttccacgcagcagtgtccccgacgacgacgccgccaccaccacgagctccgttgacaagcccgccatccctcacgccggaggcacccgccacccgctctccggcggcgtccccgcgcgccgctggggcagatgggtctcacaccccctcttccgcggcgttcgcaagcgccgctggggcaaatgggtctccgaaatccgggagccgaggaaaaagtcacgcatatggctcggctccttcccggcgccggagacgcacggcaacttccccgacgaggtccaccgtcttccgccgctcccctcctcctgcaccgcccgggacatccaggccgccgccgccaaggccgcccacatgatgatggtccaggctgccaccgccgactcgccggagaaaagcagcagcattacctccgactgcggcggccgcggtggagacgacttctggggcgaaattgagctgccagatatgttcgacggcaagtggtgggcctccgaccacgacgtcacgccgtggcctgagctggagctgccgccccagccgcccttcaccacggcgagcttgtagtcacttgtaataatcaataatgctcttcgcacgctcagccgacttggttggtatattagtagtttgtaataatcaataatgctcttctctcaagctccgacttggttggtatattaattatatatattagtattttgctcatataattaagtaactctctttgtgttctcttcacaataattaattattttaattgtgatgattagtgttagtgctgttaaaaaaaaaaaaaaaaaaaaaaaaacaaaagcggccg

SEQ ID NO: 26709 - DNA, 1031 bp, Glycine max
  Clone ID: TF_GmC120268_1
ggctcgagctcacaccatcttcacctcattttcatcattctctgtcactgtcatagggacatacatacattttcaccttcacacatcaaaccaacaagaactttctattccttaaaccatggtcgagcctgcagtagcagcaagctcagaattatcagactcaacacgaaacaccaacaccaacaccccttcaccctcttcctcatcgtcgttatctccgtcgccatcaccgtcatcatcaagctctaaaaagcgagcgagagacaacaacaatagtagaaacaacagcaacaagcattctgtgtatagaggtgtccgaatgcgcacgtggggcaaatgggtgtcggaaatccgcgagccgcgaaagaagaaccgaatctggctcggcaccttcgccaccgccgagatggcggcgcgtgcccacgacgtggcggcgctgacgataaaaggctcatccgccatccttaacttccccgaactcgccgcctccctgccccggccggcctccaactcgccccgcgacgtgcaggccgcggcagccaaggcggcgtccatggaggcgccgccgcggacccctccgtcgccggccgccacgccggaggatgacctcggcgagatcgtggagctgccgccgctcggaacgagtttcgactcgcccgaccggagttccgagtttgtgttcctggacatggacgacgggtggccctattctcacccgtggtaccacagcatttatgatggtgggtacttcattagcgacatgaacaacatggtttcgatgcaagagtcagagagcatggttctttccctgtggccttgaagttaagccaatgctactcattgcagtatggttatattttggttctttttttttttttttgcgtgagacagataatcatgtttctgttcttaagtatgcgattagggattggattttcatgtccgtatatatgaaataacatttatttgccgatatcaatctcttgaatgaacatcaatacattgagaaattagtctctcattatcgactc

SEQ ID NO: 26710 - DNA, 671 bp, Glycine max
  Clone ID: TF_GmC755_2
aagagactcacctcctcaacgaagctcaatctataggggtgtcacaaggcatcgatggactggtcgatacgaggctcatttgtgggataagaattgctggaatgaatcacagagcaagaaaggaagacaaggttttcattattttgctctctataatctttagtttaattttctgatttccttcgctttatatgatttattgtcatattaattatcttgggttggttgacaatggcaatggaaaacaactggatgcagtatatctaggggcatatgatgatgaagaagccgcagcacgtgcctatgacttggcagcattgaagtactggggccaagataccattctcaattttccattatcaaattatgaggagaagctcaaggagatggaaggccagtcaaaagaagaatatattggatccttgcgaagaaaaagcagtgggttctctcgaggagtttcaaaatacagaggcgtagcaaggtacttgaaccctgctctgttcactgcaaaatgctaggttttgcaatttttcaatctgttttacggtagatcatcatggtcaacaaaataaaccattgatatctttgttgaattcagaaagtggggcgtgcacgaatatatatatacacacacgagtgtacgaaatgtttttagaacataaaattgtggt

SEQ ID NO: 26711 - DNA, 1284 bp, Glycine max
  Clone ID: TF_GmC321_1
tctggctcgactccgtctctgcaattacgatggcgcccagggacaagactagtgccgttaagcctagcggtaacgccggggtgaaggacctgcattttcgtggagtcaggaagagaccgtgggggaggttcgccgccgagatcagagatcccgccaagaagacccgcgtctggctcggaaccttcgacaccgcggaggaggcggcccgtgcctacgacgccgccgcgcgggagtttcgcggccctaaggcgaagacaaacttccctctcccttcggaaaattttaagaacgcgagccctagccaaagcagcacggtggagtcctccagccgcgaccgcgacgtcgccgccgattcctctccgctcgacctcaacctcgcccccgtcgccgtctcctccgctcgattccccttccggaaccagttcccggttttccccggcgcggtgccggcggcgaaccaggttatgtacttcgacgccgtcctacgcgccggcatggccggtccacgtggcttcgcgtttggctacaatcctcatcccgtcgcggcgagtgagtaccacgcgacgacgagcgactcggactcgtcctccgttatcgatctgaatcataacgaaggcgttgttaaggggaacggttctagaatgttcgatctcgaccttaaccatcctcctccacatgagatcgcttgatccagaatctgactcatgccttgagtttttctttttctaattttgttttttaaagtagagaaagtagcagcgttcgataaggaaggaagggaagggaaggtaaagaaatactatgtgaatacgtagtcggtatgattgtctctatttttttgcgacagaggaaccaccagtttcatgctgttttttcttaaatcacgaagcgctcatccggtttttctttcgttttgattgatattttactacggtgtaatgttttttggttgcagccataatttggttcaatgaaattaacacggaaagtttgaattattttgattgtgatatacattttcaattaaatacgaatggggaaggaaagaaaagctgtgggtgaagcgtacttggtagtaatggtcgttgttgttggcgttgatttgattgacaggtggctcttgttacctctcccttcaaggtgactccaacgtccaatggtgcgtgggctatgtaactacacgactggtggcacagtgccacattctcaattcgctcccatcttcatgatgaaaatgaatttcatggtaaaaaattaactaaagtatgcaaaagtcatttaatt

SEQ ID NO: 26712 - DNA, 2169 bp, Glycine max
  Clone ID: TF_GmC12225_1
ttccggtccggattcccgggtcgacccacgcgtccgcaagtttcgaaattgaaaagggtgggagagatacaaagtgttcattgatttaaacccttgctagaacccttggtaaagcaagcaaataagggctcaatgaacaacaactggctttcgttccctctttctcctactcattcttccttaccagctcatgatcttcaagcaactcaatatcatcaattttcccttgggttagtgaacgagaacatggataaccctttccaaaatcatgattggaatctgattaacacccatagtagcaacgaaattccaaaagtggctgattttctaggagtgagcaagtctgaaaatcagtcagaccttgcagccttaaacgaaattcattcaaatgattcagattatctgttcacaaacaacagtctggtgcctatgcaaaaccctgtgttggacacacctagcaatgagtatcaagaaaatgctaatagtaatttgcaatcattgacattatccatgggaagtggtaaggattcaacatgtgaaaccagtggtgaaaatagcacaaacactactactactactactgttgaagttgcacctagaagaacattggatacattcgggcagagaacatccatatatcgtggagtaacgcgacatagatggactggaaggtatgaagctcatctttgggataatagctgtagaagggaagggcaatcaagaaaaggacgccaagtttatttgggtggatatgataaagaagaaaaagcagctaggtcttatgatttagctgcactgaagtactgggggacatccaccactaccaactttccaattagtaactatgagaaggaattggatgaaatgaaacacatgacgcgacaagaatttgttgctgccattagaaggaaaagcagtggtttctccaggggtgcatcaatgtatcgtggagttacaaggcatcaccaacacggaagatggcaagcaagaattggcagagttgcaggaaacaaagatctttacttgggaactttcagtactgaagaagaggctgctgaagcatacgacatagctgcgataaagttcagaggtctcaacgctgtcacaaactttgacatgagccgctacgacgtgaaagccatccttgaaagcaacactctcccaataggaggaggagctgcaaagcgtctgaaagaagctcaagctctagaatcttcgagaaagcgcgaagagatgattgcactaggatcatccacattccaatatggaaccacaagctctaattctaggctacatgcttaccctctaatgcagcaccaccaccagtttgaacaacctcaacctctgctaactttgcaaaaccatgatatcagttctcacttctctcaccagcaagaccctttgcatcagggttacatccaaacgcagcttcagttgcaccagcagcagagtggtggttcttcttcttatagctttcagaataataatataaataatgctcagttctataatggttataatcttcagaaccaccctgcattgcttcagggaatgattaacatggggtcttcatcttcttcatctgtgttggagaataataatagtaccaataataatgttggtgggtttgtgggaagtgggtttggtatggcttctaatgcaacgtcggggaacacggtggggacggcggaggagctagggctggtgaaggtggactatgacatgccgactggtggttacggtggatggtcggcggcggcggcggcggagtccatgcagacgtcgaatagtggggtgttcacaatgtggaatgactgagggaagggaagctagttctagtaatgtatggcacaacgtacgagttagttaccatacaattttgttatgcttttttctttttttttgtttttgggttttttaatattctcgcaattggaaaagaaaataggtgctgattttctgtgactaaggaagtgagcaaagaccatatatctatttatatttatgtctcttgttatggcgaatgtttgtgagacttttgcttgatttaggtaaactaatcaaacactgacttatatgtactaatgttttatttgtttagcattggattacctcccagttctatcactttttaataaaataaaaaaaactatatgagaaattatatat

SEQ ID NO: 26713 - DNA, 1159 bp, Glycine max
  Clone ID: TF_GmC1399_3
agcccacgcgtccgcccacgcgtccgcccacgcgtccacctcgtcttccaaaatatccacgtttcttttcccacacactatcttaaatcttaaaaacattttttttttcaaagcaattagaatttagaccacaaaaggaacaccgaagagatgtacggacagagtagtagtagcagtagttcttacgaatcggatttggcgctgttggattcgattcggcaccacttgctgggcgagtccgaatccatattcggcgccccgaatttcgggtcgggtcggagctccagtttcagcagcttggactcgtgtttgagcgacaattggggcgagcttccgtttaaggaggacgatacagaagacatggtgttgtacggcgttctccgtgacgccgttaacgtcgggtgggtcccatctctcgatgccgggtcgcccgagagcgtgtcgtcgggttttccggcggtgaagctggagccggacttgatgccggcgctgatacgtctcgagtgaagtgttcggattgcggcggaggagaagaaggttgttccggcgaaggggaagcactaccgcggcgtgcggcagcggccgtgggggaagttcgcggcggagatccgcgacccggcgaagaacggagcaagggtttggctggggacgtttgagacggcggaggacgcggcgttggcgtacgaccgcgccgcctaccgggtggggacggtgcaagagcaagtggggagtcaagtggcagagtgtacacgtggcgagcagttattggttagctgaggtggattctaaaactggtgttgtgtttattaaatacaataaatacaatacacttttgtaattatgtgatgtgcgtgtgtgtgtaaagcacttagctatattatagccatcatccaactcaattttggaacaaagaaaaaaaggtgaaggatgaggatagatgattttagcacatcaaatggtgagtggtgtgaccccacgggaagaaaaaaaaaaaagagggggagaaaaaaattcaaagaagttatggaatttggaagatgatgaggaatgacggggtgaggaactgaggatatgtaatttggctttgtgaatactaccaaatttgttatttgtttgttcaacattatgaactatgaatgggttaattgttaattgcttg

SEQ ID NO: 26714 - DNA, 585 bp, Glycine max
  Clone ID: TF_9564630
ccaggcaccagtgaccctattattcctctcacaaatatcatatcctccgattaaactagtgaaactaaacaagttccaaattatttcattcccctttcctagctagacccacctacttcctattccttaatttctcatttcattcatttccccacgtgccaaaaaaaaaccttgcttttcttgcaaacaacaccaccaccaaacatggcatcatcatcatcattatcatcatcaaagaggcatccattgtaccatggaatccgttgccgtggaggaaaatgggttactgaaatccgcgaaccgcgaaaaacaaaccgcatatggctggggacgttcctgactccggagatggcggccgcagcctacgacgtggcggcgttggccctgaaaggcggcgaggcggttctcaacttccctgactcggttggcgggtatccggtgccggcatccaaatcgcctgcggacattcgcaccgctgccattgctgcagcagaactcatgaagcctgaagcaagccacaacaacaacaacgttaatgcatcaacaacaaatgaggcagaagtagttcagtatgataacaataac

SEQ ID NO: 26715 - DNA, 2314 bp, Glycine max
  Clone ID: TF_GmC1816_1
ctagggcgtgtgtgtaaaaattggggtgtggagaaagtaaataagaggaagggaaattaaaagatgaatatgaaggtgaatctgaagagagaataattgagggagttgttgaggaaggactatttttcataaaaggttctagaacttccatgagctcacctctgaatggatctgactcaacttgttcttgtgatgttccgctgtagaaattcatcgaagctgccatataaaaattttccaactacaccacacagatcttagattaaaaaaatcaacctgcgtttcttttaaaaattacaaaaaaaaaataataatttttttttaaaaaaaaaaagggatggaagaggtttaaaatagacaccccctttaatccaagaagaaagaaaaaaagcttaaagggatcaaaaacaaccctcttggctgaatgaaagaaaataataattccttaacaaaaggataaaaaaacaccggatctccattctgaaaacaccacgcgtccgcccagagagagtttctcaccaaacacacacttctcttctcttctcttctcttcattttctgtggttctcactttcttttctctaatcttctaatctcttattttcttcccccctctgttactccccgcttctctgaatccctttctgttaatcatctgtctttcaactcgtgattttttgggtttgcctcaccaaaaagattcaaactttgaaaatttttctcgaaagccaggtgttttcagaatcgagatccagctttttttttgtttgtttttaaaaaattattattttctttcgttcagccgcgagggttgtttttgatccctcaaaagctctctttctttttttctttcttggatttaaggggttgtctattttaaacctctcccatccttttttgttgtaatatttaaaaaccacaggttgatttttttaatctaagatctgtgtgtgtagttggaaaattgaatttttatatggcagctacgatgaatttctacaacgaaacatcacaacaagttcagtcagatccattcagaggagagctcatggaagttctagaaccttttatgaaaacttgtccttcctcaactccctctattctctcctcagattcaccttcaccttcacctcttaatttcccttcctcttctttactttctccacaccccaatttctacacacacactccccccccttcctacttactccaaagccaacaatccttaataggctttgagcaaccaccgagttcccttctcgggctcaaccacctaagcccgtctcagatttctcagatccaggcccagatcgaggcccaacagagccaaaaccagaacccacactctctcaactttctcggcccgaagcccgtcccaatgaagcacgtgggcgggcctccgaagcccacgaagctgtaccggggcgtaaggcagaggcattgggggaagtgggtggcggagatcaggctcccgaagaaccgaaccaggctctggctcggaaccttcgacacggcggaggaagctgctttggcttacgacaaagccgcgtataggctccgaggcgacttcgcgaggctgaacttcccgagcctgaaaggctcgtgccccggggaggagtacaagcctgtgcattccgcggtggacgctaagctcgacgcgatttgcgccaacttggcggaaatgcagaagcaagggaagacggagaaaggtgccaggtcagcgaagaaatcgaagcaaggtccgaaccaggaggccaagcccgaacctcaagcttccgctgaaagtgagggttctgcggattcttctccgctgtctgatcttacctttgatgtaaccgagccgcaatgggaacattttaatttgcagaagtttccttcttatgagatcgattgggattctctctgaacttcgtctttgtttttatgtctagtcttgtggctaataataataataatttaggttagtcttgctaggtggctgctgcaattgagtttttgaagattgcagtgcttcttgtaggatttcgattttttttttttttagcatttggttattggctatttggtcaatatgatgtaaatctctctaccttggtcagctgggtttttttttttttattattattttcttgcttggcctgggagaatgacttctagccttctaggtgttgtctatgctttgatgttcatccaagtatgttattattattattattgttgttgatgtaattcaattttatttgcatctcagaatttatgaatatatttgtatttcagcttaaaaaaaaaaaaaaaactcgagactagttctctc

SEQ ID NO: 26716 - DNA, 1083 bp, Glycine max
  Clone ID: TF_GmC1388_1
tctacgttgagcacgcaacccgccccctacagcactactttcagttttttctgtctctgaatctcaaactcttcggaaagattaacattaatggctccaagggatatcaatagatccaacgttgttgttgttgccggagctcgagccgcagcactactctctgatcagttttttcttggtctccgaatcacaaactcttcgaaaaaactaacattaatggctccgagggatatcaatagatctaacgttgttgttgccggaggatccaacccgacccgtaaagagatccgataccgcggcgtgaggaagcggccgtggggccgctacgccgccgagatccgcgatcccggcaagaagacgcgcgtctggctaggaacgttcgacaccgcggaggaggcggcgcgtgcgtacgatgcggcggcgcgtgagttccgcggcgcaaaggctaagaccaatttccccacccacgcggagctgacgcacgcggcggcgcgtagccccagccagagcagcacgttggattcgtcctctcccccgacgccgccgttggacctcactcttgccgccccactcgccgccggtggcgcgttggtgttcccagtggcgcggcccgtggtcttcttcgacgcgttcgagcgtgccgaggtgcgcgcgtcgttcgatcttcccgtggcggcgttcagcgactcggactcgtccacggtcatggattacgagcggggctcacgtcggagagtgttggatcttgaccttaatgtccctcctccgcccgaggttgcctgaaccggaaaaaagatccggttttttcgcagctcggtttttctctctctatctgagtgagtggcgattatcaatttatcgtagtagctgacacggtgctagagtttatgtaaatatattataaatagattacaattaaccaaaccaaaaagaaaaagcaggcttatgtttttttttctctattctgcttttttttttccttttcgcaaaggaagaaggaatttcttacctcactgttgcccggtgatgttaactttttatatatataatgccatttctatattaattaaaaaaaaaaaaaac

SEQ ID NO: 26717 - DNA, 1745 bp, Glycine max
  Clone ID: TF_GmC88_2
ccacgcgtccggggactttggtgcatttctggctgtcattaaactttttgactcttctacagtttatttgggtggatatgataaggaagaaaaggccgctagatcttatgatttggcagctctgaagtactggggtcccactgctaccaccaacttccctgtttccaattattcaaaggaagtggaggagatgaaacatgtaacaaagcaggaatttatcgcatcattgcgaaggaaaagtagtggtttctccaggggagcttccatatacagaggtgttacaaggcatcatcaacagggtaggtggcaagcaagaattggccgtgtagctggaaacaaagatctttacttgggaacattcgcaaccgaggaggaagcagcagaggcatatgatattgcagccattaagttcagaggtgcaaacgcggtaaccaactttgagatgaatagatatgatgtggaagctataatgaagagttctcttccagtgggtggggcagcaaagcgcttgaagctttcccttgaatcagagcagaaagctcttcctgtgagcagcagcagcagcagcaatcaacagcagaatccacagtgtggaaacgtgagtgccagcatcaatttctcatccattcatcagccaattgcttctatcccttgtggaattccctttgattcaacaacagcatattatcatcacaaccttttccaacattttcaccctaccaacgctggcacagcagcgtctgctgttacttctgccaatgcaaatgcactaactgcactgccaccaacagcagcagctgagttctttatttggcctcatcagtcttattgatctaatcaaaactagaaatcatcttttgttaatttcctggttatgctaacaaatcaaaagctatagtctctggcacagtttagctgacccccctcctctattattaacccctttaggctgctaaaaaagaaaaaaaatgaggtttttgagttggctagtcttagttactgtaggaagctggatatgtaactaactgctcaagaaatgagaaatatttcgtgcatcataattttgcacaagaatttccttaatggcttatagcttgcagtggagtatgaccgcttttgtttaaaaataaaaaaaaaaaaaagttttaaattacagtttataacattcgcttgacactttcccttgaatcagagcagaaagctcctcctgtgaacagcagcagtcagcagcagaatccacagtgtggtaacgtgagtggcagcatcaatttctcagccattcatcagccaattgcttcaatcccttgtggaattccgtttgattcaacaacagcatattatcctcacaaccttttccaacattttcaccctaccaacgctggtgcagcagcgtctgctgttacttctgccaatgcaaccgcactaactgcactgccagcatcagcagcaactgagttctttatttggcctcatcagtcttattgatctaatcaaaactagaatcaaaatctttttctaatttcctggttatgctaacaaatcaaacgccatagtctctggcacagtttagctgaccccccctcctctattattaacctaaactaaaaaaggaaaaagaaaaagaaaaaaaagaggaggtttttgagttggctagtcttggttacagtaggaagctggatatgtaactaactgcttaagaaatgagaaatatttcgtgcatcataattttgcacaagaatttcctc

SEQ ID NO: 26718 - DNA, 1079 bp, Glycine max
  Clone ID: TF_GmC331_1
ccacgcgtccgcttcttctctcagaatacacaacacaaagtcaatataattatagtatatccctatgagtaggagttcggcgatgcatggaattacaagcacaaacaacaagttgaagggagttcggcgtcgaaaatggggcaaatgggtgtcggagattcgtgttccgggcacgcaagagcgtttgtggttgggaacctacgccacgccggaggctgccgcggtggctcacgacgttgccgtctactgtctaagtaggccttcttcgttggacaaacttaacttccccgaaaccttgtcttcgtacagtgttcagctcagggacatgtctccgaggtctgtgcagaaggtggcttccgatgttggcatggatgttgatgcaagaaacattgttgcgggcaaaacttcaacggtgggggcagaaactaattgcgagagtgatgagaggactagtactgcgtctgtgtgtaatgttgttggagaaggtggtgctgatcattcggatgtgttttggtgggatgatgatggtgggtcttggcatggaagtggtggagattctacggaaagggatgccttgagcatttccattgaagattatctttagctgttctaggtttcaactttagttatctttttttttttttttttgagttatgatcgatgcgcatagttagtagttacagataattactgctagtgttggtgtttaaacggtcagagatgatgatatataatttgatgtgcgctagctgccttttgaagaaactaaaaaaaggtaaaacaagaaagattgtacccccaaaatgaacttggtcaatttcacactttcacgccatttgcattttgtgcacgttgttagttttcaaattgttaattcccttgctaaacccactcaaacttgagtgcgttcaccttttattaccacgtagtaactgagagttaacgaaaatatttctttataaaaattatttaccatttagtgtctttcgtttacttgtaattattcaacttgtcaataagatgaaagttctaattttagatataataaaattcagctagtatttgtgaattactcactt

SEQ ID NO: 26719 - DNA, 747 bp, Glycine max
  Clone ID: TF_GmC1399_5
cccggctaaaaacggggctcgggtttggctgggaacgttcgaaacggctgagaacgccgcgctggcttacgaccgagccgcgtaccgaatgcgcggctcgcgcgctttgttgaatttcccgctccggattaattcaggcgagcccgaaccggttcgggtcacggcaaagaggtattcgccggagccgtcgtcttcttcgtcggatagtgcgtcgtcgacgaagaggcggaaaaaggtggtggggtccacggtgacggctcaaagtggattgagaaaggagcaagtgggaagtcaagtggcacacagtgcacacgtggagagcagttgttggtcaactaatgcgtgatgctgacgtgggatgcattgcggttttgctctttttttttaaaaaaacactctgtgtggcagtggctagaagttattataaaaattagaaataataacccaaaaaggggtggacagtgccacagtgtaaaaaatggatagggattctgactcattactcaagtgggggagtgataaaatttaaagaaaaaaaaaaaaaaaagagaccagttggaaaaagttattagggtggaggttttgtttggatttgtgaatacaattacatgatttgttattttttggttcaatatttatgaaatttgtgaattgtgttgcatgaattgaagcctccactctttatccccccaactacacacgctgatccaaatgaaccatcaatcaactaactataaggcgataatt

SEQ ID NO: 26720 - DNA, 717 bp, Glycine max
  Clone ID: TF_GmC566296_1
ctaacacacataacaataacttagcaacattttttccttccttctttctttctttctatactttttgttgttaattctaagttctaagagaagaaaaatggagggtggaagatcatcagtttcaaatgggaatgttgaggttcgttatagagggattagaagaaggccatggggaaagtttgcagcagagattcgtgaccctacaaggaaaggaacaaggatatggcttggaacatttgacactgctgaacaagctgcacgagcttatgatgctgctgcttttcattttcgtggccacagagcaattctcaacttcccaaatgagtatcaatctcataatccaaactcttctttgcctatgcctctagctgtgtcagctcctccttcttattcttcttcttcttccacttctaattattccggtgatgataataataaccaccttgtgagaccagctttttctggagaaataatgcaaggtggtgatcatgatgatgatacttttgagttggagtacttcgataataagttgctcgaggaactccttcagatgcaagataacagacacttctaaaagtaaaatataacacaagccagctatgttgtgttagtcactggcatgaaataaaatgcaaagaaatattgttgattttatttaatatattttgtttgatttttttttttttttttgtagctgatcaaagttcttcgaaatga

SEQ ID NO: 26721 - DNA, 745 bp, Glycine max
  Clone ID: TF_GmC31_2
agttgttagaatgcattgattttgaagcagacacagaagtggtaggtctcacgtctcatcataaggtcgaaaactccattgaaacaagtcttccacataattccaatttgccagaagaaccaatggtgtcaacgaaaaaggaagcaacatgttatgcaacaaggcgttacagaggtgtgaggagaaggccatgggggaagtttgcggcagagattcgcgaccccaaaaagaaagggagcagggtgtggcttggcacatttgacactgagattgatgctgctaaggcttatgattgtgctgccttcagaatgaggggtcacaaagccgtgttgaatttccctctggaggctggaatgtctcatccagagcccaacagtagtggcaggaaaaggagaagagattatacaacagctgtcacaagttcaagtcatgtcatgtcatgagaaataattcagtgtgggataaccatgtttttcttttggcattttttgtcagttacataagttaatgcaaggttttatagttctactacagttgagcgtgatgaggtctgttatttatatccttgacttatgattaagggaagcaaatggggtgaaattgaattaaaccaagaattaaacagttcataaagaaacctagttctacttttttatttaaagctctcaaagtagaatgtgtgatagtcagttagtcacgactcaccttagtcattatataattagaaaaattctcattgtatctt

SEQ ID NO: 26722 - DNA, 1348 bp, Glycine max
  Clone ID: TF_GmC106_1
gccagtgattcttcttcacttctacatcaacatcatcatcatcaacagcagcatcagcagcaccagcagcaacttcttcagtattggagtgacgcgttgaatctaagtccaagaggaatgttaacaagattgggaccagatggaaggccattgtttaggcttccaacacagcccataaacacaacaaaactctatagaggagtgaggcaacgccattgggggaaatgggtcgctgaaatccgtcttccacgaaacagaacgcgtctctggctaggcacatttgacacggccgaagacgccgccatggcctacgaccgagaagccttcaagctacgaggagagaatgctagactcaatttcccagaattgttcctcaacaaggacaaaaaagaagaacaacaacaacaagaacaagaagcttcttcgccagttctttcagctattgcaaagcagcatgaaccttctagtgaacaccgtgacgtccccatagaagagtctaatgagaatgattcgggtgacgccacggtgagcgatgaccaggttcatgctactactgagagttccgaaggagtttctcaggaaatggtttggggagaaatgtctgcatggttcaatgctattcctgctgcttggggtcctggtagtcccatgtgggatgatttggatgccaccaataatcttctttgccaatcacacattcctttttccaatcccaatcaacaagaactcaatgatgctgagagacaagaacaaaacactggaccaggttacttgtggaaggatcaggattgaaatttgaagttaattttctatataccttgcttctttctcttcctggttgcatatccatgattatcatttatccatcatccactccttcattacattttaggacactttgatggttccttagttacttacttctcactcactggttgcagatattttcaccacacaacctgtgaaccttgcctactactactcctatattcatttcctttttaacttcttttctgaaaccttctgctgaactaaggctccgtgtatttcaaggccttgcagcattttttttcttttacttgactattttacactatttttgcttttgtttttttttaatattttaatgtagtaagtaaaggtagattggcatgaccagggaagaaggagacggttttgtgatttccttctcggttgctccatccgttatgagctatgtttttcagctccaaggatggttcatatatatatatatatataatcatattacttcatttgtagtttgtacgctatcatgttatgtatcattttttttgttgttatattacatatccagcactttacagta

SEQ ID NO: 26723 - DNA, 346 bp, Glycine max
  Clone ID: TF_13787956
gatatacagaggggtaagaacgagggactgcgtgaagagggtggctgatatacaacggcctaagaaccagaccagggtatggatgggaaccttgaacaccgactatgaagccactctggcgtactacaagggcgcacacaagctcgggggggactacgccaggttgaactcgaccaagctgcgacaccactgttgcgacactgggggcgacttaagggagtataaccctgttcattccgtccctgacgccaagcttaatgccatgagtgagggcctgtctttgctgcagatacaggtgacgacagggaatcctccgaagaaaacgcggtccaaactcaatagtgcg

SEQ ID NO: 26724 - DNA, 549 bp, Glycine max
  Clone ID: TF_GmC36407_1
agcaactctgtttactcatctggtgttagaatggatagttcctctcatcagctcctccccttcaacgaaaacgacccagaagacatgcttctctatggcatcatcacttcatgccaagaaaaaaaagtgaccatcaaccaagagcaagtgaataagaagaggagcagcttccgcggcgtgcggaggcggccgtgggggaagttcgcggcggagataagagactccacgcggcatggcgtgagggtgtggcttgggacattcgacaacgccgaggccgccgcgctggcgtatgaccaagccgcattctccatgaggggctccggcgcggtgctcaacttccccgtggagaaggtgaaggagtctcttagagacatgaagcttgatggatgctctcccgttgtggccttgaagaggagacactccttggctgctaagaggaagaaggaagatgtccttgttttccatgaccttggggctgattatttggaacacttggtgatgtgctctgatctacctagtacaaccattgtttaatctttcatgacttgc

SEQ ID NO: 26725 - DNA, 838 bp, Glycine max
  Clone ID: TF_GmC636_2
gagagacaagagccgctactactaatatgtacattaaaatctacgaataatggagcaagagcttcaacgcaacagtgtccacgacgacgaagccgccaccaccacgagctccggcgacaagcccgacacccctcgcggcggcggaacccgacacccactcttccgcggcgttcgcaagcgccgctggggcaaatgggtctccgaaatccgggagccgaggaaaaagtcacgcatatggctcggctccttcccggcgccggagatggcgggcaaggcctacgacgtcaccgcctactgcctcaagggccgcagggcgcagctcaacttccccgacgaggtccaccggcttccgccgctcccctcctcctgcaccgcccgggacatccaggccgccgcagccaaggccgcccacatgatgatggtccaggctgcctccgccgactcgccggagaaaagcagcagcattacctccgactgcgacggcagcggtggtgacgacttctggggcgaaattgagctgccagaactgctcaacggcaagtggtgggcctccgaccgccacgtaacgccgtggccggagactgagcttccgccccagctgcccttcaccacggcgtgcttgtagtagtttgtaataatcaataatgctcttcccatgctctcatgacttggttggtatattagttacatatattattgctcatataattaagtaactctctttgtgttcacttcacaataattaataattttaattgtgatgatcaatggtagtgctgttaatgataacactttcactaactatttttgctaccaatttatttagcagcacattaat

SEQ ID NO: 26726 - DNA, 800 bp, Glycine max
  Clone ID: TF_GmC157860_1
aattcggcaccaggttagttactactaactaccccttttgcacacgttgtctcattcactcaaacaacttcaaagaacgaagcttttcaccaagtaacatgttttccatcaatcatttctccgacccagatgccacctcgccggggtcgggaggaagctcccgaccggcgctgtcggacgaggatttttttctggcggcaagcaatcccaagaaacgcgccgggaggaagaagttccgggagacgcgccacccggtgtaccgcggcgtgagaaggcgggactccggcaagtgggtgtgcgaggtgcgcgagcccaacaagaagtccaggatttggctcgggacctttcccacggcggagatggcggcgcgtgcgcatgacgtggcggcgatcgcgctgaggggaaggtcagcctgcctcaacttcgccgactccgcgtctcggctcccggtgccggcgacggcggaggccagggacattcagaaggctgcggcggaggccgcagaggcgtttcgccctgggaaggatgatgatgcggtggcggagagggtggcagcgacggcgacggagcgtgaagaagaacaagaagaagggatggtgccggagtatctgaggaacatggtgctcatgtcgccgacgcattgcttcgggagtgatgagtatggaagtgctgacgtggaatttgacgatgctgaagtttctctgtggagttactccatttaatttaactcagttattggattttttttttactattttgagtaatgtaaagattgttcgtatgggacaagtagaatagtg

SEQ ID NO: 26727 - DNA, 773 bp, Glycine max
  Clone ID: TF_GmC1595_2
cccacgcgtccggttggtggtgttgttgaagattctgaccgtgctttcttttgtttctttgcgtggcttttgtacctggggaatgattactgactcgtggggatcttttgctcattatgcggtttcagtttacttgggtggttatgacaaggaggataaggcagccagagcttatgatctcgcagctctcaagtactggggtccaactaccaccactaactttcccatttccaactatgagaaggaactggaggagatgaagaacatgactaggcaagagtttgttgcttctcttcgtaggaagagcagtggtttctctagaggggcctctatatacagaggagtaacgagacaccaccagcatggccgatggcaggcgagaataggcagagttgccggaaacaaagacctctaccttggcactttcagcacccaagaagaagctgctgaggcctatgacattgctgctatcaaattcaggggattaaatgcagtaacaaactttgacatgagtcgctacgacgtgaagagcattgcaaatagtactcttcctattggtggtttatctggcaagaacaagaactccacagattctgcatctgagagcaaaagccatgagccaagccaatccgatggagatccatcatcggcttcatcggtgacctttgcatcacagcaacaaccttcaagctccaacttaagctttgccatacccattaagcaagacccttcagattactggtccatcttggggtaccataatactccccttg

SEQ ID NO: 26728 - DNA, 1037 bp, Glycine max
  Clone ID: TF_GmC1970_1
cggtccggaattccggggccggccagccgacaatcgtgccggccagccgacaattacgggaggttatgtgggtccctccacttttatatacacaacaacaacacacatactagtcatttgttgttgttgtgtttgtgtttgtgttctctcctttcattaacgttgtgttgggtttgctagtgtacttggttttcattatggcgtcttcttcagcctctcgtgagggacactacagaggagttaggaagcgaccatggggacgctacgctgcagaaataagagatccgtggaagaagacacgtgtctggctgggcacattcgatactcccgaggaagccgccctcgcctacgacggcgccgcccgctccctccgcggcgccaaggccaagaccaacttccctccggcgccgcctctctgcctcgacctcaacgtcccttcctccgatcaccgctggccccacgtcccccctcgcagcctcgtcctcagcgagttcctccacaccgccgttctcagagacattgaaccgccgcaactaccttttccacccgccgccgccatcgtcgctcaccgaagcccccacgccgggggagttcaggtggtggagagttctccaacggcgtcgtttttgggtctcgttaggcgcggcatccccatcgacttgaacgaacccccacccttgtggctatgaataatgaatgaaccctgactaggtttctttcgacgtcgttttatgttccctagtattatctactactactcccatgttttttcattttaattttccctcagcatgcttaggtttttattagtagcgttgtacgttcatcgtagagggagtagtcgtatgtatctgtccatgtgagtctaacattaggttaatggaaggggaaaaaaactgctatgatattttgtatatacagtacattttttttatattttcctttatcaatgtctctacgcattttgtcgttgtacgtagtactatgttattcgccgatctaatttagtggattatgttgggatttttttcatgatt

SEQ ID NO: 26729 - DNA, 864 bp, Glycine max
  Clone ID: TF_GmC1970_2
gaagggctcgagccggtgccggccagccgacaatcacgggaggttatgtgggtccctccacttttatatacacaacaacaacaacacacatactagtcatttgttgttgtgttctcctttcattaaggttgtgttgtgtttgttgggcttcgttactgtactttggtttcattattatggcgccgtcttcttcagcttctgcttctcgtgagggacactacagaggggttaggaagcgaccatggggacgctacgccgcagaaataagagacccatggaagaagacacgtgtctggctgggcacattcgatactcccgaggaggccgccctcgcctacgatggcgccgcccgctccctccgcggtgccaaggccaagaccaacttccctccggcgccgcccctctgcctcgacctcaacgtcccttcctccgatcaccgctggccccaccacgtccccccccgcagcctcgtcctcagcgacttcctccacaccgccgttctcagagatatcgacccgccccaacaacctttcccacccgccgccgcagtagctcaccgaaatccccacggcggagctatgcccgttggcggcggggttcaggtgatggagggttctccaacggcgtcgtttttggggttcgttaggcgcggcatccccatcgacttgaacgaacctccacccatgtggctatgaacgaatgaaagccctgactagagtcaaactatatatagagatatctctgcctacggatgtgacggaagcaaatgaaggattcctgatggggggtgacttgaagcccattgattgttcctttccttgcgtctccaaaggtaacagtccctttactaatcttatatattgg

SEQ ID NO: 26730 - DNA, 571 bp, Glycine max
  Clone ID: TF_7233004
ttacattgttgtctgctgaaataaaaaacagaagagtgaaatggagcttgcacctgtgaagtctgaactaagtccaaggagccataggttgctcatgatagatggtagtgaggttattggcactaagtgtgtcaaaaggcggcgaagagattcatctacggccgtgttaggtggctatggacaacaaggtgaacagttagaagaacagaagcaacttggtggccaatcaactgccaccactgtgaatagaagctcaaggttcaggggtgttagcagacacaggtggactggaaggtttgaagcacatctatgggataaagggacctggaatcccactcagaagaagaaaggaaagcaagtatatttgggagcttataatgatgaagaagctgcagctagagcttatgatttggctgcactcaagtactggggaatatcaactttcacagatattcctgtgtctgattatgagaaagaaattgagataatgaaaactgtaaccaaagaagaatatcttgcttcatagagaaggaggagcagtggtgtttccagaggtgtatcgtagtataga

SEQ ID NO: 26731 - DNA, 1352 bp, Glycine max
  Clone ID: TF_GmC699_1
aattcggctcgagcggctcgagctcgagccgattcggctcgagggagtatcaaaaccaaagggccaaggagggtagattctgtgagaaactcaagatcaagaataggccaaagtttgtaggagtgagacaaagggcttcagggaaatgggcagcagagatcaaagacacatcaaagaagattaggctttggcttggaacttatcaaactgctgaggaagctgctcgagcttatgatgaagctgcatgcctccttcgaggttcaaacactcgcaccaatttttctactcaagggtgtggcgttgctacaaattctcctatatctctcaaactcagaaacctccttgatcgtaaagccatgtcaaatcaaagtcaaagtcaaattcaaaggcaatcctctatgataagttccactttccaaggtgctgatacttcagctagtccaaatgttagtgccatcaataagatcatggttatggaaaactactctgcttgtagtagtgaaggtaagtctttgtttttggttcagaaccaccaagtctgtgataacccgtatggactagatatgaatatgatcaactgttcaacgggtatcacaccaaatacatcgcagtttgattattcttggccattagcccaacaaaggattaacgaattgccaatatcaaaagatgattttggtttgaatgcagaaaggcaattgtcaggatatgccaccaatgagtgccatgaggaggatacgtatgcatatgatgtcaattatcctctctcccactttttctgcttcacttgatatctatcttaatcttcctatctcttcttaaaacatagtttgtataatattaccttgtttccgtgtcattttccctgagaggataaaccaagagtcaagaccattgaatttctaaactcactctgctttaccaagtgcttataggaatcagtaacaagattttcggtacaatggtactttgcccagagtgtaacaattcttttcaactcctcaaagttaacccattggatattttgcaagctcgtgatcacttacagtcacaccccatctcagtataataaggaagactaatgtgtgaagtcaaatgtgtacgcactatatatcagtcttcattcttctacaaatgtacttagtgcttacgatatattcaatcccactccttatggttggataattagatgaaaacggatattaagatgtattttacttttttgtgttatatatcacctttaaaataatttctgcacacacatataagtgcatctcctagctaggttcacttgggggtccatattattttgtgatcaagtcatgtataatacaagtatttttgtttaaaaa

SEQ ID NO: 26732 - DNA, 1825 bp, Glycine max
  Clone ID: TF_GmC603_1
gggacataccatatatacatatattatagtttagtttgcactattttaatggtggctggctaccttaattccacatgctaaaattttgcacccctttattatataaccgtttcattctctatagcatctcaaagggtgtcctgagaaggaatcacacaagagaaattttgggtggatcttggcaatttaaatttggtccaaaaatagtaagaaagaaaaccatagtttatatagttttcatgtccttgctaacggtggcgcaccaaagggggtcaggtgagtttatgcggttcacggaaagtcatggcggcggtggtggcggtgacggcgatggtgaatatggttatggacatgatgatggtagaggtggtgggggtggtggttcactagggttgaattttaaccaagtgatgcaacaaggtgaggttacaacgcaaggaggtactttggtttcagggtataacaggggtgatccagatttgagagaaatggtttccgctttgacacatgtggtggtgtcttcagggtcaggccagaggagcaccgaatggatccagcaaagtggttttcctatgatgtctgcatcttctctttcatgtttgtcttctttctcttctccttcttcttctggagcctcttgggttggccacaaaagaggcagagaagaagaagagagtagctcttcccataacatgatccaacaacaacaacaaagtgctccaagactcttcagaaacattggtgacttcatggtgccttctcaaggagactcatcttcagcgacagaagaagcccccacctccacaactacaagtgtaaccgctgtggcaacaacggttactgaaaccccacccccaccgggaggtggggaaaggaggagaaagtacaggggagtgaggcagaggccatggggaaaatgggcagcagaaattcgtgatccacacaaagcagcaagagtttggcttggaacattcgacacagaagaagcagcagcaagagcatatgatgaagctgcattgaggttcagaggcaacagagcaaagcttaacttccctgaaaatgtaagagcagttccacccattcaaccttttcaagccaccactaggctaaccgtttctgattccaccacctctcaattccggccactcgtcacggaggcgccgcccttcattcagcagccacagattcagggctcctctgacttgatcagagattacttgcaatactctcagcttctacagagtgattttcaacagcaacaaatacaacaacaacagcagcagcagcggcagcagcagcagcggcagcggcagcagcggcagcagcagcagcaacaacaacaacaaccatctagtttgcttcagcagttgtactataatgcacaatttgcttcacttcaatcaccttcaatgctatcatcatctccttcattttcttcttctgtgtctccagcaccattcccattattcacaacctctgcttctttccccttgttttcaagtcaacaaatgggctatttccagccaccggaaagccgcaatcccgctggcggcgtgccggagtttccaacgtccacatggtcggataccagtagccagccaccaccttctggttgatacagtgttttagtttccttcatattttcctttttcttttttctttctttcattcttagcataaaaaaaaaagacttgttatacttatttcttttttcaagggtgaaactatgatatagttttttttaagtatttttggtactattctcgtatcagaattagagtttcagtaatttatgttgatattcaatacaaatctttattatgta

SEQ ID NO: 26733 - DNA, 1527 bp, Glycine max
  Clone ID: TF_GmC603_2
ctcaaagggtgtcctgagaaggaatcacacaagagaaattttgggtggatcttggcaatttaaatttggtccaaaaatagtaagaaagaaaaccatagtttatatagttttcatgtccttgctaacggtggcgcaccaaagggggtcaggtgagtttatgcggttcacggaaagtcatggcggcggtggtggcggtgacggcgatggtgaatatggttatggacatgatgatggtagaggtggtgggggtggtggttcactagggttgaattttaaccaagtgatgcaacaaggtgaggttacaacgcaaggaggtactttggtttcagggtataacaggggtgatccagatttgagagaaatggtttccgctttgacacatgtggtggtgtcttcagggtcaggccagaggagcaccgaatggatccagcaaagtggttttcctatgatgtctgcatcttctctttcatgtttgtcttctttctcttctccttcttcttctggagcctcttgggttggccacaaaagaggcagagaagaagaagagagtagctcttcccataacatgatccaacaacaacaacaaagtgctccaagactcttcagaaacattggtgacttcatggtgccttctcaaggagactcatcttcagcgacagaagaagcccccacctccacaactacaagtgtaaccgctgtggcaacaacggttactgaaaccccacccccaccgggaggtggggaaaggaggagaaagtacaggggagtgaggcagaggccatggggaaaatgggcagcagaaattcgtgatccacacaaagcagcaagagtttggcttggaacattcgacacagaagaagcagcagcaagagcatatgatgaagctgcattgaggttcagaggcaacagagcaaagcttaacttccctgaaaatgtaagagcagttccacccattcaaccttttcaagccaccactaggctaaccgtttctgattccaccacctctcaattccggccactcgtcacggagacgccgcccttcattcagcagccacagattcagggctcctctgacttgatcagagattacttgcaatactctcagcttctacagagtgattttcaacagcaacaaatacaacaacaatcaccttctagtttgcttcagcagttgtactataatgcacaattggcttcacttcaatcaccttcagtgctatcatcatctccttcattttcttcttccgtgtcaccaacaccattcccattgttctcaacctctgctcagttttcctctgcttctttccccatgttttcaagtcaacaaatgggctatttccagctgccggaaagctgccctcccgctggcggcgtgccagagtttccgccgtccacatggtcgggtaccagtggccagccaccaccttctggttgatacagtgtctcagtttccttcatattttccttttttctctttctttcatacttacgataaaaaaatgatttgttttacttatttcctttttt

SEQ ID NO: 26734 - DNA, 505 bp, Glycine max
  Clone ID: TF_jC-gmfl02220146c10a1
ggctcgagctcgatcccattttaacacatacacttctctttatctgtgtcggatcgcatgaacagcacttggaggaggaagaagatcaccaccgtgcgggtgctagtcgtggaccaaatctgaagagacggggcggggggggtggactgtttctctgtgaccctacatgaacaagagtccatggaccgtgaccattcacctgtgactagacaattttttccggcggaagatgctgacgcggcgggtgccaccttcggtggtggacccggtctcacctccacgatcccttgtgctcactggctacgtgtgaaattttgccactcatattcactttgcaccggaaaatcatgaggggaagtttttctccctatgaagaagagtcgtcgaggaccatagtcaatgagctctcagtttagaggagtcaccctctaccatataacgggccgctgggagtctcatatatggcattggggaaaacaagtgtatctatgtggatcttacacat

SEQ ID NO: 26735 - DNA, 815 bp, Glycine max
  unsure (1)..(815): unsure at all n locations
  Clone ID: TF_GmC445884_1
gggggtagctttttttaattttttttttttttnnttttttggagaagaaaaaagtaagcatttattatgctgcagtaagttatcaagcaaaattagaaaagctttgttcaagcttgaaaaaccacaactcaatactcctcaacttagagaagttacttacataatccattccctacagttactatgactcggactttccgagcaaaaaacctatctttcttctcagcaaaagggttaaagaggggtcagacccagaagcaggtcaagctaaattgcaccataaactagctttctatttgttagcagaacagaaaattagctagttgatcatttccacaattcaatagttctgatgaggccatacgaagaacccaggaactgccagtggtggaagggtagcgagtgcgattgcatcggtcatagttgcagcaaattctgcagtgctactttcaccgttggtgggattaaaatggtggaagaggttgtgggggtaacatgtgattgcagaatcatagggtatagaagacactggctgaatggttgagaaattgatgctgctactggcgtttgtgttctgaggtggttgaatggtgctgacaagagctttgttctccgtttctggggaaactttaaagcgttttgctatgccgccaactggaagagagttgttcaatatagcgtcgacgtcatatcgcctcatctcgaaattggttacggcacttgcacctctgaactttatggctgcaatatcatatgcctctgctgcctcctcttcagttgaaaatgttcccaaatatagatccttgtttcccgca

SEQ ID NO: 26736 - DNA, 452 bp, Glycine max
  Clone ID: TF_uC-gmrominsoy058g08b1
cttaaactgacgctaaaaagtatcttagagagatgtgtggaggcgctatcatctgtgacttcattcctgacgcggtggcggccggggctggccgcctgaccggccattacatgtggcctgatctgaagaagcgtaagaatgacttggacgttgacttggacgctgacttcagggattttaaagactattctgacatctactacgacaacgaccgccacgacaagccctttgctaaggcctcctcttcttgccgctctaccacagcgaaaactgcggcattacaagtgcgagctgaaaaacttgctgataggaagaggaagaatcagagtaagggaatccgtcaacgcccttgtggaaaatggtcaggtgagatgtcggatcctagaaaggaggctcgagagtggcttggaaccttcaacactagctaagaagctgctagagcttatgatgct

SEQ ID NO: 26737 - DNA, 635 bp, Glycine max
  Clone ID: TF_6724385
gcacgagccacattggcatgcctagaagaagaggctgaggatgatgatgaagcagcagaggaataagtggcagcattagtggcaccaccagcagtcatagggtactcatcaggaaagttaaggattgcaaatggacctctcatggcataagcagctctatcataggctctggccgcttcctccgcagtgttgaaagtccccagccacaccctctgaccctgcctcgtggagtctcgaatctccgccgcgaacttcccccacggccgcctccgaaccccccggtaccggacatctccggcatcctccttagccctccccctcgacccttcttcatccatggttgcacttttggtaaggtactaatttttgtgttttttgcatgcatggtaaggtatgacaaggttggagtatatatatatggttgaaaaggcacaatctgattaggccacgcaagcattgttgccacgtgacgattagaagtttctgctattgaaaccaatgaccaatattgaaaagttcttgtgtccattgtatctggatggtcaaggtggtgggctttgcaaggtatagagattcttgtgccgcgctagcactcgctctttgaaacgccttctgcacatcgttgtttgggaatc

SEQ ID NO: 26738 - DNA, 1469 bp, Glycine max
  unsure (1)..(1469): unsure at all n locations
  Clone ID: TF_GmC1593_1
cggctcgagagctattgaacttatctctcttctcacttctgttgttataagtaacttccctcatcattacaaaacaatcctccacaggtttcaaaatgctgaaatcgggcatgggaattgaggagagaaagcaagtgaagaagccagcacaagccagctcgagaaaagggtgtatgagagggaaaggaggtcccgagaatgctagttgcacctacaaaggtgtgaggcagagaacatggggaaaatgggttgctgaaatccgtgaacccaatcgaggtgctaggctctggctcgggacttttgagacctctcatgaagctgctttggcttatgatgctgctgcacgtaagctctatggctctgatgccaaactcaacttaccagagctctctatcaaatcacaatctcagtgtccaccaccaccttcttctgtttccaacaacactcagattcctcaaatggagaacctgcagcagcagattcaaaacaattacatggacatggctacatgttctaataatttcaacaacaacaccaataatccttcagaagtttccatggcctctcagcaggttggagttggagtaccaatttacaccagtgactccatcgtgtctcttcccttggacaccaatcccaagcctgtggagaatgatggtgactttcgtccttcgtggggtacaatgaatgagggtttgccagtttttgatgattctatttgggctgaagctgccatgtctctagattttcctcaaattgcagcagagactgcgatttattcatcgggtaacaacttggccgatgtgggtgtgtgggactctctgcaaaccccatggtgcatgtaatttcatcactttcaaaagggcaagggaaagccacaagctatagcttttcttctcatgccagctggactgatatctgcttgttaaaatatatagtgtatatataagaggggtaagtaagtactttgtaaagacatatatgatacccaaattaagactagtttagttaaataggatactatatcatatcatatatatggtgtctaccttggagtgtatggaaaaccatgacgtgcttattttcgcacgacgtcgttttctgccttatagtctatagtaatattatgttatatgtaaatattacttaatacgataagggatggtggtgatgctctatcgccccgatattaataagttgtgttagcttttgtgcagtttattgtgagttttatgtaagcatcttgtgagttatatatgtcaataagaatgtacaactagtagttgtgtagtaataatggtgtacatataaaatgtattattgtagtctatgtttatgtttagaaaatttcgttttaaatttcttatgatttgatccanaacaaaaaacatggagaaggaaatggaggaattaaagatgatgatgttgtgaaaataaggaaagagagttaataaaaaattactaaaggg

SEQ ID NO: 26739 - DNA, 375 bp, Glycine max
  Clone ID: TF_LIB3242-641-P1-J1-G1
accaaaactgacgcttttgttattcttcgagtctctgagagagatgtgtggaggcgctatgatctctgacttcatgctcctttttgagacttctaatatcctcagggttttttgggagaattggctaaaaaatgggtctaccacagcgaaatctgtggcattccaagttcgagctgagaaatttgcaaataggaagaggaaaaatcagtataggggaatccgtcaacgcccttggggaaaatgggcagctgagattcgggatcctagaaagggggttcgtgtctggcttggaaccttcaacactgctgaagaagctgcaagagcttatgatgctgaagcacggaggattcgtggcaagaaagccaaggtgaattt

SEQ ID NO: 26740 - DNA, 1315 bp, Glycine max
  Clone ID: TF_GmC953_1
gcgtggtttgtatatcctcgaaaatgatgaatgaagcggctggtgaaccctaattagttgtcggtgtttgttggaagagctcatctctgttttcttcgtcatcttccccaaccagagatgcgccccacaacacatacttactaaagctttcaactttccaacaccctttcagatgttagccaaggcccataacaaaggggatggatctaagtccctggctaagatactggcaaaatggaaagaatataatgcccagattgattccagcagtgatgcggataagccaattcgcaaagttcctgccaaaggatcgaagaaggggtgcatgaaaggtaaaggggggccagagaactcacggtgtaactaccgaggtgtcaggcaaaggacttggggaaagtgggttgctgaaattcgagagccaaacagaggcaataggctttggctaggtactttccccactgccattggagctgcccttgcatatgatgaagcggccagggcaatgtacggttcctgtgcccgtctcaactttcccaatgtttcagtttccagtttctctgaagaatcttccaaagattctccgtctgcgaatcattgtggttcctcaatggcagtgtctgcaaacgagtccatgatttcacctagtaactctggggtagatgcagaagaggatgttgatatggagcccatttccttatccttaagtgtaaagcatgagaatggggaaggtgaatcggggataagttcatcccctccttcttcctcatgatgtacattgggacatggctaaattttttagcacatgtacttgttaatggttagcttagatttgatcacatttggtcctggagattagctgttgtaaaactaaaatgaactccgttgcaaaaatggtcaattcttttggccgcctaatttgcatggatatctgtctatttttaactcgttagggtgtgaatcatacttacctttgtcatgttacatgctctcttccctcacctctacatctccaaacccatttgttattgtctctatcttgcccggtttattttactgtgagaatgtggttttcttaattttaagagcttacatttctcatgtaagtttctatttacataacacttgacttgccatgcatgattgggttataggggatggaagcttttggaaataggaatagtctataggaaatctccatgggtctctagaggaacaaattaggaagtatttcagcacgtttggaaccgcgatgtgaactcatggtaactttaaagctagcctctggtgtggtgtagtaactttctgtaatcatgtt

SEQ ID NO: 26741 - DNA, 1150 bp, Glycine max
  Clone ID: TF_GmC768_1
tcctcacaacaatattgtttcatcactcagatcccttaaagatgacaacagcagaagaaacttcaaacttggatctcatacgccaacacctattaggggaaaatatcatctcagactcctcctttttctccaatctccttcatcatcctatgaaacttgaagcaccctcatcaccagaatttgatttcacctcatatatctcagacaacacaagctttttcactttccttgaaggctatgatttgatggcagacatgaaatttgttgattcagacaacaccatcccttcaaaggaggttaagaaatgcaatatttctcctgaaccattggtgtcatcaaaagagaagccaaagaagttagaatacgataaggcaaagcgttataggggagttagaagaaggccttggggaaaatttgctgctgaaatccgtgaccctacaaggaaagggacaagggtttggcttggaacctttgacagtgaaattgatgcagctaaggcctatgattgtgctgctttcaagatgagggggcagaaggctattctgaacttccctcttgaggctggactgtctgatcctaagcctaacagttgtggcaggaaaaggagaagagagagccatgatcatgaattggagctgccacaagtccaagttcatcatggtgtttcctgagaaaaagtgagaagatataataatagatttagttgttttgtgagtagcattaagtttgttgcctagaaaaataaggttgctttgccttttagtttgtacgtagaagcaaggctaatgtgaaatgtctatatgaatctatgcaaaaagcatgttacgaaagttttactaactttgaggagttttaaaaaaatattaatcatgttatgaaagttttactaacttttaggagttttagaaaaatattaatcagtttatgtttttttttaaccttcaatttatcagaaaattttttttctgactaatccaaaatttgattaggagatcaaataatctgataaaacattattttcactgaagataatcaatttatgtttgaagatacaccgaataaaatgaacaaacacattttcttttttgttgtttgtctctgtttttgagggaaacatgcaaattcttttcagttcaccttcacttttgtc

SEQ ID NO: 26742 - DNA, 1295 bp, Glycine max
  Clone ID: TF_GmC307_2
cctgttgaggactccgaactgcctgtctccgccgccgccgcaggcagtggaggcggtggcggcggaagctccttcccacgtgctcactgggtaggtgtcaaattttgtcaatcggaaacacccggcgccggaaaagcagtgaaagtgtcggagccgatgaagaaaagtcgccgaggaccacgctcgcgtagctcactttatcgaggagttactttctacagaagaactggtagatgggaatctcatatatgggattgtggaaagcaagtgtatctgggtctgtttgacaccgaaattgaagctgcaagggcatatgataaagcagcaataaaatgtaatggcaaggaggctgtcaccaattttgatcctagcatctatgatagtgagcttaattctgaatcctcaggaggtgtagctgcagatcacaatttggatttgagtttgggcaattccagctctaaacataacaatagtcaaacatcggggaatcacttcgcaaattctgcaaccgatcagcatatgccacctgaatctaattggcggaatgggggaagcaagcctaagctggtaaatatacttccaaaaccatgtggtagaagcaacatagaagcctatgggcacggtgagagtgaaaccttgaggttgctaagccaaactcaccttcaatccccaaccaataaagaaatgcacagatattgtccgtataggtcgccagcagagccacaaatgcctcacaatttcgcacatcatcttcaccaaccaagttttcatgttcctagcagcagcagcaaccgaggccgtattggaagcgatctttcgttatcaatgtccgatcaacaacaatggcaacaagccgggcctccacatttgttagcaactgctgcagcatcatcaggattcccacagcaaattagaccctcccaaggttggctgcagaaaaatgggttccactctctcatgagaccctcatgaccctcaagatattatttctaccatgccattttccatttgaaaaataatctccccctatttgttttgtgagcatgtatgtacgagtgaatgcagtttagattattgtttatgttatgtccaacctcccccttctttaggaaaagcccatacataactgtaactttactattgggtgaaagaatagggagagccaaattgggaactcactctggacttgttataggccagtcaaactaaccaacgtacgaaatctttaactagatactaagatattctgggctctgactaaagtttctgatcttatataactatgatttcctgcc

SEQ ID NO: 26743 - DNA, 1886 bp, Glycine max
  Clone ID: TF_GmC6126_21
ccacgcgtccgggaatctctctctctctctctctttctttccctttttcactttctcattcattcttattagtatttctatttcacttcaccaacccactccaccgtttcccctttccttccatgctattatggcttcatcttccatcaaacacactcaccaccttaaccgcacaaaactcttcatgaaagaagaaacccttttgaaaaagaagcatcactatcccaaaatcatacgaatacgtgtcaccgacgccgacgctaccgactcctccagcgacgacgacgagccctccatgtcctccacgcgccgcagagtaaaaaacttcgtcaacgaaattaccatccaaggcggcggcggtggtggtggcgacgttaacgttgtttctaagaaaagaagattcaagtccggtgccggagctccgttatgtcggcggaagacgggggcgaagaagttccggggagtgaggcagcggccatgggggaagtgggcggcggagataagagacccgtcgcgccgcgtccggctgtggctgggaacctacgacaccgccgaggaagctgccattgtgtacgacaacgcggccattcagctgcgtggcgccgacgcgctcaccaatttcataacgccgccgccggagaacagaaaaaccggttactgctccggcgaggagtctcgcaacaacgacgacttgcgttcccccacttcggttcttgggcgctgttcggtgtccgaggaagctgtaactgcaaacgacgtatttggaggctctagtgagtgcgagtattcatgcgtttcggagtcagtgtttcctattcctaacgaggtggtgtttgactttgaaagcacgttagatatgtttgatgaagggattaataatgttgtggcagagactagtatattcttggcggaggatttagatttgggttttacgagttggcatagagagtgtgataatttccaagacattgggggggatttgtttgtttgggatcctcttgtcgctctttgattgagacacagacaccattctctcgtctttgtaattctattgccaacgaaaatgggttgctatcagttttgtttcttttgggggtttaggcaaaaaccttgtgtctaaggagaggttttctaattttttattctagcagtatatgtttattaaccactagttgtaaaaccgtgcttcccacggtgttgccgtctttttgtttcttatataaaattatgtctcataaaaaaacccacgcgtccgtggttctatttgtttgatggccatcttgcacgtcctgatcttattgtgttcaagtgacagacaaatcagaacagggaagagagatttgaaatgtaaatgccaagtgaaagtgaaaagtacagtccagttttagtgatctctttaatttatttgttcatagattaatatgatggtgtatgattgcttttctatttattgtggcatttttgtgttgtaccctgttgttgtgtttgcaataagtattagtaataaagcagcaaattcaatttcaaaaaaaaaaaaaaaaaaaaaaaaaaaaaaaaaaaaaaaaaaaaaaaaaaaaaaaaaaaaaaaaaaaaaaaaaaaaattaaaaaaaaaacaaaaaaaaaaaaaaaaaaaaaaggggggggcccttttaagggatccaactttacgtcccgggccttgcaaggtaatagtttttttttggggcccccaaaatcaaattccggggccggggtttaacaacgccggacttggaaaacccttgggttaccccaatttaatcccttggaaaaaaatccccttttccccagttgggtaaataacaaaaaggccccccccattcccctttccaaaaatttgcccaccctaaaggggaaagggcacccc

SEQ ID NO: 26744 - DNA, 1135 bp, Glycine max
  Clone ID: TF_GmC320_2
ctcgagccgctcctattaagttttcagttctcacaaattaaaaaataaaaatattatatatacatatatatatatatatatattctcttcgagtccgtcgaaaaagaaaacaatggcgaaacccagcagcgaaaagccagaggagcatagcgattccaagtactacaaaggggtccgaaagagaaaatggggcaaatgggtatccgaaataagactacccaacagccgtcagaggatttggttgggatcctacgacacccccgagaaggccgcgcgtgccttcgacgcggcaatgttctgcttacgtggccgcaacgccaagtttaatttccccgacaacccacccgacatcgccggcggaacgtccatgacgccgtcgcagattcagatcgccgccgcacaattcgccaacgcggggccccacgagggacattcgggtcgacccgaacatcctcccatggaatctccatcgccttctgtttcggaagggaccatccaaacggacagtgacgtccccactcttaacggttcagtaacggatttgttcacgcccgttgggtcgagtggttacgcatccgattacgggattttcccgggctttgatgatttcagtggcgatttttatgtgccggaaatgccgaacgttaattatggagaagaaaacggggaagggttcatagttgatgaatctttcttgtggaatttttgaggggcaatcaaatccagtattcaccaccggccaaatgggttatggttcaggactacgagagaggcgtaaccaagtttaagaataaagtttttttatttatacatcaaatagtttattaaaattattattattttatttaaaatttatttttaaatataattttataatatttttttttaggtatattaatactaaaaaataaaatttaaaactatttttttagctaaagtccttacatggattgtttgatccttaagtcgatcctgtcattgttatggttgcagatagttttattgattctggaaccgtggtaatgatccgggtttgaattcgttaatttttggacgaccaaacctatatgattaatgagtttctatgatattgatatcgatgctactgtcaagattattgtttcattcaataatg

SEQ ID NO: 26745 - DNA, 2198 bp, Glycine max
  Clone ID: TF_GmC4678_2
cccacgcgtccgtacggctgcgagaagacgacagaaagggataccaaggtggaggcttacccagatgacaagcttagtgcgcgagtctctctcccttataacccttcttccacttccgtgtcttttacgagttagatttctcattcgtcatggaacaacacattcactctctctctctttagtgattttttcgatttgattgacaaacacaacgaaccaaagttaactactttagagagagagagagagagagagagagagagagagagagtggagagtgaaggaagaagagaaggaggagagagagaaacaacagcagcgacgaggaaggtggagggtgctgagagaagatacaaaggaataaggatgaggaagtggggcaagtgggtcgctgaaattagagaacccaataagcgttcaaggatttggctcggttcctattctacccctgtcgccgccgcacgtgcctacgacacggccgtcttttacctccggggaccctccgcacgcctcaacttcccggagcttctcgtcagagaaggcccggccgccctagtcgccggctgcgacatgtcagcggcttctattaggaagaaggccaccgaggtcggtgctagagtcgatgctcttcaggcaacccttcaccaccactacgtgcccccgcggcaacttctctctggcggtgatggtgggtccggggatttcccggtgcgggttgttgacctgaataagatgcctgaacccgagagttcggactgtgagtgggatgtgaattgaaggaaaaaaaagtacatgttttcttattcggttgctaagcgcgggttgaggcaaagtgatgttgttgatgaggcctatgggtggtgccgagtactgtactgtatcttattccttcaattttctctcttgggtcttggctagttttttttttttagatattacaaaagaaattttggcgttgtaaaaatatattaaatgtaaattaactagtccagtagccaaaccattttccataacttccgcccctgatgatgattaccttagcgttcacataaaaatacttggtgattggactcgaagtctgaaagccaaattcacacaggcgtgccagcaacccctcaatggacagagtggactcctaagagctgaatgcttgaaaggagataacagcccaagttcctttcctaaggttctggtggatggtccatatggggcgccagcgcaagactacagggagtatgaggtggtgttgctagtggggcttggaattggggctaccccaatgataagtatactaaaggacatggtgaacaattttaaggccattgatgaggaggagggaataggtggtgctaaatcaccaacgaggttgagtgacttcaagacaagtagggcatacttctactgggtgactagagagcagggttcatttgactggttcaaaggggtaatgaacgaagtggcagaagaggaccgaaggaaagtgattgaactccacagctactgcaccagcgtctacgaagagggtgatgctcgctctgctcttattgctatgttgcagtccctaaaccatgcaaagaatggagtggacattgtctctgggacacgagtcatgtctcactttgcaaaacccaattggcgcagtgtctacaagcgcattgcgcttaatcatccagatgcccgagttggggtattttactgtgggccatcagccctcacccatgagcttcgtcagctagcattggatttctctcacaacacatccaccaagtacgacttccataaagaaaatttctgacaagatcgagctaagccgtccaccacctagatcattccactttgttttttgcctataaataattaagtttctacatgtggttcttatttatggctttgtaaaagcaccaaggcaggtgggagctaaatggttaaaatagagttgcctaccaattataaaaggtgtggacgtctgttaatgtctctgcgtgtctttatgtccatgtaaatttaaggagaaataaccactccttggaaacaccttgggagaaactagaaagtaatacagaagagagaataatgtctagctggagcgcacttgatactttgtattaatccccgatgccttttagctgatcaattgcagaattcaggagattcatttataaatattataaataatttgtgcacccgcaatatttatt

SEQ ID NO: 26746 - DNA, 2355 bp, Glycine max
  Clone ID: TF_GmC1178_1
ggctcgaggttttcaaccagaccgtccttcgtcagttaactatgggctaatcacaattcaggaagcccaaaactattaaagtatgtatatctgctctctcttttttgtttgtttcccgactgagcatagtcattcaactcaaagatgatcactgttctctaatctcaaaatcaaaaaggaaaccgacaacacaaaggatttgcagaaagtgcagctacttagttccattttcatcctctctccattaactttcagtcaaaacaaaacaaaacctctttaggtgtgaaattccacgtgccaaaatcatctccgaggcaccaacatcggcagccacatatttctttatttattggtacagtattgtttttttcttcttcttcttcttcatttttcattaacatatatttctttttcgaagaatcaaaggtagaatctacaatattaaaaaaaactgtataagaaattaaaggtagtggtagtggagtgtgtgtgtgtgtgttaattatgtgtatgcatggtggaagctagagtaatagaggcgcaacatggtcactgtttctgtgggggctatagccagcttctcatcatgttcgatttctcttattcttacccatcttcttatatataaatatttataataacgtgtttcagtttctttctcagaaggaatcagtatataaaacacctgctttctaacggtggcgcaccagaggggtttaggttcaggttcggggaagttcttcgcggcggagcaaggcggcgatgaggaagcggaagagagtactgaggtaggttctgttccgagccatgtggtgtcagcctctgcagcttcggcccaaaccaatcagtgggtgccgcggggaagtggttttcccatgatgtcacgttttatgcatgcgccttctcccgttctgtcttcttcgcatcctcatttgggagttggccacaagagagagcgtgaagatgacactggcgctggtgcgagtggaggtgttgctattgcagcagcttcttcacaaacgcaaacacaagagattgaaagtgctggcggcgacaggaggaggagatacaggggagtgaggcagaggccgtgggggaaatgggcggcagagattcgcgatcctcacaaagcggcgagagtgtggcttgggacattcgacactgccgaggctgcggccagagcctacgatgaagccgcattgaggttcagaggtaacagagcaaaacttaatttccccgaaaacgttgtaccggttccacctcctcctccggttcccgatttaccggcaagtgcggtagccggttccgattccatttccggttccggttcagtggtggcaggtttttcgccgacgctgatgcagggagcgccgtttcagggctcctctgcttttctgagagattattgggggtattctcagctgctgaggagtacaggggacttccatggactcgaccagtggttctttgattctcaaatggcagcgtttcaatcttcttcatcgtcgttgttgccatcgccgccgccgccgtcgttttcgccttcctctgcttcgtatcctctgttttcttccagccagcaaatggggattttccggccgccgggagagcagggtcatggcggagaagacggtggtagtgggtcagagttttcggagcttccaccttcgacgtggtcagataccagtggctatcctcctccaccacctggttgacatggaatacacatttttttctttattctattttttctctttctttggttaaagaaagaacaaggctttcttctgtttatttattttaatttatctgtttttgcttttttagattatttggagtccagttcactgaatttttatgtggttttgggttaaactgttactatttgctgctgttatttgaataaatactatttgaagagtagggagtagggaatgggaggttggaggatgcatgataaaggctttaagcctttgaggtagatacgaatggagtttaagtggtacgaggcagcactttgaagaattgtttagagataaagacaaagcagtacttaggttggaagctgagtttattccagattatcaactcaatggatttgatgttaacattttgtcaacaatccacgcaaaggtgaagaaaccaatatcttttataaaacctgttcccaataaaccaacttttttattaaggaatgaggattgagggatgtatttagaagatataatactaatttagtgtgatatgcataattttggtttttaagctggtgttaattgtttggtaagtgtattaaaatgtctaaatagtaatatttggaagtttgagtctagtactgtcaataattaaactcgt

SEQ ID NO: 26747 - DNA, 1455 bp, Glycine max
  Clone ID: TF_GmC1178_2
gttttcaaccagaccgtccttcgtcagttaactatgggctaatcacaattcaggaagcccaaaactattaaagaaaccgacaacacaaaggatttgcagaaagtgcagctacttagttccattttcatcctctctccattaactttcagtcaaaacaaaacaaaacctctttaggtgtgaaattccacgtgccaaaatcatctccgaggcaccaacatcggcagccacatatttctttatttattgaaggaatcagtatataaaacacctgctttctaacggtggcgcaccagaggggtttaggttcaggttcggggaagttcttcgcggcggagcaaggcggcgatgaggaagcggaagagagtactgaggtaggttctgttccgagccatgtggtgtcagcctctgcagcttcggcccaaaccaatcagtgggtgccgcggggaagtggttttcccatgatgtcacgttttatgcatgcgccttctcccgttctgtcttcttcgcatcctcatttgggagttggccacaagagagagcgtgaagatgacactggcgctggtgcgagtggaggtgttgctattgcagcagcttcttcacaaacgcaaacacaagagattgaaagtgctggcggcgacaggaggaggagatacaggggagtgaggcagaggccgtgggggaaatgggcggcagagattcgcgatcctcacaaagcggcgagagtgtggcttgggacattcgacactgccgaggctgcggccagagcctacgatgaagccgcattgaggttcagaggtaacagagcaaaacttaatttccccgaaaacgttgtaccggttccacctcctcctccggttcccgatttaccggcaagtgcggtagccggttccgattccatttccggttccggttcagtggtggcaggtttttcgccgacgctgatgcagggagcgccgtttcagggctcctctgcttttctgagagattattgggggtattctcagctgctgaggagtacaggggacttccatggactcgaccagtggttctttgattctcaaatggcagcgtttcaatcttcttcatcgtcgttgttgccatcgccgccgccgccgtcgttttcgccttcctctgcttcgtatcctctgttttcttccagccagcaaatggggattttccggccgccgggagagcagggtcatggcggagaagacggtggtagtgggtcagagttttcggagcttccaccttcgacgtggtcagataccagtggctatcctcctccaccacctggttgacatggaatacacatttttttctttattctattttttctctttctttggttaaagaaagaacaaggctttcttctgtttatttattttaatttatctgtttttgcttttttagattatttggagtccagttcactgaatttttatgtggttttgggtt

SEQ ID NO: 26748 - DNA, 409 bp, Glycine max
  Clone ID: TF_jC-gmst02400023c03a1
ggctcgagcacagcaaaggttggttacggctggctgtgttgtagctgtgaagtgtgccatgagggagaggattaaccattctcgtggaatccgtcagtgttcatggggaaagtgggctgctgagatccgtgacccatgaaagggggttcgcgttaggcttggaactttcaactctgctgaagaagctgcaagagcttatgatgctgctgctgggaggttcctgggcaagagagccaatgtgaatctcactgatgagcctgttggcgctgctgtttatgtgtaacgcctcaaggagaatgcagaagctgagtcaatgaaagaaaatctgaataccgtgaagccgaatatgaaccagatgctcaattctggtcacaatctgcagggctactacagcccagtagatcatgtg

SEQ ID NO: 26749 - DNA, 1116 bp, Glycine max
  Clone ID: TF_GmC1169_1
caattaacaaactctaacaacatcatggtgcaatcaaagaagttcagaggtgtcaggcaacgccattggggttcatgggtatccgaaattcgccacccgcttctgaagagaagggtgtggctagggacatttgaaacagcagaagaagctgctagagcctatgatcaagctgcgattctgatgagtgggagaaatgccaagaccaatttcccaataactcaaactccagaaggtgatccaaagagcactaccagtgaggacactccctccaccacctcgaaggatctggaggaaatcttacatgcaaagcttcgaaaatgtgggaaggtaccttcaccttctatgacttgtttgaggcttgacccggagaactcccacatcggagtgtggcaaaaacgtgctgggaggcgttctgattcaaattgggtcatgacggttcaactgggaaagaagagtgttaatgttaataataatgacactcatcatcaagctgatagtagcagtagtagttctctttcttcttctctaccttcttctgaacatcaccacattgagtctccatcactggctgtgacaggtaatcttcatcatcaagaagttgtgagaggagagattgacgaagaggagagaattgcccttcagatgattgaggaactcctcaacgacagaaactgccctagcccatcatttaacaacaacattcaagaaagggatggtgctgatcatgaccacttttttctttaagcttcttttttccacacagcgttatggtattcacatgcatgtttaatcttcatcttcaacaagggttgtcattatttgggaaaaaaagggaagtggtagttataggctaattatatataaccacatcatatctatcatatcatatctgttttcatgtatgtcatatttattataagtgtagataatatatatatacacatacatattacatgcatgcataggaaaatatacataagaaaataagagagatgtatacagaatattattttcagagttcatatgtaaaggccctatcgtctgctgcttgtttgaaacgttcatggtttatttatcataaataataaatatattttcagttaaaaaaaaaaaaaa

SEQ ID NO: 26750 - DNA, 725 bp, Glycine max
  Clone ID: TF_GmC1487_1
gtaggactctgcggctcgagatacactgtgaatggaccatcaacctccaccgtgccccgccgccgcctccgcaacggacaaccctcgtggcggaacgcgccaccccatgtaccgcggcgtccgcaagcgccggtggggcaaatgggtctccgaaatccgggagccacggaagaagaaccgcatatggttggggtcgtttccggtgccggagatggcggcacgagcatacgacgtcgcagcctactgcctcaaaggccggaaggcgcagctcaactttcccgacgacgtcgactccctgccgcttccgtcgtcccgcacggcaagagacattcagaccgccgcggcccaggcggcgcgtatgatgaaagcttccggcaatgatgagaaaagcggcattgcctccgacgacggcgatagcggttgcgatgatttttggggcgagattgagttgccagagctgatggacggcgagtgctgctggggttgtccggccggcgcttcctcctggacttcctccggcgatctcgccgagtggccggaggaggagctttcgccgcagcaaccgtcgtttatggcatgtctataatctactgtatctctgtattaatgctgcatgttcagttgtcgttggtatgtttcttgtattatatatcctattcctaatgttatatcctatgtgccaactgttcctgttgtcataaataatattaatagttattatcagt

SEQ ID NO: 26751 - DNA, 817 bp, Glycine max
  Clone ID: TF_GmC16307_1
aattcggctcgagcgacagaagggggtcaacactgaattcaaaatcactttcgaccatattctcttcttcttctctctctccatcatggtgcaaacaaggaagttcagaggtgtcaggcagcgccattggggttcatgggtatcggaaattcgccacccttttctcaagaggagggtgtggctaggcacgttcgaaacagcagaagaagcggcacgagcttacgaccaagccgcgatattgatgagcgggcgtaacgcgaaaaccaatttcccaatactccaaaccccggagggtgacccaaagacgacgctaacacccatcgatcacgagacctcatcatcgtcgacgaccacctcgaaggaactggaagagattcttcacgccaagctccgaaagtgcgggaagcttccgtccccttccatgacctgcctgaggctcgaccccgagaattctcacatcggagtgtggcagaagcgcgccggccagcgttccgattccaactgggtcatgatggttcctcccctcggaaaaaaaggtggtgctaatgaaggaggtactggaggagatgcttcttgttctaactcctttccgttctccgagtgcgatccgaccccgcaagtggcaaggcaggagcttctgaggacggagatggacgaggaagaaagaattgcgctgcaaatgatagaagaactcctcagcaggaactgccccactagcccttcattcaataacttatattaattaagggaaatgtttcctgaagaaggataattctattcagtttctttaagggtctttagagataaattatgctgg

SEQ ID NO: 26752 - DNA, 876 bp, Glycine max
  Clone ID: TF_GmC1010_1
cgaaagcacggggtgcggctcgagcttcattcattctttatggatcaagaaacaacaagaagaaacaccatgcaagaatgtcatgtgatagccccaacaacaacaacggcaacatcatcgtatcgtggagttcgtcagcgaaaatggggcaaatgggtgtccgaaatccgtgagcctggaaagaagagcagaatatggttagggagctatgagtcaccagagatggctgcagcagcatatgacgtggcagcgttacaccttcggggacgagctgcaagactcaatttccccgaattagttgagacgctgccacgtccaacgagttcgaaacccgaagatgtccaagtggcagcacaacaagcggcggtgatgttcagaatatcaccaacaatgtcacctattaacaatcatcaaggatgtgtcaatgacaataacattattaagggtagtgtggttcctgtgagagtgggactctcacccacacaaattcaggccatcaatgagtccccattggactcaccaaagatgtggatggtgcaaatggcagaggcactcaggtttggtttcgatgatcactctatgatgatgctgccttctgatgatgatgattatgctttggagttgagtggatgggaagaaatacagcatgaatctttatgggactctccagaatatatgtaattaattacgtaactattaattaataatcaatgtacccttgatttagggcattatatattacatatgattaaagaatcatgtggttttagtgagactgattcaatgaagcaaaaggattaataaattatatatttgtaaattgcgtacagtatttcatgacccatttgtttctccaattgatttgtgtatgtgtct

SEQ ID NO: 26753 - DNA, 1082 bp, Glycine max
  Clone ID: TF_GmC56_2
caaaggtgttcggatgcggaaatggggcaaatgggccgcggagattcgtgaccctttcaagggcacgcgaatctggttgggcactttcagcactgcagaagaggcttctcaagcctatgagaccagaaggcttgagtttgaggtcatggccaaggctctatctgatgagaagagcaacaatggcagcagcaacaacaatgttgttgcttctgctgaaactgaaactgtggctgcccctgaaaataacagttcaaactattatgtttcttctgctgcaggttctgtatcagactccaagtctgcttttatggatgaatcagagagtgtgttgtcacacacatcaccatcttctgtgcttgaattggatacatctgcttccaatttgattgggagtggtaaggtttcaagcaatgaaattgttgagactaaagggttggaggccgaagttgctgagactaaaagtttggcagctgaatttgccgagctggaaatccaagatttgagtatgctgaatgtaccatccccatctgctgttgctgctgctacgtctgagtatgaattggatttgttggcatttgacagtttcaaatatggatttgattatgaacatggctttgatgatgattttgctgccctggaagacattcacatttgcagttttgatgataatgagcctagcgagcttcctgattacgattttgatgactttggtgctgatgagtttgctggttggattgaagaacccctcaatataccttgcgtatagattttgcagctacataggaatgagttctatccaagagaattacaagttttgtgtcattgcttaaaaatgctctacagttttgtgagatctcaggaaaaaactagttcctgggggtgttgttttgttttaatttatttgtttctttagggagatggaagatcaatgagaggttaagagagaatgccttggttttccttgtgctattagagccgtccaagggtttttcaatttctattatcatgaaagttctgagtgtgtagaagtctatcaaacttgaattctattatctttatgaaaaattctatggtatccttgg

SEQ ID NO: 26754 - DNA, 458 bp, Glycine max
  Clone ID: TF_17963946
gcatcttgaaagcagctctatcataagctaaacctgcttcttcttcagtctcataagtcccaagccaaacccttccacctttgctctttgggacccatatctccgccgcgaactttccccacggcctccgcctcacgccccggtaatgcttccataccggatgcgtgtgaaattcacgcgcgtccacatgctgttcacttttgcatgaaaataaaccctttgagtcgtggacaccttccaagcagatttcgtggttggagacattggagatagtgttggaatcattttcatgctctagaagatagtgttgaacagattccaatggagaaagatcgcaatatattgtattattctccatgttaattagtttaatttggaatacaatagcgagggtagtgtgtttttcttttggagagtaactttgcggttgattgaatttctttttctttttctttttt

SEQ ID NO: 26755 - DNA, 1396 bp, Glycine max
  Clone ID: TF_GmC25_6
ggctcgaggttttgttaatgggctcgctatgtgttttggggaatgcgaaggtgtatgtgtttccggagctaaaacaacatgttttttgtcattctgaatatgagggaagaggacgaggaaagttttgggagaaccttaattaagggaattgagaaatttgaggcagctgttcgacaagttcagggaaacatactgagtggggaggaagcatttgtcttgtgggatacatatgggtttccattagatctcactcagcttatggctgacgaaaagggattagtttgcgatgggggccgcaaacgcagccaaaacaacaactaacgacaaagattcttccccaacacaagggaaaaccggagcaacaaaaaaagtaacacacacgcacacacgcatcatcgtataacatttgttttattttttttaaagagcgagtgttgtaacaaatggtgaagtcgaagagcgtggagaaacctgcggaggaacaacaacgaggtggtgtttcagcgtacagaggagtacggaagaggaagtgggggaagtacgtgtcggaaattaggctgcccaacagccgtcaaaggatttggttgggttcctacgacagcgccgaaaaggcggcgcgtgcattcgacgcggccatgttctgcttacgtggcagcggtgccaactttaatttcccgagcgaccggcccaacatcgctggcgggaggaacatgacgccctcgcagattcagatcgccgcggcgcgtttcgccaattcggagccccgaaaggagtgttcgggtaaacccgtggagtctttgacttcgattgaggaaacgacgtcgtttccagtaaattcggatacggatacatcttctcctctatcagtagtgacgatccaaaacgacaccgaagtagcaaccgggtcgtttccgggtatattttcgggtttcgggtcgggtaatttcgtccccgaattctccgattttccgagcttcgatgatttcggccacgatttcttcgtgcatgagcttccgggtttcgattacggagaagagaacttggatgggttgataattcaggactcgttcctgtggaatttctaagcgggtcggggttaggataattttattatatcccaaccgtgtttagaattcggatcggatccggatttgggttggtcaatttttgtgagaccatgccctctgtgttagtagttagtgatggtaatgttttttttatgtacctagtagtcaaggtttcgattttttgggatgagaatcataatttatttatttgtcatgactcatgtcattaattgtaaagttgtctgctgatagtgtaattttcttttggccattcattcaattataaaaatgataagatattttcgtctggataaaggttttaaacaacc

SEQ ID NO: 26756 - DNA, 634 bp, Glycine max
  unsure (1)..(634): unsure at all n locations
  Clone ID: TF_jC-gmXLIB3563P071cf05a2
cggctcgagcggctcgagcggctcgagcggctcgagctcgagccgaatcggctcgagcggctcgagctaacgacaaagattcttccccaacacaagggaaaaccggagcaacaaaaaaagtaacacacacgcacacacgcatcatcgtataacatttgttttattttttttaaagagcgagtgttgtaacaaatggtgaagtcgaagagcgtggagaaacctgcggaggaacaacaacgaggtggtgtttcagcgtacagaggagtacggaagaggaagtgggggaagtacgtgtcggaaattaggctgcccaacagccgtcaaaggatttggttgggttcctacgacagcgccgaaaaggcggcgcgtgcattcgacgcggccatgttctgcttacgtggcagcggtgccaactttaatttcccgagcgaccggcccaacatcgctggcgggaggaacatgacgccctcgcagattcagatcgccgcggcgcgtttcgccaattcggagccccgaaaggagtgttcgggtaaacccgtggnagtcttgacttcgattgangaaacgacgtcgtttccagtaaattcggatacggatacatcttctcctctatcagtagtgacgatccaaaacg

SEQ ID NO: 26757 - DNA, 527 bp, Glycine max
  Clone ID: TF_GmC786295_1
gcacgagggtgaagtaccgtggagtgagaaagaggccatggggtaagttcggagcagagatcagagacccaacaaaacctacgggaaggcaatggttagggacatttgacactgctgaagaagctgctagagcttatgatcgtgcagccattgctttgaggggtgctcttgcaatccttaattttcctcatgagttccattctcatctcccttttatattatcaaattcttccactaagggaaatggaagttcttttgataaggaagttattgagttagagtatttggatgacaaggtgttggaagagcttcttgagttagaagagaagagaaggagtaacgaagactaagatcactggagtactattcattgttttgagatccccggccccttttattttctctagctctccacttgtattaatatctgaacttatgatttagggttcagattgatttccaaaaatcttccccacccattgattgaattaaattgtgtatgcttcaaaaatcttacaattaatgca

SEQ ID NO: 26758 - DNA, 1151 bp, Glycine max
  Clone ID: TF_GmC700_1
cggctcaaacattaagtactgttccttaacaaaaaaaaaaaacagaatggctgagctacctagctcagaagcatcgtcatcatccgcttccagtcggaagcactcgtcttcggaggcccatttacccgccccggatcagaaaaggcccaagcaggcccgagatagcagcagcaagcaccccgtctacagaggggtccgaatgcgggcctggggaaagtgggtatccgaaatacgcgagcccagaaagaagaaccggatctggctcggaacctttgccaccgccgagatggccgcacgtgcgcacgacgtggcggcgctcgccatcaaaggcaactccgccattctcaacttcccagaactcgcggcctcccttccccgacccgactccaactcgccaagagacgttcaggccgccgccgccaaagccgccgccatggaggttaacgatgttccgacgacgccttcgtcttcgtcgtcgtcggcgtctctgtcgctatcgcaatcgtcatcttggtcttcattggcggtttcttcttcctccggcgatggcccgtcgacgccggaggagctgggggagatagtggagctgccgagtctggggacgagtttcgaaatacccgacccgagtggggagttggtgtatttggacccgtggccgtattctcaggcgtggagtcacggcatttatgatgagagtgaggggtattttattggggactctgagactgagagcatgatactttgtggcttcgagggttcattgtggcagcattaatgcttgtgctttccttttttttctttttttgtcttattgactttccaatgtgtgagagccctttcccaatttttcacttcaagggctgctaaatacattactactactactactactactactgttgtttcccccccttaggtttctcaatgtcatcctccttctccttccgcgtgttgcacaacacgacaggtatgcctgccatcctcctcaatattcaatgtcttgtttcatgtaatcaatgtaatgcaaatgatttatgctcaattcccatatacgtgtagaaatcctacgtctatcatatttattattattaactattctactttttattcactggactaaataaaactttaacttgattctctaaaaaaaa

SEQ ID NO: 26759 - DNA, 307 bp, Glycine max
  Clone ID: TF_GmC250_3
ggctcgagcataaatttccctttaagcacttatgagaaggaacttgaagagatgaagcacatgaccaggcaagaatttgtcgccaatttaagaaggaagagcagcggattttcaagaggggcatctgtgtatagaggtgtgacaagacaccatcaacatggaaggtggcaggcccgaataggaagggttgcaggaaacaagacacaccctttaggagagacccacaacatatcaatcccgcatgattatatgactatgatacaccttcagaggggtgaaaaaagaaatggaaaatataaataaatag

SEQ ID NO: 26760 - DNA, 989 bp, Glycine max
  Clone ID: TF_GmC1715_1
ccagcgtcctcccccacgcgtccgtaaaaaacagagcaactactcaattcttcactctgtttccccttaccttacacactctaacacatggattcaccttcctccttcttcaactcaccctcttccggtttctgctccgaatcttcctctccggaagccttctcgtgggaagggtacctacccttcaacgagaacgacccggaggagatgcttctatacggcatgatcgccggcgcgacaaccgaggagcactccggcgagagggcgagctcggaggagagtgctgcagcacggaaggagaagtcgtaccgcggcgtacggcggcggccgtgggggaagttcgcggcggagataagggactccacgcgccacgggatgagggtgtggctggggacattcgacagcgccgaagccgcggctctggcttacgaccaagccgcgttctccatgcgcggctcggcggcgattctcaacttccccgcggagatcgttagagagtcgcttaaagagatgaactacgctcatgatgattccaacaacgaagaagggtgctcccctgttgtcgctctcaagaggaaacactctttgagaaggaaaattaacgtcaggaagaagaagaacaacaataacaatagcaaactacaaagtagtaccgtagacaatgctgtcgtgtttgaagaccttggtcctgattacttggaacagctgttgatgtcctctgatcatcatattcccaccaccttctgattcatttattcctcaattgcaattcagatctcaaaaaccttataaatatccattgcatagtttctacctagggtttttgtgttagtagtgttaattccttcttcttctttgttcttttgtttttgtaaggctaaaatgcttaggtcatgtttggatgacagatttgaacttcttttcagttcttatctttttttctttgtttttgtttttgttttcctactctgggagaattttcttcttta

SEQ ID NO: 26761 - DNA, 1913 bp, Glycine max
  Clone ID: TF_GmC158_1
cgacccacgcgtccgtacggctgcgagaagacgacagaagggaaacggacctcggccgtgaacaagagggctttaagagaagacggcggcggtggtggcggcggcggagcgatgaggtaccgcggcgtgaggcgcaggccgtgggggcgttacgcggcggagataagggaccctcaatcgaaggagcggcgatggctgggaaccttcgacacggcggaggaagccgcttgcgcctacgactgcgctgctagagccatgaggggtctcaaagctcgcaccaacttcgtttacccaacttctccgcaaccttcttccgccaccaccgaacacttgttccctaacttcaacaacaacaacaactttcacaaacactcactcttcaatcaccaccgtaaccgccacataaccggttccaacacttgttttgaccaccctcactccgttgacttttcagcccctcgaaacccttcttctctcaacatgcttctctttcgtgaccttattcactctaacccttctttgctttcttcttcttccactcagaacttccacgaccagttttacaacaagagtacttctactttttcatcgttacctgtttctccttctcttgctccccctagttattcgatgaataattcttgtggaggctctttgtctgttaagatgaacacgtttcccacttgtggaactaattttgctgaaaaaggtgatgatggtgatggttttttctctcgtgagtcttcggattcggggttgttggaggagatagttaacaagttcttgcctagaacgaagcctagtaaatgcgagactacttttgcaaatcctcaggaggagtcgcttcttctccctccgcttgtttctgaatcaacgcttgtttccaccgggcaacaatactatgatgatgacatgaaaaaagggtttccaaagaacgagggtctaggtgttttttattctgatcaaggttttcccatgcagcaattcgacacctctaatgggtttaatagcatggctatggagaatgatcaaaacattattaataatgcagagaactgtgtcgttgaagatgtttttcagtaccaagagcttcttaatgctttcgcaatcagaatgcaaaatgcttaattagttaacatttccagtgtctgcatctcaatgctagttgtgtatgtagtcatgttgaatctgtcacttctcaatgttggtctggcctttcaattagaaacttattaatcattagggcctttgttcctaggtttaattaaccaggttattttgttcgtgcttactatgtagtattatgcccctctggcttccttccagtagtattatgtatggaactatggataatttgaaagcaatatatttttagtattggtattttgggtaacctttgaaattgtcatgtttataattgtttttggttaagcacgcctttgcccttttcactatatgttttctttatgatatatggacattcattttttaaacacctaataactattttttattttttatacgtgaaatcatattatctataacatttatgttttttttttatttctgagtgttaggtattcattaacatattgggtatttatcgataatttttgttttgtttttctactctgaaaaagggattaatgagaaccacgcactcagagtgaatttgtttttgctagatgacgatagcttttgcgttgactttggaaatagaaaattagtcttgcgttgcacaataccttttttctgctttgtatggatctatatattcttccttctgtttggagaacgtattggtctggtttcaatagtgcctggttggtgttgtccttttcttcttagtattttgttgtggtattgtgaaaaaaaaaaaaaaaaaaaaaaaaaaaagcggccgctctagagga

SEQ ID NO: 26762 - DNA, 1812 bp, Glycine max
  Clone ID: TF_GmC189492_1
cccacgcgtccgctctacctcccactctcacaatccctctctctctttctatcttcactccggctattacttattagcataactctcttttgctctgccttcccgccaaaacccttctctgtgatcaccaaggattcaaggttgagcgttgaattcttgaaccttgttgttgttgttgttgttgatgtgagtggagtgagatttcacttgaagcgcatccaaagttggccatattctcttctctctttctctctctctcttggaatatatctctagagacgaaaagcaaaagttgttacccataaaacatcttggtttttctttctgcttcaccaccaccaaaagtgtttccaaacgtctcaattccccccagcatatacatctacttgtccacttttcccccataccctctaaattcttctcttactctttaaaccccacccttcatgcactccagccaacaccatcacacaacaaccttccctcttccctctctcactcaaacaaaaacatccttaaccactccaaaaacactcttttaggcatgtccgtacacgcaaaactgaagcaccaccccatgaacctagcatccccaagttcccattttgaggacgacccaccatgcaaaaccaagaccaaaacccaaaggaggctccttcggatcataatcaccgaccatgacgccaccgattctgactcctccgacgaagaacaacagcagcagcaacaaaaaacaagaagagtgaacagagaaatcacccaaatcaacatgcaacttcctctatcacataatagttccttttccccttcatcttcttattactcttcagcttccacctcatcggaacaaaacctaaagtgcaagagacccaacaaaaagccgccaccttcctccgccgaggcccgccgccgcaacaagttccgcggcgtccggcagcggccgtgggggcggtgggcggccgagatccgcgaccccacccgccggaaacgcctctggctcggaaccttcgacacggcggaggaagccgccacggagtacgacagagccgccgtcaaactcaagggccccaacgccgtcaccaacttccccctcgcgccggaggctacggcgcagtctccaccgctcgccgcggacaacctcagctccgacggcggcgcgtcgtactcggacctagtggcctcgccgacgtccgtcttggcctacgagtgcgactcgacgccgttcgacggtttccgttatctcgacgttgacgcgttcgggttccacatcgacgcgccgttaagtttgccggaagttaacgttaacgttgcgctgacgtgtcatcacgggaagaagcaggaggaggcgtttgatgaattcgatctggacgagttcatgacgtggccttactagtgataaaaatctcagggacagtttggtaaattacaccctgtttgcattgcggaagtgtgagttggaaatcccgaaattgcccccctccccctctcgttgtccaagtttgaaattttgtcgtactcgttggagctttggaagagtgtagagttgttggtacaaaattttatgtagtcgcattttactaccacctgaaacggcgattctttgtgtcgtatttggtagagtttaatttgtagttattatcatgaaaagaagaaaaaaaaaatgaagtgtcaaaactagtgagtgagaaaaggagaaaaggaaagatggtgttatttgagaaggaaggactatattgtaatttcggtatataaattttgataattatttaaagaaactttggtattgtctatatatagatcatgggttaactt

SEQ ID NO: 26763 - DNA, 527 bp, Glycine max
  Clone ID: TF_17153962
caacttcctcggtgtctcatggttcaggtagtgttgtggaagcagaggtttcggtttcgtacagaggggttcgaaggaggccctgggggaagtttgcggcggagataagggactctacgaggaacggagtgagggtttggttgggaaccttcgacactgccgaggctgctgcgttggcttacgaccaggccgcgctggtcatgagagggtccatggcagtgttgaacttcccagctgagattgttcgccaatcgcttcggaacatggagcagtacggtagtttccaagaaggctcttctccagttctggagttgaagaagaggcactccatgaagagaaaatcagagaccaagaagcaccaactccacgatgtgatggtgttggaggacttaggggcagagtatttggaacaccttcttactctctcccaggatatggatatggatgcttgttagttaagttacatttacctccttcgtcaaaccttgcctttcccatccccaccactttcttttctctctctatca

SEQ ID NO: 26764 - DNA, 1904 bp, Glycine max
  Clone ID: TF_GmC6617_1
ctgaactcttgttcttctttaccgattcaacaacagctcagcagtggtagtacccatgagcctgcagaatctgcactttttttgccttggcttctattctctcctcactttgaatcggaagatatcctttccattcaaggcagcaagcagaagtttcaacgaaagtctcctctcccacacagctactatcttctcaacactattggaatcaccatcatctgaataattcccttttttctttctctttctctcacacacccccatgatgtcaaaagttgttattttctctttattcctatcatcagtcccgaccatgtcttaacagctctttttcttctttaccgattcaacaacagctcaggattctctctccctctcaccctcttatttccaaaccattcccctatttgggttcattttgtcttacatttgaataagaaacgcaatttggaagacagtatcctatgcaaacacacagtgcatagcaccgtcaccaagaaactcatctcccccaaaaaatcatcccaaaccaattcatcgacagagcgcacaatagtgcggatttcatacactgatccagacgcaaccgactcctccagcgacgaggaaggtttccccttggttcgccaaagaatgaagcgctatgttaaccagattgaaatagaaaccgctttcgccgaaaaagttgttcggaaaaggcccgccggtgagccttgccgccgaccggcgaagcttcactccgggaagaagttccgcggcgtccggcagcgaccgtgggggaaatgggcggcggagattcgagatccggcgagaagagtgcgtctctggttgggaacctacgacaccgccgaagaagctgccatggtctacgacaatgccgctattcgtcttcgtggccctgacgcgttaacaaacttcgtaacgccacctcaaagagattctccgtctccgtctccaccgccggcggcggcggagactccggcggaggtttgcgacatgaaggttgtggtcaccgaagaagcctccggctccggctacgactccagcgaggatcattgccaccacaacctctcctctccgacttcggttctccagttccgaagcaactcgagcgaagaaaattccgagtctcagcagaaagcagaacaagtgttgagagaatgcgagggtgagacagaaacgagtttgttcgaggaaacgggtgagtttttggcgctggataacatgcctttgcctgcctgggatgacgtgttcaatttcgaaacgccagagtaccctcctcttctgtttcaagaggaggagaatctgaatctacttcatcagtcccagatgttgggcgaaacggtgcagttttcctcggaggaagggttcagtgatgaaagcagtatcatgctggccgactcgctcatagatttcgacagagcctgcccttcaccatcctccttgtgccaagtggacgatttcttccaagacattttgtttgcttctgatcctctcgttctgctctgaacactcttaaaacttactaaactgtcattcgttaatcgtcaatcgtccacttcacggcttgcccaatattcatggcagatttttgcttccggtggtaaaaaaaaaatgcctagtttctatttaattaaaatactatatatatatatatatatatatatatatatatatatatatatatatagttttatttgcgtatttatttagatgttttagatgctccgttacaaatagctaacggggggatgagttgagaacttgtgagcgaagttttgtttaaattttagttatatttgtaatctttttgcttaataagtaggatcgtacgttgagacttgagaatgtaatgtatatttgtccagatgttaatctaagtgtaatggcgttcttttctttac

SEQ ID NO: 26765 - DNA, 547 bp, Glycine max
  unsure (1)..(547): unsure at all n locations
  Clone ID: TF_jC-gmro02910014e07a1
ggctcgagccaaaactaaaactaaaggagttagaaacatcaagagagtcactgacaaccaacctggcatgccaagtcctaacttcattctttgttaatttctttcccttccatccactcctctctatcttcttactatctcaccttaccaaaacaaattgtttactttcattcacgtccaaaacttgaacatgaaaccctacacgtcatcaccatcatcctccaagtccaaaaagaagccaacaacaacacaacaagatcatgaaacagcatggggaggaaggtaccttggagtgaggaggaggccatggggaaggtatgcggccgaaattcgcgacccttccactaaggaaagacattggttgggcacgtttgataccgcagaagaggccgccctagcatatgataaggcggcccgctccatgcggngctcacgtgctcgaaccaacttcatctatccggatactcctccgggttcttctgtcacctccatcctctctccagacgagcaaacccaaacccaaatccaccaggcccaagaagagctc

SEQ ID NO: 26766 - DNA, 1188 bp, Glycine max
  Clone ID: TF_GmC250_1
gccattggattttcaagaggggcatctgtgtatagaggtgtgacaagacaccatcaacatggaaggtggcaggcccgaataggaagggttgcaggaaacaaggacttgtatcttggtacatttagcacacaagaagaagctgctgaagcatatgatatagcagcaatcaagttcagaggaacaagtgctgtgaccaactttgacataagtaggtatgatgtgaagagaatctgctcaagctccactcttattgcaggagatcttgcaaaacggtctcctaaagaatcaccagctccggttcctgcctctgacttcaattcgtgcggttcatcgccgatgccgctggtgtctcagccacctcctttggctataactgatggtgaacattctgatgagttgtccaacatgatgtggaatgccaacaacagtgatgagcaagcacagaatgagagtggtggtgctgaattcaacaacaatgtaactgaatcatcatcatcacaacaggtttcaccaagcagcaacaaggatgctttgaaccctcaaagccccaatgagtttggagtcagtggagcagattatggacatggctacttcacccttgatggaccaaaatatgatgatgggaacaatgaaaatgaccacatgagcaccaacaggcttggaaatttgggattggttaatcaagttcccatgtttgctttgtggaatgaatgaagggaatgttatgttgatgagttgagattacaaaaaacattagcttaggaaaaaaaactaagatcagatggcagaattattgaatgattattatattgtagcttggtatggtaactttttattttatgttgaaagaaaggggatatgtcagtagtgctgattcctgaagtaaaaagagcagataatgaaaataggtacttcacccttgaagaaaaaaaaaaggatgatgggaacaatgaaaacgaccacatgagcaccaacaggcttggaaatttgggattggttaatcaagttcccatgtttgctttgtggaacgaatgaagggaatgttatgttgagttgagattacaaaaaacattagcttagttagggaaaaaaaaaactaagatcagatggcagaattattgaatgattattattgtagcttggcatggtaacttttattgtatgttgaaagaaaggggatatgtcagt

SEQ ID NO: 26767 - DNA, 652 bp, Glycine max
  Clone ID: TF_GmC152_5
cccaagcctacgacgacgccgccatacgcatccgcggcgacaaggccaagctcaacttcccggccaccaccatttccgccgccgccgccgttccgccaccctccaaaaagcaacgctgcctcagccctgacatcatcactgaagaaagcagcagcagctcacattccaccactggatccaccggcgaaagcggcggaggaaacgacgaactcgacctgaaacaaattgaatggtttctaggtttggagaatgagctgcctgttagcaacaacattggtgctgagtgggacaacatggatgacctgtggatgctggacgacgtcgttgtgcccaaccgtcacttaatttactagaaggctaataattaataaatggcgttttcttaagttttagttttattttataaattgtagtataaaactatgttggtatttgtgttcttagttttcttctgctgttttgtctcttctctggctttggtaatttctgttttggacggttgaatgatttcaaaattaggtacttaattacaccctatcatgattgggatgatgattatatattatgattatgatgattatatataaataaagggtgattaagttagggcgcgtgagtgtttgcgactttgcgccgtgcatgtttttataaa

SEQ ID NO: 26768 - DNA, 1337 bp, Glycine max
  Clone ID: TF_GmC1286_1
gatgaaacaagctgcagcacttggaggagtgcaaagagccaggaagaggtttgttggtgtaaggcaaaggccatcaggtagatgggtggctgagatcaaagacaccattcagaagataagagtgtggctgggaacttttgacactgctgaggaagctgcaagagcctatgatgaggctgcttgcttgcttcgtggcaccaacacaaggactaacttctggccttgttctcaatcctccacaagtccagctctttcctcaaagatcaccaatctcctccttcaaaggcttaaagaaaggaacaacaacaacacttgttcctcgtcctcgtcctcctccacttcacttctcatcaaccaccaacaaatgcatcagcaagttggtgcatatggagaaggttcaacacaattctcaattgaccaattcactgatttcctcaatgaccctgaagattatagcacaagcaacaatgacttcatcaacaacagtgcacaaattgactacattactagtagctttgaatcatgcttaactgaaaaagatggtgggactaaaattgatatgcaatacaaatccaggaatgtgacaccacagacttcaagcaatgacagcaattcaggagtggaggatagtgaagaagaaggctctgatttgggtgtgcaaagcacaaatttggatgtccatgattttaagtttttggacaacattgctccacctagttactactctccctttgagatggctgaagagatggaggaggagcctgtggagcctgagaatgagaactatggcgatgagccttcaatgcttagagctgtgatgaagagaatgacttatgagaggaagttctcagcttctctctatgccttcaatggaatacctgaatgcttgaagttgaaacttgaatcagggaacatgaagggaagaggactagctgatcaattaacaagccttcaaatggcttgtagcaaaaacatactcgagaagaacaaggaggagaaagaatacattggaacaatggataggagacaggaagaagaacaccaacaaacatcacctgacatggattcttcaagtgttgatggggaactgttgctttggaattcacttgatcttcctcctatttgctttgttaacttgctagaaaacggttcattcaattagcaatatccattcattttctgtaacattatttatgctgagcacaactatattgtaacattagactttgtagtaagcatgaagtaatatcttctgctaattgaaattatttaaattcttatttcattcataattcctagtatcaatgagtaacattgaatttaaagtttttcttaaa

SEQ ID NO: 26769 - DNA, 432 bp, Glycine max
  Clone ID: TF_jC-gmXLIB3563P052af02a3
gccatctgtactcagaacacatagacccaccgacacaacagaccttcttgcactcctgcacatatcggcgcccaatggaccctatgccccctaaacaggagcaaggagtgccaggggactgcaaaaaagcacccggtgtaccacggtgttcggaaaaaaaactggggccaagggggtccgaaatccgggagccacactaagaaggcccgaatctggctcggaacattatcaactcccaaaatggcggtgcgagcccacgacgaggcggccctcaccataaagggccagacaacaatactcaacttccccaaaactgcacaccagatccctaggcccgtcacgtgctccccacgtgacatccaaaccgcgcacacggccgtggcctccatggttaagatcgacactgtaacacaatactcagactcagaaact

SEQ ID NO: 26770 - DNA, 953 bp, Glycine max
  unsure (1)..(953): unsure at all n locations
  Clone ID: TF_GmC104_2
cgctgganncggcttgagctttaacgcgccaaattacaatcaccatgtcctcttcctcttcctccttcttccccgcccatatcaccaccgaccaagaattctccctcatcgttgccgccctcaccaacgtcgtctccggctctacctccagctcctccgtccctgaattccgcttcccgcactcctccccgcctctttcttccgccagccttatgccgccacccccgcctagcatccacacgtgtcgcgagtgcaacatcgcaggatgcctgggatgcaactttttccccgaggaacaaaggaagaaatacagaggagttaggcagaggccttcgggaaagtgggccgccgagattcgcgatcgtcatcgttcggcccgggtctggctcggtacattcgaaaccgccgaggacgccgcccgggcctatgacaaggcctcgttcgagttacgcggcccacgggccaagctcaatttccccttggtcgacgagtcgctcactctccagccggagatggctgcaacagaagagcagattaacaacgaggataatctcaatcaaggcatgggaatggactcgcacgaattctgggacaggatcaacgaagctgattttcatccgttcatgatgatgatggattttactggagattcttcagactctgctgccactgggtacactctcagttcctgaaattgatattcaattaaaccaaataattagttttgttaatgtgcgtttaacaattgtacaactcggctaagcgtatttgttaaattagcatttgctagctccactgcaatacattacactacatgtatttctgtaatatctttcttccgctaggtttttttcgtgaggaagttgctgcatagtacaaatcaagagttttaatgtttcatttcaccaccccaagagtatgctatgtataaagattagagtattattactgtt

SEQ ID NO: 26771 - DNA, 954 bp, Glycine max
  Clone ID: TF_GmC5319_1
tatttaaaaaagcaaagataacgtcatatcaactaaccacacgtggggaagaatcttccacttcaacattcaatgctattttcaaatactcttgtagcttcaaagaaacatcacacaaacgaaaacaatattaaagaaataattagcatcacgttgttcaaactatgtttctatagttacaacgaatacataaaaaaatatacaactccagaacccagtggtataaatacacaacgcattattcttcatagtgcttcaagaataaaaaaagataaccccaaaatcagaaaaaaccatcgtcttcatcaccattcaaaacatggccaccacaatatcttgtgatttctcttcaatggaatctattcaacactatcttcttgagcctgaacacgattccaacgctctcatgaacatttccaaccacgaagtttgctattctgcaacgtacaatgcattcccaagccctacgttcagcttggagggtgtcgtccatgatgcaaacgattccttagcatgcaaaagagaacaccctagggaggagcgtgaagttcacgcgccaccggtatggaagcattaccggggtgtgaggcgtaggacttggggcaagttcgcggcagagataagggatccaaagaagaatggtgcaaggatttggctaggcacttatgaaactgaagaagcagcgggtttagcttatgatagagctgctttcaaaatgcgtggcagcaaagctaagttaaattttcctcatctcattggctctcacgcgcctccgcagccagtgagagtgacaaaggctttgaagcgaaactcgccagagaagaggaaaaatttggctgacttgttaaacaggttggccaagaatagaagccaaatacttatacaggtgcttgaaatgggtttacatgcaaattatgtcaatgttgaacaatggtagagtaagttgaatgtgtt

SEQ ID NO: 26772 - DNA, 1221 bp, Glycine max
  Clone ID: TF_GmC15_1
gtacgcgtcggacgcgtgggcggacgcgtgggcggccgctcgagctcatctgtatgcctatgcttgtttatcattttcttactttcctctcacgctctgccacaaaactccgtctccgcaataacggaataaaaaaacaagtttaattactattatggcgccgagggatcataagacaagcaacgctaaggctaacggtaacggtaacagcggggtgaaggaggtgcattttcgtggagtgagaaagaggccgtgggggagatacgccgcggagatcagagatcccggcaagaagagccgcgtctggctcggaaccttcgacacggcggaggaggcagcgcgtgcctacgacgccgcagcacgagagtttcgcggccctaaggccaagacaaacttccctctccctttggaaaatgttaagaactcgagccccagccagagcagcaccgtcgagtcctccagccgcgaccgcgacgtcgccgccgattcctcgcctctagacctcaacctcgcccccgccgccgtcgcatccgctcgattccccttccagcaccagttcccggtttttaccggcgcggtgcctgcggcaaatcaggttttgtacttcgacgctgtcctacgcgccggcatggccggtccacgtggctttgcgtttggctacaatcatcatcccgttgcggcgagtgagttccacgcgacgacgagcgactcggactcttcctctgttatcgatctgaaccataatgaaggcgaggttaaggggaacggttctagaatcttcgatctggaccttaaccatcctcctccgcatgagatcgcttgatccaaagtctgactcacccctttagttttttttttttttttgtgtttcggattatgaatttctcgttagtttttttttttatataagtagagaaagtagcagcctccgataagggaaaataacgagggaagggaagggaaagaaaagaaagtatgtgaatacgtaggcggtatgattgtctcaattttttgcgacatagaggaaccaccaccggtttcatcctgttgtttcttaaatcacgaaatggttatcgggtttttctttcgttttaattgattatgtactgcggtgtaatgtttttggtttgcagccataatttggttcaatgaaattaacacggaaagtttgcataaaaaaaaaaaaaaaaaaaaaaaaaaaaaaaaaaaaaaaaaagggaa

SEQ ID NO: 26773 - DNA, 1610 bp, Glycine max
  Clone ID: TF_GmC1684_1
tacggctgcgagaagacgacagaagggtacggctgcgagaagacgacagaagggtacggctgcgagaagacgacagaagggtacggctgcgagaagacgacagaagggagaacaagaggaacagagaatgtaaagaaggaggagggaaggagaaaatatagaggggtgaggcagaggccgtggggaaaatgggcagcggagataagagacccattcaaagcagcaagagtatgctagggagattgaaggggtattattttttcatgcagaaacgagggatcatctaattaaaccagctttcatcagggtgtgggtgatttattgtaagctttttcttattatcttcgattgtgtttacacgtgtgtgttaaaggtggcgaatcctaaagagaagggaaatgaggttgatgacaataaggaattgatattattccatgaagggataatgaacaaccctacattgtcaaggctatttccgggtttgaatagggagagggagatgtctgctatggtctcagctttgacccacgtggtctccggagaggtgccaataaccggtgattcttcttcttcttcttctttggttcttcatcatcaacctcatgatgatactgttattgttacaccaaccatgccttcttcttcttcttcatctacttatgttgttggcacctcttctctcaagagaagtagggaaaatgatacatatacatcatgcttattctcacatacaccttcatcatcccctgctatgccaaaaagggcagaatatgcaacaagggaaatgggaaactgtggggataagtgaccaattcaaaccaggaagagtatggttaggaacatttgagacggcagaagcagcagcaggcagaggccgtgggggaaatgggcagcagagataagggacccattcaaagcggcaagagtatggttaggaacatttgacacagcagaggcagcagctagagcatacgatgaagctgctcttcgtttcagaggcaacaaagccaaactcaattttcctgagaatgtcactctccgacaacctcaattcactgtttccaatcctccatcttctcttgtatctattacaacatcaatagacccagttgttcacagtactcgacctctccttcttccttctcaggcttcaactgcgaccaatgtttacgagtattttcaactctcgggcttccccaccaacaccaacctttatgatggtaataggatgtttgtgacgtctaatgccatggcttctcatcatcttcaatcttcgtcttcgttgttgtcgtcttcttcttctgcgtttgtttcttctgtaacttctcaggacacttcactttcttcgttgtattctggccagttgccaccatggtcaaaggtttctggtcacagctcgtcttcctccggatgatcctttttgtttaatgtttatggaatctgtatttttcttctttcattatcataatctcttcatttttttttaaaaaaaacattatacttctattatctgtaattgcaagactagcttgccaatacgtacattcatgattcatgactttagatgattaagatgtttatggaggaaattatggtattaaaaccttcac

SEQ ID NO: 26774 - DNA, 548 bp, Glycine max
  Clone ID: TF_GmC392056_1
agctcaaaatttattaagttgtttcacagccagcaagcaaacttcagctcaacaccctcgttccctttcggctccaaaacatgtcatccacaaccacggattcagattgttcatatttggaacaaattcaacaatatctccttcacaatgattcaacaattctaacaccacctcaagcttttccaagccctagccatgatagtagttcggatgcaagtgtccactttgagcacccttcggaagcgcatgacgtgaacgcgccacccaaatggaggcgctaccggggtgtgaggcgtaggccatgggggaagttcgcagcagagataagagatccaaagaaaaatggttctagggtttggctcggaacttatgttaacgaggaggaagcagctttggcttacgacaaagctgctttcaacatgcgtggccaaaaggctaagctgaattttcctcacctcattggctctggtgtgcagccggaaccaccgtgtctggcggtttctagaggagcttaccagagtcttctccccaacacaccatatgatagt

SEQ ID NO: 26775 - DNA, 1442 bp, Glycine max
  Clone ID: TF_GmC326_6
ctcaggttcctcctatatatatatatatatacatacataatatccttctccctcaaaccaaaccatacctattctcaagtttctctctgtttcttcctacttcatgctatagcacttacaatactcaacaataacctaaccaaaccaaaccaaaccaaaacccttatctgcactcacttcacacaaaccaaagttaattaattaccaacacaaaatggatggaggctgtgtcacagacgaaaccaccacatccagcgactctctttccgttccgccgcccagccgcgtcggcagcgttgcaagcgccgtcgtcgaccccgacggttgttgcgtttccggcgaggccgaatcccggaaactcccttcgtcgaaatacaaaggcgtggtgccgcaaccgaacggtcgctggggagctcagatttacgagaagcaccagcgcgtgtggctcggcactttcaacgaggaagacgaagccgccagagcctacgacatcgccgcgctgcgcttccgcggccccgacgccgtcaccaacttcaagcctcccgccgcctccgacgacgccgagtccgagttcctcaactcgcattccaagttcgagatcgtcgacatgctccgcaagcacacctacgacgacgagctccagcagagcacgcgcggtggtaggcgccgcctcgacgctgacaccgcgtcgagcggtgtgttcgacgcgaaagcgcgtgagcagctgttcgagaaaacggttacgccgagcgacgtcgggaagctgaatcgattagtgataccgaagcagcacgcggagaagcactttccgttaagcggatccggcgacgaaagctcgccgtgcgtggcgggggcttcggcggcgaagggaatgttgttgaactttgaggacgttggagggaaagtgtggcggtttcgttactcttattggaacagtagccagagctacgtgcttaccaaaggatggagccggttcgttaaggagaagaatcttcgagccggtgacgcggttcagttcttcaagtcgaccggaccggaccggcagctatatatagactgcaaggcgaggagtggtgaggttaacaataatgctggcggtttgtttgttccgattggaccggtcgttgagccggttcagatggttcggcttttcggggtcaaccttttgaaactacccgtacccggttcggatggtgtagggaagagaaaagagatggaactgtttgcatttgaatgttgcaagaagttaaaagtaattggagctttgtaacattacatagtttttgagtttcttttgtgaattttgtaactgttgaattcatgaggtagagatggtgatggtgttgttgcaagttgccactcacaaaaggtgtatagtctcagacaaaaagaaaaaggaaaaattagggcaagaaaaattgttgaacagaaattttcttaac

SEQ ID NO: 26776 - DNA, 529 bp, Glycine max
  Clone ID: TF_10710623
actcaacaaaaagagctagagagaagataccccttaaatcctaatttctacctcaaagaaagtactcttcaaacattttgtattcactgaagaaggatctttgcacttgcacctgcagccatctaccatggttaagtcagaacacaagatcaaaaccgaaccatcatcaaaggcaatgcggttatcttcaccctcatcatcaacatcagattgcaagaagaagaagtacaagggagtgagaatgaggagctggggatcatgggtttctgagattagagcaccaaatcagaaaacaagaatatggttaggctcttattcaaccccagaagctgcagctagagcctatgatgctgcacttctatgccttaaaggctcctcagcaaatctcaatttccctttaagctcttcacaacaatacattcctggagatgctgtcatgtcccccaaatcaatccaaagagttgctgcggccgccgcatatagtttcatcgacaatgccaccactcccccttccccaccttcggcttcg

SEQ ID NO: 26777 - DNA, 1641 bp, Glycine max
  Clone ID: TF_GmC1505_1
aaatcagctcacaaagtggaggcctctcaaaaaacaaacaaaagtgacatcaaaatccccttctccttcctcttattctcttataccccacccccacttcttagcttcatccctctctctctctctccttctcaacaattacttgcaagtcttgagttttctcctccctgttctctggttttggaattgagacaggctttatttataattttaaaaacttgtttccctccctcccttatttttgggttttctcaacttgttcttgtcatcttgtaaaacatgggaactgctatagacatgtacaacagcagcaacatcgtagcggatttcctagatccgtatagtgaagagctgatgaaagcacttaagccttttatgaaaagtgattatttctctgcctcttcttcttcttcactcgaatcacagccttgttctttttcatctaattctctccccacttcgtatccctcttccaaccaaatcaagctcaaccaactcaccccagaccaaattgttcagattcaggcccaaatccacattcagcagcagcagcagcacgtggcccaaacccaaacccacctgggcccaaaacgcgtccccatgaagcacgctggcacggccgcgaaacccacgaagctctaccgcggggtgcggcaacggcattggggcaagtgggtcgctgaaatcagactcccaaagaaccgcacgcgcctctggctaggaacattcgacaccgcagaggaagcagcattagcgtacgacaacgcagcgtttaagctcagaggcgagttcgcgcgtctcaattttcctcatctaagacaccacggagccttcgttttcggcgagttcggagattacaagcctctaccttcttccgtggattccaaactgcaagctatttgcgaaagcttagcgaaacaagaggaaaagccgtgttgctccgtcgaagacgtgaagcccgtgatacacgctgctgagctggcagaggtcgagtctgacgtggcaaaatcgaacgctgaatatgtttatcccgagttcgaggattttaaggtcgagcacgagaacccaatgttttctggtgaatcttcttcgcctgaatccagtgttactttcttggatttctcggacttctcggattctaataatcagtgggatgaaatggagaattttgggttggagaagttcccttctgtggagattgattgggaagctatatgatgactcggtgaattttcgttatgtcaaatggttggtttggttttgctctgcttttgggttttagtatgtacttattatgttttgtaattttttaggtttatgtttcggtagtgtctttggctgcttctgcaatggattttttgacatttgcggatgttttgctgagacacgagggttgcaaattttaggcagtgaaatcagagggtcgtagtgatctttttgtggtctgctcgtgttttttgttacttgcatgaccttgggggcttctacttgtgtcttggctagctacttcttgttcaactgtaattaaagtgcccttccaatatatgaaaaatttacatgttcttgtaaaaaatggactatggagaagaaaaaaaaaaaaaaaaaaaaaaaaaaaaaaaaaaaaaagggcggccgccgact

SEQ ID NO: 26778 - DNA, 360 bp, Glycine max
  Clone ID: TF_LIB3242-559-P1-J1-G12
ggctcgagggcgtttaccacacatatttctttgtcatttccaaaccacacttgcttactagcggggggagcttattggtgagtgcgaaaaaactaacagctgaacattacatgcattatcattagaggagaatcagcataactaaatgttgggataaatcgcacagcaaaaaatttaaacaatatatcaaaatcttaatatattatatcgtgtcataacatacaacttggaatactcactaatgcttccaatgctgttggcaacagaaccatttttgttgcctatcaccacccgtgaacaaattcatttgaatttattgatccatatccaaacctatgtgaagtcaactttacacgacta

SEQ ID NO: 26779 - DNA, 354 bp, Glycine max
  Clone ID: TF_LIB3242-501-P1-J1-E8
ctgagactgacaaaaagttcagtgtcggcatgaggtttaagatgagattttatgacgatgattctgctgagactggcaaaagatcttagggtaccggggttggagagcaagatatttatatctcattggtgtaaattcaaaatgtgcgatcactacaatgttcaatagggatgaacgctgcattctgttccccagacctgataggtgtttcaccatgggagatacgaaccctatgttgcttgtgattttacacacctaatttcaacctactatgctaacgactaaaaggccccggacacccatcgaaacttcagatgttgacacaacatctgatgcttatgttttttgggatgc

SEQ ID NO: 26780 - DNA, 1780 bp, Glycine max
  Clone ID: TF_GmC340_2
cccacgcgttcgcagaattagaattagaaagagaaagagaaagagggggggtcgtgtcggcttgaaaccaaacacgaccttatcggcgatccaatttcgatctgtgcaaatcgtaaaccctacctacttgcttctgcaattctggtggactggatccattttcatctcaattctcagtaagttggggcacatcacacaataactttgacatggcttccgctgcgccaggtgcaaccaatgatgctttatacaaggaattgtggcatgcctgtgctggaccccttgtcactcttccgcgtgaaggggagagagtttattacttccctcaaggtcatatggaacagcttgaggcatccatgaatcagggattggagcagcaaatgccttcctttaatctgccttctaaaatttcatcaggaaataaataaccatttccaagatgcgtgattaaacggctgagattgtgtacagttatccagaaacagaaaccgtagacaacccgaatcccttattaagcaggggtttcgcggcgcgagacggtgacactggcagagtggaatttccgccgccattcgaagctacagcgatggccataaccgccaccatttccgttcccttcacatcccccagtcgccgcactctcgcctccgtcaatagcctctctccgcgttctacccgatccactttgcccacaccgcaacgcactttcaaataccctaattcgcgcctcgtcgtgtcttccatgagcaccgaaacagccgtcaaaacttcatccgcctccttcctcaaccgcaaggagtccggcttcctccatttcgccaagtaccacggcctcggaaacgacttcgttttgattgacaacagagactcctccgagcccaagatcagtgctgagaaagcggtgcaactgtgtgatcggaacttcggcgttggagctgacggagttatctttgtcttgcctggcatcagtggcaccgattataccatgaggatttttaactctgatggtagtgagcctgagatgtgtggcaatggagtgcgatgctttgccaaatttgtttctcagcttgagaatttacatgggaggcatagttttaccattcatactggtgctggtctgattattcctgaagtcttggaggatggaaatgtcagagttgatatgggggaaccaattcttaaagcctcagatgtgcctactaaattacatgcaaataaggataatgctgttgttaaatcagaactagttgtagatggagttatctggcatgtgacctgtgtcagcatgggaaatccacactgtgtaactttcagtagagaaggaagccagaatttgcttgttgatgaattgaagctagcagaaattggcccaaaatttgaacatcatgaggtgttccctgcacgaactaacacagagtttgtacaagtgttgtctaattctcacttgaaaatgtgtgtctgggagcggggagcaggagcaaccctagcctgtggaactggagcttgtgctactgttgttgcagcagttcttgagggtcgtgctgggaggaattgcacggttgatctacctggaggacctcttcagattgaatggagggaggaagataatcatgtttatatgacaggctcagccgatgtagtttattacggatctttgcccctttaatatgttgcccccattgttaaacccaatatggaattaggaattgctgaataatatttgtatgagaggtggactttctgcttgttcttactattttgccacatatttatatcttcc

SEQ ID NO: 26781 - DNA, 502 bp, Glycine max
  unsure (1)..(502): unsure at all n locations
  Clone ID: TF_11413657
gctacattctaaggtttactagttccttagggtcacatggagcatgcctttccctcgcattacctcagccctctcatccgctctctccccttcgtcccctgccatgttcctcctcactctcctctcacaatcacaacaacaacctttccaaaatgacaccaaggaggtttgaaatgacgatgacgataaggaccgcgagaacaacaacgtcatttcattcgcgaagatcctcactccctccgacgccaacaatggcgacgacttctctgtgccacgcttctgcgccgactcgtgcttccctccactcgactttcgcaccgatctgcctgtctagctcctctctgtcgctgacatccacggcgtcgagtggcgcttccgccacatctaccatggcacgccacgccaccacttcttcaccatcggctggagcaagtttgtcaatcataagaagctcgtcgacggcgacactgtcattntcgtcaaggactcccacgatggaatg

SEQ ID NO: 26782 - DNA, 2026 bp, Glycine max
  unsure (1)..(2026): unsure at all n locations
  Clone ID: TF_GmC630_7
nngatgggatgaaacatcaaacataccacgtcctgagagagtttcacaatggaagatagagcctgctcttgctcctcttgctctgaatcctctaccaatgcccaggcctaaaaggcctcgatctaatgtggttccatcatccccagattcctcggttcttactcgtgaaggtatggataggttgcttttaaatatttgatatttatttgagtttcatctttgcttaacatatgtaattatgtgaagcctgatctgttatcggtgattaacagcttctaaagtaagcgtagatcctttgccaacaagtgggtttcaaagggtcttgcaaggtcaagaactttcgaccttgagaggtaattttgctgaaagcaacgaatctgatacggcagagaagtctggtgtgtggccacctgccacggatgatgaaaagattgatgtttctacctcaagaaggtatgggtcagacagctggatgtcaatgggaaggcatgaaccaacatatccagatctactttcaggctttggggcccacggagatcattcatcccatccatcatttgttgatcaaaatggtcctgtagctaaccttagtagaaaacatttgctggatcgtgaaggcaaacataatgttcttagtccttggcctggagtgccatctagcctatcactgaatctcttggactcgaatttaaaaggctctgctcaaggcggtgatacagcttaccaagtacgagggaatctgaggtatagtagtgcatttggtgagtaccctgtgcttcatggacataaagttgagcattcccatagaagctttttgatgccaccaccaccatcaactcaatatgagagtcctcgttcaagagaactgttgtccaaaccaatatcaggaaaaccttgtgaggtttcaaaactgaaagacagtgactgtaagctatttggcatctcacttcttagtagccgccccattgcatcagagccttctctatcacaaagaaatgttacaagtgagtcagttggtcacatgcatacagcatcacaccatcaacgtgcaattgaaaacgatcagaagtctgagcattctaggggttcaaaaccagctgatggtctgctgattgatgaccacgaaaaggtgttacaaacttctcagccacatctgaaagatgtacaagcaaaatctcatagtggttctgctagaagttgcactaaagttcacaagaagggtattgcacttggtaggtcagtggacctcacaaaattcagtgattatggggaattaattactgaattggatcaactattcgaatttggaggtgaattaacttctccacaaaaggattggcttattgtctacactgataatgagggagatatgatgcttgttggtgatgatccgtggcaggaatttgttgcaatggttcgcaaaatttatatctaccccaaagaggagattcagaaaatgagcccgggtaccttgagttcaaagaatgaagagaatcaatctgccagtgaaggtgcagcagacgcacaagaaatcgagtgtcagctcaatcattcatcttcagatacctgatagttcgtagatttgatttccatagcttccaggttccggactggagtggaaagtagtaggtgactgtcataaagccatctagttggagaatatgacctgaagaaggaaattctaattctgaatctgactgttttatcaagtgagtgcttgtgtttggaatcagaatatggatggcatgaatgagtatccatccaattttggaccgtgtcgtggaattagtagtagtagtagtagtagtagtatatatgccttccctgttatacactcctaatatagtagtatagtacggaattgtgcgttgtgcaaggtgataagggagtgtatcggccttgcatttttcaacaatcctaccttgtacatagttttactcgcaaccttagtaccggaactcgttaatgtaattaagttgatatacaagggcgattttaaacaaaaaaaaaataaaaaaaaaaataa

SEQ ID NO: 26783 - DNA, 581 bp, Glycine max
  Clone ID: TF_GmC140962_1
ccacgcgtccgcaaagacacagtggtcaaccgtcttcctctaacaaataagagagtgtctgtctggcacctttgactccgagactatcttcgcttcgccattccttgatttgacttcactatccattccattccgattccctttccctaccttcatttcctttgcttttcacttttcgctaaatcactacaagagagatgcatcgccgctaacctaaaacaacctccacgcccaccgaagcaatgaaggcgcaaccaccagacggtgccgccgccgtcgcacccaacgccggcgaaggaggagagaagaaaaccataaacgctgagctatggcaagcttgtgcggggccgcttctcaacctgccttcgcctggaactcacgtcgtttacttccctcaaggccacagcgaacaggtagcagcgtctttgaagaaagacgtggatgctcaagtcccgaactataccaatctcccctccaagataccctgtcttcttcacaatgtcacgctgcatgcagatccagacacggatgaagtatatgctcagatgacacttcagccggttccttcttttgacacggat

SEQ ID NO: 26784 - DNA, 378 bp, Glycine max
  Clone ID: TF_GmC1198_4
acggctgcgagaagacgacagaagggcaaggacaagccagttcattgttagtgtgaacaagtatttagaggctatcaaccaaaaatgtaatgttggtatgagattcaagatgaggtttgaaggggatgaatcccctgaaaatgacaaaagattttcgggcacaatacttggagtagaggatatttcccctcactgggtgaattcaaattggcgatctcttaaggttcaatgggatgaacctgcatcttttccaagacctgatagagtttcatcatgggagatagaacacattctggcttgtgttcctactacgtcatctcaacctgctgttataaagaataaaaggcctcgacaagcaagtgaagttcccgatctttg

SEQ ID NO: 26785 - DNA, 382 bp, Glycine max
  Clone ID: TF_uC-gmflLIB3275P141f02b1
acacgcgtccgccacaccgtccgttgtgacctcttgaatcttaagaaccaaaagggggcttcccttccaccaaagtgggcacctgcaggcaaccagccacaaaacattttttgcaaaactttaaccgccggggcaccaacccctcatgggggatttttttggccttgccggccagttgaaaaagggtttcctccatgggatttttttaaaaagcctcctgttcaaaaattaattgcagggaatttgctgtggattgaagggaaattcaaacttattttccggggccagcccaaagggcatttacttacaaccggatggagggtctttgtaagggctaaaaaacttgttgctggggattctgggctgttaatctggaatgaaa

SEQ ID NO: 26786 - DNA, 271 bp, Glycine max
  Clone ID: TF_701152936H1
cggctgcgagaagacgacagaaggggatgaggtttatacacaagttactttgcttcctcaagctgagttggaagggatgtatttagagggcaaagaacttgaggaattgggagcagaagaggagggggatgatagatcaccaactaaatcaacccctcacatgttctgcaaaacactaactgcctctgataccagcacacatgggggcttttctgttcctcgccgagctgctgaagactgttttcctcctttggattataagcagcagagg

SEQ ID NO: 26787 - DNA, 518 bp, Glycine max
  Clone ID: TF_GmC229993_3
acacagcagagaataaagttattattgcctctgagcaaagacaagttgaggaagggaggatctgataggaaaagttaacacgttaatgaaatagactccatttataataatggtggtgtagtgtacctgcagaagacgccatggagaatcaggccaaaggatgggatctgcaacttgaacagaagaaatggttcccatgaaccagctgatcctagaagaatcctcagtctcaaagggcattttgaatctcatcccagaacaccactgaatttgcattgcagccttcacaacagaagccttaacacaaaactctggcgaactagcccttggatagtacacaacctcaaagggccttccattaacagcacaagtcacagcctcaacaacagattcagcagccactcttcccaccaacatctcatgatcaccaccactcatcaaattgctctcactcccacacaagaagccaccaccaaagagagggttattccatccaccagaagagaactcagtccctc

SEQ ID NO: 26788 - DNA, 1887 bp, Glycine max
  Clone ID: TF_GmC1322_1
aattcggctcgagtagagagccttgactgttcttattcagttggaatgaggttcaggatgcgttttgaaactgaagatgcggcagatcgaagattcactggattaattgctggaattagtgatgttgatcctgttagatggcccggatcaaaatggagatgcctactggtaaggtgggatgacatagaagctgctaggcacaatagggtttccccatgggaaattgagccatctggttctgcttcaaattccagtaacttgatggcagctggtttgaagaggaacaggattgaaatgacttcagcaaagctggaatttcccaatcccaatgggattcaaacatcagactttggggaatcgttaaggttccggaaggtcttgcaaggtcaagaaattttgggtgttaatactcccccctttgatggtattaatgctcagagtccctggttatacgagttagggaggtgctatcctggttcaaactgttctgggattcctccaacaggaaataacatcagagtgccgcatccggcatctgatttttcctgcaatggcataggctttagtgaatctttccggttccagaaggtcttgcaaggtcaagaaattcttccaagccaaccatatggaagagccttatctattgaggaggctcgagcaaatggtcgctatggattttatgatggctgtcagttacttaactccagaaatggatggtctgcacagatgcatgacaatgcttcacatttgcatgcatctgttacacctgcgcaagtgtcatctccatcatctgtgttaatgttccagcaagcagttaatccagtttcaaactgtgattataacattaacaaatgtaataaggaaatggagggtagaatccattatcaaggcttatacacatctgaaatgaaaggtagaacattggcatcttccccatttgacgatcttattgtatctaggcgagctcccgaaggtgctagttctataggtatgtttggatgttcataatcagttgggtagttcacagttacatgaatcagtgtcagcattgagaagcagtcaaaagttggtttcctcatgtaaaagtagttgcagactctttggtttttcattgactgaggacacacatgttgcaaatgaagaggtatcagcctctaccatcactttaccattgagttctggaccttcgtttactagacttgttgaagatgagttccatcctggccattcgcatccgagtaaggcggttggaagtaactgcaccaagagtgtattgcagtattgagcttagaatcatgatgtgtgctggctatatgacacactgggaatgagataagctgaagaacgggtccatagtttgctctggttacgtgctttgctataatatctttggatttaagtaaggaggaaaattgttattatttgtgccatatttgttggctgaccaagttgaagtgcttgtgtattaacggtttgctcatgggcaatatgacctgtaaaagatgcatactccgaagtaaaaactattgctgtaatcttaggcatatttatcctccatttggcacttctaaagttgaatgtatttgttagacgcaagaagttaaaatttcaatggaaaggccatcgacccatcttggaggatctcgaaacactatagcctatagggtggaacgttcttcaactgaactttctcagtgatttcttgacacctgaaagtgggttagtatttcaattgacactggattaagtttcgttttttttctcttaaaaactattcctccccaagtcctaatataatacattgactggccttttaagttttgattgtataaaatgagtgaaacctccagtaatatatagggaaaaatggttaattttattttgggg

SEQ ID NO: 26789 - DNA, 608 bp, Glycine max
  Clone ID: TF_GmC340_7
gtcgacccacgcgtccggactagttctagatcgcgatctagaactaggaaagagggggggtcgtgtcggcttgaaaccaaacacgaccttatcggcgatccaatttcgatctgtgcaaatcgtaaaccctacctacttgcttctgcaattctggtggactggatccattttcatctcaattctcagtaagttggggcacatcacacaataactttgacatggcttccgctgcgccaggtgcaaccaatgatgctttatacaaggaattgtggcatgcctgtgctggaccccttgtcactcttccgcgtgaaggggagagagtttattacttccctcaaggtcatatggaacagcttgaggcatccatgaatcagggattggagcagcaaatgccttcctttaatctgccttctaaaattttatgtaaagtggtcaatgttcatcttcgagctgaacctgaaacagatgaagtatatgcacaaataactttgcttcctgaagcagatcaaagtgaggtgacaagccctgatgatcccctgcctgaatctccaaggtgttcagtccattcattttgcaagacactcactgcttgtggcactagcactcat

SEQ ID NO: 26790 - DNA, 4722 bp, Glycine max
  unsure (1)..(4722): unsure at all n locations
  Clone ID: TF_GmC340_1
ggctcgagaaaataatgtaatatgcttagatagggcgtgggacagtgggggaagttgtaggggtttcagggcacgcattctatcgctgtttctctcgaatcaacaaaacgccaccgtttcattgatctacttcctccaaagccaggtctccatgaataggtaccaattcaagctgcaaatatacttgaacttcaacttatcccacattctccactctcaaaggcttcaactctcaaatctggcggaattcatcgtgccgtgcggtgtacagaattagaattagaaagagaaagagaaagagggggggtcgtgtcggcttgaaaccaaacacgaccttatcggcgatccaatttcgatctgtgcaaatcgtaaaccctacctacttgcttctgcaattctggtggactggatccattttcatctcaattctcagtaagttggggcacatcacacaataactttgacatggcttccgctgcgccaggtgcaaccaatgatgctttatacaaggaattgtggcatgcctgtgctggaccccttgtcactcttccgcgtgaaggggagagagtttattacttccctcaaggtcatatggaacaggtacaacttgcctgggcatgttctcttaatttctgactttaattgaacttgaggcatccatgaatcagggattggagcagcaaatgccttcctttaatctgccttctaaaattttatgtaaagtggtcaatgttcatcttcgagctgaacctgaaacagatgaagtatatgcacaaataactttgcttcctgaagcagatcaaagtgaggtgacaagccctgatgatcccctgcctgaatctccaaggtgtacagtccattcattttgcaagacactcactgcttctgacactagcactcatggaggtttctctgttcttcgaagacatgcattgcgtacagttatccagaaacaaaaaccgtagagaatccgaatcccttatcaagcaggggtttcgcggcccgagaccaagtcaaaccgagacggtgacactggctgagtggaatttccgccgccattcgaagctacagcgatggccatagccgccaccatttccgttcctctcacatcccccacccgccgcactctcgcctccgtcaatagcctctctccccattctcccagatccactttgcccacaccgcaacgcactttcaaataccctaattcgcgcctcgtcgcgtcctctatgagcaccgaaaccgccgtcaaaacctcctccgcctccttcctcaacctcaaggagtccggctttctccatttcgccaagtaccacggcctcggaaacgacttcgttttgattgacaatagagacacgtccgagcccaggatcagtgcagagaaagcggtgcaactgtgtgatcggaacttcggcgttggagctgacggagttatctttgtattgcctggcatcaatggcaccgattataccatgaggatttttaactctgatggtagtgagcctgagatgtgtggcaatggagttcgatgctttgccaaattttttctcagcttgagaatttacatgggaggcatagttttaccattcatactggtctggtctgattattcctgatgattgttagccaccactggatatgactcagtagcccccatggcaagaattagttgcaactgatctgtatgggaatgaatggcattttagacatatttttcgagggcaaacccaggcgccacttactgaccactgtggtggagtgtctttgtcagttacaaaaaattagtggctgtggatgcatttatattcttaaggggtgaaaatggagagctgcgagttggaggtaggaggctcatgagacagcatagcaacatgccatcttctgttatatccactcacaatatgcatcttggtgctctgactactgcatctcctgccaaagagacaggaacagtgttgtctagattttacaagcccagactgtagctgggctgagtttgctggtagtagcctcacctgtggtagaggatgcttgtggtaatattctggcggtagttcttccgggatgaggttcaagaggagatttgagggtgggagcagattcagaggaactattgcgggtgtgggattgaggtagggatgataaatcgtgcttttgagtggcgatccttaaaggttgaatgggatgaaccatcgtctattttgcgtcctgttagtatttctgcccgcgatttggaaccacctgtgactacccctcataaagactcccagccatcccaatgtaactagaaatcggggcctctcattctaccttcaacaatgcctgattcttctttgcaaggtgtatggaaatcaccagttgaatctgcaccattctcttattgtgaccatcaacatgggcgagatgtctatccatcaaccaatttcaattccactgcaactggttttcttggttttggtgggaactgctatgcttccaacaagtcaatatattggtccagtaggatggaaaactccacagaatctttttctcctgtagcacttaaagaatttggagagaagagacaaggcactggaaatggctgtagactctttgggattcagttacatgacaattctaatgctaatgaagaaaatctaccaatggtcactttgtcaggaagggtgggtgatgatgggtcggttccatctttggatgctgagtctgaccaacattctgaaccatcaaatgctaatcgatctgatattccttcggttagctgcgatgctgaaaaatcatgcctgcagtctccccaggagtcacaaagcaggcaaataaggagctgtacaaaggtccacatgcaaggtatggctgttggaagggctgtggatttaacacggtttgatggatatgaggatctgctaaggaaattggaagagatgtttgacatcactggtgagctctgcggatcgacaaaaaaatggcaggttgtgtacactgataatgaagatgatatgatgatggttggggatgatccatggcttgaattttgtagcattgtgaggaaaattttcatctacactgcagaggaggtgaggaagctttcacccaaaataggacttccaatcagtgaagaagttaaacccagcaaaatggactctgaagcagtagccaatcctgaggatcagtcatctattgtggggcctggttgctaatgtcttaggtcttccaacatttcagttgttatatatatatacaatagatattggcatgaaaataggaagtagaacgtgagagaaacgagtatgtacctggcaagcccttcatcatggcctataaggagcatatggttagtgtattctgcatctatacaggagcagcataacagcaccaaagcagagggcttggggtattgtggcttttctctttctttcatagctctgtaatcaccgagtttcgatgccttgcttgttcagttttgtattggttgcgagcgtgcagaaatgtcttgtttttttttttttggttgcgagcagcataacagcaccgaagtatcttactatgtatgcatttggattttttttttggttcttttgtaattcacttgttatgatgcatcatctcatttatgtatatataactttctattatatacatactatttaatgtatgtatatcgagccaatttaatgcgatgcatcctttttgtaaaaataggagcatatcatggtgtcatctatacaagcacaaagggctggtgtggtataatactgtttttgaagataggcttggggtgtggcttttctatttctttcatagctccgttatcaagtctcgatcgcccttgcttgttcagttttgtattggttgcgagcgtgcagaaatgtcttttggttaagtatcttactatctagtatgcatttggagtttcttttttggttcttttgtaattcacctatgttgcatctcatttctgtatatataactttctattatatatactatttaatgtatgtatatcgagccccctgtcagagttgatatgggggaaccaattcttaaagccttggatgtgcctactaaattacatgcaaataaggataatgctgttgttaaatcacagctagttgtagatggagttatttggcatgtgacctgtgttagcatggggaatccacactgtgtaactttcagtagagaaggaagccagaatttgcttgttgatgaattgaagctagcagaaattggcccaaaatttgaacatcatgaggtgttccctgcacgaactaacacagagtttgtgcaagtgttatctaattctcacttgaaaatgtgtgtttgggagcggggagcaggagcaaccctagcctgtggaactggagcttgtgctactgttgttgcagcagttcttgagggtcgtgctgggaggaattgcacggttgatctacctggaggacctcttcagattgaatggagggaggaagataatcatgtttatatgacaggctcagccgatgtagtttattacggatctttgcccctttaatatgttgcccccattgttaaacccaatatggaattaggaattgctgaataatatttgtatgagaggtggactttctgcttgttcttactattttgccacgtctttatatcttcctacccttttttggttgaatgtgtcacaacaacggtttgttatctggttttggctatattaacctganagaaatgaagcaatga

SEQ ID NO: 26791 - DNA, 849 bp, Glycine max
  Clone ID: TF_GmC630_4
ccacgcgtccgatttatcagctgagagaaaaaataaatactaaaataaaaaaagaaatccagcaagagagagaaactaagacagaaagagagagaaagagtggttgaaagcgtccattgaaggtatagagagagaggttttgtgaattggtgctgcttcgtgtctgtttatttcctcgcgaggtttgaattccggaacagtgaagagaaacggaggttccgatcctgcgatgtgatatatgagagatctgtgaggaaattgaactggaaaaaaaaaatggcgacgtcggaggtatccatcaagggaaattcggtgaacggaaaaggagataatagttctggtggctacaccaacgatgttaggaacggttctggtggaggcgaggctcggaattcttcttcttcgtcttcatccgcgagagacgcggaagctgcgctttacagggagctgtggcacgcgtgtgcaggtcctctggtgacggtgcccagagaaggagagcgcgtgttctactttcctcaaggacacatcgagcaggttgaagcgtccacaaatcaggtagcggaacagcatatgccggtttacgatctaccacccaagatcctttgtcgggttatcaacgtcatgctcaaggcggagccagacacggatgaggtgtttgctcaagtgactttacttcctgagccaaatcaagatgagaatgcggtggagaaagagggtcctccggcggcgcctcctcggtttcacgtgcattcgttttgtaaaacgctgacggcgtctgatacgagcactcacggtgggttttcggtgctgaggcgacatgccgatgaatgcctcccttcgctggacatg

SEQ ID NO: 26792 - DNA, 461 bp, Glycine max
  unsure (1)..(461): unsure at all n locations
  Clone ID: TF_GmC883036_1
cttagcacaaaaaggctctntgctggagattcagttctttttatcaggtataaagagggctaatagacagcagccagcactatcttcatcagtaatatccagtgacagcatgcacattggcattcttgctgctgcagctcatgcagcttcaaataacagcccgtttactatattttataatccaagggccagcccttctgaatttgtaattccattggccaagtataataaggccctgttcaatcaagtttcccttggaatgagattcagaatgatgtttgagactgaggaatcaggggtacgcagatatatgggtacaatcactggtatcactgacttggatcctgtccgatggaagaattcacagtggcgcaatcctcaggttggatgggatgaatcgactgcccgtgagcgcccgagcagggtttctatttgggatattgagccagtggtgacctggt

SEQ ID NO: 26793 - DNA, 1343 bp, Glycine max
  unsure (1)..(1343): unsure at all n locations
  Clone ID: TF_GmC77382_1
cgcgtgcgcgcgctntaagtctcggatacgagcacttgagagagagagggagaaagctatagtagcatggtcaccaagttagaagtagtatagtagtactagtaagtagcatgaacatgaccaatgaccatgaccacaaagcataaccataaaaactaagcacaaacacaaccattgctacttctacttcccatttttccattaccggaattctaatgagccaaacgctgactcttgattttgtactactactctttaccaacgctctttcctctgtatacaaacactgatcctttcacactttctctctcttcttggattcgctgttctttctctgagatctgtgtgcttttcgactctgttcctcttctgggtctcgttactctttcagattgttgctaaatttggcagaaaaaagccacgtgtacttctgagagattctgttgtgcgtaacgaggactttcgttgaggactggaacctggagtgttgggggttaaggaaaactagaaccgaatgaggcgtactccaattgtcttttcttgtgacactggttttggttgaaggttcatacgtgtgaatattaatggattgtaaggggcgtgaagtactggtacaaatataacagagaatgttattctgcagtgggaaggaagggagagaggaaaaggcttgttttgtggtggagggtgtcattttgtgagaatttcgttgcgtaattggtagtgttgtgattgtggactcgattttgaggttactaatttgctttagccttttttgctcaaatgagactttcttcagctgattttagtcctccaccccaggaaggggaaaaacgagttctagattcagaactttggcatgcatgtgctggtccccttgtctctttaccagcagttggaagccgcgtggtgtactttccacaaggtcacagtgaacaagtggctgtgtcaaccaacaaggaagtagatgctcatatcccaaactatccaagcttgcctcctcaactcatttgtcaacttcataatatgactatgcacgctgatgttgagactgatgaagtgtacgctcagatgaccttgcaacctctgaatcctcaagagcaaaatgaggcataccttccagcagagttgggcactgcaagcaaacagccaacaaactatttctgcaaaactttgaccgccagtgacacaagcactcatgggggattctctgtgcctcgccgggcagctgaaaaagtgtttcctccattggatttctctcacagcctcctgctcaagaattaattgcaagggatttgcatggtaatgaatggaaattcagacatatcttccggggcccagcc

SEQ ID NO: 26794 - DNA, 261 bp, Glycine max
  Clone ID: TF_jC-gmro02910046c03d1
ggctcgaggatccctttatcttttttataggacagaatggtgaactctctgttggcgtccgaggagcattgcgacagcggggtaatgttgcatcctcacatctctccagccacagcgtgcgtactggcgtccctgcccctgcttggcatgccatctggaccggcaccatctacactgtctataacaagcctaggaccagccctgctgaatttattgaaccctacgatcaatgaacggcgtctactcgaaatagtaatagct

SEQ ID NO: 26795 - DNA, 2805 bp, Glycine max
  Clone ID: TF_GmC1198_1
acgattccaaaagctgcttcctctcataaattctctgtcaacgcataatcattccatttagttatcatctgtgacaccatcacactgcgatcatcatcctcattcctactttgcacacccttatgacaatgatgatgtcatggacttagattcattggtcacagtcacagactctgaagaagaaaaacaacagctttgaattgattacaatacaaccttaaacgttctcgttgaaccgtggtggaggaggagaagaagatgaactctatgagcaactatggaaagcgtgtgcaggaccccatgtggaagttcctcgtactggccaaagggtcttctatttccctcaggggcacatggaacaattagaagtatcaacaaaacaaaaactaaaccaaaggattccactcttcaagtgggactccaagatcctttgtcgtgtcgtcaacgtccatttactggctgaacaagaaacagatgaggtttatgcgcagatctgtctagaaccagtatcttagcaagctgagcctatgagccctgatccgtgccctgctgaacttccaagtccaagagttcactccttctgcaaggtcttaactgcctctgatacaagcacccatggtggcttctctgtcctcaggaagcatgccactgaatgccttccagctttggacatgtctaaatcaaccccaactcaggaattggttgccaaggatcttcagggctatgaatggcgctttaagcatatatttagaggtcagccacgtagacacttgctcacaactggatggagtaattttgtgacttccaagagattagttgctggagacacctttgtgtttctgagagggaacaatggagaattgcgggttggagtgaggcgcattgctcctgtgcagagcagcatgccatcatctgtgatttctagtcagagcatgcacctaggagttcttgcaactgcatctcatgctgtagcaactcagactctttttgttgtatattataagccaagggcaagccagttcatttgttagtgtttggctaggcaagtttcatgctagttgtaatacactggctaattgtagctcaatatagagattctaggtactaattaggttcaaaattacaaaagattttcgggcacaatagttggagtagaggatatttcccctcactgggtaaattcaaattggcgatctcttaaggttcaatgggatgaacctgcatcttttccaagacctgatagagttttaccatgggagatagaacccattctggcttctgttcctactacatcatctcaaactgctgctataaagaataaaaggccacggcaagcaagtgaacttgcagatcttggagacacagcattagcttcccctactttctgggatgctggactgacacagtctgatatggcaaaacttagtgtcatggccgaaatcaaaaggagtgacagtagttcccatatgtggcatcataacagtaaaagcagcaacaatggtatatcaatgaatcagacagaagcaatttggctatcttctccttctcaattatatcatgacacaaccgatgatagcaagagcatctcagcttggcctatttcaaaacctcactcagagagattgaacaatgatcatttccttgaccaggttgacaaggagatcaacaaagtagaggctgctacaagttatagattgtttgggattgaccttattgatcatgcaaggaacaactctctttctgcagagaatgcatctggaatcacctctgagtgcaaaattgatgtaaaccatgtgtccgatatctcaaaggcttctaaagaatggaaccaagaacagctacaactatctccaaaagagactcaaagcaaacaagtttgtagcagaagttgcactaaggttcaaatgcagggggttgcagtgggtcgtgccgtggatttgaccacattggatggatatgatcaacttgtagatgaattggagaagatgtttgacataaagggacaacttcaacttaggaataagtgggaaattgtcttcactgatgatgaaggggatatgatgcttgttggtgatgatccatggcttgaattctgtaaaatggtgagaagaatcttcatttattcaagccaggatgtgcacaaattgagctcagggagcaaactacctatctcttctatggaagagattgtaacaagtttagacacaaccgagacctgaaacttttacattcttgtcctttctactttgttagttttcttcttcttcttcttctttttttttgctgtttcttttatttttcttatctaaggtaaggatgttagtttatttttggctaggcaagtttcatgttagatgtgaaacgctggctaattgtagctcaatttagagattctagacactaattgggttccaaagaccaaattgaatattttaataaaaagtaaattacacatgtcaaaaaaaaaaaaaaaaaaaaaaaaaaaaaaaaaaaaaaaaaaaaaaaaaaaaaaaaaaaaaaaaaaaaataataaaaaaaaaaaaaacaaaaaaaaaaagaaaaaaaaaaaaaaacaaaaaaaaaaacgaatgaaaaaaaaaaaaaagggggggcccccctatggggatccagctttttacccccggccacgtacaacaaattgtttttttttttgcccccgaaaaataaattacgggcggggggtttaaaaacgcgggggtgggaaaaccggggggtaaaccaattttaatggcgttttaaaaaaacccctttcccgcagttgtgttaaaaaatcaaaagggcccc

SEQ ID NO: 26796 - DNA, 2748 bp, Glycine max
  Clone ID: TF_GmC695_1
gatgaaatctatgctcaaatgactctgcaaccactgaattctgaaagagaagtttttcccatatctgattttgggctaaagcacagtaaacatcccagtgagttcttctgcaaaactttgactgctagtgacacgagcacgcatggcggcttttcggttccacgcagggcagcagagaagctctttcctccattggattacacaattcaacccccaactcaagagcttgttgttcgagatttgcatgataatacctggacatttagacatatataccggggtcaaccaaagagacacctgctcacaacaggatggagtttgtttgtaggctcaaaaaggcttagagctggtgattctgttcttttcatcagggatgagaaatcacaattgcgagttggcgtgaggcgtgttaatcgtcagcagacaacactgccatcatcagtactttctgctgatagcatgcacattggtgtgcttgctgctgcagctcatgctgctgccaatcgaagtccattcactattttctacaatccaagagcatgcccctcagaatttgttattcctctggccaaatacagaaaatctgtatttgggactcaggtctcagttggcatgagatttggcatgatgtttgagacagaagaatcgggtaagcgcagatatatgggtacaatagttggtatcagtgatgtggatcctttaaggtggcctggttctaaatggcgcaatattcaggtggagtgggatgagccagggtgtggtgataagcagaacagagttagtgtgtgggagattgagactcctgaaagcctttttatctttccttctttgacttcaggtctaaaacggccattaccatctggtcctttggaaaatgagtggggaactttgttaacaagacccttcataagagttccagaaaatggaactatggagctctcaaactcaattccaaatctctactcagaacacatgatgaaaatgctttttaaaccccagctgattaacaataatggagcatttttatccgccatgcaacaagaatctgctgctacaagaggtcccttgcaagaaatgaagaccactctggcagcagaaaaccaaatgctgcttaaaaatctacatcctcaatctatccctgaccaacctaatgccttaaacatgcaatcactgttgaaaaatgatcagcctgaaaaatttcatcctcttgccaaaattgataatcatcttccttctgggatagttattgacaagccaaaattagaatgtgaggtattacctgaccgcgtgattgactatccttccatggaagggtgcaacaatgaaaaggtggcagtaaatcctgttaaccagcaaggcctagcaacccaattgccattccataatcaaaaccagagtccactactccctcaatccagtccatggcctatgcaacctctgatagaatcctccatgccccatcctcaaatgattggtatggctcaagctgattctgccatggtaaatggcctgtttcctcagcttgacattgatgaatggttggcgtatgcttcttcccaaccttttgctgggcagaacagaccaactggacctttttctgacttgcaagaacataactcacttcagcctcaagtagtgaatccccctttaccttcaatgaacaatgaagtatgggatcattatgtcaagaacttcaagttcttatctcaagcagaccagcttacatccatctgtcagccagggatgtatggcctcaatggcgtaccaagctcaaataatttgagggatctttccgctgagagcaataaccaaagtgagatttgtgtcaatgttgatgctagcaacagtgtaggcaccaccatggttgatccttctacttcaagcaccattttggatgagttttgcacgatgaaggacggagaatttcagaatcctcaagattgcatggttggcaacttgagttcaagccaggatgtccagtctcagataacctctgctagtctagccgagtcacatgcctatcctcttagagacatccctgacaactccggtggcacttcatcaagccatgttgattttgatgaaagcagcttcctgcagaataactcatggcagcaagtacctgcacccatccgaacctacacaaaggtgcaaaaggcaggttccgttggaagatcaatcgatgtgactactttcaagaactatgaggagttgatccgtgcaatcgaatgcatgtttggactcgatggcctgctgaatgacactaaaggctcaggatggaaattggtgtatgtagattatgagagtgatgttctacttgttggtgatgatccttgggaggaatttgtaggctgtgtccgctgcataagaattttatcaccttcagaagttcagcagatgagtgaagaggggatgaagcttctaaacagtggagctttgcaagggatgaatgtttgaatatcaggtggtggctgcatccaatgtcactaagccatgctttgtgatgttcttgtacaaggcaatgtttgaaaagcaaaggcatatgttgtggaagaagtcagtattattaacttgtatggaacaaaccttgaagatggaagagagtttgagttttattatcacacagatcaaaagttgtaagatgatgttccaatgagtcaagggtgttgcataccttatgttgtaagaaattcttgctggcaagtggacatattatgctttattattactacgcattgggacctttcc

SEQ ID NO: 26797 - DNA, 248 bp, Glycine max
  Clone ID: TF_LIB4281-002-Q1-K1-F7
ccacgcgtccggttttgtctgcagatgtgcctttagcattactataatccgaggggcagatcatctgagtgatcatacctatccacagagtgcgaaagagcctcgattatccgtattcagctggaatgaggcccaggatgcgctatgacactgaggctgctgcctagcgaacatccacaggattaattgcgggcatcgctgacgtggatccctgtcagatgggcctgtatctagatggatacgcctaa

SEQ ID NO: 26798 - DNA, 4089 bp, Glycine max
  unsure (1)..(4089): unsure at all n locations
  Clone ID: TF_GmC630_1
ctctctcatccgcacaacacaccacaaccttcttcttcttcttcttcaacttctggttcaaaacctcaacagtttgttgaattgcgcgttgaaatacgactcaatattctttcgcgagctctgttctcacttcaaaggttaggttcttcgacagtttctttgtttccactccgtcgcttgctgagaaggcgtgagcgagagttgtagaattacgcaagagaaactaagacagaaagagagagaaagagtggttgaaagcgtccattgaaggtatagagagagaggttttgggaattggtgctgcttcgtgtctgtttatttcctcgcgaggtttgagaacagtgaagagaaacggagtttccgatcctgcgatgtcatatatgatagatctgtgaggaaattgaactgaaaaaaaaaatggcgacgtcggaggtatccatcaagggaaattcggtgaacggaaaaggagataacagttctggtgatgctagaaacagtggaggcgagggcacaaccctagcaacgcttcttcttcatcttcatcaaaacctcaacagattgtggaatagcgcgttgaacagcgacagaattattcttccgcaaactcggttctcccttcaaagcgtcgagtttaggttattcgagagattctttatatttactccgacacttcgcgagaaaccgtgtcttgcgagagcgaggcttggagaaccacgcgaggagtgtcgcggatgagagatctctggtgaggtctgtggaaatggcatcatcggaggtgacgatgaagggaaattgcttgaaccacaacgacggcggagccacggagcctcattcgccgtccacggccaaagacgcagaagctgcacttttcagggaactatggcacgcatgtgccggtcctctagtcacggtaccgcgggaaaaagagcgcgtgttttatttccctcaaggacatattgagcaggtggaggcgtcgacgaatcaggtggcggaccagcacatgccggtttacgatctcccacccaagatcctttgtcgggtcatcaacgtgcagctgaaggcagagcccgacacggatgaggtgttttctcaggtgactttgtttcaggagccaaaccaagatgagaatgccgtggagaaagagcctcctccagcgccgcctccacggtttcatgtgcattcgttttgtaagactctgacggcgtccgatacgagtacccatggtgggttttctgtgctgagacgacatgctgatgaatgtcttcctcctctggatatgtcgaagcagccacccacacaggaattggtggctaaggatctgcatgcaaatgaatggcgatttaaacatatctttcgaggtcaaccgcgtagacacttgcttcagagtggttggagtgtttttgtcagctccaaaaggcttgttgctggggatgcatttatatttcttagaaggtgagaatggggaacttcgtgttggtgtcagacgtgcaatgagacagcagggtaatgttccatcctcagttatctcaagccacagcatgcatctcggtgttcttgcaactgcttggcatgccatcttgaccgggaccatcttcactgtttattacaagccctaggactagtcccgccgaatttattgttccgtatgatcaatatatggagtctctcaaaaataattatagcatcgggatgcggttcaaaatgaggtttgaaggtgaagaggctccagagcagaggtttactggtaccgttgttggaatagaagattctgatcccaaaaggtggagagattccaaatggagatgccttcaaggtgagatgggatgaaacatccaacacccctcggcctgagagagtttccccttggaaaatagagcctgctcttgctcctccggctctaaatcctctttcaatgcccaggcctaaaaggcctcggtctaatgcagttccttcatccccagattcttctgttcttactcgagaagcatcatctaaagtaagcatagacccttcaccggcaaatgggtttccaagggtcttgcaaggtcaagaattctcgaccttgagaggcaattttgcagaaagtaacgagtttgatactgcagagaagtctgttgtttggccacctactgcagtagatgatgaaaagatggatgtttctacttcaaggaagtatggttcagagagctggatgtcaatggggaggaatgagcctacatattcggatcttctttcaggctttgggaccagtggggatccttctcatttatccttgaaggatcaaatgagccctgcttattctgctagaaagcaatcattggatcatgaaggcaaacttcacatgccttatccatggcctgtaatgccctctagtctgtcactgaacatcttggactctaatgcaaaaggtcctacacatggtggtgatacatctttccaagctcgagggaatttgaggttcagtgcatttggtgaataccctgaactgcatggtcataaagttgaggattcacatggaaacttgatgccacccccacctgcaccccaaactcaatatcagagtccttgttcaagagagcttatgtcaaaacaagtatcagcaaaaacttgtgaggctgtgaaaccaaaagatggtgactgtaagctatttggcttctcacttatcagtggccctatcgtaccagagccttctttatcacaaagaaatgtgagtgagcctgctggtcagatgcatcttacagcacaccaacaaagaacatctgaaaatgatgagaagtcagatcactcaaagggatcaagacctgtagatgatctagttgttgatgaccatgacagaccattacggacttctcagtcgcatactaaagacgttcaagccaaacctctcagtggttctgctaggagttgcactaaagttcacaagaagggcattgcacttggtagatcagtggaccttacaaagtacagtggctatgatgaattagttgctgaattggatcagctgtttgaatttgggggtgtattagtgtcaactaaaaaagattggcttatcgtctatactgataatgatggtgatatgatgcttgtaggcgatgatccatggcatgaattctgtgccatggattgcaaaatttatatctaccctaaagaggagatcccgaaaatgagcccaggtaccatgagctcgaaaaatgaagagaaacagtcggtaatggctagtgatggtgcacgatgcaaaagttagttaaatgtcagccacatcaaaagtttccaattcagaaaatggccttgacgcctaatgattagtagattgatttccatagctttcagattctgggatggaaagtaaggaactgtcatgaagccatccatccagttggaaaacataacttgaagatgaaatcgaggctgactgctgcttatcagtgactgcttcaaatcaaatatataagatggcattaaaagagtagtatccgtccaattttggaaatcccggaattagtagtatatgcctgcccagttatacaatccctagtatttaatcaattgtgtttttgagtgaggtgatatagggtgatatcgaccttgcttttttttttttttaaaacaatcccaccttgtagttgttgctgtacatagttgtttctctcccaccctatgaacaacaacccattaatgtaatgaaagtttcgtataccaggtcgcggccttgtggttggtatccagtttatttgattttaattttgattcttattcttattagtcataatttgtgagatggaaattatcgagattccattctgcatgctgtataattaaattttgttttaagtgtacataattgttttgtaccccgtttgtaaaaaaaaaaaaaaaaaaaaaaaaaaaaaaaaaaaaaaaaaaaaaaaaaaaaaaaaagggggaaaaaaaaaaaaaaaagggggggcccccaaaaagagggcccccccccccgaaaataaancccggccccaccctcaaaaccncgggggggcccccaaaaaaaggccccttcccccccgggaatattttgccccccccccccccgggggaaaacattttttcctttaa

SEQ ID NO: 26799 - DNA, 585 bp, Glycine max
  Clone ID: TF_GmC896_4
gcgaggattccgattccgccgctcattctgtgctgcgtggcagctgtgaagttcctcgccgaccccgaaaccgacgaggtcttcgccaggctgcggatggttcctctaagaaactccgagctcgactacgaagacagcgacggtaacggcggcggaggggtcggagaagccggcgtcgttcgcgaagacgttaacccagtccgacgcgaacaacggcggcggattttccgttccgcgatactgcgcggagacgatattcccgcggctggattactcggcggagccgccggtgcagacggtgatcgcgagggacgtgcacggcgaggtgtggaagttccggcacatttaccgagggacgccacgtcggcacttgctgactaccgggtggagcagtttcgtgaaccagaagaaactcgtggcgggggattctatcgtgtttctgcgggccgagaatggggatctttgcgtggggattcgtagggccaagagagggggagttggtgggccaaaggggccgtgcgggtggagcagttatggttctggagggcttgtgcttgagccatacggggccttttcgggtttatg

SEQ ID NO: 26800 - DNA, 643 bp, Glycine max
  unsure (1)..(643): unsure at all n locations
  Clone ID: TF_GmC240088_1
tcgatccagcgtccgatttgtttgctttgtgccaaaagcctcacccgttgaaaccgtccgctgcacttgtgccttttttcccaggctttggtctctgctttgttttttctcagagatcaacagcaacaacaacaacatatgagatgagattcttcttcacatattaacaacgtgaacccttttcttctcttcttctttctaatggggtggggagggaaaggaaagttttttttttgtttggtggggatataatataacttgttgtgaattgatgaagaagacgtagaaacacaggttcctctagtggtttttaagttgaaggcgtagagagtggtgcagacataggaataggatatgatatgatggcttccgttgaagaaaagattaaaactggaggagttggaggaggaatggttgttgggggtcaaactcttgttgctgagatgaaactgttgaaagaaatgcaagaacattctggggtcagaaagactttgaattcagagttatggcatgcttgtgcaggccctcttgtgtcactaccccaggttggaagccttgtggtgtacttcccttaggggcgtantgagcaggtggggggttgtactggagggacgggggggtcggggtttgccccccactcccg

SEQ ID NO: 26801 - DNA, 975 bp, Glycine max
  Clone ID: TF_GmC216969_1
ccacccgtccgctttctccctcctctttttctcatccaccaacaccaattcacttttcttcttcttcttcttcttcttccttcattttcttctctgcatctcacactgatcataccccaaacaacccttttgagatatgtttatggttatggattcagcagaaaggtgcttagattctcaactatggcatgcctgtgccggtgccatggttcagatgccacccctcaacacaaaagtcttctactttccccagggccacgctgaacacgctcatgggaaggtggaatatttcgggaaaaaccatcaaacccgtgttccaccactcatcccttgcagactctctgccatgaaatacatggcagaccctgacaccgacgaggtttatgtcaaaatgagactcacccctttgagggaacatgaattattggattcacaagatgattgtttcttgggaaacacaaacagtggaggagttgagaatcaagagaagcctccaacttcttttgctaagactctcacacaatctgatgcaaacaatggtggaggcttctcagtgcctcgttactgtgctgaaaccattttcccaaggttggattattcggctgagcctcctgttcagaccatcattgccaaggatatgcatggacagtgctggaagtttaggcacatctatagagggacaccaaggaggcatcttttgaccactggatggagcaatatcgtgaaccagacgaggcttgtcgctggcgactctattgtgtttctgagggcagaaaatggggatctctggtgttgggataacgcgggctaagatggggattgacggagggactgagtgaccttacggtggatggtataaccctctgtttggtggtggctccttgtgtgagagtgagaacaatgtgatgagcggcgctgatcatgagatgttcgagggaagagtggctgctgaatatgatgtcgaggctgagacta

SEQ ID NO: 26802 - DNA, 2795 bp, Glycine max
  Clone ID: TF_GmC1058_2
cctttgcgttcggagagtgataggtgagtggggagagaaagacagagagagaaagcgggtcagtttctttttggagtattgggtcagcttcttttggcaatgccaaagttggtcacgctctctgaaaatgcagcagctgcagcagcaggaggcatgaagaacaacaacctcaccactccttcaaatatcatcatttctcactcgttacttcactttcttctttgcttctctctcttcttccctctcctttctcattcttctcctcatggctggtctcatcgatctcaacaacgcaaccgaagacgatgaaatgccgtcgtctggctcctcctccaccgtgtgcctcgagctctggcacgcctgcgcgggtccattgatttccttgcccaagaaagggagtgttgtcgtgtacttccctcagggacacttggagcaacaccttcacgattttccgctccctgcctctgccaacatcccctcccatgtcttctgtcgcgtcctcgatgtcaagcttcatgctgaggaagggagtgatgaagttcattgccaggtggtgctggttcccgaaactgagcaagtacatcagaagctgcgggagggggaatttgatgctgatggtgaagaggaggatgctgaagctgtgatgaagtccacgacgccccacatgttctgcaagactttgactgcttctgataccagcactcatggtggattctccgtgcctcgtcgcgctgcggaagattgcttccctcccctggattacagtcaacagaggccttcacaggagcttgtggcgaaggatctccatggccaggaatggaggtttcgacatatttatagggggcagccgcgaagacacctgcttactaccggttggagtgcctttgtgaacaagaagaaacttgtatctggagatgctgttctgtttctcaggggtgaggatggagaactgagattgggaattcgtagggcggctcaactgaaaagtggcagtaccttttcagctctttctggccagcaagggagtcctaccagtcttatggatgtggttaatgctttgtctgcaagatgtgcctttagcattcactataatccgagggtcagttcatctgagttcatcatacctatccacagattcgtaaagagccttgattattcttattcagctggaatgaggttcaggatgcgcttcgaaaccgaggatgctgcagagcgaagattcacaggattaattgttggaattgctgatgtggatcctgttagatggcctggatctagatggagatgcctaatggtaaggtgggatgacttagaagccacaaggcataatagggtttccccatgggagattgagccatctggttctgcttctactgcaaataacttgatgtcagctggtttgaagaggaccaagattggattgccttcagccaagctagattttccagtttccaatgcgattggaacatcagactttggggaatcactaaggttccagaaggtcttgcaaggtcaagaaatgttgggtgttaatcctacttatgatagttttaatgctcagagtcaccagctatctgatttgaggaggtgctatcctggctcgaactatcctaggattgctgcaacaggaaatagcattggaatcccacaagtgagttccaatgtttccagcaacggcataggctttagtgaatctttcagattccagaaggtcttgcaaggtcaagaaatacttcctagccaaccatatggaagggccctgtctgttgacgaggcttgtggaaatggtcgctgtggactctttgatggtttccaggcgatgagatccagaaatggatggtcttcccacgtgagcaacaattcctcacatttgcatcctcctgttccatctgggcaagtttcatctccgtcatctgtgttcatgttccagcaagctgtcaatccagtttcaaactccgattataacaaccaaattggtcaggtgatgggaggtaaggtccatcagcgagtttcatatgcgtctgaagttaaaggcggaaaatttgtatcaaccccctatgagcctcttctccgtggactatctcaggaaggcacaaattcttttggtctttcaaactttcataatcagctggatagttcacgttcacacgattctgtttcagtactgagagctagtcaagagttggttccctcgtgtaaaagtagatgcagagtctttggattttcattaactgagggtgctcccgttgcaagtaaagaggcgactgactcatctgcagttgcttgtgctggaccttcctttacaagacatgttgaagatgatttccatccagggcattcacttaggagcaaggcagtggcaagttattgcaccaagggtgtgctgcaatattgacttggaaatcttgatgtatgctggtactgatgctggcataaggtagcagaagagaatgtccacagttgttgtacttgtgtgctttgctctagtgacttggaatattgggagactaaaatattgtaactattcgtctaatttagatacttgttaaattggctatgaccacgttctagattctgtattaatcatgtatctacccttcattgacttgtatggggaaaacctctaaacgatgcatgtttatccaccgttttggccatatgaacaaagtaagccaggtggttgtgcataacccttcatttatcttgaattgggcattgattacattagagagcaatagctctcttaatgtttcatgtccttaatgttgtctccatttttactcactgttcaaaaa

SEQ ID NO: 26803 - DNA, 2906 bp, Glycine max
  Clone ID: TF_GmC340_3
aaaaaaaagaaatgaatatactaaaaaaatgtaatccgcttgatgggcgtgggacagtgggggaagttgtaggggtttcagggcacgcattctatcgctgtttctctcgaatcaacaaaacgccaccgtttcattgatctacttcctccaaggccaggtctccaagaattggtaccaattcaagctgcaaatatacttgaacttcaacttatcccacattctccactctcaatggcttcaactctcaaatctggcggaattcatacaggggcaatcaatgatgatttatacaaggaattgtggcatgcatgtgctggtccccttgtcactctccctcgtgaaggggaacgagtctattactttccacaaggtcacatggaacagcttgaggcatctatgtatgagggattagagcagcagatgccttccttcaacctgccttctaaaatattatgtaaagtggtcaatgttcatcttcgagctgaacctgaaacagatgaagtatatgcacagataactttgcttcctgaagcagatcaaagtgaggtgaccagccctgatgatcctctgcctgaatctccgagggtcaagatccattcattttgcaagacacttactgcttctgacacaagtacccatgggggtttctctgttcttcgaagacatgcagacgattgtctgcctccactggatatgtctcagcagccaccatggcaagaattggttgcaactgatttacatgggaatgaatggcattttaggcatatttttcgagggcaacccaagcgccacttacttaccactgggtggagtgtctttgtcagttccaaaaaattagctgctggtgatgcctttatattcttaaggggtgaaaatggagagctgcgagttggggttaggagggtcatgagacagcaaagcaatgtgccttcttctgttatatctagtcacagtatgcatcttggtgttctggccactgcatctcatgccattgccactggaacactgttttctgtgttttacaagcccagaacaagccggtcagagtttattgtgagtgtcaacaagtatctggaagttcagagtcataaactctctgttgggatgagattcaaaatgcgatttgagggtgatgaaattcccgaaagaaggttcagtggcacaattgtgggtgttggagataataaatcatcgtcggtctggcctgattctgagtggcgatcattaaaggtgcaatgggatgaaccatcctcaattttgcgtcctgacagagtttcatcatgggaattggagccacttgtgtctaccactcttgcaaactcgcagccaacccaaagaaacaagagggcacggcctctcattctaccttctacaatgcccgattcttctttgcaaggtgggtttgctgggttggttgtgcagaatttctttgtcattctgctgcccattctgtttttctacataatcatctttctttgtgcaccaggcatatggaaatcatcagttgaatctacctctttctcttattgtgacccccaacaaggacgtggcctctatccatcaccaaagttcaattcttctgcaactaactttattggttttagtgggaatagctctgtgggatctccttccaacaaatcaatatattggtctaataggatggaaaataacttggaatctatttcagctatagctcttaaagaagctggagagaagagacaaggcactggaaatggctgtagactctttgggattcagctacttgagaattctaatgcagaaggaaatctacaaacagtcactttgtcaggaagggtgggtgatgataggtcggttccatctttagatgctgagtctgatcaacattctgaaccatcaaatgccaaccgatctgatattccttcagttagttgcgatgctgaaaaatcatgcctgcagtctccccaggagtcacaaagcaagcaagttcacatgcaaggaatggctgttgggagggctgtggatttaacacgatttgatggatatgaggatcttctcaggaaattggaagatatgtttaacatcaagactgagctctgtgggtccctaaaaaaatggcaagttgtctacactgataatgaagatgatatgatgatggttggagacgatccgtgggatgagttctgtagtgttgtgaggaaaattttcatctacacagcagaggaggtgaagaagctttcaccgaaaataagacttccaatgaatgaaaaagttaacccaagcaagcaggattcagaagcaatagtgaatcctgaggaccagtcatctaatatggggcccagctgctagaagtcgtatgaattccagttccagtatatcctagttgttatgaatgcaataaatgttggtgtggagagaggcgataatgaactaaaggtggccggccaatactaataggagcatgcatatcacttccacttgtgtattgtattgtattgtattgtattgtattgtattgtattgtattgtattgtgcagctaggctggctggctggcatgacgtcagcaagcaagaatcgacgcagagggttgttttgagatactgctgtttgatcttgccttgccttgaatgaaagatattgtgggttttctatttcttctacggctcggttatcttatcgccgggagggagtgtagtggtccttgctcattcggttttgagttggccgcaagcaccaacatgtatgtctttacttaatatcatgccatgcatgatatgatctttttttttttgttttttatgagaggggtgggtattttcttttgtaactcactcaatgtgatgcatgcctttttgtacagaagtatttattattatcttcgaatgctatttatatgtacgaggcataaccctccgttctcccgct

SEQ ID NO: 26804 - DNA, 768 bp, Glycine max
  Clone ID: TF_GmC245555_1
ctgacgcgtgggcggacgcgtgggcgccaccccagttgatttgccaacttcataatgtcacaatgcatgcagatgttgaaacggatgaagtatatgctcaaatgacattgcagccattcgtccggcaagagcagaaggatacatttctttctatggaattgggcattccaagtaagcagccgtcaaattatttttgcaagacattaacggccagtgacaccagcacgcatgggggattctctgttcctcgtcgtgcagctgagaaagttttccctccactggatttctcgcagcaaccgccggcacaggaactaattgctagggatctccatgatgttgaatggaaatttcgacatatttttcgaggacagccaaaacgacaccttcttactacaggctggagtatatttgttagtgccaagagacttgtggctggagattctgtgcttttcatatggaatgagaagaatcaacttcttttgggaatacgtcgtgccaatcgaccgcaaactgtaatgccgtcatctgttctatccagtgatagcatgcatatttggacttcttgcagccgctgcccatgctgcagcaaccaatagctgtgttacccgtattttataatccaagggctagtccatctgaagttcggcataccactttcaaaatatataaagctggtgaccatacacgtattttctgttggggatgcgtttcaggaagctttttgagactggagaagccaagtgtccgcaggtataatgggtacaataa

SEQ ID NO: 26805 - DNA, 3040 bp, Glycine max
  Clone ID: TF_GmC630_2
acgcgagaagacgacagaagggcgcctaatgattagtagattgatttccatagctttcagggaacggtctgcctcccataccagctaactaacactggattcaatgattttagctgtctagatcaaaactgccctatgtaatgttgttacaatacatgaattttgaatctagtttagtagaggaatttcatggtgtaacggtttcatgtgagccacgcgtacggtcctaatctttaagatcctcagatgtcaaacaaaaaaaaaccaacaaccttttcctttgggttagtgagctcacgttgaagttgttagttcaaagacttttactctcttcactgatgacgagtaggttatgggaaggttctggggataacggattccccacccgatgaatgccttcctccgctggacatgtcaaagcagccacctacccaggagttggtggccaaggatctgcacgccaacgagtggcgattcaggcatatttttcggggtcaaccgcgtagacacttgctgcaaagtggttggagtgtttttgtcagctccaagagactagttgctggggatgcgtttatatttttaaggggtgagaatggggaacttcgagttggtgttaggcgtgcaatgagacaacagggtaatgttccatcatcagttatctcaagccacagcatgcatctcggtgttcttgcaactgcttggcatgccatattgactggcaccatgttcactgtgtattacaagcccaggactagtccagcagagtttattgttccctatgatcaatacatggagtctctcaaaaacaattataccattgggatgcggttcaaaatgaggtttgaaggtgaagaggctcccgagcaaaggtttactggtaccattgttggaattgaagatgctgataccaaaaggtggccaaagtccaaatggagaagtcttaaggtgagatgggatgaaacatcaaacataccacgtcctgagagagtttcacaatggaagatagagcctgctcttgctcctcttgctctgaatcctctaccaatgcccaggcctaaaaggcctcgatctaatgtggttccatcatccccagattcctcggttcttactcgtgaagcttctaaagtaagcgtagatcctttgccaacaagtgggtttcaaagggtcttgcaaggtcaagaactttcgaccttgagaggtaattttgctgaaagcaacgaatctgatacggcagagaagtctgctgtgtggccacctgttgcagatgatgaaaagattgatgtttctacctcaagaaggtatgggtcagacagctggatgtcaatgggaaggcatgaactaacatatccagatctgctttcaggctttgggacccatggagatcattcatcccatccatcctttgttgatcaaaatggtcctgtagctaatgttggtagaaaacatttgttggattgtgaaggcaaacataatgttctgagtccttggtctggagtgccatctagcctgtcactgaatcttttggactcaaatacaaaaggctctgctcaaggtggtgatacaacttaccaagttcgagggaatctgaggtatagtagtgcatttggtgagtaccccatgcttcatggacataaagttgagcattcccatagaaactttttgatgccaccaccaccatcaactcaatatgagagtcctcgttcaagagaactgttgtccaaaccaatatcaggaaaaccttgtgaggtttcaaaactgaaagacagtgactgtaagctatttggcatctcacttcttagtagccgccccattgcatcagagccttctctatcacaaagaaatgttacaagtgagtcagttggtcacatgcatacagcatcacaccatcaacgtgcaattgaaaacgatcagaagtctgagcattctaggggttcaaaaccagctgatggtctgctgattgatgaccacgaaaaggtgttacaaacttctcagccacatctgaaagatgtacaagcaaaatctcatagtggttctgctagaagttgcactaaagttcacaagaagggtattgcacttggtaggtcagtggacctcacaaaattcagtgattatggggaattaattactgaattggatcaactattcgaatttggaggtgaattaacttctccacaaaaggattggcttattgtctacactgataatgagggagatatgatgcttgttggtgatgatccgtggcaggaatttgttgcaatggttcgcaaaatttatatctaccccaaagaggagattcagaaaatgagcccgggtaccttgagttcaaagaatgaagagaatcaatctgctagtgaaggtgccacagacacacaagaaatcaagtgtcagctcaataattcagcttcagatacctgataatttgtagatttgatttccatagcttccagattccggactggagtggaaagtagaggtgactgtcataaagccatccagttggagaatatgacctgatgaagaaaattctaattctgaatctgactgctttatcaagtgactgcttgtgtttggaatctgaatatggatggcatgaatgagtatccatccaattttggaccgtgtcgtggaattagtagtagtagtagtagtagtagtatatatgccttccctgttatacactcctaatatagtagtatgttattgtgccttgtgcaaggtgataggggggtgtatcggccttgcatttttcaacaatcctaccttgtacatagttttactcgcatccttagtacccaaactcgttaatgtaattaagtgtcatatacaagggcggtttatctgattttaaatatgattgtctcttatttgtagtggggtaatttgtgccagtatgcctaatcattgtggatattaaaatattagtatgcgtttgggtagtagatgtattattaaattttgcccctaaaaaaaaaaaaaaaaaaaaaaaaaaaaaaaaaaaaaaaaaaaaaaaaaaaaaaaaaaaaaaaaaaaaaggatatat

SEQ ID NO: 26806 - DNA, 2042 bp, Glycine max
  Clone ID: TF_GmC144398_1
gaatgcagacgctgatgtattttcacattaatttcttttccctcgttgattgtctgaaaccgtggacactcgaaaggtcatatcgcattcacatgtataagtactaaatataagtaatatatatatatatatatatatatatatatatatataaagcaaaaatgcgaaaaattgtgaaatgaaatgaaagtatgaaaccttctctctctctttctttctctccctagaaaagataaatcatctgacacagggacacagtctctttctcctccttaaaaaacacccaaaaacaatggcggttctgtcttcattcgctcaagcatagaaagagaaaagcaacagtagcacgaccatagtcgccgccgaaactgctacccattttcccttatggctgcttagaaaaaaagaaaaaaagaacagacccggtttttttttaagaaaaaaaaattctaaaggtgtgtatcacactgttttcttgtcacctccgtgaaaaaggaacaagtacctacgtttgtaaccgtggtcgttttccgttgcaacgtttgcttcggttttttgtactgtggagtgagtgcttgtgctgattcccaagtcccattttgcgcttttttcccggctttgcttgagatccggttaccctttgggatttgtagctcctttcgctgagatctgtttcgttttggagtttcttcgcttgtttggtttttcacgttgttgccaaaaaaatgttggtgatatagaaaaaggggttaaaagaaggtgctggagcgtgttacttgctattggtggttcaagcgttgttgtatgatgaagtgttgggttgaagatttgaactttgggtggtggtgtgggttgacgagggtaggaagcgaatgaaaggtaggagtagaacaattgtgttttgtagtgaaactggtattggttgaggattaaaaaaggtgggaattttcagagtttcttagcgtttctcgttgatggttgagggaatttggcatctggggtgtttgagttttgttttgattcatttgggttttggttggtgaagggggggttaaaggtaaaaaaagaatgctattgtggaggaaggaggaagggaagaaagggattgttgtttggtttggggtgaaggttgggggaattttgttgctgctaaattgttctacttaagagttttgcttcaatcattgatttcggggctgggttttaaggtttgaaattgctgaaagtttactgaaatgaaactttcttcacctggttttagtcctccaccccaggaaggagaaaagcgagttctagattcagaactttggcatgcttgtgctggtcctcttgtttctttaccagctgttggaagccgagtggtatactttccgcaaggtcacagtgaacaggttgctgtgtctaccaacagggaagtggatggccatatacctaactatccaagcttaccaccgcagcttatttgtcaacttcataatctgactatgcatgcagatactgagacagatgaagtatatgctcagatgaccttgcaacctcttaatcctcaagagcagaagggagcataccttccagctgagttgggcactccgagtaaacagccaacaaactacttctgcaaaattttgacagccagtgacactagcactcatgggggattctctgttcctcgcagggcagctgaaaaagtttttcctccattggacttttcacaacagcctccttgtcaagagttaattgctagggatttgcatggtaatgagtggaaatttagacatatcttccgtggccagcccaaaaggcatctacttacaacaggatggagtgtgtttgtgagtgctaaaagacttgttgccggtgattcagtgcttgttatctggaatgaaaagaatcaattgcttcttggaattcggcgtgctaatcgaccttaacctgtgattgcctcatcagtgttggcaaagtgatagcattgcactggggccttcttgctgcttgaagctcattgccagtttcaactaaattttcgttttacccttctttta

SEQ ID NO: 26807 - DNA, 522 bp, Glycine max
  Clone ID: TF_LIB4280-012-R1-K1-C7
ccacgcgtccgctctcattctcattccattccattccattccgttgctatgtttcaaaaccctaaccaaaccctcttagcattctctcttgtgtaacgaattcaatttccgtgatgcctcgccaacctccgccttcacctccgtctcagcctggtgttctcgaccctgcactctggcttgtctgcgccggaaccaccgtggagatccccaccctccattctagggtttactacttcccccagggacacttcgatcaagcctcttccgctccaagaaacctctcccctctccttctttcgaaacccgccgttctctgccgcgtcgaatcggttcaattcctcgccgatcctctcaccgacgaggttttcgcgaagctgattcttcaccctgtcgctgattgcttcgcttcgggaccttccgctggtgctcctgctgctgcttctgcttccgctcaaaccggtgagaataacgtcgtttctttctcgaagggtctcactgcttctgatgctaataacgtggggg

SEQ ID NO: 26808 - DNA, 1876 bp, Glycine max
  Clone ID: TF_GmC1238_1
cccacgcgttttaactaactacaacacagttataatattttaaccattatcttccatgaataaaacaaagaaatatctataggaatatgacattttcttcctgtgttgcaggtgtactagtggtatagtgactggaatgagtgatttggatccctataaatggcccaagtcaaaatggaggtgcttgatggtacatttgctattttttctttacaaactacgcagaatgttttgaccttatattgtacatttagcatttgctctggattttatcttcaccgactttgccattgaagatatgttatgcttcatcaaccttttattgaagatgcattttcatgcaggctgccacacccagtcacctcaccactggtatgaatcccaaatcctaatgccgagacagccaaagtaaaataaatcagtaaacttcgagatcctaatcatcctcttgggagaaaatacgggttttatgtcactatattatggatgtgacacagtaactaagcacttctgcatctgtgtcagcaggtgcgctgctcctgcgttggggtgggttcgcccttctgggtttgcgggccccgcgggctcctccaccttgccatgggcctcccgaggccaattcggctcgacagagttattatcccaatttcctttcttctgtggctaatgctatatcagcgaaaagcatgtttcatgttttctacagtccaagagcaagtcatgcggattttgctgtgccctaccaaaaatatatcaaaagcatcaagaatccagtgaccatcgggacaagattcaaaatgaaatttgaaatggatgaatcttccgaaagaaggctcactttctccgacaggactggaatgagtgatttggatccctataaatggcccaagtcaaaatggaggtgcttgatggtcagatgggatgaggatattgagattagtcatcaagatagagtatctccatgggagattgatccttcttcgtctcttcctcccttgagcattcaatcctccagaaggctgaagaaactgaggccaggtctgcaggctgccacacccagtcacctcaccactggaggcagtgggtttatggactctgaggagtcagtaagatcatccaaggtcttgcaaggtcaagaaaatacgggttttatgtcactatattatggatgtgacaaagtaactaagcagccagaatttgagatcagatctccaagtcatcctaatcttgcatcaactggagtgagaaagatttctgctgctgagtttatgagggttcacccttctagttttgcaggcttttcggaaactaacatgtttccaagggtcttgcaaggtcaagaaatatgtccggctagatccctaacaggaaaggctgatttgaactttggttcttggggcaaacccaatgtcagttactcaaataacaacctgcatcaggcaaccaaacctagctttcactctttaggaccagaagttattcaaactgcatatttcccttatggtgatattcacaatgctggtcaaggtagcagcatcttgtgctccaaaccgaccaatttccaacgagagaatatcccatttaacactccttctactcagtcagggatcatgagaaatgaagttggacggtcagacatcacaattccaaatgagcagaagctgcaggacaatatttctggtactgcttctttaggggcaaacatgaggattccaaaggatgacaatttcaaggggcaggtaaaagcttgtaaactatttggaatttccttgtccggggaaactaccgcccaaaatttacagaactctgctaaaagaagctgcacaaaggtgagcgacgatagcaacagagttatattgtgaaatatgcctttttt

SEQ ID NO: 26809 - DNA, 2378 bp, Glycine max
  Clone ID: TF_GmC695_2
cgaagtccattcactattttctacaatccaagagcatgcccctcagaatttgttattcctctggccaaatacagaaaatctgtatttgggactcaggtctcagttggcatgagatttggcatgatgtttgagacagaagaatcgggtaagcgcagatatatgggtacaatagttggtatcagtgatgtggatcctttaaggtggcctggttctaaatggcgaaatattcaggtggagtgggatgagccagggtgtggtgataagcagaacagagttagtgtgtgggagattgagactcctgaaagcctttttatctttccttctttgacttcaggtctaaaacggccattaccatctggtcttttggaaaatgagtggggaactttgttaagaagaccctttataagagttccagaaaatggaaccatggagctctcaaactcaattccaaatctctactcagaacacatgatgagaatgcttttgaaaccccagctgattaacaataatggagcttttttatctgccatgcaacaagaatctgctgctacaagaggccccttgcaagagatgaagaccacacttgcagcagaaaaccaaatgccacttaaaaatctacatcctcattctatccctgaccaacctaatgccttaaacatgcaatcactgttgaaaaacgaccaacctgaaaaattgcaccctcttggcaaaattgataatcatctgtcttctgggatagttattgacaagccaaaatcagaatctgaggtattacctgatcatgtgattgactacccttccatggaagggtgcaacatcgaaaaggtggcagcaaatcctgttaaccagcaaggtctagcaaaccaattgccattccataatcaaaaccagagtccactactccctcaatctagtccatggcctatgccacctcagatagaattgtccatgccccatcctcaaatgattgatatggttcaagctgattctgctatggtaaatggcctgtttcctcagcttgacatcaatgaatggatgtcatatgcttcttcccaaccttttgctgggcagaacagaccaactggacctttgtctgacttgcaagaacatacctcacttcagcctcaagtagtgaatccccctttaccttcaatgaacaatgaagtgtgggatcattatgtcaagaacttgaagttcttatctcaagcagaccagctaacatccatttgtcagccggggctgtatggctcaatggcataccaagctcaaacaatttgagggatctttcagctgagagcaacaaccaaagtgagatttgtgtcaatgttgatgctagcaacagcgtaggcaccactgtggttgatccttctacttcaagcaccattttggatgagttttgcacaatgaaggacagagaatttcaaaatcctcaagattgcatggtgggcaacttgagttcaagccaggatgtccagtctcagataacttcagcaagtctaactgaatcacatgcctttcctcttagagacatccctgacaactcaggtggcacttcttcaagccatgttgattttgatgaaagcagcttcctgcagaataactcgtggcagcaagtacctgcgcccatccgaacttacacaaaggtgcaaaaggcaggttctgtaggaagatcaattgatgtgactactttcaagaactacgaggagttgatccgtgcaattgaatgcatgtttggactcgatggtctgctgaatgacactaaatgttcaggatggaaattggtctatgtagattatgagagtgatgttctacttgttggtgatgatccttgggaagaatttgtgggctgtgtccgctgcataagaattttatcaccttcagaagttcagcagatgagtgaagaggggatgaagcttctaaacagtggggctttgcaagggatgaatgtttgaatattaggtggtggctgcatacaatgtctcactaagccttgctttgcgatgttcttgtataaggttaacctcaaatggctttatcgtccaatgtttgaaaagcaaaggcatatgttgtggaagaagtcaggattattgacttgggtgtcatgtgatgtattattattaactaaaggacactcgttatttgaaacatttcttaaggtatggagcaaaccttggagatggaagagtttaagttttattattacttatcaaaagttctaagatgatgttccaatgagtcaagggtgttgcataccttatgttgtaagacattcttgctggcaagaggaaatattatgatttattattaatacgcattgggggctttccaaaaaaaaaaaaaaaaaaaaaaaaaaaaaagcggccgctctacaggatcca

SEQ ID NO: 26810 - DNA, 710 bp, Glycine max
  Clone ID: TF_GmC240259_1
gtccggggatattgtcggcgaaggtggttgccgaggcggcggagctggcggcgcggaacatgccgttcgaggttgtttattatccgaaggaaaggtggtcggagtttgtggtgaagactgaagcggttaatgaagcaatgaaggtcgcgtggagtcccggattttgagtgaagatcgctgcggagacagatgattcgtccagggtgtcgtggtgtcagggtacggtctcttctgtcgctcttcacggtaatggccaatggcgcggttctctttggcgtatgcttcaggttacatgggatgaacctgaaggtttgcagatagcaaaatgggtcagcccttggcaggtggaacttgtttcaaccacacctgcacttcattcagcattccccccaataaaaaggattaaagctgctcatgattctggggtgtttactaatggagagagagacccctttcctatgacaggattcactaattcgacaatgggacaactgaatcaggcattgttgagttatggtacttttcctgctggcatgcagggagccaggcatgatgcattttctgcatcaagattttgcaattatccaactgacatgtctcgtctgtgtatgggtaattcctttgggaagagcacatttccatggctgaaaacattggaaacagaggtaaatgttggcagctctcaatctgatgaattgtcacctgatagt

SEQ ID NO: 26811 - DNA, 2855 bp, Glycine max
  Clone ID: TF_GmC127069_1
ccacgcgtccggtggatgtgagactcctataaagtcctgccacaacaaaagattggggaaaaaaacagaataggctctgtaactaacgtggtgaggccaggaaggaagtgtgtgtttgttttcctcactcaaaacgcgcgttaggagtcccgttcaacgcaatttctgttagaaaaagctttggtgttgaacgtcgtggttagctccaaagcctaaccaatctgtagcagctcaattatcccttcacgatccgacgaaaaaagccgactcacacacataacttgtttttctggcttctcaagatacggcgtttactttttcagatccgacgaaaaaccgttttgggaaattaacaagatcagtgaaagttgttgagtgagatgattacattcatggacacaaaggagaaatcaaaagaggtggagaggtgtttggatcctcagctatggcatgcatgtgcaggtggtatggtacaaatgccaacagtgaactctaaggtttattacttccctcaaggtcatgctgagcatgcatgtggaccagttaacttcaggacttgtcctaaggttccaccttttgttccatgtagagtgactgctgtcaaatacagggctgatcctgagaccgatgaagtctatgccaaactcaagctcattcctctgaatgccaatgatgttgattatgatcgtgatgttgttggtggggctgaaactcaggacaagcctgcttcatttgcaaaaaccttgacccaatctgatgccaacaatggtgggggattttctgttcctaggtattgtgcagagacaattttccctcgtttggactactcagttgaccctcccgttcaaaacatccttgccaaggatgttcatggagaaacatggaaattcagacacatttataggggcacgccaaggcgacatttgttgactactgggtggagtacttttgtgaatcacaagaagcttgttgctggggactcaattgtgtttttgagggcagaaaatggggatttgtgtgttgggattcgacgagcgaagaagggaatttgtggtggacttgagacttcctcagggtggaatcctgcaggaggaaattgtcatattccttatggtggattttctccctttttgagggaggatgataatagaatcttgagaaatggcaatagcaatggattgaaccctagtgtaagtatgatgggaaagggaaaagtgaggccagaagcaattattgaagctgcaaatcttgcagccaataagaaaccctttgaggttgtttactaccctcgggcaagtactcccgagttttgtgtgaaggcctcactagttgaagcagcaatgcagactaggtggtattctggaataaggttcaagatggcctttgaaacggaagactcctcgcgaataagttggtttatgggaactatatcttcggttcaggttgctgatcccctaaactggcctaactcaccttggaggcttctccaggttacatgggatgaaccagatttcccccttgatggccagattcctttgccgacacttcccaacaaccttctaggtcccaacaacaccaaccaatttggttgtctactcgaaagtactcctgccgaatcggctcgagccaggcatgctcattatggtctatccttatcggatctccacctcagtaaattgcaatcaggtctatcttcggctggtttcccgcctcttgatcacactgctacgccaatgaaggtctcaaataacaagacattgcaaaagcctagcatcagtgagaacgtctcttgcttactatctatgacaaattctactcggtcttcaaagaaattggatgctgggaagacaccttcgctcatgctttttggccaaaaaattctcactgagcaacagatctctccgagcagctctgttgatacactctccccagttcttaccagaaattgttcgacagatggaaatgtcaataaagtgactaatttttttgatggttttggatcagctcttcatcagcaaggtctacacgaacactcctcttgtgagcaggtcccagtggtgtaaggataatccccaagaaactgaggctggtttggagattggtcactgtaaagtttttatggagtctgaagatgtgggtcggactatggacctctcgttgcttccgacttatgatgaattccatagaaagttggcagacatgtttggcatagaaaaatctgaaatgttaagtagggtgctttactgcgattcagttggggctatcaaacacattggtgatgagccattcagtgacttcacaagaacagccaaaaggttgactattctaatggattctggcagcaacaatgtaggagtgtagtggggcagaataaactattcttttaattgtacagatagttcacgaagtctcattttctaacctttccctcttcctggtgcaatggaaggagacaacctaatttattttttgaatatcaaactctacataaatgtttctattccatctcaaaggggatttttggatttttgaattttggttagagtgatcataacttgtgtttccctttttctttttgtttttttctgtcaactatctctttatctttgcctacttgagtttccttttaaaattttgttggggaaaaaggtggaggacaaagagagaagtttgaaatcctataaatatgattggtttgtaagcaggtaaaaatgtatttgatctgaatactagttgaaacaaaaggagagtcattcttgcttttatgtattcacttgttcaaagattgtaccattttcttcttgttgttgccttataaattatttgctattacaatttaatcttgcattgaatgc

SEQ ID NO: 26812 - DNA, 460 bp, Glycine max
  Clone ID: TF_GmC137804_1
gttattattcaattgtttagttttatagattacagagagtgtgtgtaagagaaaaaagttgtccccctcttttcccttcttctttctctgagatccaaaaaaaaattcaggtgaggtcttgtgtggtagataactgactccactcaactcaacctttttgattttgcattcactgagagagagagagagagagaaagaaaaacataaaacataaaacatcagcatcaatacagagtttaactgaatcatcatcagttttggttcgtgccggtgccgccgcaatgaaggaaacagacaagagtttggatccgcagctgtggcacgcgtgcgccggcggtatggctcagatgccgccggtgaactccaaagtgttttatttcccgcagggacacgcggaacatgcgcagtccaacgtcgatttctgagcggcgaggattccgattccgccgctcattctgtg

SEQ ID NO: 26813 - DNA, 514 bp, Glycine max
  Clone ID: TF_GmC5800_2
ggagagtattgggtcacagcctcttttagcaatgccaaagttactcaacaacacctcacgctctcggaaaatgctgcaggcatgaaaccattcattccaaccttcaactccttcttccaaacctctccttcacttgttagatttgttcacattgcaaagagatttttgttgctatggggttgatcgatctgaacaccacggaagatgatgaagctgctccattatctgcttcttctccagcttcatattcttcttcttcttctcactcggggataagcacttctgcttcaaccttggttgttcctcctactcctccttctgtgtgcttggaactgtggcacgcgtgtgcgggccctttgatctctctgccgaagaaaggaagtgttgttgtgtacttgccacagggacactttgagcatgttcaggattttccggtcactgcttatgatatcccaccccacgtgttctgtcgtgtccttgatgtcaagctccatgcagaggaagggagcgatga

SEQ ID NO: 26814 - DNA, 1581 bp, Glycine max
  Clone ID: TF_GmC1198_2
ccacgcgtccgagagagtttagtttggtcattcattattccaaccgagtaacgccgtttctcttcttcccttcgtttcacaggcaaagaccgcaacagcgtcgtcgtcgttcaacggaacctcttcttcttcttcatcttctgaagagtttttcttttttgttttttttaactcttacgttagaagctgtcttcttctcagttttgtaataacgggatctcgtaaaggggattcacttattattcagattagtgacaaaacttgacaaaacgaatcgttttgttttcgtgaatatttcttattttctttaatttcttttctggggcgttgacttgggttgaaccatgttgagccgcggggcgcatggcgaagtggttggttctggtgagagtggtgaggatgagatgtatgagcagcagtggaaggcatgcgcgggaccactggtggatgttcctcgtgttggccagagagtcttctatttcccacaaggccacatggagcaattagaggcttcaacaaaccaggaactgaatcagaggattcctttgctgaagcttcccacgaagatcctatgtcgagttgtgaatgttcatttactggctgagcaagaaacggacgaggtttatgcgcaaattactttggtgccggaatctagtcaagacgagcctacaaatgctgatccgtgcactgctgaacctccaagagcaccagttcactcgttcagcaaggtcttgactgcttcagataccagcacccatggaggcttctccgttctcaggaaacatgccacggaatgccttcctgtgttggacatgtcccaaccaacaccaactcaggaattggttgcaaaggatcttcatggttatgaatggcgctttaagcatatatttagaggtcaaccacgcagacacttgctcacgactggctggagtacttttgtgacctccaagagattagttgctggagatacctttgtgttctcagcttggcctatttcaaaacctcactcagagagattgaacaatgatcatttccttgaccagagaatgcatctggaatcacctctgagtgcaaaattgatgtaaaccatgtgtccgatatctcaaaggcttctaaagaatggaaccaagaacagctacaactatctccaaaagagactcaaagcaaacaagtttgtagcagaagttgcactaaggttcaaatgcagggggttgcagtgggtcgtgccgtggatttgaccacattggatggatatgatcaacttgtagatgaattggagaagatgtttgacataaagggacaacttcaacttaggaataagtgggaaattgtcttcactgatgatgaaggggatatgatgcttgttggtgatgatccatggcttgaattctgtaaaatggtgagaagaatcttcatttattcaagccaggatgtgcacaaattgagctcagggagcaaactacctatctcttctatggaagagattgtaacaagtttagacacaaccgagacctgaaacttttacattcttgtcctttctactttgttaggttttcttcttcttctaaaacaaaaaaatca

SEQ ID NO: 26815 - DNA, 405 bp, Glycine max
  Clone ID: TF_jC-gmst024114e07a1
ggctcgagtgctcacaactggggttattgcatgtgtgaacaaaacgaagctggttgctggagatgctgcgatgttacttaggggcaaccatggagaactgagattagggatacgctgggcagctcatctgtaaagagctggttcgtaggcaggtccctctgggcaggaattgaatactgcaactctgaagggggtggggaacgcattatctacacgaggtgcatttagtgtgcgctacaatcacaggatgagctctgcacaagttatcatacctgttcacagattcttaaagagccttgactgctcttattcagctggcatgaggttcatgacgcatgttgaaactgaagactcggctagagccaagatgcactggattaattgctggaattagtgatgttgatc

SEQ ID NO: 26816 - DNA, 1141 bp, Glycine max
  Clone ID: TF_GmC74745_1
gcggattgcggctcgcgtcgtctttcaaacccaaaaatcctcacttgggtctcaatccgaaagcgataggccacaaaagagggcctttacttccttacatactctcacttgcttgtggttccttggtcgttcatatttttgatatttcttcttcttcttcttcttcgttttgttcagtttctttcatggcgatctcggagaacgtgtcacctttgaagctgttgttatgttccaattgggttccacttgtggtttttgcgtttgcttgatgttttccttttctgggtgtttttttcttctttgctttttggtggggttttgaggtttgtagagagcatgttgcggagcttcatggatccctttgaaggggttttggggtgggtttgattttttgggaagttgctgtttttttttttttttttttgtttgggcatggagtgcattggcaagtgggaggaggggaacatgggggaatgcaataatgataattacaataataataatattaatgggtttggggaaattgaggatgctggcactgagctagggttccatgtgtgtctgtgattgctgaatactgtgtcttcaaaaaggaggaaaaaggggaaagcttgatatgaagctttcaacatcagggttgggtcagcagggacatgaaggaggggagaagaagtgtttgaattctgagctatggcatgcatgcgcgggtcccttggtgtccctaccaactgcagggactcgtgtggcttatttccctcagggtcatagcgagcaggttgctgccacaaccaacagagaagttgatggtcacatacccaattacccgagtttgccaccccagttgatttgccaacttcacaatgttacaatgcatgcagatgttgaaacagatgaagtgtatgctcaaatgacgttgcagccgctgactccgcaagagcagaaggatacgtttcttcccatggagttgggcgttccaagtaagcagccctcaaattatttttgcaagacattaacggcaagtgacaccagcacacatggagggttctctgttcctcgtcgcgctgctgaaaaaaggttttccctccattggatttctcacagcaaccacctgccgcagaactaattgctagggatctccatg

SEQ ID NO: 26817 - DNA, 770 bp, Glycine max
  unsure (1)..(770): unsure at all n locations
  Clone ID: TF_GmC293503_1
aaatgggagtggaataatactttgaatttcttgttattatttgattgacactcttctcttcttcagctcttcttcttcccaccatgtcctctgttccactcctcccctgttttttttttcttcttttctcccttgtggtgtccctccaaacatgaactccttttcgtgatttgacctcatttccattctgttacagttctcactttctgcctttcctttttttaaaaacccacttgattgttgcactcttggcctcctttatcctctcttttctctgcttttttttttcttttatcctctttggtttcccatttgagttccacttcagaagaagaaccaacaacaacaaccacactggggtgtgttcatggaaattgatctgaatgatgcagtgacgagtgaggctgaaaagagtgcgtcttgcaatggggagtgtgagaaaggtgctgctttgtcatctccaacatgttcatcttctggctcctcctccacacgtgtgtcttcttcttatattgagctttggcatgcttgtgctggcccccttacttccctcccgaagaaagggaatgtggtggtgtatttcccacaagggcaccttagaacaagctgcatccttctctcccttttcaccaatggagatgccaacctatgatcttcagccacagatcttttgtagagttgtcaatattcagctacttgccaataangagaatgatgaggtttatacacaggttactttgcttcccccagctgagttggcagggatgtat

SEQ ID NO: 26818 - DNA, 1158 bp, Glycine max
  Clone ID: TF_GmC86745_2
ttggcactgacaaagacactccaccctgtagtaagaagatgccttttgggctgaccgcgaaatatatgcctgaatttccattcattatcatgaagatctctggcaattagttcttgagcaggaggctgctgtgagtaatcaagaggagggaagactttttcagctgctcttcgaggaacagaaaatcctccatgagtgctggtatcacttgcagtcaatgttttgcaaaagtagttggttggttgcttgctgggagtacccaattctgcaggcagcagatacacctccttttgctcttggacttagaggttgcagagtcatttgagcatatacttcatctgtttcagcatctgcatgcattgtcacattgtgaagctgacagataagttgtggtggcaagttagggtaattaggaatatgtgcatctacttccctgttggttgatgcagcaacctgctcactatgaccttggggaaagtatactacacgacttccaaccagaggcagagaaaccagagggccagcacaagcatgccaaagttcagaattcaaacattttttctccccttcttcttcagcaggagggttaaatccagaagaagagagcttcatgcttggagctataacaataggtgaagttccaaactagtaaaaactgaagcaccccaaatcgaataaaagcattattattgttataaaggtcgcaaattttgcatgcccctttgaatcagcaatgatcctatttcataacccatcccacctccccacccaccccgaaaattgaagctacccacagaaaaccatcatccaaagccacttccaatgcaacacccgaatctcctggttctcataacacgctggaatccaaccctaattgggagcctgaagttcaaaccctagcttccagatctcaccgtagcggagctgaacagtagaattagagggattgggggagagaggcgagtgaagtgagagtgacattcatgtgggatttcagtggaagaagcggagaatgtgatgggagagagagagatggctaatggctatgttactcaacaacaataatgcacagtgactggtaataattgatccatggcatggtatgtgttgtgctattatacgaaaccggacgcggggtcgacccgggaattccggccc

SEQ ID NO: 26819 - DNA, 229 bp, Glycine max
  unsure (1)..(229): unsure at all n locations
  Clone ID: TF_6070067
ggaactatgtgacgcatgtgccgatcctgtggtcgcggtaccacgngagaaagagcgcgtgtattatttccgtcaaggacatatggangagggggaggcgtcgacgaatcacgtggcagacgatcacagtgccggtgacgagcgaccacacaatgaggtttgtcagatgatcagctatcatatggatgccgggcacgacacggatgatatgtatgctgaggtgagtgtg

SEQ ID NO: 26820 - DNA, 408 bp, Glycine max
  Clone ID: TF_jC-gmXLIB3563P078bd01a1
gccaaacacgaccttatcggcgatccaatttcgatctgtgcaaatcgtaaccctactcacttgcttctgcaattctggtggactggatccattttcatctcaattctcgtctctcttcagtaagttagggcacagcacacaataacaattcattctcttagacatggcttccgctgcgccaggtgcaaccaatgatgctttatacaaggaattgtggcatgcctgtgctggaccccttgtcactcttccgcgtgaaggggagagagtttattacttcccgcaaggtcatatggaacagcttgaggcatctatgaatcagggattggagcagcaaatgccttccttcaatctgccgtctaaaattttatgtaaagtggtcaatgttcatcttcgagctgaacctgaaac

SEQ ID NO: 26821 - DNA, 722 bp, Glycine max
  Clone ID: TF_uC-gmflLIB3275P163h04b1
cccacgcgtccgcttcctccaaggccaggtctccaagaattggtaccaattcaagctgcaaatatacttgaacttcaacttatcccacattctccactctcaatggcttcaactctcaaatctggcggaattcatacaggtttctctctaatctcgtgtttctctttcccctttttttgacgcaacctcgccagaatcattctttaattgcttactcaccttgggttgctctctctaattgaattcatagccaattcgtgagactcttcttacccatgccatatgtcatgatcatgagtaactttatctgactggtctgtttggcaaaatttatcaacgttggaaggtgtttaatatatattccacatgaactttaagttattctctacttcattattttgtcatgctttgttttttaggggcaatcaatgatgatttatacaaggaattgtggcatgcatgtgctggtccccttgtcactctccctcgtgaaggggaacgagtctattactttccacaaggtcacatggaacagcttgaggcatctatgtatgagggattagagcagcagatgccttccttcaacctgccttctaaaatattatgtaaagtggtcaatgttcatcttcgagctgaacctgaaacagatgaagtatatgcacagataactttgcttcctgaagcagatcatagtgaggtgacccagccctgatgatcctctg

SEQ ID NO: 26822 - DNA, 1779 bp, Glycine max
  Clone ID: TF_GmC5800_1
ccacgcgtccgccatgtttgtttgcacctctctctctctttctgcccacatcaaacccaacagtctcagcattgcagcagcaactgcaccactgctctgctgcttcagctctcagaagacgagtaaaataaaacaagaggggatacaaagctcccatttttatatgactccaacttaaatctcactgaaagcttgatttgatgctaccccaaaatacacaccctctttcccccatgccataacataaagtaaaaaaagaaaagaaccctccaaaaagaaacaaaagtaaaaaaaaatttaaaaaaaaatacagcagagagagtgataactcatatcatatagagtagtgagagaatgagagagagaaagagggtctctttctttttggagtattgggtcacagcctcttttaggaatgccaaagttactcaacaacacctcacgctctctgaaaatgctgcaggcatgaaaccgctcattccaaccttcacctccttcttccaaacctctccttcacttgttagatttgttcacattgcaaagggaactttgttgctatggggttgatcgatctgaacaccacggaggatgatgaagctgctccattatctgcttcttcttctcactcggggataagcacttctgcttcaaccttggttgtttctcctcctccttctgtgtgcttggaactgtggcacgcgtgtgcgggccctttgatctctctgcctaagagaggaagtgttgttgtttacttgccacagggacactttgagcatgttcaggattttccggtcaatgcttttgatatcccaccccatgtgttctgtcgtgttcttgatgtcaagctccatgcagaggaagggagtgatgaagtgtactgccaagtgttgttggttcctgaaagtgagcaagtggagcatagcttgcgggaaggggaaattgttgctgatggggaagaggaggatactggagctacggtgaagtcaacaactccccatatgttctgcaagactctcacagcttcagacaccagcactcatggtggattctcagttccccgtcgggcagctgaagattgctttcctcccctggattacagtcaacagagaccttcacaagaacttgtggcaaaggatcttcatggcctggaatggaggtttcgtcatatatataggggccaaccacggaggcatttgctcacaactgggtggagtgcatttgtgaacaaaaagaagcttgtttctggagatgctgtattgtttcttaggggcaatgatggagaactgagattagggattcgcagggcagctcagttgaaatgggctggttcctttgcagttccctcaggtcagcaattgaatcctgcaactctcatggatgttgttaatgcattatctacaagatgtgcatttagtgtttgctataatccaaggtatttttctctttattcacttgtaccttccccaggagttattgaaggaaatctgttaatgtcagttcctgtgcacagttattatggagttttttctgtttgtataagatggggatggggattctgaattctgaaacatgtttagtcataatgtctaaatgaaaatttcccatttcacctcagtcttctattttaaggtgctagactggagatttggtttaatagaagaaaacaaactgcattgaagttcctagttccttaccattaataattgaatattttaatgatttttaaaatttccattttctctgtatgcatagtatgttttaacaagatttgagttatag

SEQ ID NO: 26823 - DNA, 2362 bp, Glycine max
  unsure (1)..(2362): unsure at all n locations
  Clone ID: TF_GmC769_1
gaccacanactgtcatgccatcctcagttctatctagtgatagtatgcacattgggcttcttgcagctgctgctcatgctgcagcaactaatatttacagtgtgctacaacccacatctgaactgtttttcctttaaatatgtcaaagctttctctgtaccattttttctttaattcggctcaagatgctttttgagactgaagaatcaagtgtccgcaggtatatgggtacaataactggcataagtgatttggattctgttcggtggccaaattctcattggcgctctgtcaaggttggttgggatgaatcaacagctggagagagacaaccacgagtgtctctgtgggaaattgagccattaacaacattcccgatgtatccatcattatttcccctcagactgaaacgtccatggcatcctggcacctcatctttgcatgatgggagagatgaagctactaatgggctaatgtggatgagaggtggacctgtagaccaaggtctcaattccctaaattttcaaggagctggtatgttgccctggatgcagcagagactggatccaactttactaggaaatgatcagaatcaacagtaccaagccatgttggcagctggtttacagaacttaggtagtggatatctaatgaaacaacaaatgatgaattttcagcagccttaccactatcttcaacaatctggaaacagtaattctcctttgcaacttcagcagcagcaaccaattcaacaatctgtgtcttctaacatgctgcagccacaagctcacgtgttgacagagaacctctctcagcacctccttcagaaaccacataacaatcaagaagtccaagcacaacagcagcaacatacttatcaagactcgctcttaattccgagtgatcaactccatcagagacaacactctggcattccttcaccatcatattcaaaaccggatttcttggattcgagcatgaagttccctgcttcagtttctcccgggcaaaacatgcttagttcactttgtcccgaaggaagtggcagtctcttgaatttatccaggagtggtcagtccttgctgaccgaacagttaccgcaacagcaatggactcaaaaatatgcacctgtgcaggtcaatgcctatggaagcactgtgtcacatgcacaatattctggaaaagattctgtaatggtgctaccacattgtaactcagatgcccaaaattctacgctttttggtgtcaatatcgattcatctggccttctcctccccaccaccgtccctggttacaccacctcgtcagctgacactaattcatcaacaatgccattagcggagtctggtttccagggttctctatatggttgcatgcaagattcatcggagttgttgcaaagcgcagggcatgttgacccagaaaaccagactcaaacctttgtcaaggtttacaaatcagggtcagttgggcgctcacttgacatatcccggttcagcagctatcatgaactgcgcgaggagttggctcagatgtttggaattgaggggaagttagaagaccctcttagatcaggctggcagcttgtgttcgtcgacagggagaacgatgttcttctccttggagatgatccgtgggaatcatttgtcaataatgtttggtatatcaaaatactttcacctgaagacattcagaaaatgggggatcaagcggtagaatcccttgctctaggttcaggacaaaggctaaacggcactggtgctgagtctcaggacattgtttctggaccaccatcaatcggctcacttgagtactgagaaaactgaaacatgtattccttcagaccccatggtcaagagaatttctctacatgttttattacttaagttggaatatgttgtgtatgatctgttccccctttcagccctccttattattactatcagcattgaagaaaagtatacatttatgattaaaaaaaacccttaggacatgcttctgtgccaatttgaacttggagcactgcaagctagagttagtgttaatgctattttagcataatatttgatcaaacttttgcatgaactaatgtactctagataggaaactagagaaggctgtttatgcttgagctgtctttgtattctacaatgccattagttcccagttaaggggtcgaacttttaactcaaaatgtatgagtagtattttactatattgccattgaaaccatcaacccaccatacgacatgtctcttaaatgctactattttgtagctctattnaaaaaaaaaagtaaaaaaataaaaaaaaaaaaaaaaaaaaaaaagagggcngcgccgntcttataagagatatcaag

SEQ ID NO: 26824 - DNA, 619 bp, Glycine max
  Clone ID: TF_LIB4281-036-R1-K1-A6
ccacgcgtccgttctgttcatccagttccactctctcttttttttccctttgatttaatactctccaaatatgaattctttctcacaatctaacctctttttccatggtatttatactttccactttctggggcttccttttctcaattcttccacttggtgacacacacactctttccctcccttcttcaagttgtgaattttcgttgtggggtgcttttgttgctgcttccttgttctcttggcttccatttgagcctacaccactaggtgttcatggaaattgatctgaaccatgaagtgactgaggttgagaagaatgcattctgtgatagggaatgtgagaaaggtgtctggtgttacttgttggtcctcttccacttgttcatcctctacttcttcctcttcagcgcttgtgtcctcttcttaccttgagctttggcatgcttgtgctggccctctcacttctcttcccaagaaaggaaatgtggtggtctattttccacaaggtcacttagaacaagttgcatctttctctcctttcacaccattggagattcccacctatgatcttcagccacagatcttttgcagggctgcgaatgtccaactactcgcc

SEQ ID NO: 26825 - DNA, 631 bp, Glycine max
  unsure (1)..(631): unsure at all n locations
  Clone ID: TF_LIB4164-060-R1-N1-B1
cctacacccgtagacaaaagtaaaaaaccaaattatacatatctatttatctgtaacacaatctctgatatttctataatagtgctaaattctatcaagacaatgtcatatagttgctatatgaatcaaacagtcataacaaaccttcacagaacgccagtgtgaatttggccagcggactggatctaaatcactaataccagttatggtacccatgtatctggacaagaacatgatacagtgagtataggttcaaatgtttaaaaaaagaaaaagaaaaaggaaaacaaaaaaaaaacttggaaaagaccactgttatgaaggacaaacaaatattgttgtggctaaatcattcaaagcttttaaaattttggctttttatcttttggaagcacataagttatgcatcaacagtcatgaacaggagtgcacagcagagagtggcattaaatggcatacagaaaactattaatacaataataatggttagaaaccaacanatcagtaacataaaatggcaggaaccaaaatcgaggaaagctaaagggaactaaaatcgatttgctacagacacaactgttgaagtcacagtcacatatagataaagatttaaaggggtccaactaatact

SEQ ID NO: 26826 - DNA, 755 bp, Glycine max
  unsure (1)..(755): unsure at all n locations
  Clone ID: TF_LIB4391-012-R1-K1-E9
cacctctcaaaactaatttattaaaatatttaatttagtctttggaacctaattagtatctagaatctctaaattgagctacaattagccagtgtttcacaactagcatgaaacttgcctagccaaaaacaaactaacattcttaccttgaataagcaaaataaaagcaacagaaaaataaaagaaaaaaaaccaacaaaatagtaagaacaagaatgtaaaagtttcaggtctcggttgtgtttaagcttattacaatctctcccatagaagagataggtagtttgctccctgagctcaatttgtgcacatcctggcttgaacaaatgaagattcttttcaccatattgcagaattcaggccatggatcatcaccaacaagcatgccactgaatgccttccagcattggacatgtctaaatcaacaccaactcaggaattggttgccaaggatctccagggctttgaatggcgctttaagcatatatttagaggtcagccacgtagacacttgctcacaactggatggagtacttttgtgacttccaagagattagttgctggagacacctttgtgtttctgagagggaacaatggagaattgcgggtttggagtgagggcgtattgctcctctgcagagcagcatgccatcatctggtgatttctagtcagagcatgcccttaggagttcttgcaactgcatctcatggctgtagcaactcagactcttttttgttgnatattataagccaag

SEQ ID NO: 26827 - DNA, 1103 bp, Glycine max
  unsure (1)..(1103): unsure at all n locations
  Clone ID: TF_GmC88076_1
ccacgcgtccggtggcgtctggtccataactggggaggtaaactgattgcagtatgaagaagaagagcagcataaaggcggagctgtggcacgcttgtgcggggcctttggttaagcttcctccctccggcacgcacgtcatctacttccctcaaggtcacagcgaacaagtctctgcttctctcaacagagatgtccactctcaaatccccaactatcccaatctcccctccaagctactctgtctcctccacactctcactttgcatgctgatccccaaactgatcaagtctacgctcagattactcttcaacccctcccttcttttgacaaggatgctctcttgagatctgatctcgctctcgaatccaccaagccaccacctgacttcttctgcaaacaactcaccgccagtgatactagcactcacggtggtttctccgtccctcgccgtgccgccgagaagattttccctcctcttgattattctatgcaacctcctgctcaagaactcgtcgccagggatttgcacgacaccgtttggaaattccgccacatataccgtggacaaccaaaacggcatttgcttaccactggatggagtctgtttgttagtggaaagaggctttttgccggagactctgttttgttcattagagatgaaaagcagcagcttcttttgggtatcagacgagctaacaggcaacccaccaacatatcgtcatcagtgttatcaagtgatagtatgcacattggaattcttgctgcagcggctcatgcagctgcaaataatagccccttcaccgtcttttacaatcctagggctagtccctcagaatttgttattcctttagccaagtactacaagtcagtgtacagcaaacaggcatcacttggcatgcgtttccgaatgatgtttgaaactgaagactcaggaacaagaaggcatatgggtactgttacaggtatcagtgatctggatcctgtgcaatggaaaaactctcaatggcgtaatttgcaggttggttgggatgagtcaactgctggggaaaagcgtaacagggtctcaatctgggaaattgaacagngactgctccatttt

SEQ ID NO: 26828 - DNA, 716 bp, Glycine max
  unsure (1)..(716): unsure at all n locations
  Clone ID: TF_GmC86745_3
caaagttggggtaattaggaataatgtgcatctatttcccttgtggttgatgcagcaccctgctcactatgaccttgggaaaagtagacttcacgacttcccaacggaggcagagaaaccagagggccagcacaagcatgccaaagttcagaattcanaacattttttctccccttcttcttcagccggaggattaaatccagaagaagagagcttcatgcttggagctataacaataggtgaagttccaaacttagcaaaaactgaagcaccccaagttgaataaaagcattatgattattgtcataaaagtcgcaaattttgcatgcccctgtgaatcagaaatgatcctattgcgtagcctgcccaccccccaccccaaaaattgaagctacccacagaacaccatcatccaaagccacttccaatgcaacacccgaacctccttgctctcataacacgctcgaatccaaccctaattgcgaacctgaagttcaaaccctagcttcccagatctcaccgaaacggagctaaacagtggaattagagggattgggggagagagacgagtgaagtgagagtgacattcatgtgggatttcagtggaagaggcggagaatgtgatgtgtgtgtgtgtgtgtgagagagagagagagagacagagaaatgggccgaggctgcggtaccacgcaacaacaataatgccggacgcgtgg

SEQ ID NO: 26829 - DNA, 249 bp, Glycine max
  Clone ID: TF_701099624H1
ccttgctgagtaagttacggatgacgtatacgcacagatcacgttggtgccggaatctaatcttgatgatccgatgaaccctgacccgtgcactgctgttcctccaagtgcaccagttcactcgttcatcaagacttgacagcttcagataccagcacccatggtggcttctctgttctcaggcaacatgccatggaatgccttcctgcgttggacatgtcacaaccaggcccatctctggaattggtt

SEQ ID NO: 26830 - DNA, 3859 bp, Glycine max
  Clone ID: TF_GmC570_1
tgaaactgacgaggtgtatgcacagatgacccttcaacctgtaaacaaatatgagaaagaagcaatactggcatcagacatgggtctcaaacaaaaccgtcaacccactgagttcttttgcaaaactcttacagctagtgacactagcactcatggtggattttctgtgccacgtagagcagctgagaaaatattcccacctttggattattcaatgcaacctccagctcaggagcttgttgccaaggatttgcacgacaatacatgggcatttagacatatttatcggggacaaccaaagaggcatctattgactactggatggagtgtatttgtcagcactaaaagactgtttgccggagattctgttctttttatcagagatgaaaaacagcatcttcttttaggtataaggcgtgctaatagacagcaaccagcactctcttcgtcggtgatatccagtgacagcatgcatattggcattcttgctgctgctgctcatgctgctgcaaataacagcccattcactatattttacaatccaagggctagcccctctgaatttgttgttccattagccaagtataacaaagtcacgtacacccaagtttctcttggaatgagatttagaatgatgtttgaaactgaggagtctggggtacgcagatatatggggacaatcactgggatcaatgacttggatcctgtccgatggaaaagctcacagtggcgcaatattcaggttggatgggatgaatcaacagctggtgaacgccccagtagagtttcaatctgggaaattgaaacagtgttgactccgttctacatatgaagacctcgatttttgaggaaaaagatcccccgagaatcaggggtgctagatggcgtaatgttccaggcaccaatcatgattagagtggggcagacactggcaaatcatgttgggttgagtattaagataactcccatacctcctttattcggtaaagtggaattgatgaacatgcacaataaaaaccaatcaacttctgcacatttattagttgagcactcaattaatctaattaaacctctgccgggtgaggttccaattaatagtactaatcctttatgcagcattcagattactgtcgtttttccggggagtttgaatcacgacaactgcactctactgactcaaaccacgccactttaaaagtcgcctgtgtcatgtcctcagctgcaacaattgcagcatcaactacatctgaagcggcagcaacaacaccgacagcatcagcatcagctgctagggattgaacaacagcttcaggttcattcattgttggatgtagcaatataccatctccagcagcagagggaacaacatcttcctgaacgacaaaatttggcatggatgtgtaaactggctccacagctaggacagaaggccaaggaccgagaggcaagtaatcaatgtggatcttgaaataggcggttttcctgttcctaataaatcttggagaggatttgaaaacagtgaacagcgtatggggaaattcacatataacgaggtaccgcaaatgagcttggatggggatctaggtcaagttcccgactcaaatcattcttgtaatggacaagataatggcaacgcatagatgggaaagcttgcttctaactgtggcagctacaacaacagcagacacaattgaaactatatccattgcagttgttgcagtaaaacctgcgagagatggcacaacaacaaaccccatccaattaaatgttagtgcttaatcctacagagctacaactccaactgcagttgcaacagaaattgcagcagcagcagcagcatcaacaacgactactttccacgtctaccccacttttgctgtctcagcttctacaacaacaaaatactcaccaacaaaaccagcaattaccgcagcccctgccgcctatatctcagcatcaacctcaacaactaggcaataacgcattctcaacagagaagcttctcaacagcaacaacttatcttcgtatcttatgcaatcacagaaggtttcaatgaaccatccccagaatacacagaaatcacttaccatcactagagctccctctacactaactgagggagatgccccatcatgctcaacctctccatctactaataactgccaggtgactcccccaaacctcctgaaaagaaatcagcaattaccagccacattaaggggaagtttgatagttgagcccactagtaatctgatacaggagcttcacagtaagcctgacacgcagatcaaacaggagtttctcaatgtaaaaggacctgaccagttgaagtataaagggacaattactgatcaactagaagcttcttctggaacatcttactgtcttgatcctcctggtaatgtccagcagaacttgccactttccaacttctgcatggaaggggatgtccaatcacacccaagaaatagtttaccatttgactccaatctggatggtctaacacctgatactatgctctcaaggggctatgactctcaaaaagatcttcaaaacttgctgtctaattatggtggtgctccaagagacattgaaactgagctgtcaactgctgacattagtccacagtcgtttggggtgccaaacatgccttttaagcctggatgctcaagtgatattggcatcaatgatcctggggttttgaataataataatggcttgtgggctaatcaaactccacgaatgcgaacatatactaaggttcaaaagcgtggctctgttggaagatgtattgatgttacccgttacaagggatatgatgaactccggcatgatttggctagaatgtttgggattgaagggcagctagaagatcctctaaggactgattggaaattagtatatgtggatcatgaaaatgacattcttcttgttggtgatgacccttgggatgaatttgtaagctgtgtccagagcataaagatattgtcatctgcagaagtgcagcaaatgagcttggatggggatttaggtggtaatgttccaatccccaatcaagcttacagtgggacagacagtggcaatgcatggaggggacagtatgaagataactcagctgcctcctttaataggtaatgatgtcaaatgctgacgcttaagagagatcaacttgtgcatttcaagtggtggtggagaaccaacttcttaacctaacaaaacttctggttggtgcttctcaaatggaaagtacacattcattacaaatgatgcagtttattggggattgtattagaggtggactggacccataactgcatcctagttctcttcaccacaccacttttgatggtgagaaagtttagatcctcaaatgtagcaagagcagtttcccttacactattaatgctacagatcctataacttcggaatcagcttttcttgtggttgtttgattaggatttctttttcattttttgcaagggacaacagaatagggcagctagtgtataatatgatcgttctgatataaacattaatttttacttatctcttgtaaatcttgtcatggttaaagttgtatacggaagtttggtgtctaagtgattgcccagagcctgagacaacgaagaatgcatgccaattctagctcttgtataaagtgcctacgatgtttccacggtgtccattatggatgaagaaaaactcagtttctttttaaactcttcaattttggaattaatgtgcttcaattacaattagatatttgcgcgtccaagagagacagctttgacaaatagtttcaagatgccttcaatttccacctgtaaatttcaatggaaattcttttacctttattct

SEQ ID NO: 26831 - DNA, 2485 bp, Glycine max
  Clone ID: TF_GmC318_1
ggctataccattagcgaagtatgttaaagctgtgtatcatactcgagtttcagttggtatgcggttcaggatgctgtttgaaacagaggagtcaagtgtgcggagatacatgggtacaataactggcattagtgacctggatcctgtccggtggcaaaactcacattggcgctccgtcaaggttggctgggatgaatccactgcaggagacaggcaacctagagtgtctctttgggaaattgagccatttactacatttcctatgtatccatctccattcccccttaggcttaaacggccatggcttccaggattgcattcattccatggcatgaaggatgatgattttggacctaaatcaactctgttgtggctccgagatcctgatagaggacttccgtctcttaagtttcttgggattgggattaatccttggatgcagccaagatttgatctcaccatttagaatatgcaaacagacatgtaccaggctgcggctgtacaagacattaggagttttgatccttcttcaaagcagtctgcttccttacttccatttcagcaaccacagaacttcccaaacaggactgctgctttaatgcaggcccagatgttgcagcagtcacaacctcagcagatttttggaaatactcaagagaatcaacattccccacaatctcaggctcatcttcagcaacatctacaacatcaacactcgttcaatagtcagcatcatcatcaccaccagcaacaacaacagcgacagcaacatcaagtggtagataatcaacagatttctagtgcagtctctacaatgtctcagtttgtttcagctcctcaacctcaatcaccacctatgcaagttatctcttccatgtgccaacagcaaaacttttctgattcaaacgggaacactgtgactactattgtttctcccctgcacagtatcttgggttcttttccccaggatgaaacatctcacctcctgaaccttcctagaacaagctcttggattcctgttcaaaattcaagtgggtggccctcgaagcgtgttgcagtggatcctctcctttcttccggagcctctcaatgtgttctacctcaggtggagcagctagggcagccacagagtaccatgtctcaaaatgctatttctttaccaccttttcctggtagggagtgctcaatagaccaagaagggagcaatgatccacaaaaccatctcttatttggtgttaatatagagccctcgtcccttctcatgcctaatggaatgtcaagccttaagggggtctgtggaaacaatggctcctcaaccttgccatatcaatcttctaattatctgaatactaccacacggactgattcttcattgaatcatggaatgacccccaacataggcgactcgggtttcctgcagtgtctggaagaggcaggacaaggaaacccactgaacaaaacctttgtgaaggtttataagtcagggtcctttggaaggtcattggatatcactaaattcagcagctaccatgagctgcgtggtgaactcgctcgaatgtttggccttgaaggcgagttggaggaccctgtgagatcaggctggcagcttgtatttgtagaccgagagaacgatgttcttctccttggtgatggcccctggccggaattcgtaaatagcgtatggtgcataaagatactttctcctcaggaagtgcagcagatgggcaacaatggccttgagctgttgaactcgtttccaattcaaaggctctctaatggcatctgtgatgactatgtgagccgtcaagacccaagaaatttaggcactgggataacaaccgtggggtctttagactactaaatagtcttcacttcttctatcacatgtaatattattacccttacttctcaaccctttctttgtgtacggtgggaagcacctttgcctaagtgtagtttacatagcctactctttagcctttggatgttttcctgttttttcctgctaggacatttcataaactaatactgtaactatatggcatctagtcattgtgctagccacaatatatacgatacttaatccgttaggaaatcaatgcgtgagatatgttctcttaacttgtacagaactttttctttctagtttggaaataatcagaatcagcagggctttctggcgcagcagcagtaacaagggcaacgtctgcagttgcaacatccacaagtggtcgatcatcaacagatttcaagtgttgtctctacaaggtctcagcttagcacagcagctcaatgtcaattaccacccatgcaagctatctctacacttggccatcagcaaagcttttctgattcaaatggaaaccccacgactactgctattgtttctcccctgcataggatataggattcatttcctcttgatgacacatctcacctttttaggctttctagatacacttgttgcgttcctgttcaacattct

SEQ ID NO: 26832 - DNA, 848 bp, Glycine max
  Clone ID: TF_GmC630_6
tgcgagaagacgacagaagggggagagaaagagtggttgaaagcgtccattgaaggtagagagagagaggttttgggaattggtgctgcttcgtgtctgtttatttcctcgcgaggtttgagaattcagtgaagagaaaacggagtttccgatcctgcgatgtcctatatgatagatctgtgaggaaattgaactgaaaaaaaaaatggcgacgtcggaggtatcgatcaagggaaattcggtaaacggaaaaggagataacagttctggtgatgctagaaacagtggaggcgaggctcagaatgcttcttcatcatcatcatccgcgagaggtaacgtggtttcctctgcgtgtgccttgtggcgtgtttggcgtgacgataacaagtttttttttggtttcagacgcggaagctgcgctttacagggagctgtggcacgcgtgtgcaggtcctctggtgacggtgcccagagaaagagagcgcgtgttctactttcctcaaggacacatcgagcaggtaggtaactcataactgttcctccgaactcagattcggtggagtttctcacgaactcggacttggctgcctctataatgaaatttgatggctttctatttatgacgagtgagtgtttgtttttatggcacaaacacgcattaggtggaagcgtccacaaatcaggtagcggaacagcatatgccggtttacgatctaccacccaagatcctctgtcgggtcatcaacgtcatgctcaaggtagtaaccaacgcttaattatctctgtttttcaagagctaagtttgtaaatgaacttgttttttaatgttatggtacttcgtttttggc

SEQ ID NO: 26833 - DNA, 2685 bp, Glycine max
  Clone ID: TF_GmC340_4
atcgtgccgtgcggtgtacagaattagaattagaaagagaaagagaaagagggggggtcgtgtcggcttgaaaccaaacacgaccttatcggcgatccaatttcgatctgtgcaaatcgtaaaccctacctacttgcttctgcaattctggtggactggatccattttcatctcaattctcagtaagttggggcacatcacacaataactttgacatggcttccgctgcgccaggtgcaaccaatgatgctttatacaaggaattgtggcatgcctgtgctggaccccttgtcactcttccgcgtgaaggggagagagtttattacttccctcaaggtcatatggaacagcttgaggcatccatgaatcagggattggagcagcaaatgccttcctttaatctgccttctaaaattttatgtaaagtggtcaatgttcatcttcgagctgaacctgaaacagatgaagtatatgcacaaataactttgcttcctgaagcagatcaaagtgaggtgacaagccctgatgatcccctgcctgaatctccaaggtgtacagtccattcattttgcaagacactcactgcttctgacactagcactcatggaggtttgtctgttcttcgaagacatgcacgatagattgtttgccaccactggatatgactcagcagcccccatggcaagaattagttgcaactgatctgcatgggaatgaatggcattttagacatatttttcgagggcaacccaagcgccacttactgaccactgggtggagtgtctttgtcagttccaaaaaattagtggctggtgatgcctttatattcttaaggggtgaaaatggagagctgcgagttggagttaggaggctcatgagacagcaaagcaatgtgccatcttctgttatatccagtcacagtatgcatctgggtgttctggccactgcatctcacgccattgccacaggaacattgttttctgtattttacaagcccagaacaagccggtctgagtttattgtgagtgtcaacaaataccttgaagctcgaagtcataaactttctgttgggatgagattcaaaatgagatttgagggtgatgaaattcccgaaagaaggttcagtggcacaattgtgggtgttggagataataaatcatcgtcggtctgggctgattctgagtggcgatcattaaaggtgcaatgggatgaaccatcctcaattttgcgtcctgatagagtttcttcatgggaattggagccacttgtgtctacccctcctacaaacccccagccatcccaaagaaacaagagatcgcggcctcccattctaccttcaacaatgcctgattcttctctgcaaggtgtatggaaatcaccagttgaatctgcaccattctcttattgtgaccatcaacatgggcgagatgtctatccatcaaccaatttcaattccactgcaactggttttcttggttttggtgggaactgctatgcttccaacaagtcaatatattggtccagtaggatggaaaactccacagaatctttttctcctgtagcacttaaagaatttggagagaagagacaagggactgcaaatggctgtagactctttaggattcagttacatgacaattctaattctaatgaagaaagtctaccaatggtcactttgtcaggaaggatgggtgatgatggcccccttccatctttggatgctgagtctgaccagcattctgaaccatcaaatgttaatcgatctgatatcccttcggtaagctgtgatgctgaaaaatcatgcctgcggtctccccaggagtcacagagcaggcaaataagaagttgcacaaaggtccacatgcaaggtatggctgttggaagggctgtggatttaacacggtttgatggatatgaggatctgctaaggaaattggaagagatgtttgacatcactggtgagctctgcggatcgacaaaaaaatggcaggttgtgtacactgataatgaagatgatatgatgatggttggggatgatccatggcttgaattttgtagcattgtgaggaaaattttcatctacactgcagaggaggtgaggaagctttcacccaaaataggacttccaatcagtgaagaagttaaacccagcaaaatggactctgaagcagtagccaatcctgaggatcagtcatctattgtggggcctggttgctaatgtcttaggtcttccaacatttcagttgttatatatatatacaatagatattggcatgaaaataggaagtagaacgtgagagaaacgagtatgtacctggcaagcccttcatcatggcctataaggagcatatggttagtgtattctgcatctatacaggagcagcataacagcaccaaagcagagggcttggggtattgtggcttttctctttctttcatagctctgtaatcaccgagtttcgatgccttgcttgttcagttttgtattggttgcgagcgtgcagaaatgtcttgttttttttttttggttgcgagcagcataacagcaccgaagtatcttactatgtatgcatttggattttttttttggttcttttgtaattcacttgttatgatgcatcatctcatttatgtatatataactttctattatatacatactatttaatgtatgtatatcgagcc

SEQ ID NO: 26834 - DNA, 3224 bp, Glycine max
  unsure (1)..(3224): unsure at all n locations
  Clone ID: TF_GmC715_1
gaagttgcagtaggctaagctgaatctatagactagagtagagtaggggtccgggaaatgagtgattaacttctcaaactgagagagagagagagaaagagagagagcactgaagtgaagagtgcattgtgatatgaggaagcaacaacgttggcaagttggtatcgtggattgaggtggtcttttgggggaaaccatcaacgacaacgacagcatcaaaaggaagagaaagacccagaaacgggaacggctttcagaaactcacaagcttttcaaaaagagcttcaaagtgaaggaaaaaagtgccctttgattcttggtcaccacaacgccaagacaaacaacaaacaaagcaaaacacacacacacacacaagcaaactagaggagccaccgcaacatgttttctgtaaccgaatgctataattcaagggagttggtggtggtggttgttacagaatagaaagagaaaaaaaagcatttttgtagtttggaattatcattgctactacttcgnctactacacacatttaactgtcatgtctgggtggtgaaaagagctttctgttgtgttggctttgtctttcttgtgtggggtttgtttgctggtgaattcggctcggggttttttaatgatgaaatttgaggggtgtgtgaatgacccttttcccctgtgaggattggggaaattggggtggagtaaagttgttaactttctcagagaccatgcaggggcattgagcttgtgttcttgtttcttctcttctcacttggttttgttttgtggcaggtttgaaggatgatgatctgtatagagagctgtggaagctatgtgcagggccattggtggatgttcctcgtaatggggacagagttttctacttccctcaaggtcacatggaacaattgcaagcatctacggatcaggaattgaaccaggaaattccccatttcaatctcccggccaagattttttgccgtgttgtgaacattcagctgttggcggagcaagacactgatgaggtttatgcttgcatcgctttacgtccagaatcagatcaaactgagcctacaaaccctgatccaaatgtagtttaggccccaaaactatataatatctaagcttgaggtagattaactgcctctgatactagcacacatggaggattttcagttttgcggaagcatgctactgagtgcctgcctgaattggacatgactcaatcaacccctactcaggagttggcagcaaaggatcttcatggatttgagtggaagtttaagcatatatataggggtcaaccaaggaggcatttgcttacaactggttggagtactttcgttgcatctaaaagattggttgctggagatgcttttgtgtttctaaggggagagcatggacaattgagagttggtgtcagacgtttagcgcggcagcagagtcctatgccttcatctgtgatatcaagccagagcatgcatctcggcgtgcttgccactgcttcccatgctgtcatgactcgtacaatgtttttggtttattataagccaaggactagccagtttattgttggtttgaacaaatatctggaggcagtcaacaataaattttcactcagcatgcgattcaagatgcgattcgagggagatgactcacctgagagaagattttccggtactattgttggggttggagacgtgtctgcagggtggtcaaattctcagtggcgctcattgaaggttcaatgggatgaaccagcaacaattccaaggccagatagagtttcttgttgggagatagagccttttgtagcttctactgctttgaatgtcacacaaccagcagttaagggtaaaaggtctaggcctgctgatgttttatcttctgctgcttcaggtttctggtatcatggttcttccaatgagcttagtcaattaggtgctgctgctgaggtccaaagcaaggaaaatcaggttgttccatgctctctgaggcagaaagacattattaatagcaatcctattaatgctaataactctagcatcagtactagagtccgaatggaaggagtatggccttcttcaccacatttgaatgccactccaaaccttttttctgatcccaataacaacaacagcaacaacggcgtttcggcacgatcactgatctctggttatcctaatgttccatctagatcaagtgatggtcccacatgcgacggtgtggaagatgggaaaaagactgagaactcccttgattgctggttatttggagttaatttgactaacaattgtagcaacgttattactactccttcagagagggaacagagaggtccaagctcaagtgttgttcttagtggtcccaaagaatctattcctgcagctgcatgtgaaactgagagggttcagactcccaactattcactgtccaacaaagggcagaagcaaattatttctgaggcatcaccaaatcagtggcagaacaagcaggccactgtactatccatgaggacgcggactaaggtgcaaatgcaaggtgttgctgttggtcgtgcgtttgacttgaccacgttgagtggctatgatgatctcatagatgaacttgagaaattgtttgagatcagaggagagctgcgttcacaagacaaatgggctgttactttcacagatgatgaaaatgatatgatgctcgcgggtgatgatccatggccggagttctgcaacatggtgaagaggattttcatttgttcaagggaggacttgaagaagatgaaatgctgcaagttacctgcttcttcatcagaggttgaagagattctattgagtccagattcacagaatagggatgagactcagcagtctcacatgccttagacaacttggcttttttttttttttttactttttttggggtttgggaagtgaaagatatctgatggcataggttgcttaattttatggaactttcaaagcaactgcagattagtggactaattatataatatgaaagcaataggtagtgcagttggattttaggtacttatatttgtgaatacccttttttttctttttcttttttttatcctagagtgccatcagcttgtaaacaaatatgcttttcccatctctaatggattgtttgtctgtgatgtgtcggtttcttctacatataaaaaaaaatgatgttttgctaaaaaaaaaaaaaaaaaaaaaaaaaccttg

SEQ ID NO: 26835 - DNA, 2013 bp, Glycine max
  Clone ID: TF_GmC769_2
tattattctgagtgtggtgcaagccacctatgtactatttttcctttacttatgcaaaagctacctttgtactatttttcctttacttctgcacaagccacctttgttttgcaggtacatgggtacaataactggcataagtgacctggatcctgttcgttggccgaattctcattggcgatctgttaaggttggttgggacgaatcaaccgctggagagagacagccacgggtatcattatgggaaattgagcctttaacaacgtttccaatgtatccatctctatttcccctcagattgaaacgaccctggcatccgggcacctcttcttttcatgatggcagagatgaagcaactaatgggcttatgtggctgaggggtggacctggagaccaagctctcaattccctgaattttcaaggttctggtttgttgccatggatgcagcagagaatggatccaactttacttgcaaatgatcataatcagcactaccaagccatgtttgcatctggtttgcagaacttagggagtggagatttaatgagacaacaaataatgaattttcaacagccttcaattatcttcaacaatcaggaaaccccaatcctcctttgcagcttcagcaaccgcaagcaattcagcaatccgtatcttctaataatattctacagccacaagcccaagtaatggcagagaacctgtctcagcacctccttcagaaatcacacaacaatcgagaagaccaaacacagcagcagcagcagcagcggcacacttatcaagatacagttttacttcaaagtgatcagctccatcagaggcaacactctggtctaccttcaccgtcatattcaaaaccggatttcttagattcaagcatgaagttccctgcttcagtttcaccaggacaaaacattcttggttcactttgtcccgaagggagtggcaatctcttgaatttatccagaagtagtcagtccatgttgactgaacagttacctcaacaatcatgggccccaaagttcacaccattgcagattaatgcttttggcaactcaatgcaacatgtgcagtattctggaaaagatactgcaatggtgccaccacattgtaacccggactcccaaaatcctattctatttggggtcaacattgattcatctggccttctgcttcctacgactgttcctcgttatactactgcatcagctgaaattgatgcatcagcaatgccattaggagagtctggattccagtctcctctatatccttgcgtgcaagattcatcagagttggtgcaaagtgcagggcaagttgaccctcaaaaccagacacgaacattcgtcaaggtttacaaatcagggtcagttgggcgctcacttgacatctcccggttcagcagttatcatgagctgcgggaggagttggcacagatgtttggtattgaggggaaattagaagaccctcttagatcaggctggcagcttgtattcgtcgacagggagaacgatgttcttctccttggagacgatcccgtgggaatcatttgtcaataatgtatggtatatcaaaatactttcacctgaagatatccataaaatgggagaacaagccctggaatcccttggtccaagtccaggacagaggctgaatagcactggtgcagattctcatgaaattgtttcaggactaccatcaattggctcccttgaatactgagagaattttaacatgtatttttctctcaggtcctacggttaagaagactattacatatccacatgtttagtacttctgtttgaacactacttttcgaccttgcatatctgaatcaatatatactgtattgtctgtttcactttcaaaaacatcgttattatttcgtagaggattgttgagattttcaggacaaaaaatctatattatatatatgatgagaaagaaacctaggacaaacttttgtgccaatttgtaaccttgtgttgacatagagttaaaactattgtagc

SEQ ID NO: 26836 - DNA, 791 bp, Glycine max
  Clone ID: TF_GmC88076_3
ccacgcgtccgcggacgcgtgggcggacgcgtgggggaaagaaaccattttttggtgtgtcgaagcgagcgtggcgtctggtggaaaactccggaggtcaactcaagagaaagagagagtaatgagcattgcattgtgtctcacacactctttgaacgcatcctcctaatgaagacgacgcagcagcctgaagctcctcaaggcgatccctgtgaagagaagaagaagagcataaaccctgagctatggcaagcttgtgcagggcctttggttaaccttcctccctccggcacccacgtcatctacttccctcaaggtcacagcgaacaggttgctgcttctctcaacaaagatccccactctcaaatccccaactatcccaatctaccttccaagcttctctgtctcctccacaatctcactttgcttgctgatcccgaaactgatgaagtctacgctcagatcactcttcagccagtcccttcttttgacaaggatgctctcttgcgatctgatctcgccctcaagtcctccaagccacaacccgacttcttctgcaaacaactcaccgccagcgatactagcactcacgggtggtttctccgtccctcgccgtgccgccgataagattttccctcctctcgattattctatgcaacctcctgctcaagaactcgtcgccagggatttgcacgacaccgtttggacattccgccaattttaccgtggacaaccaaaacgtcatttgcttacactggatggagtctatttgttagtggaaagaggctctt

SEQ ID NO: 26837 - DNA, 2265 bp, Glycine max
  Clone ID: TF_GmC339_1
ttaggcttgttcctttgaccagaaacgagggtgattttgaggatgatgctgttggaggcatcaatggatctgaaaataaagataaatccccttcttttgccaaaaccttgacacagtctgatgccaacaatggtgggggcttttctgttcccagatattgtgctgagacaatttttcctcggttggactattccgcggaccctcccgttcagaacatccttgccaaggatgttcatggtgagacatggaaatttaggcacatttataggggcacgccgcgccggcacttgttaactaccgggtggagtagctttgtgaatcacaagaagcttgtggcgggggattcaattgtgtttttgagggcagaaaaggatgatctgcgtgttggaattcggcgggctaagagggggattggaattggtggaggacctgaggctcctgcagggtggaattcaggtggggggattcgtcctatgccttatggagggttttcagcttttttgagagaggaagatagccagctcttgagaaatgggttgagtccaaatgcaaaggggaaagtgaggcctgaagcagttattgaggctgcaactcttgctgccaatatgcagccatttgaggttgtttactatccccgggcaagtgccccagagttttgtgtgaaggccaatttagttagagccgcattgcaggttaggtggtgtcctggaatgaggttcaagatgccctttgaaacagaggactcctcgcggataagctggtttatgggaaccatctcttctgttaactttgctgatccaagatggcccaactctccttggagacttctccaggttacatgggatgaaccagagttacttcaaaatgtaaaaagggtgagcccgtggctggttgaaattgtatcaaacatgcctaccattcatctttcccattactcaacacaacaaaagaagccaagattccctcaacacccggatttttcttttgatggtcagatttcattgccagcatttcccagcaactttctaggtccaagcaatccgtttggttgtctagctgaaagtactcctgctggcatacagggagccaggcatgctaattatggtatatccctatcaaatctccacttcaataaactgcagtcaggcctatttcaagctggtttccctccacttgatcacactgcttccccagtattgagagtctcctccaacaatgcagcaacaatgcaaaaggtcggcacgggtgacaacgtctcttgcttactgtccatgtcaactgctactcaaccttcaaagaaagtggatgatgtgaaggcaccccaattggtgctttttggccaaacaattctcaccgaacagcaaatttctttgaacacctctgctaagacagatcctactcgaaataattcatttgatggaaatgctgataaaatgtgcaagttttcagatggttttggttatgctcttcacccacaaggctcttctcttgagaggttacagtggtacaaggatcaacaaaaagaaaccatggctagtttggagacaggtcactgtaaagtttttatggaatctgaagacattggtcggactatggatctcacaatgcttggatcttatgatgaattgtatagaaagctggcagacatgtttggcatagaaaaatctgtggtgctaagtcacatgctttaccgtgatacaactggggcagtcaagcacattggagatgaagcattcagcgaatttaccaaaactgcaaggaggttgaccattctaatggattccaacagcgatggtagaggaatctagaggaagaaataaacaattatcatttcaattgtacagctggttgatcaatttctctggagagtctcatctaatttatggatattaatgtttttctcgaagggcctatttggatttgttttttttcttttagtgatgatagctcgtggttttccttctctttttggatcataacatggtttacttgaggcttttgtttaataattctgatgtgaaaaaaggtgggggagagaagagaaagggtagtgatcatatatccctatgaatacgattggttcataggagtttcctgtatacaatggtttttaagtgtaaaaaaagctacctaggcttaatggttattgagacagtagttacctatttttttgttctgtgtttttaccactgtagttacctatttcattttcttgtgactttcgtatgcaaaaggaaagaaggggaaaggggggggggggtaggt

SEQ ID NO: 26838 - DNA, 471 bp, Glycine max
  Clone ID: TF_LIB3242-311-Q1-J1-H3
gtggttgaaagcgtccattgaaggtagagagagagaggttttgggaattggtgctgcttcgtgtctgtttatttcctcgcgaggtttgagaattcagtgaagagaaaacggagtttccgatcctgcgatgtcctatatgatagatctgtgaggaaattgaactgaaaaaaaaaaatggcgacgtcggaggtatcgatcaagggaaattcggtaaacggaaaaggagataacagttctggtgatgctagaaacagtggaggcgaggctcagaatgcttcttcatcatcatcatccgcgagagacgcggaagctgcgctttacagggagctgtggcacgcgtgtgcaggtcctctggtgacggtgcccagagaaagagagcgcgtgttctactttcctcaaggacacatcgagcaggtggaagcgtccacaaatcaggtagcggaacagcatatgccggtttacgatctacca

SEQ ID NO: 26839 - DNA, 2627 bp, Glycine max
  Clone ID: TF_GmC896_1
ccacgcgtccgcctttctttgactcagagagatctaagagcgcaaaaaacaaaaaccagctcgtgcttgtactttgcgcgatgaatctcctttgaagaaaacagaaacttcaaaaagcacattattttctcttttgaacacactctgttttttttgttgtttccatgaaggaaggtgaaaaggtattggatccgcagctatggcacgcgtgtgcaggtggcatggttcagatgccgcaaatgaactccaaagtcttctacttcccacagggtcacgccgaacacgcccacaccaacattcatctgaggcttccaccattcattttatgcaacgttgaagcagttaagttcatggcgaacccagaaaccgacgaagtgttcgcgaagctgagtttgcttcctctcagaaactcggaactcggtgctgactcggacggtgctggtggtgatgacgtggcagaaccttcttgttgtgaaaagcctgcgtctttcgctaagactctgactcagagcgacgccaacaatggtggggggttttcggttccgcggtactgcgcggagacaattttcccgcgtctggactacacggcggagccgccggtgcagacggtggtggcgaaagacgtgcacggcgagacctggaggttccggcacatctaccgagggacgccacgtaggcacttgctgaccacagggtggagcagtttcgtgaaccagaagaaactcgtggctggggattccgttgtgtttctgagggctgagaatggtgatttgtgtgttgggattcggagggcaaaaaagggaattagcgagggttcaggttcaggttcatcatctgtgtggagttcagcttctgggtctggaaatggaaattgtgggattgggccttatgggcctttttcttttttcttgaaagaagaaaacaaaatgttaaggaatggttgtggtgggaatttgagtggaagggtaaaagtgagggctgaggatgttgttgaagctgtgactcttgctgctagtaacaagccttttgaggttgtgtattacccaagagccagtactcctgagttttgtgttaaggcttcttctgtgggggctgctatgaggattcagtggtgttctgggatgaggttcaagatggcctttgagactgaggatgcttcaaggataagttggttcatgggaaccattgcttctgttcaggttgttgaccccatctgctggcctaattccccttggaggcttcttcaggttacttgggatgagccagatttactacaaaatgtgaagcgtgttagcccgtggcttgttgagttggtatctaacattccactcattaatttcacacccttctctccaccaagaaagaagctgcggccacaacacccagacttcccccttgatgttcaatttccaataccaatgttttcaggcaaccagcttgggcctaacagccccttgtgtggtttttcggataatgctcctgcagggatacagggagccaggcatgctcaatttggaaaatctctatcagatctccaccttaacaataaactgcagttggggatgcttccaactaatatccatcaacttggagtgtataatgagatttcaaatggtaacatgatgaccaaccatgataagagcaaagaaagtttatcatgctttctgaccatggggaaatctaccaagagtttggagaaatctgatgatgttaagaaacaccagtttttgctttttggtcaaccaattctcactgagcaacaaatttctagctgttctggagatgtgttgtctcaccgaaaaagatcggtaagtgatgataaggacaaagcgaagtgccttatggatgactcgcaatctacactctcacagcagttttcaccaggaaaagcatcttctgctgagttctcttggcaacttggcttggatactggtcattgcaaagttttcttggagtcggaagatgtaggaaggaccctagacctatcgctgtttggttcttatgaagatctgtataggagacttgccatcatgtttgggattgaaaggtctgagattttgaaccatgtgctctaccatgatgcagctggtgctgctaagaaaaccggagaagaacccttcagtgacttcatgaagacagcaaaaagattgacaattctgacggattcaagcagcaaaaacattaaaagggcctttattacaggaactcgtaatggtgaacatggactagatgcatcaaacaaaacaggccctctgagcatatttgcttaaaatatgctatagatagcatctgagacattgttgagatctgagtagttgaaggacagtcctaactctatttacctctgcaaagactgaacatgagctgaatcttttatcatggttgttactattgtgtactaaaaacaatatctatcaaggttggcttagttgtttattagtgtacaaataatgatgccattatcatggtcaactgttattgtaatattaaccaagatttggaccccatttggcaacttgcttcttttcttttccttatttttttgttcattgtgctctcacactcacatgctgctgcctacgtgtctccacgtcaccagtgctcaataaattgtgcaaagttggtat

SEQ ID NO: 26840 - DNA, 656 bp, Glycine max
  unsure (1)..(656): unsure at all n locations
  Clone ID: TF_GmC82302_1
gggtcgaggacgcgtcaggttggttttggcgttttgatttgtgcagccacatggattccaatgctggggtttttgtcctatttgtttgagatttggtgtgacttgaatccttcgatgttaagttgttgaatttggagagcttgtgctgtgtggaagttggagttagaaattagttgcatttgagggaaaagggtcagtttttttgttgatcctattcttccatatgagtggacaattttgtgttcgttttctgtggcagtgctggacgaattgaagtttgaattgtcttgttatgaaaatcctgtgggacaagggcaaatcttgttgctagaaaaggccatgtggtgaatttgttttgcggtcattgttttttttttataggtcgtaatgaaggctccatccaacggttacttgcctaattctggcgaaggggaaaggaagacaatcaattcagagttatggcacgcttgtgctggacctttggtttctttgcctcctgttggtagtcttgtggtttacttcccccaaggacacagtgaacaagttgcagcttccatgcaaaaggaggctgacttcataccaagttacccttaccttnncatccagntgatttgcatgcttcacaatgntgcggtgcatgctgatcctngaactga

SEQ ID NO: 26841 - DNA, 634 bp, Glycine max
  Clone ID: TF_LIB4280-026-R1-K1-G4
ccacgcgtccgcttctgtcgcgtcctcgatgtcaagcttcatgctgaggaagggagtgatgaagtttattgccaggtggtgctggttcccgaaagtgagcaagtgcagcagaagttgcgggagggggaatttgatgctgatggtgaagaggaagatgctgaagctgtgatgaagtcgacgacgccccacatgttctgcaagactttgactgcttctgataccagcactcatggtggattctctgtgcctcgtcgcgccgcggaagattgcttccctcccctggattacagtcaacagaggccttcacaggagcttgtggcaaaggatctccatggccaggaatggaggtttcgacatatatatagggggcagtcgcagagacacctgtttactactagagtgtagtggcttaggagacaagtatgaccttagttcttgggaacagtaattggtttttgcatttcaaagctgggaaagaacattcaagtactttcaagttcctttgtcaataggcaagaccaatacactgtggaaggagtgcagaatcttggagacaaagcagtgatgtgccataggctaaatttcagaactgcagtattttactgccctgaagtccgtgaaacacagctttcat

SEQ ID NO: 26842 - DNA, 687 bp, Glycine max
  unsure (1)..(687): unsure at all n locations
  Clone ID: TF_LIB4390-057-R1-K2-C10
gttaaagctgtgtatatacacgagtttctgttggcatgcgatttaggatgctatttgagacagaagaatcaagtgttcgccggttggctgggatgagtccactgcaggggagaggcagccaagagtttccttgtgggagattgaacctttgacaacattcccaatgtatccatctccattccccttaaggttgaggcgcccttggccatcgggcttaccttctttatatggtctcaaggatggagacatgggcattggttctccattcatgtggctccaaggtgggcttggggatcaaggaatgcaatctttaaacttccagggngcttggtgttacaccatggatgcaacctagacttgatgcttctataccaggtctccaaccagagttataccaagcaatggcttcttctgcattccaggaaataaggacaatggatccttcaaaatcttcgcaatctctgntgcagtttcagcagacttcgaatgttcccagtgctcatgcttctgaggtacagaggncagtattaccacagtctcagcctcaaacacccttctacaaattatcaagaaaaccaggtgcctgctcagtcacaacttctgcaacaacagttgcatcgttaccacccatattatgatccgcggcaacagcagcagcaacttaaaaacttgcctgttcagcagcag

SEQ ID NO: 26843 - DNA, 803 bp, Glycine max
  unsure (1)..(803): unsure at all n locations
  Clone ID: TF_GmC86745_1
catgcctgcagattaagaagacaatgtgcatgctatcacttgacaaaacagacgatggcatgatagtctgcggacgattcgctcgccgtatgcccaagagtaactggtttttttcattcctgataaagggaataagaagaatggttacaataatatcttatagttcctttgaatagattccagtcatgcagccatggcctatatagatgcaattactgacgatattgctttatggacaagctaacaagctaaaacatatttctcaggtcaaaaagctcccatggaagtagactagaatctcggaaccaagctcaacgcggcatgttccggtattgccaattcagtagacattatttttaaataatggagaactaatataaatataacatgacttctcagtttaaatatatctataactaaaactgtgcacacagatggagggagagaaaaggaattgaatttccaataggtcaatttaatgaaaatattaaaaattatatgtaccagatgaaaaggactgaatcaccagcaacaagcctcttggcactgacaaagacactccaccnctgtagtaagaagatgccttttgggctgacctgaaagcgaaaatataaagcagttagaagtgaaaacanttaagtaacaatttaagcagctttcatgacatcacatatcacgactgttgcttgttgatcattcccttggtttcactacagacaatttgtaaaacttgatatggaaaaggattttcaggaggaaaggaagagccaaagatacatgcaaatgattaaggactatacact

SEQ ID NO: 26844 - DNA, 1790 bp, Glycine max
  Clone ID: TF_GmC591_1
ggcgttttcgtcacatatatcgtggtcagcccaaacgacacttgcttactagcggttggagcttattcgtgaatgcaaagaaacttgttgctggagattcatgcattttcgttagaggggaatctggagaacttcgtgttgggattcgtcgcgcagcagaaaatctcagcaatatatcgcaatcttcatctctgatatcgggtcatagcatgcaacttggaattttgactaatgcttccaatgctgttggcaacagaaccatgtttcttgtctattaccgcccgtggacaaatccctttgaatttattgtccatctccaaacctatttgaagtcaactttacaagactatccaattggaacgagggtacaaatgcagcatgaagttgaagaatctttaagaagacttgcaggtacgataattggtaatgaagatatcgatagtattaggtggcctggttctgcatggagacgtctcaaggtgcaatgggacgccatagtagaagacaaaatgcatcctgaaagggtttgtccttggtggattgagcccttggaatctgccaaggagaagaagcaagttcctgctctccccaccaagaaaaaggggcatgcacttcttaaccagcgctctttgcctggaataagtggctttggcaagaatgatgttcatcagaattcagccggcccttcgtctcagactcggagggcagacggagacctgcaaggtcaagattacagcggcctatctcctccacagcctttgcaaagagcaccatcaactgatataatccgcccatcaaaggtcccaatccgtggctcgcggttcgggaaggagaatcggaatcagcatccctttctcaagcaagatcctcttcataaatctcttggcagatcaatgtcacttacacatgaagacttgtcaattacaagctcaaacctaacttccattggttctgaatcccttggaatgccttctactgaatctagaggtgaaaatgatgctccttttgggcagcctggcagttctagtacattcaaactttttggagttaacttaattgacagctcccctgagatcccatcggttaattttgttgatctcaacaagacttcaagtcttccttctagtcctccaatgggtgttgccccaggaaaaacatgcaagaagtgtcgctgtgttaataatcggagctgcacaaaggtgcttaagctgggaaatgctcttggaagagcagttgaccttgcacgctttaatgggtataccgaacttattgctgaattggactccatgttcgattttcaaggaaccttgataagcggaggtagtgggtggcacgttacctgcttggatgatgaaggagatatgatgcaacttggagattatccctggcaggatttcctgggcgtggtgcaaaagatgatcatatgtccaaaggaaggtactgacaatctcaagccaggctcctcagctaatccttgaaacctttagtcgcctaccttttctccccttttccaccattgcatgcatgcacagtttgcagtactgtgtcgtttctagttcgaataaatttctcttttcctgagaatctaggagatcaataagtttctgctataaaaatatagcaatcatagtgaaataaatttacagagtggaaaaacaaaaactgctttttcttgttttaagaacctgtttttcatgatacttgtggaaagtactcatgagtcatgaccgtgatatgaataattgacataataaatgcatggttattccgtcctcatgaacgggcgttcg

SEQ ID NO: 26845 - DNA, 508 bp, Glycine max
  unsure (1)..(508): unsure at all n locations
  Clone ID: TF_uC-gmflminsoy056g07b1
gaaaagaaacagttgtggggggtttttttttgaccacacccccaagagcacaccagngnctgtttcggacttttgactcggagaactatcttgccaccacaatttcccggcaattcctttatttgacttcactatccattccgattccctacctcattttttttaatattttatttcctttgcttttcacttttcactcattcctcttctcgctatattcatcaataatcactacaagagagatgcatcgccggtaacctaaacaacctccacggcgaccgaagcaatgatcacgcaaccaccagacgctgcccccgccgtcgcacccaactccggcgaaggaggagagaagaaaagcataaacgctgagctctggcaagcttgtgcggggccgcttcttaacctgccttcgcctggaactcacgtcgtttactttcctcaaggccacagcgaacaggtcgcagcgtctttgaagaaagacgtggatgctcaggtcccgaactatacc

SEQ ID NO: 26846 - DNA, 835 bp, Glycine max
  Clone ID: TF_LIB4200-008-Q1-K1-G8
ccacgcgtccgagagagcactgaagtgaagagtgcattgtgatatgaggaagcaacaacgttggcaagttggtatcgtggattgaggtggtcttttgggggaaaccatcaacgacaacgacagcatcaaaaggaagagaaagacccagaaacgggaacggctttcagaaactcacaagcttttcaaaaagagcttcaaagtgaaggaaaaaagtgccctttgattcttggtcaccacaacgccaagacaaacaacaaacaaagcaaaacacacacacacacacaagcaaactagaggagccaccgcaacatgttttctgtaaccgaatgctataattcaagggagttggtggtggtggttgttacagaatagaaagagaaaaaaaaagcatttttgtagtttggaattatcattgctactacttcgtctactacacacatttaactgtcatgtctggttggtgaaaggagctttctgttgtgttggctttgtctttctgttgtgtggttttgtttgctgttgaatggcacatctggggtgttgtaatcttgggggccctgggagtagtggaacttctctaccggaaaaaggtttgaaggatgatgatctctatagagagctatggaagctgtgtgcagggccattggtggatgttcctcgtactggagacagagttttctacttccctcagggtcacatggaacaattgcaagcatctacggatcaggaattgaaccaggaaattccccatttcaatctcccggccaagattttttgccgtgttgtgaacattcagttgttggcggaacaagaactgatgaggtttatgcttgca

SEQ ID NO: 26847 - DNA, 1003 bp, Glycine max
  unsure (1)..(1003): unsure at all n locations
  Clone ID: TF_GmC88076_2
ccacgcgtccggtgtttgaaattggaaagaaaccattttttggtgtaaggaagcgagcgtggcgtctggtggaaaactccggaggtcaactcaagagaaagagagagtaatgagcattgcattgtgtctcacacactctttgaacgcatcctcctaatgaagacgacgcagcagcctgaagctcctcaaggcgatccctgtgaaggtgactcagtctcttttctttgtatttatgtgtgtgctaacaacaataataatattggttggtgcagagaagaagaagagcataaaccctgagctatggcaagcttgtgcagggcctttggttaaccttcctccctccggcacccacgtcatctacttccctcaaggtcacagcgaacaggttgctgcttctctcaacaaagatccccactctcaaatccccaactatcccaatctaccttccaagcttctctgtctcctccacaatctcactttgcttgctgatcccgaaactgatgaagtctacgctcagatcactcttcagccagtcccttcttttgacaaggatgctctcttgcgatctgatctcgccctcaagtcctccaagccacaacccgacttcttctgcaaacaactcaccgccagcgatactagcactcacggtggtttctccgtccctcgccgtgccgccgataagattttccctcctctcgattattctatgcaacctcctgctcaagaactcgtcgccagggatttgcacgacaccgtttggacattccgccacatttaccgtggacaaccaaaacgtcatttgcttaccactggatggagtctatttgttagtggaaagaggctcttggccggagactctgttttgtttattagagatgaaaagcagcatcttcttttgggtatcagacgagctaacaggggcacccaccatatatcgtcatcagtggtgtcaagtgatagcatgcacatttgaaatncttgctgcagcggctcatgcagctgc

SEQ ID NO: 26848 - DNA, 2799 bp, Glycine max
  Clone ID: TF_GmC1058_1
gtgataggtcagtggggagagaaagacagagacagagaaagcgggtctctttctttttcggctgcgagaagacgacagaaggggaatgccaaagttggtcacgctctctgaaaatgcagcaacagcaacagcagcagcaggcatgaagagcaacatacacaacaccactccttcaaatatcatcatcatttctcacttctcatccttcactctcttcttctctttcttcccttcactctctctttcgcttcatggctggtctcatcgatctcaacaacgccaccgaggacgatgaaacgccgtcgtctggctcctcctcctcctcctcctcctccaccgtctgccttgaactctggcacgcttgcgcgggtccaatgatttcattgcccaagaaagggagcgttgtcgtgtacttccctcagggacacttggagcaacacctccacgattttccgctccctgcctctgccaacatcccttcccatgtcttctgtcgcgtcctcgatgtcaagcttcatgctgaggaagggagtgatgaagtttattgccaggtggtgctggttcccgaaagtgagcaagtgcagcagaagttgcgggagggggaatttgatgctgatggtgaagaggaagatgctgaagctgtgatgaagtcgacgacgccccacatgttctgcaagactttgactgcttctgataccagcactcatggtggattctctgtgcctcgtcgcgccgcggaagattgcttccctcccctggattacagtcaacagaggccttcacaggagcttgtggcaaaggatctccatggccaggaatggaggtttcgacatatatatagggggcagccgcgaagacacctgcttactactggttggagtgcctttgtgaacaagaagaaacttgtatctggagatgctgttctgtttctcaggggtgaggatggagaactgagattgggaattcgtagggctgctcaactgaaaagtggcagtaccttttcagctctttctggccagcaagggagtcctaccagtcttatggatgtggttaatgctttgtctgcaagatgtgcctttagcattcactataatccgagggtcagttcatctgagttcatcatacctatccacagattcgtaaagagccttgattattcttattcagctggaatgaggttcaggatgcgctttgaaactgaggatgctgcagagcgaagattcacaggattaattgttggaattgctgatgtggatcctgttagatggcctggatctagatggagatgcctaatggtaaggtgggatgacttagaagccacaaggcataatagggtttccccatgggagattgagccatctggttctgcttctactgcaaataacttgatgtcagctggtttgaagaggaccaagattggattgccttcagccaagctagattttccagtttccaatgtgattggaacatcagactttggggaatcactaaggttccagaaggtcttgcaaggtcaagaaatgttgggtgttaatactacttatgatagttttaatgctcaaagtcaccagctatctgatttgaggaggtgctatcctggctcgaactatcctaggattgctgcaacaggaaatagcattggaatctcacaagtgagttccaatgtttccaacaacggcataggctttagtgaatctttcagattccagaaggtcttgcaaggtcaagaaatacttcctagccaaccatatggaagggccctgtctgttgacgaggcttgtggaaatggtcgctttggactttttgatggtttccaggcgatgagatccagaaatggatggtcttcccatgtgagcaacaattcctcacatttgcatcctcctgttccatctgggcaagtttcatctccgtcatctgtgttcatgttccagcaagctgtcaatccagttttaaactcggattataacaaccaaataggtcaggtgatgggagataaagtccatcagcgagtttcatatgcgtctgaagttaaaggcggaaaatttgtatcaaccccctatgagcctcttctccgtggactatctcaggaaggcacaaattcttttggtctttcaaactttcataatcagctggatagttcacgttcacacgattctgtttcagtactgagagctagtcaagagttggttccctcgtgtaaaagtagatgcagagtctttggattttcattaactgagggtgctcccgttgcaagtaaagaggcgactgactcatctgcagttgcttgtgctggaccttcctttacaagacatgttgaagatgatttccatccagggcattcacttaggagcaaggcagtggcaagttattgcaccaaggttttgtattaaatgcttatggggtgtgctgcaatattgacttggaaatcttgatgtatgctggtactgatgctggcataaggtagcagaagagaatgtccacagttgttgtacttgtgtgctttgctctagtgacttggaatattgggagactaaaatattgtaactattcgtctaatttagatacttgttaaattggctatgaccacgttctagattctgtattaatcatgtatctacccttcattgacttgtatggggaaaacctctaaacgatgcatgtttatcccccgttttggtcatatgaacaaagtaagccaggtggttgtgcttaaccataaaaaaataaagaattgagcattgattacattagagagcaaaagctcttttaatgtttcatgtccttaatgttgtccccccc

SEQ ID NO: 26849 - DNA, 1181 bp, Glycine max
  Clone ID: TF_GmC131_1
tacggctgcgagaagacgacagaagggggaccttggcgcatgcttcaggttaattgggatgaacctgaagtcttgcagaatgcaaagcgagtcagtccttggcaggttgaacttgtttcccttccatttgcacttcatacagtatactcccctaacaaaaggcttagatctgaccagggttctgggctgttaagtaatagggagggagaccccttctttcctatgacagggttccctaactcgacaatggaacacatgacagggttccctaactcgacagtgggacacatggataaatcattgttgagttatgatacttttcctgctggcatgcagggagccaggcatgatctattttctccatcaagtttttccaactttttaaatgataagtcctatctgtatatgggtagtggttcatttgggaacaatccagtgcaaagtttgggaactgtgacaacagagctaaacatgagcagttctcaatcggatgacttgtcaccacatagccagagtagttttcattcctttgccagagagtttgctgggacccggaactgtgacaccaaagttgcttctggttcaattctgctatttggtaagatcatacagcctgctgaaagtgatttgcatgatggtgattgcatggaacgtgatggcagcaggggcagcaataaacttaagacagttgaggcatgctatttttcaaagtagttatgcagcagaatgcagttaaatacttgtacaggaaatcaaggctggcaggtaaaacaggaagctgtctagggcttgtagtggtaaagtgatgtttccgggtcatcatatgttggtcttactacaaacttgaatgatgaactaacatcatgatatttgatcagttgtatgatattaatatctgacatattattgtgtatattttcaaatacattcttaaaaggcaattgtacttgccttttaaaaaaaatgcccatgcttgcgcaggtaacaacctccgtactcgtatatctttatttgatgaggtaattgtagcctgaaagaatgcttgcaatactctttaactctgtctagcatggttgctgcgtagcacatacttcatggtatgttgaggcagtatcatacctcactcatataatatttagcttgcatttatgtacgacgtcaatgaataacacgtctctgcc

SEQ ID NO: 26850 - DNA, 844 bp, Glycine max
  Clone ID: TF_GmC153313_1
ataatcctagggcaagcccatctgaatttgtcattcctttggccaagtacgttaaagctgtgtatcatacacgagtttctgttggcatgcgatttaggatgctatttgagacagaagaatcaagtgttcgccgatacatgggtaccataactggtattagtgatttagatccagtccgctggccaaattcacactggcgttctgtgaaggttggctgggatgagtccactgcaggggagaggcagccaagagtttccttgtgggagattgaacctttgacaacattcccaatgtatccatctccattccccttaaggttgaggcgcccttggccatcgggcttaccttctttatatggtctcaaggatggagacatgggcattggttctccattcatgtggctccaaggtgggcttggggatcaaggaatgcaatctttaaacttccaggggcttggtgttacaccatggatgcaacctagacttgatgcttctataccaggtctccaaccagagttataccaagcaatggcttcttctgcattccaggaaataaggacaatggatccttcaaaatcttcgcaatctctgttgcagtttcagcagacttcgaatgttcccagtgctcatgcttctgaggtacagaggcaagtattaccacagtctcagcctcaaaacacccttctacacaattatcaagaaaaccaggtgcctgctcagtcacaacttctgcaacaacagttgcatcgttaccacccatatagtgatccgcggcaacagcagcagcaacttaaaaacttgcctgttcagcagcagttaccaaatgtcatctctcctttgtctaa

SEQ ID NO: 26851 - DNA, 1168 bp, Glycine max
  Clone ID: TF_GmC231_12
agaaaatggagcagttcattgataacttgccgccgatggatctgatgcgatcggagaagatgaccttcgttcagctcatcatccccatcgagtccacgcaccacgccatctcctatttaggcgaactcagccttctccaattccgcgatgtggagaggattgcaagctaaggttatggagtatcaagtctggtgaactgctttttgaggacaagttctctgattcagttatcttcattgtgtgctataaaacatatggacatagttttaaagcagaagaggaaaaccaatacaagcgtgactcatctcagggtgcatggcttggatcacttgaaggactattttatatgtgctggttatgagtgtgaagggtcctgcagctatagaatctgaagctaactagatgcccacaatacctgataaatactaagtttatagcatattactcacatgaagcagcttaagtcctgagattctagaaggtttactaagatcaggtttgcaatgatacggcatgtagatgtcacaatggatcaggtttggggatggctttcatgtctgcaaggtttatgtcaacaaaagtcggaaggagttgatcggccgcaatggtccacatttagtgatgttaactactcaggttctctttcatccacatttggtagcaaggctttagcaactgaaggagagaaggaaaatttgatgacagattatgtcttaagggactggaggtctgtgctgatactattgtaggaaatgcaatgttaagggggatatctggtggacaaaggaaacgtgttacaacatgggagatgctggttggactagctaatgcttaattcatggatgaaatatctactggtttggatagctcgacaacttaccaaattctaaactcgctcaagcaatgtgttcacattctcaaaggaacaacagtcatctctttgaattttaatgaaatatctactggtttggatagctcgacaacttactattccctcttgcattttaatgatatgcttgtgtgatgctactaaaaaattttcaggggtcagaaagactttgaattcagagttatggcatgcttgtgcagggcctcttgtgtcattaccctaggttgggagccttttgttttacttcccttagggacatagtgagcacgtgaatgaatt

SEQ ID NO: 26852 - DNA, 1030 bp, Glycine max
  unsure (1)..(1030): unsure at all n locations
  Clone ID: TF_GmC630_9
caaaaaccacacacaacacaccacaaccttcttcttcttcttcttcaacttctggttcaaaacctcaacagtttgttgaattgcgcgttgaaatacgactcaatattctttcgcgagctctgttctcacttcaaaggttaggttcttcgacagtttctttgtttccactccgtcgcttgctgagaaggcgtgagcgagagttgtagaattacgcaacgagtgtcgcggatgagagatctgtggtgaggtctctggaaatgacatcattggaggtgacgatgaagggaaattgcttgaaccacaacgacggcggagccacggagcctcattccccgtccacggccaaagacgcagaagctgcacttttcagggagctatggcatgcttgtgcaggtcctctagtcacggttccgcgagaaagagagcgcgtgttttatgtttcctcagggacatactgagcaggtgggctcgaggtggaggcgtcgacgaatcaggtggcggaccagcacatgccggtttacgatctcccacccaagatcctttgtcgggtcatcaacgtgcagctgaaggccgagcccgacacggatgaggtgtttgctcaggtgactttgcttccggagccaaacgtgagtttcctctcctcgttagtgtgtgttttttagagagagacagagtaattgggtgaaaaagtggtgatgcttatgatttttttttaatgtgggtggnggatgatgatatagcaagatgagaatgccgtggagaaagagccaccaccacctccgccaccacggtttcatgttcattctttctgtaagactctgacggcgtccgatacgagtacccatggtgggttttctgtgctgagacgacatgctgatgaatgtcttcctcctctggatatgtcgaagcagccacccacacaggaattggtggctaaggatcttcatgcaaatgaatggcgatttaaacatatctttcgaggtcaaccgcgtagacacttgcttcagagtggttggagtgttttggcagc

SEQ ID NO: 26853 - DNA, 763 bp, Glycine max
  Clone ID: TF_GmC896_2
gcagtagttctagttcgctttctttcactcactcactgagatctgaaataacaaaaaacaccgccagctcgtgctggtactttgcgtgatgaagctcgtttgaagaaaagagaaacttcaaacttcaaacttcaaaagccacattattttctccttgaacacactctgttttttttgttgttgttccaatgaaggaaggtgagaaggtattggatccgcagctatggcacgcgtgtgcaggtggcatggttcagatgccacaagtgcactcaaaagtcttctacttcccacagggtcacgccgaacacgctcacacaaccattgatctgagagttccaccgttcatcttatgcaacgtcgaagccgttaagttcatggcggacccagaaaccgaccaagtgttcgccaagctgagtttggttcctctaagaaactcggaactcggtcctgactcggactctgctgctggtgatgacgcggcggaaccttcttcttgtgaaaagcctgcgtctttcgccaagactctgactcagagcgacgccaataatggtggggggttttcggttccgcggtactgcgcggagacgattttcccgaggctcgactgcacggcggagccgccggtgcagacggttgtggcggaagacgttcacggcgagacgtggcggttccggcacatttaccgggggacgccacgtagacacttgctgacaacaggggggagcagtttcggtgaaccagaagaaactcgttgctgggggat

SEQ ID NO: 26854 - DNA, 2060 bp, Glycine max
  Clone ID: TF_GmC519_1
gggtctgcaacaggttgacatcgcacacaaaaatgttttgtcacaaagcacatggaatgacaatactggacgtaacagatggtagcaagattgtctcagctgtgccggttacaaagccttactcatctacattgaacagtgagaatgtgcgcgactcaggcaactagcagagcaacatcagtgattctacgtcaaagcatgcatctgggggtgcttgcattgatccctcatgctgttgccactcagactctttttgtagtatattataagccaaggacgagccaattcatcataggcgtgaacaagtatttagaggctatggacaaaaagttcagtgtcggcatgaggtttaagatgagattcgagggggatgattctgctgagactgacaaaagattttcgggtaccatagttggagtggaagatatttctcctcattgggtaaattcaaaatggcgatcactcaaggttcaatgggatgaacctgcagctgttcccagacctgatagggtctcaccatgggagatagaaccctttgttgcttctgcttctacaccctcagttcaacctactatggtaaagactaaaaggccccggccacccagcgaaactccagatgttgacacaacatctgttgcttctgttttctgggatgctggtctgcaacaggctgacatggcacaaaaaaatgttttggcggaaagcaaatggaatgacaatactggtacgtggcatcatatgcaaactgacatgaatagtaaaagcaacagtggcaacactatgttaaggaatcagacagaaggaagttggctatcttctccgcattctagttgtccctctcatttgtttcaggacgtaacagatgatagcaagattgtctcagcttggccggtttcaaagcctcactcatccaaattgaacaatgatcatgtgctcgaccaagttgacaaggagagcaaagttgagactgctacaagttatcggttgtttggaattgaccttattgatccttctaggaactctccttctgtagagaaggcatctgcacaagcagtaaatgtacccaaagttactactgaaggctgtaccatcaccttgtcccattctgtaatatggtgagaagaatcttcatttgttccagccaggatgtgaagaagatgagttgtggaagcaaactgccgatctcctcagtggaagacgggactgtaataagctcagacacaactgaaacctgaaacttttgacattctttcctgtggttttgcgtttgtttgtcagcagcacccaaatgctgatccttcttgttgcttcaaattgtttgtgggaaggaagttggtctatttgggctggggtaagtttcatgttatcagatgtgagacactagctaattgtaacttaatttgtagagacaccaccaccaggcattaattgtgctagaaaaaaaaagacctaaacagatttctttaataaattagtaagtgggaagatggcaaatttaggcttagtatatgtgaatattcatgtcaagctggaaaaagaataaactttgacatctttcttgtggttttgcgtttgtttgtcagcatccaaatgctgatccttcttcttgttgcttcaaattgtttgtgggaaggaagttggtctatttgggctgggtaagtttcatgttattaaatgtgaaacgcactagctaattgtaaacttaatttgtagagacaccaccaggcattaattgtgctagaaaaaaaagagaccaaaacagatttctttaataaattagtagtgggagatggcaaatttaggcttagtatatgtgaatattcatgttaagttggaagaagaatgttgggggttgatgttttgaaaagacttgccttttctagtcaagggggcttattcattggagctttgtatgcgtataatgtgcactttgttgttatcctctaaaatttctaatctgggtgagtcaatgtctgttgctgtcatcagtgaatgtaaattatggcattaaattgcttcaattgtagtgttcagaaaaacagtggtcccctgtgccagtc

SEQ ID NO: 26855 - DNA, 985 bp, Glycine max
  Clone ID: TF_GmC326_8
gacgccgtcactaacttcaagcctctcgccggcgccgacgacgccgaagccgagttcctcagcacgcattccaagtccgagatcgtcgacatgctccgcaagcacacctacgacaacgagctccagcagagcacccgcggcggcaggcgccgccgggacgccgaaaccgcgtcgagcggcgcgttcgacgcgaaggcgcgtgagcagctgttcgagaaaaccgttacgccgagcgacgtcgggaagctgaaccgattagtgataccaaagcagcacgcggagaagcactttccgttaagcggatccggcggcggagccttgccgtgcatggcggcggctgcgggggcgaagggaatgttgctgaactttgaggacgttggagggaaagtgtggcggttccgttactcgtattggaacagtagccagagctacgtgcttaccaaaggatggagccggttcgttaaggagaagaatcttcgagctggtgacgcggttcagttcttcaagtcgaccggactggaccggcaactatatatagactgcaaggcgaggagtggtaaggttaacaataatgctgccggtttgtttattccggttggaccggttgttgagccggttcagatggtacggcttttcggggtcgaccttttgaaactacccgtacccggttcggatggtattggggttggctgtgacgggaagagaaaagagatggagctgtttgcatttgaatgtagcaagaagttaaaagtaattggagctttgtaacattacatagtttttgagtttcttttgttaattttgtaactgttgaattcgtgaggtagagatggtgatggcgttgttgttgcaagttgccactcacaaaacgtgtatattcttaatttgatgggaaaaaaaaagagaaattagggcaagaagaattgtataatgcaaaggtttttttcaaaagaaaggaacatggagtgcaactatttatttttgt

SEQ ID NO: 26856 - DNA, 735 bp, Glycine max
  Clone ID: TF_GmC892011_1
gcgaggcgctgtgaggggccgggacggcgtcggcttgggccctaccgggcctggtcgggttttatccgcgagcggagtcgccgggcgttggtgtgtggtcctccgctgtgagaggcgctttctggggccgctggtgtcccggcgtgtggggcgggttgccttccgcgaccgaggactcctccgggttgtgctgggtcctcggctctgtggcggccgttcaggttcctgtgccgttccgctggccggttccacctgcctggcgtctccggggttgctgccaggaccagctggttcatggggactattgcttctgttcaggttcttgatcctattcgctggcctaattcaccttggaggcttcttcaggtacacactatttcaattcatgcttgtctttgccaatattctaaagtttgaattttcatcgcaacaggttagttgccttgggcccgtcttgctccagcagcccctgcgggtgtccccctggttgcgcgcctgcgggcctaccgggcccctcgccctcccggctgccttctctccaccaaggaagaagcttaggttcccccttgacgttcagtttccgataccatcgttttcaggcaacccctttgggtcttctagctctagcagccccttttgttgtctctctgataacgctcctgcaggcatacagggagccaggcattctcaaattggaatatctttatcagatctccaccttaacaataagctgca

SEQ ID NO: 26857 - DNA, 1212 bp, Glycine max
  Clone ID: TF_GmC229993_1
gatagaaactcatgagttacatcatcccatatataattggaagagggattctccctcaataaggaaatacagtagtaggagagaaaacttcagtcaagtgcaagttaacgaaaatattaccccttcagttcatcaaaacggttactcagttttaacaaacaacacataatagttgttatggtgtcataaaatatgtttctgaatcaaacgggggaatatttttgttaacttgcacccaagtacaatttatgccgaaggaaaagaaacacctatacaacaaaggcaacaacactacagctactgaaatctgttataagaatagttagccgcattgatgtattgtctccaagaactcactggcgtagcaactgaaaataggggcgattttgttataaagcaatacacaatgtgttaacattgtcagttccaagatcagacttgtgttggtccttgtaccagggaaaccctccatcagaattgttctcaattggactaccttgatgcaaaccaaaacctaggccatcggatgcattagatgtcttgtgtgaattcccctcagatacactattaccattagtattggcagagctagtgtttgaactcttttgctcagtctgaatgagttttccaaataacaagatgtgaggtgcttttgtttcattggattccttgaaattctggccaggatttcccactgtcaacaagcaagaaatgccaacattggccttagtagtggtgttgttcttataggttccacaaggtggcctaataggctgtgctgctgcatggtcaagccttgagaaaccacctagaagcatgtctgctgggagcttgttgaagggaaaatcagatggagatagtccaaattgagcatgcctggctccctgtatgcctccagaactattactatcttgaatggtgcaaagagagttggtgtaattgagaaggttgctagagaatgatggcattgggagttggttgatgacttgaaaataaggatcctgaagaaaacgttgtttcattctaggaggtgagtatgcagagagattgaatgtaggcatgtttgagactagttcaaccagccacgggtttacacacttcacattttgaagtaaatctggctcatcccacaccacctgcagaagacgccatggagaatcaggccaaaggatgggatctgcaacttgaacagaagaaatggttcccatgaac

SEQ ID NO: 26858 - DNA, 498 bp, Glycine max
  unsure (1)..(498): unsure at all n locations
  Clone ID: TF_GmC749534_1
gcacgagggtcaattcagctgtttccggtgggaaaacaattaccaacaacgcccataacagaggcaaagggttttggagattccaacaaaaggggcaaagaaaaactggccctgtttgtattctgtaacaggctaacagccgctagctaaagagataaattccgtggcagttgagttagaagcgaaaagaaggaaactactcactgtctgggttccgctttctctctccttacctgccgtggggtactaatctaatcagtaatcactctaccacctgctttcagcttttgcctctctgtcttcctcaatggcaggtgtgggagatggcgatttgtacacgcaactatggaagctatgcgcgggacctttggtggatgttcctcgccaaggggagagagttttctacttcccgcagggtcacatggaacaattgcaagcttcgactaatcagggactgaaccaggaaattgaatgggttgttctaaanaaaaaaaaaaa

SEQ ID NO: 26859 - DNA, 507 bp, Glycine max
  Clone ID: TF_jC-gmXLIB3564P118cd01b1
cccacgcgtccgttaatttttcatatctacaaaccaaatgctgcttggaaagcactgatggctgaaagaaattaccaagagattatttaatggcttcaacatcttgcgttggtaaccgctcattacctataaaacatgcaacaggtccaagttattgagcatattctttttctctagcacaatatgaggaggttgtagacaatccccagctcttcatgtttaccttggaaaaacttcacgccgatatgggtaccaagtgatgattcccattggtggaggaagagaactatatttgcatcccctctttgatgaagtgacttctcgaggagggattgtcaaaataattagagagaggaaatggaaagacgtaccttcagtattaaattttccatcaacagctacagatgctttgattgagctgcggaagtactatgctgcattgctctaccattatgaacaaattgacttctttaaagcccgggaatgggaccctactgctcctgatgc

SEQ ID NO: 26860 - DNA, 499 bp, Glycine max
  Clone ID: TF_LIB3242-287-Q1-J1-G12
aattcggctcgagaaaggaattgaaattgtcataaggtaaggtgtgtgtttttatatttacatagattaaggatttatgaccaattatggagatatgaatgtgacaaataagccaaacccagatggttccaccaatgggtttcagtctcagcttcaagttcaacaacaaaatgggtgggagcagggatcatctagactcagacccactaaaccttaccctgcaccaacggctcggtaccaggacattgttcgtgatgcaaacctcttctggggaacgcttcaagcttttcacaaaatacttggcaccaaatacaaggttgctactgtgggaggaacgtcacttgatctacatcgcctttttgtcgaagttacatctcgtggtgggattgaaaaggtgattgttgatcgtaagtggaaggaagtgattctgaccttcaatttcaaagataccataacgagtgcatcatttgtggtgcgcaaatcctatctatcgatgctt

SEQ ID NO: 26861 - DNA, 1613 bp, Glycine max
  Clone ID: TF_GmC52418_1
atttgaaatttgcatgaagctacctcaatgggctttgcagattttgagacagctagcacctgaggtttcttatcgaagtttagttgcacttggcattgctagtattcaggggttgcctatagcttcttttgagaaagatgatgctgaacgcttactgttcttctatcaaaactgtgagaaagatagctgtacaaacaaaaataatataatttttagcagtccccctggttggttgaaaccaccccctcctactaggaaaaggtgtgaaccaagacaagaggctagccctggtcttcatgaaggtgtctttgcagggcagggtggtgtttgtaaattaaatgaagaggaaaaggacagaaaaattgtcaatgggattagcatgccgttaactcctgctaggcagagattaaaagtatctgcaatgaggccaattcctcacattcgtcgccatagaatgacacctttttgtgggccttctgagacagatggttttgatggcactcaggtagaggctattttgccacttgttgcccctacgaagcgtactagtattggatcaacatctggaacacacagaaaatcattttcaagtgcagctcagtctaagcaggttatttcattgaacccattgcctcttaagaaacatggttgtggtagaggcccagtacagacatgctctgaggaggaatttcttaaagatgtcatggagtttctgattctccggggacataatagactgattcctcaaggagggcttaccgagttccctgatgccatactcaatggaaaacgtcttgatctctacaacttgtataaagaggtggttaccaggggaggatttcatgttggcaatggcatcaactggaagggacaaatcttttcaaagatgcgcaattacaccacaaccaatagaatgactggtgttgggaatactctcaaacgacattatgagacctaccttttagaatatgaattagcacatgatgatgtggatggagaatgttgcttgttgtgtcacagtagtgcagctggtgattgggtgaattgtggcatatgtggtgagtgggcccactttggctgtgacagaaggcagggtcttggtgcatttaaggattatgcaaaaacagatgggctagaatatatatgtcctcattgtagtgttacaaatttcaagaagaaacaaaattttgctaatggttattctcaagggttaatgtcttcacgacccctttgatagttttccccattcccttctggaatagcggacaaactagttacctgatttgctggatttatctgtaatttatgttttagatagattagtgaaatataggatgaaaaatttgaaaattaggtttaatcaacacaaatgtcatcaggagtaggcgaaccccttccacatttgttcttgattaaggggagcaaaaattcctaattcagataatggaaatcattccactttcggatctccatcaaactctccattgtgagcagtgagctgaagtttattttattacgagtgtcctattgtattgaaaggaaaatgtatagacttgtgcactaagcatgtttatatgatttaatttaacatctcaattttaagtctttctgtt

SEQ ID NO: 26862 - DNA, 2265 bp, Glycine max
  Clone ID: TF_GmC1753_1
gcatcagcatcttattctgtttattaatttcttttgctgttgtatattttatagtgcaacaccaccacctctccaggcaggaacattctcacgtggtgtagtgactatgcgttgtgatatatcaacatgtagttctgctcatatatcacttttggggtctggtagtgcagacacttgttttaatgatcaggcatgggtgaatttgctgccagtgtttgacattttacatatatgatcttttaaactttttacttacctatcacttattttgggtatatcctcagcttttggagaatcatattaaaaaagagctgattgagaagagtcaacttgtccaggcatttcctaatcatcaacaaagtaaagcaccttcatccgagcctcgaagatcagcctcagtagcgtgtggatctagtgtgtttgaagtttgtatgcgagttcctgcatgggcttcacaggttaattgttgtttctcaaggtttcgtctgtcggatatagctttctaaaatataatttaatggatcttaaaaattatttttaatcaatgaaagggcctagatggaggcttttgctaaagatatttgtgacttctgctttgccattatattttccagttgactggtttatgtattttagtccaattgttaggcctataacagtagtttgtttactttgttattgttccaattgttctgtttttcacggaagtgacggaacatatgaaaatagcctccacattgtattggcttgatcttttagcaatttcatgctgtaatgacatgacccttgttagttccttttttctttttgaataatgaaaccttatcttttgattaatggtttttgatatttgtgcacaggttctgagacagcttgcacccaatttggcataccgcagccttgttatgttgggaattgctagtattcaggcattgccagttgcatcttttagtaaagatgatgccgagcgccttcttttcttttgtactaggcaggagaaagaaaactgtcctaaggatcatgttttctctggtattccaagttggctgaagcctccaccacccagtcgaaaaagatctgaaccatgctctagttcaaagtctattaatgctagtggccggggagttgaagctattggcagtcatagacagaaatttattgttgcttctatgaggccaatccctcactctaatagacacaagattctccccttttctggattgtctgagggtacaagatatgatggagaccatggaaaatcaaatctaccacttgctcttattaagcataatgtttcaggccctacttcagttacaaataggaaatctgtgtcgaattcatttcaagctcaccagattatttctttgaatccactacctatgaaaaagcatggttgtgacagagctccaatacgagcttgctctgaggaggaattcttgagggatgtaatgcagtttttgatacttcgggggcataatcgtctaattccgcctggtggacttgctgagttcccagatgccattttgaatgcgaaacgccttgacctgttcaacttgtatagggaggtggtttcaagaggaggctttcatgttggaaatggtatcaattggaaagggcaagttttctcaaagatgcgcaatcacactatgacaaatagaatgacaggtgttggcaatacactcaaaagacattatgaaacttatctcttagaatatgaattatctcatgatgacgtagatggagagtgctgcttgatgtgtcacagtagcgcagcaggtgactgggtgaactgcggcatatgtggtgaatgggctcattttggctgtgataggcggcagggacttggagcatttaaggactatgctaaaaccgatgggctggagtacgtttgtccccgctgcagtgcgttaaaattcagcaaaaaatcccaaaaaactgcaaatggtttttaacaactaacacaggtcaaacattgctggcccagagcaaaatgtacattgcaagtgctagatagatttatttacacatccattgtgcttggacccttgtctcaattggtaagggtaggtttctaaggactgtaattgtttcacttatgttaaagctgtagagttttgacatgctatggtcacctcacatctcaaacttgcctattttattttgtcaaaggtactcatacctagtacaaaatgggtgtcgtcttgtcataggtattcattgcaattatcattattattattattattattattattattattatta

SEQ ID NO: 26863 - DNA, 2002 bp, Glycine max
  Clone ID: TF_GmC327_2
cacgcgtccggggtttttcaaattcaacatttcttcggttaccaattttcggttgttttctctcacccttcaattgcaattcgtacaggaggttgttctattctcatgcacaattgaaattggcaaatgagtgatgcaaaagaaaacgaggaagctggccagggcatgccctcggtcgtggaagaaaaccaacagttggttgatgctgaggttcaagatcaacctgaaactgcctcttagtagaggaaacttcaaatcatgttgaaaattactcatgttgaaaaggaagaacctcgtgccaggataaaaatgcagaacttgaggctgtttcagagggaattccacaagaagatgttcaaaatactcttctatgtcccagtagagtctgatgctcagattttggataggactgagtctgaagaagatctgttgcgaaggtggaagctgatgaattaccacagaataataaggaggctgagaataatgatgatattcatcaaaaaagtaatggcaatgttgagatggctttggaggtgaagcctgaagcctgtggaatggctgatagtaaagcatgtgataatggtgaccctgtgcttgcaagtcataatgagcctgctacgcccctacctgctcctgcagatacaaacactgaaattatgaatgtattagaagttgagaataaggttgatgaaaagcaagtggctgaacctgcagataacgggaattcaaactcaaagcacatgcttttcttggatgccgaccattcctatgatggtaatgagtcaggaacagaggaggagcagtcagcatttatgaaggagcttgaaaacttctttagggagaggagcatggaattcaaacctcccaaattctatggagaaggattaaattgccttaagctgtggagagctgtaacgagattgggtggctatgataaggtgacttcatgtaaattatggcggcaagtgggagagtctttcaagcctccgaagacatgtaccactgtctcatggacttttcggggattttatgagaaggcacttcttgattatgaaagacataaaataaaaggtggtgagctgaatgttcctgttgcttctcatccagagcctataaatattgaaaatcaggcctctgtatcaggtagagcacggagagatgctgcagcacgagctatgcaggggtggcactcacaacgcctcctaggcaatggtgaagttagtgaccctattattaaggataggaattctgtgtctgtgcaaaagcgtgaaaagcagcttaaaagcatcaatatacacaaacgtaagaagccatcttcaccttacatggataatgcagtcaaagctgcacgcagtaaaccgtctaaaccacaattggacacaactgtgattgatattggacctcctgctgattgggtaaaagtgaatgtacaaaaaactaaagattgttttgaggtatatgctttagttcctggcctgctgagggaagaggtccgtgtacagtcagaccctgcaggacgcctagtcataagtggggagcctgaacatcccaacaatccttggggtgtgacacctttcaaaaaggttgtcagcttgccctcaagaattgatcctcatcagacatccgcggtggtgacactgcatgggcagttgtttgttcgtgtcccgtttgaacatttagaatagtggtcgcttatgctttcaatgcctctctctttgaccatgatatgtatgtaggatagttgacccggaaaccatgtagaaaaatatttctgcctgtaaaacatgccaatttctagcttagcgtagcatttattttaatgttttagttcacttataaattctcgtacatgattttctcaaagaatattttaaccttgttaatatgagttaggtaggattctgtaattgctgaggatcaatgttgtaatattgcaacttggttagtgagattacattaaacttttgacctttttatgttgaaaaaaaaaaaaaaaaaccac

SEQ ID NO: 26864 - DNA, 2085 bp, Glycine max
  Clone ID: TF_GmC327_1
aatacggctgcgagaagccaacacaacctgacttagaatttgcgctcttacaatttagaggaaaaggaaattaattaaggttttccttcaaattcaaccattgttgagttttcttttgcaatacgattgaatttcaatatagggttggtgtagaaggttgttctgtgttctcgtgcgtggttaaattttggagatgagtgatgcaaaagagaatgatgaagcagggcagaatgtacccttggctgtggaggaaactcaggagttagttgaagcacagagtcaaccagaagatttggctgctcctgtgtccaaaggggatacttcaaatcatgttgaaaacgggaaagaagaggggcacgtgtgggtaggataaaattgtgaaaccagaagcggattctgagtgcattccacaaaaagatgttctaaaaatactcttcatgcagtccccgtaatggacaatgctcaagttttaaataaaaccaaagaaggtgaatatgtttcagatgtgaagagcaaagctgaagaaactccacagtgtgataagagaatcgagaatgatgctaatgtttggcaaatcaacatggatactgctgaaacgactgtggcggtgaatcccaaagcttttgaagtggctgatagtaaaacttgccttaatggtgactccaactccatatgccctagtcataatgagcctaatacaccacatgcaattcctactgaaatcaatagtggattagacaatgagaatagggataatgaaaagcaggctgttgttgcacatgcagataatggacattcgatctcaaagaacttgtactttttggaccctgatgattcatataatggtaatgagtcaggaacagaagaggagcaatcagcttttatgaaggagcttgaaaatttctttagggagaggagcatggaattcaaaccacccaagttctataaagaggagcttaattgccttaagttatggagatctgtacacagattgggcggctatgacaaggttacctcatataaattctggcggcaagtgggagagtctttcaaacctccaaagacatgcacaacagtttcatggacttttcgggttttttatgagaaggcacttcttgactatgaaagacataaaataaaaggtggtgagctgaatgtgcctgttgcttctcatccagagcctataaatattgaaaatcaggcctctgtatcaggtagagcacggagagatgctgcagcacgagctatgcagggttggcactcacaacgtctcctaggcaatggtgaagttagtgaccctattattaaggataggaattctgtgtctgtgcaaaagcgtgaaaagcagcttaaaagcatcaatatacacaaacgtaagaagccatcttcaccttacatggataatgcagtcaaagctgcacgcagtaaaccgtctaaaccacaattggacacaactgtgattgatattggacctcctgctgattgggtaaaagtgaatgtacaaaaaactaaagattgttttgaggtatatgctttagttcctggcctgctgcgggaagaggtgcgtgttcaatcagaccctgcaggacgcttagtcataagtggggagcctgaacattccaacaatccttggggggtgacacctttcaaaaaggttgtcagcttgccctcaagaattgatcctcatcagacatcggctgtggtgaccctgcatggacaattgtttgttcgagttccatttgagcattcagaatagagaaggctgatagattcatgacgaactaatttaccatggtttataggatagttgacccctaagccaaattccgtattctattaacattatgttaatattttttatttaaatttttgtgtagaaaactatttctgcctgtaaaacatgccaatttctagcttagcgtagcatttactttaatgtttgagttcacttataaattctcgtacatgattttctcaaacaatactttaaccttgttaatatgagttaggtaggttctgtaattgccgaggatcaatgttgtaatattgtaactttgttagtgatattgcatttaacttttaccc

SEQ ID NO: 26865 - DNA, 880 bp, Glycine max
  unsure (1)..(880): unsure at all n locations
  Clone ID: TF_GmC37930_1
gttggaaggaaagaaagaaggagaaaggggtaagatagtattttgacatgcaggaaacgaagcggtagtagtagagagtagtgggaaggtaaccggagtttctctcccaccgctatatcatatgggggccaattgttttattttcatcattcattcaaattctgcttccaatcatatttaaatagaaacacacactcctcatcccaaaccctacattttcttcaagcgctgcggtggatcagattccccattaaggatggaggatggtgagaaacccagccatggcattgctgatatggatgttgttgatgccactttgcaaagccatcgtgtggcttctgatcaagtaatggtcctacagggtcatgatatcaaaaacggcgattctgatcctgctcacgtgccagcaaccagtgcaattagcaataatcagtttgaacttgaagatgctaagactgtttcgcatcaggaactgatcactccaaagcctaaagaaaagaatgtcagagaaatgaagaatgtgctaaatgataccgagatgactgattatgatgagtatggcacgcctctggatcgagaaacatttatgaaagagcttgagactttctacagagagcggtccttggaatttaagcctcctaagttttatggagagccactcaattgtcttaagttgtggagagctgttatcagactaggcggctatgatgtggtaactggatccaagttgtggcggcaagtaggagagtctttccaccccccaaagacctgcactacagtctcatggacatttagaattttttatgagaaagcacttttagagtatgaaaagcacaagagagagattggggagctacagnctcctgttggaccattccat

SEQ ID NO: 26866 - DNA, 1285 bp, Glycine max
  Clone ID: TF_GmC85_1
ccggattcccgggtcgacccacgcgtccgctcttcccttcttaactttcacctttaacctcagttttccggtgccttcgcgtcgctctgaatgtcatcggcggcgagaactcccggtggcgaggagggaaagcactaccctgctccactcgcccctcacgagggcgtcgtgaaggactccactctcttctgggacactctaaggcgctttcactttgttatgggtaccaaatttatgattcctgtgattggagggaaggagctggatttgcacgttctttacgtggaagttacgagaagaagtggctacgagaaggtagttgcagagaagaagtggagggaagttggtagtgttttcaagttcgcagctaccaccaccagcgcttcttttgtactcaggaaacactactttagtcttctttatcattatgaacaagttcacttctttaaagctcggggtcctatctacactccatcagcagatgcattttccggcaacagcccttcgtggagacctgaattagctattgtggaatattcgcctaagcctatggataatagtcctgaatctcgtgctgaagatacttcatgcctttcaggaaatggaaccatcgagggaaaatttgactgtggttatttagtgtccgtgaagcttggttcggaggttcttagaggggtgctttaccatcctgagcaattggttcctcaccatcgattccaaacatgagagtgccattgtaccaatcaaccgcaaacctcaccgttctggtcgtaggaagaaaaacaaaagaaggtgggaccccaattatccaaagccgaataggagtggctataacttcttctttgctgaaaagcattacactctcaaaactctctacccaaacagagaaagggagtttaccaaaatgattggccagtcatggaacagtcttagcccagaagaaagaatggtttatcagaacattggcttaagagacaaagaaaggtacaagagagaattgacggagtacaaagagaagatgaagcttaggcagacctcagaagttggacgtccatagaatctcattggtacccgtttgtggaggcgaaagaatggcttagaaaatttttataatctgttgacttttacgtgcatattgttgtggataatggtccactggactgtggtctacagaactattgtttttttcttttcaaaagagaaaactagtgtctattgttagtcagagaccctttcatttcgtttaatcaattaattatcctcccaagtttgttctctgttagaa

SEQ ID NO: 26867 - DNA, 1707 bp, Glycine max
  Clone ID: TF_GmC1306_1
gcagcgtccggtttgagacctgaatctgctgctccgcggaaaatactgaaggctgaaatgaccaaatagttaatggcgtcaacatcttgcgtaggtaacacttccttatctatgaaagattcagcttcgagatattctgcatatcctcttcctctagcaaaatatgagaagcggatggacaatccccagctcttcatgtcaaccttggagaaacttcacgctgctatgggtaccaagttcatgattcccattgttggaggaagagaactagatttgcatcgcctctttgttgaagtgagttctcgaggagggattgcgaagataattagagagaggaaatggaaagacgtaacttcagtctttaattttccatcaacagctacaaatgcttcttttgtgttgcggaagtactatgtttcattgctctaccattatgaacaaatctacttctttaaagctcgtgaatgggatcctattgctcctgatgtttcgcagaaccaatcgaccctgccagttcctcctccaaaaatgcagtttcagcagcctttgtcagaaactcaaccagctgtctttcaactgtcaaatgttaatgctgctaaattgcctgaagcaatggcagcatcttcggcaggttctccagtcattggggtcattgatgggaaatttgaaagtgggtatctagttactgtcacaattggttcggaaaaactcaaaggtgtgctttatcaagctccacaaaaccctgtattgacagcatcccatcatagtgcctcagctaataacaacaatgcttctgcttcattgggtgtccatcgtcgacgacgcaggaagaaatcagaaataaaaaggagagatcctgctcatccaaaacctaacagaagtgggtacaatttcttctttgctgagcagcatgcaagactaaagctacttcaccatggaaaggacagagagattagtaggatgattggtgaactctggaacaagttaaaagaatcagaaaagacggtttatcaagagaaggccatgaaggataaagagaggtacagagtagaaatggaggattatcgggagaaactgaagatgggcccagttatcagtgatgctgtgccgcttcaacaacgacttcctgaaccagatactgacatgttggatgaagctgagggagattctcctcaaactccagaggagagcagctctggtggaagtgattatgaagattataataaaactgcagagagaggttttgatatggatgcattgcctgttataggaatgggcgcagaaacaagttatttgggttcagaagagaagttatctaagggggggttatgagcttctccaggagagagagagagagagagagagaggttagctggccctgatttttagcagagattttcttatggtaattttagatgcagtggagatttgaggtaggattcaggttgcagtgcttacaacacagtgcttaactgtgagttttgtcatttttaatgtttttattaaggtgttcatgttggcttcatgccatattgctgttgtacatctggcatgctgacatggatgatggatgatggatgatggatggtaacttgttaattaggcctttgggagcagtggacactggggagtctgctcttcctatgttattaggtccatcgagacctaagaataaaatgttgcctctttcaaaaatttattctttag

SEQ ID NO: 26868 - DNA, 1115 bp, Glycine max
  Clone ID: TF_GmC327_3
atggaattcaaaccacccaagttctataaagaggagcttaattgccttaagttatggagatctgtacacagattgggcggctatgacaaggttacctcatgtaaattctggcggcaagtgggagagtctttcaaacctccaaagacatgcacaacagtttcatggacttttcgggttttttatgagaaggtgattctagattaataaggcacttcttgactacgaaagcatacaacaaaaggtggtgagctgaatgtgcctattactcctcttgcagagccaataaatattgaaaatcagtctgtccagggttcagcatcatcaggtagggcacggagagatgctgcagcaagggctatgcagggttggcactcacaacgtctccttagcaatggtgaatttagtgatcctattattaagatttacttaaacgcaagaaatcatcggacaccgttaatgttgtcaaagtggcacacagtcaaccatctagaccacagttaagacacatatcggacacatctgtggttgacattggacctcctgctgattgggtaaaaatcaatgtgcaaaaaactaaagattgttttgaggtctatgctttagttcctggccttctgcgcgaagaggtgcgtgttcaatcagacccagctggacgcttggtcataagtggtgagcccgagcattctgacaatccatggggggtgacacctttcaagaaggttgtcagcttgccttcaagaattgatactcagcagacgtcggctgtggtgaccttgcatggacaattgtttgttcgagttccatttgagagcaatcaaaatagagaaggctgatagattcatgccgaactaatttaccaaggtttataggatagttgacccctaagccaaattcatgccgtgttctattatctctgaattatgtcaataattttttatttaaaattttcatttgatgttctgtcaaaagttttacaatttcaagcattgtttaaaatcacaccttagtaatagtatagtggcagcgttggttgctattctattatttaaaccccatgctaccaaaactaatatttccccaaaatgaaagaagtattctaaaaagcactgtaaaaa

SEQ ID NO: 26869 - DNA, 2106 bp, Glycine max
  unsure (1)..(2106): unsure at all n locations
  Clone ID: TF_GmC1243_1
cccacgcgtccgtccacgcgtccggtaggtgacacaacaccaacaagtggatggagctctgtttgcttgggaagttgaaaactttgaacacagtacaagaaccgcttaccagggaaacaacccaataccacttccaccattaacaatacacagataacccatttattgctaacatcattatctttccgtccattaaaacgggatggtaaaaaacaaaacactgggcctgggggccccgcgtccgcactctcaaggtacttccccactgatccgattttatgcccgtactagtctgacccttttagtggcatagattgaggtacaattacaaaagcatattacccgtatcgtatcctttctgctacaaccaccccgaaacacactgcgttttttttgtgtcaaacttcaaccggggctttcttacttctcttctcttcaactttttagtgttttttttttttttttctcgtgtcgggtccttgagcttctatttgtttatttatttccggcagcgagttgagttaattttcgtgtcatagtctcaattaggtggatgtgacttgtgtggttagggtttacatgcaaaaacgcatgtgcttcgtgtctaattcatcctgaaacaaggttttgggacagagatctgaatatttcaagctatctattttgtttctctatctagaaggttttgagaaatcaaagatggcgaatagatggtgggctgggaatgtgggaatgataagagagcaagagttgatggaaaacagcaacaacaacaacaacaacaacaacgctactactactacaccgacgaatagcagcaacagcaacactaacgcgaacaccaacaccaacacgaccgaggaagaggtgagcagggataacggagaggaccagaaccaaaacctcggcagccacgaagggtcggagcccggaagcagcggtcggaggccacgtggcaggccagcggggtccaagaacaagcccaagccgcccatagtcataactaaggaaagccccaacgcgctccgaagccacgtcctggaaatcgcctccggcagcgatgtcgccgagagcatcgccgccttcgccaaccgccgccaccgtggcgtgtcggtcctcagcgggagtggcattgtagccaacgtcactctccgccagcccgccgcccccgccggcgtcataaccctccacgggaggttcgagatactctccctctcgggtgcctttttgccgtccccctcgccgtccggcgccaccggactgaccgtctacctagccggcgggcaggggcaggttgtcggcggcaacgtggcgggctctctcgtcgcctccggaccggtgatggtgatcgccgccactttcgctaatgccacttatgagaggttgcctctggaggatgatcaaggtgaggaggaaatgcaagtgcagcagcagcagcagcagcagcaacagcagcagcagcagcagcagcaacaacaatctcaaggtttgggggaacaggtttcaatgcctatgtataatttgcctcctaatttgctacacaatggtcagaacatgcctcatgatgtgttctggggagctccacctcgccctcctccttccttctgatcacccttgccaatatgatcatgtctttaatctctcactgacttgcgaattaagtactatgttaattaatttctcacggtttttcttgcaagcatagctagctagctagcaaggttagttattaggatggttttgttaatttgtgcttcttagagactcgagtcaagtagatgatgttcttatctttaatatactttgtagtactactggtttgtttaggttcgttttgttaatttgtgcttcttagagactcgagtcaagtagatgatgttattatctttaagatactactttgtagtagtagtactactggtttgtttatttgttgttggttttacttctgtctaatcaagctgcttgttttggtggaaaagtttaattatgattgtgtgtagggataattaataaggatggagtttgaaatggtccggggaataaaattggagctgtgtgctggaatttgaacccnnnnnnnnnnnnnnnnnnnnnnnnnnnnnn

SEQ ID NO: 26870 - DNA, 378 bp, Glycine max
  Clone ID: TF_uC-gmflLIB3260P050e10a1
gggcaaaaacggggattacttcctgaatttcggccccgggggcgcccccgggggtccccccgggaattcgggcccggacccggggggggtcccagttttcccaatggggggccgaattaaagctgggcaaaaacaggggaaaaggtgcttccgggggaaaagatgtaccccctcacaaatccccacaaaatacgggccggaaacataaagggaaaacccggggggcccaaaggggggccctaccccaacataaggggggtgggccacaacgcccgttttacgagcgggaaaacctgggggggccccgtgcaaataaaaaaaaccccccccccccggggggggggggtttggaaaatggccccccggggggtttttttt

SEQ ID NO: 26871 - DNA, 1058 bp, Glycine max
  Clone ID: TF_GmC120058_1
ttatctcgcgaagaaaccagcaaaggcctctctcttctctctttctccttctgcttccttttctttccctgcactccatccaccgccgctcctcctctttatcgattcaacacaacacaagctttctctccctccatccatatatgttatatttatatacagacgcataccacacttcccttaaaataaccataaacaaaagagaactccttcctatttattaatatccagctatatcaacacccaaaaaataaactagtatatattcgtttttttttctttgaataaaaattgaacagtacctctctcttcctttgatgtgtctatggctggtttggatttaagcacggcttcacccttcgtccaaagtctccacagaccagacttcaaccaacaacacgattccggagaagacgccaaacaatcagcagaagatgggccacatcaccagggcgatgtggtggggcggcgcccgcgggggcgtccggcggggtccaagaacaagccgaagccgccggtcatcataacgcgggagagcgccaacacgctccgcgcccacatcctcgaagtcgccaacggctgcgacgtcttcgaaagcgtagccagctacgcacgccgccgccagcgcgggatctgtattctcagcggcagcggaacggttacgaatgtgagcctccggcagccggcgtcggcgggggcggtggtcacgcttcacggcaggttcgagatactgtccctgacgggatcgttccttcctccgccggcgccgccgggggcgacgagtctcagcatatacctcgccggaggacaggggcaggtggtgggtgggagtgtggtcggagagtttgatcgctgcgggaccggtgattgtgatggcggcgtcgttcacgaacgtggcctatgaaaaggttaccgttggaggaagaagagaacaggttgagatatcttggtgttgctggtaataatagtaacccctttcctgatccttcttcgggacttcctttcttcaatttgccaatgaatgttcagttgccctgtggatgcctgggccgggaaac

SEQ ID NO: 26872 - DNA, 2048 bp, Glycine max
  unsure (1)..(2048): unsure at all n locations
  Clone ID: TF_GmC873_1
ggtccggaattcccggctcgaccacgcgtccggaacgagggtaacgaaaaccctttagaggagtttggcacactggaggagcatgtgccgtttcatgaagagcaacatgcaatggtgcatcatcagcaagggcaagcagaagaggaagatcatcaggttcctttttgtgaagagatccaaggagatgaagaaggtggtgatggtgttggagtagatgatgagatgagtaatgtgttcttggagtggcttaagtctaacaaggatagtgtctcagctaatgacttgaggaatgtgaagctcaagaaggcgacactcgaaagcgcggcgaggcggctagggggaggaaaagaagccatgaagcagttgctgaagctgattcttgagtgggttcaaaccagccatcttcagaataagcgccgaaaggagaataatggtagtagtattagcagtgtacttcaggcacagtttcaggatcctagtggccagaacaacaaccagaatacacaaagtggttcatttgcacctgaatcaaacacttgtttcaacaaccaaacaccatggttgagttctcaaacttttgcaacagatcaggctcctctcatggtgcctccacagcaatttccacaacccatggttgggtatgtgggtgacccttacactagtggtgctgcttcaaataacatatcagccactcataaccataacaacagcaacccttatcaacctggtgcagaacaataccacatgttggagtcagcacattcatggccacattctctgttcaatgttgcttctaactatagtcagtcttttggggacaataatggtcttaacccacatgggggtttcggtggtggaggctatggcaataaccagtacccttatcagttttttcatggccctggtgataggttgatgaggttggggccctccgcgacgaaggaagcgaggaagaagagaatggcaaggcaaagaaggtttctgtctcatcacaggcatcatagtggtaatcaccagaatcaagggtctgaccctcatgcaagattggggggtgataattgcaacactgctttggctgcacctcatcacgcaaatccttcagccaattggatgtactggcaggctatgattggcggcgcggcaggtcctttggctccggtgattccggccgagccgccggtggtacaaccggtcgtggaccggtcggccatgcagacacagaattgtcatcagaatcgagttgcatcagataggagacagggttggaagcctgagaagaacttgaggttccttctgcagaaggtgttgaaacaaagcgatgtgggaagtttggggagaatagttttgccaaaaaaagaggcagaaacccatttgccagagctggaggcaagagatggaatttccataacaatggaagacattggaacttcacgtgtttggaacatgcgctatagatactggccgaacaacaaaagcagaatgtatttgctcgagaacactggtgactttgtgagagccaatggactccaagagggagatttcatagtgatatactcagatgtgaagtgtggcaaatatatgataagaggagtgaaagtgaggcaacaaggtgtgaaaccagagaccaagaaagtaggaaaatcgcagaaaaaccagcatgggacagggacaaatgcatcaactacagcttgtactgctgctaataatggcacgccatcgtcaccgaaaaccaaagctgaaaaaagtagtaaattaatataatacatagaatatgtatgtacaatatatattatattatattatatataataaaataagagactctgaagtctgaacacggtgctcacataatgttgaggagttttagcatgccctgcaatggaggctgtcaaggatttgtataacagtattttgggtatatttcttttcgtagtttattttgcgattgttattatgtgaaaatgttgtatgtgtttaacttggatgtacatgttacgttattagtggtctatgtgatgttcatttaagactgaaaannnnnnnnnnnn

SEQ ID NO: 26873 - DNA, 2570 bp, Glycine max
  Clone ID: TF_GmC873_2
ctctgaaattgtcatgtccacgttaaggtcttgattggcgcttcagggtttggagaagatagaatctctgcttcactctcttcactgctgtgggtggtaactgagccaaaccctattggttttggcaccatggaaaacgaacacactttggcggttgctgagagagagatgtggctgaacagtgaccaagacgagttcctaggagtcaatgatgcttccatgttctacgccgatttccctcctctccctgatttcccttgcatgtcatcatcatcatcttcttcttcagcactaccatttcctgtgaagaccatgacatgttccaccagaaccacaacaacaaccaccacttcctcttcttcctcttcctcatcctgggccgtgttgaagtcagatgctgaggaagatgcagagaaaaatcattgcaaccgctacatgcatgaccaacttgatgcaactttgtcttccactgcttccatggaggtttctcaacagaaaaacctcgatcctgggcttggtggccctgttggtgagtgcatggatgatgttatggacacttttgggtacatggagcttttggaggccaatgatttcttcgaccctgcctctatctttcagaacgaggataacgaaaaccctttagtagatttcggcacactggagcagcatgtgccgttgcatgatgagcaacatgaaatgttgcatcatcagcaagggagaacagaagaggttgatcatcaggttcctgtgtgtgaagagatccaaggagatgaagaaggtggtgatggtgttggagtagacgatgagatgagtaatgtgttcttggagtggctcaagtctaacaaggatagtgtctctgctaatgatttgaggaatgtgaagctcaagaaggcgacgattgaaagtgctgcgaggcggctagggggaggaaaagaagccatgaagcagttgctgaagctgattcttgagtgggttcaaaccagccatcttcagaataagcggcgtaaggagaataacggtagcagtattagcagtgcacttcaggcacagtttccggatcctagtgtccagaacaaccagaatacacaaagtggttcattttcacctgaatcaaacgcttgtttcaacaaccagacaccgtggttgagtcctcaaacttttgcaacagatcaggctcctctcatggtgcctccacagcaatttcaacaacccatggttgggtatgtgggtgacccttacactagtggtgctgcttcaaataacatcacaacttctcataatcataacagcaacaacccctatcaacctggtgcagaacaatatcacatgttggagtcggcacattcatggcctcattctcagttcaatgttgcttgtcactatagccagtcttttggggacaataatgttattttcccacaggggggttttggtggtggctatggcaataaccagtacccttaccagttttttcatggccctggtgatacgttgatgaggttggggccctcggcgacgaaggaagcgaggaagaagagaatggcgaggcagagaaggtttctgtctcatcacaggcatcataatggtaatcaccagaattcagggtcagacccacatgcaagattggggggtggtgataattgcaccactggtttggctgcacctcatcatgcaaatcctacagccaattggatgtactggcaggctatgacgggcggtgcggcgggtcctttggctcccccggccgagccgccagctgtggaccggtctgccttgcagacacagaattgtcatcagagtcgagttgcatcagataggagacagggttggaagcctgagaaaaacttgaggttccttctgcagaaggtgttgaaacaaagcgatgtgggaagtttggggagaatagttttgccaaaaaaagaggcagaaacccatttgccagagctggaggcaagagatggaatttccataacaatggaagacattggaacttcacgtgtttggaacatgcgctatagatactggccgaacaacaaaagcagaatgtatttgctcgagaacactggtgactttgtgagagccaatggactccaagagggagatttcatagtgatatactcagatgtgaagtgtggcaaatatatgataagaggagtgaaagtgagacaacaaggtgtgaaaccagagaccaagaaagtaggaaaatcgcagaaaaaccagcatgggacagggacaaatgcatcaactacagcttgtactgctgctaataatggcacgccatcgtcaccgaaaaccaaagctgaaatttgtagtaaattaatataatacatagaatatgtatgtacaatatatattatattatattatatataataaaataagagactctgaagtctgaacacggtgctcacataatgttgaggagttttagcatgccctgcaatggaggctgtcaaggatttgtataacagtattttgggtatatttcttttcataatttattttgcgattgttatgtgaaaatgttgtatgtgtttaacttggatgtacatgttacgttattagtggtc

SEQ ID NO: 26874 - DNA, 718 bp, Glycine max
  unsure (1)..(718): unsure at all n locations
  Clone ID: TF_GmC283122_1
cacgcgtccgaaaaaaaaaaccctaagctaatgatgatggatcagcgacagcgagagaagctgcttcacaaaaccgaggcctgtgctttcgtggcaggtgttgttccggagctttcccttgtcaccgttccagggaacaacaccaacaacgttaacaacaacaacaacgttgtttctcattctcaatctaacgggtcgggtcggatccaggaaaacaaccaccaccttggactcgttgctgctgtcacctccgccttcggtaccgttcaaaggaagaaaaggatggcgagacaaagaagatccactaaacccacttcgttgatgaaccatctcaacaaccataagcacaacaagcctcgttctcttccttctcccagtgcatcctcctcgtacgtgccactctcctccgcaactctccagcccgcacgtgaaatcgatcaaagaaggttgagattccttttccagaaggagttaaagaacagtgatgttagctcccttaggagaatgatattgccaaagaaagcagcagaggctttcctttcagctcttgaatcccaagaaggaattgtaatcagcatggatgatatagatggcttcatgtatggaggttcagtacagggctgggctacatatacagcggatgtatgcacttgaaaatctggagaatttgncaacacacatggcctcgtttggagattcattatggttaccaagatag

SEQ ID NO: 26875 - DNA, 2397 bp, Glycine max
  Clone ID: TF_GmC5693_1
ggctcgagcttagaagcaaatgctggcatggtatcgcagattcgtgtggcaagaccacctgctgaaggacggggaaggaatcaattgcttccacgttattggcctaggattactgatcaagagttgcaacaaatatcaggagattcaaattctacaatcgtgccactctttgaaaagatgcttagtgcaagtgatgctggtcgaattggtcgcttggttttaccaaaagcatgtgctgaagcatatttccctccaatctctcaaccagagggccttcctttacgaatccaagatgtgaaaggaaaagaatggatgtttcaatttagattttggccaaataataacagcaggatgtatgttttagaaggtgtaaccccctgcattcagtctatgcaattgcaagctggagatactgtaacatttagccgtatggaccctgaggggaaacttataatggggtttagaaaggcaacaaattctactgcagtacagttacaaaagggatgttcagaaacccacctaaatgcgctgtctaaaaaatggaactcagctggtggtgacatgagttggcataacattgacatgcctgaaagcagaaaaagagatgagttgccgttgccacctgtgatggttcctgagaagaaaagaactcggaatattgggtcaaaaagtaagaggttgcttattgatagccaggatgcactggagctgaaacttacttgggaagaggctcaagatttgctccgtccacctcctactgttaagccaagcgcttgaataacagagcagcaaacaaattcagattaaaatgtgcaggcacagtctaccaaatgatagttaggtgtagcacaatgaagattgcgaaaccactacggttattcatgcgcaggaaaccagacatgaagagaacagcgggcaagataacgagccaaaacaattaactcatgaatgcttgccagttgcattttcttttttccttcttttgttgcactcaaaaatcattttccaagggaccttgataaacttctgaggctgaaaaaggaattcaagtatgaaagtctgtcagctaggcagagactggccctggaacatgaatcttcaggactggatgctttggcaaatgcagcaatactgggagatgatgcaagtgactctggcagaacaccagttgttaccaccacaaaacatcctcggcatagacctgggtgctcttgcattgtctgtatccagccaccaagtgggaagggcaaacacaaacctacatgcacctgcaatgtgtgcatgacagttaaacgtcggtttaaaaccctgatgatgcgaaagaagaagcggcaatccgaacgtgaagcagagattgctcagagaaatcagttatcatggcggacgaaagatgaatcagaagtagatagcacctctcgccatttaactccagttgacggtttggagaatgaagtaagggtgcaaaatgaattagattcaaggagtccagacgatgcggtggctgaagctgccaagggacaattagacttgaattgtcaacctgatcgagaagatgtgcaagctgggccgaacagcttgagcatgacgagtcttcttgaagaagcaaatctcccgctggaaacctacctaaagcgaaatggccttagtagcttgatatcagagcagcaaacaaattcagcttcaaatgtgcaagcacagacaaccaatgatagtgaggtgaaacacaatgaggattgcggaaccgcttcggttattcatgagcaggaaagcagtcctgaagagaacagtgggcaagataaagagcaaaacaattaactcatgaaatcttgccagttatattataatttttttttccttttttttttaactcaaaaatcattttacaagaatccttgcataaattataaaattataggaggttcatttgtatgtctatatttttttttcttgttattgttgtctgtgtcttatggttgtgaaatttccccccaaaactcaataacctatatacgccaaagcgtgtgttttagggttgtaaactagtgagaggcaaggagttgaaggaaagcacaccacctggtttttttttctttggtgtgtgtgtgtggtgagtctgaataagcattgtttttcttcttttttgttatatggagaaagggagatttcacctaatttcgtttcttagtgcgtgtgtttagtttgaaaagccattatttggcttgcctttttaataggaaaatgctcttttgcatgaaaaacatttcactgatgttgtacagaactaatgtgactggttgatgtatgtaatagttatgtgatttcttcaaccgttgaggctgcgggcgcagggtgcggcagcgagctagtcagcccgtcgacccgggaaacatatgtcat

SEQ ID NO: 26876 - DNA, 3008 bp, Glycine max
  Clone ID: TF_GmC962_1
ttcctctctctctttttctctctcttcactttttttctctacagccctccgcgtctcccatacatcgtattatccgaaagcaagcattatcagaagcagaaagaaagaataagaggttgcagcaacaatggcagccatggctgcgcttcagagctcaatggtcggtctctccctctcctccaactctttcttaggccaacgcctttctcccatcaccctcccctctcttcttccgggtaagtcaacagagaagcaatgtcctattgtaatgaggcttaaacgatgggaacggaaggagtgtaaaccaaacagccttcctatcttgcacaaaatgcatgttaaacttggagatacggtgcaagtcatatctggacgtgaaaggggtaaagttggggagattactaaaatcttcaagcataacagcatctaacatagtaaaagatttaaatttgaagaaaagagcattttgagagtagagtagaaggggatcatgggagaatgattatgactgaggttgttgtatgtagatctattcagattctcaacttgatatatctgatggtcgccatcgtggggaagcatactgacaatgatcgtggcattgaacatctgctgcaaaataagaaagagagaaagttttgataaagcggaggcctaatggtatctaaacatccatccttgcgaaggtaatgaagtctggactaattgaacgtgatggtactgacgtcaaccaaaaaagcactagcaggaagacattaacctaaataaatatgtcttttttagtgtagttgtaatttacgttcaagtctagttaggagagggcgtaccataaaattgaaaatggataaaactgttggtaatgaattttttgattctaagccatctttagatggtattggtaacagggaattagatgcaggattctgtcaatagatgagagaaaaaagtatggagtgatagtctgtcggtttaaagtgtctacttctaccattatttgagaaggtgttgagggccactgtcgcaggtcttattggccgtcctgtttttccctaagcctaacctgatgcacattttcctcttatttcacaatctgaaggtgttgctttacgaatgcaagatgtgaaggggattgagtggacatttgagtagaggttttggccttataacaaaagtaggatgtatacattggagggtgtaacagttaccatacagagaaggaactattgatctcttgataatgaaggaattaattgtagacaaaaaggttgatcttcatatatggcatcacggttagaataaaatatttcaaatatttagaaaaagtatgtgacgagtagagcaaaggaggaacggggacaaattattaagattgaaggttctatccacagctcaaatgcgatgctctactccaaatgtcttaaggtagcaagtcgtgtggggcataaagtcctagataatggtaaaaaagtccgctaccttataaaaactggagaaataattgatagttcagagaactggaagaaactgaaggaggctactaagaaaactgaagaagctgctgctgctacgacttacaatgatggaagtaaaacttacatgtagctacattttaactctaatgaaactcatttggaacttacatatcaagaagcacaatatttgtttcgtccttctccggttgtcaagccacaaattataacaactgaggaccaagtatttgaagaatatgaagtaaccactgtttttgtaaagagaactatattcagtgcctgttcatctggggggaaggaacaatgggctcagtgtgatgattgctctaaatggcgaaagctgcccgttgatgctcttcttcctcccaagtggacatgttctgaaaatgtttgggattcaagcaggtgttcatgctctgtgccggaggagttaagttcaaaggaattagaaaatcttctgaaaaccaacaaagattttaaaaagcggcgaattgcagaaagcagcaagtcaatccaagaacacgaggcttctggcctggatgcccttgccagtgcagctgtccttggagaaaatcttgttgacactgccgagtcatcagctggagccaccaccaaacatcctagacaccgtcccggctgctcttgcatcgtatgtattcagccaccaagtggaaaggggaggcataagccaacctgtacgtgcaacgtgtgcatgaccgtgaagcgccggttcaaaaccctcatgctaaggaagaagaaacggcaatctgaacgcgaagcagatactgcccaaaaagaccaaactctcctgaaagatgagccggataccaacggagcaccgagggacgatacaagtcggttggagaaagaggtgggactaaacaaaagtcaacatcaggtgggtgagtccagtgctggacagatagatctgaattctcatcccaaccgcgaagacatgcaagtggaaaccactggacttaacatgtctagtcatcttgaaccagcaacaaaccatacagtaggggaatttatgaaccaaaatggcctaagaaactttaataatgaagtgcaaactggtcagaattcttctttgcacactcctaaatctaatggagaaggtcagagatacttctctgatggaagatgctttgcatccattatgtggaaccaggaaagaaaagatgaggtacacagtcaaaccaatcaaagtcaaaacaatctttcttaacaatttatttaattttatattcaaccttttttttttcctttactggatttcttttatatttctccttgcacttgcagtatatattttgctttctctttcaaaggggtggtcagaagtagttcgttcttataaaaaaataatgtaattttttgtatcgtctatctttgaagttttagttttttatttttcatggaagtgggtcgtgcacatttctttctttgtcaatgtatttgattgtcggttatatgaatgaaacataggaaaaagtttacagattcaatctgtttgtc

SEQ ID NO: 26877 - DNA, 1831 bp, Glycine max
  Clone ID: TF_GmC5717_3
ggctcgagcaaactccacctccaggaaagcaatttaatggcactatgcatttagcacctgattcatcaggtgaggctcaggttcgcaatgggcggcctcgagcagatgcccgaggaagaaatcagttattgccacggtactggccaaggtgtacagatctggagctacagcaaatttctattgattcaaattctgtaattactcccttgtttcagaaaaccttgagtgctagtgatgctgggcgaattgggcgtttagtgctacccaagaagtgtgctgagacctacttcccaccaatttctcagcctgaaggattgccacttaaaatccttgatgcaaaacgtaatcgattcgggtggggggtgcaagggaagagatcatataattgctttgcttatttgcgaggatttgatggaagaacatctcactccattggctgttacccatctccttcaacacactctcagaagtttgtgcatccatgaaaattctcaatgggtctacgcagtcttctggaggatcttgcctagaaactaccctccacccaagtgggaaggacaaggggcttatgatagatcaagaggaaacagaaggaattggatattggtgtgggaagatggtttctgcaattttgctgcatcagcagcacctgaagttaactctggtgattgttctaccccacctgtttatgggaactgtgaatttcagccctaccaagggctgcaaccggagctcttcttcaagatgtcacatgagatctataactatggagaagggttgataggaaaagtggctgcagatcacagccacaagtggataaacaaagagcctaatgatcaagaaatcaacttcttgtcagcatggcacaattcagcagattcgcaccctaggacttgggaagcccagttcctgtctggtataaagaccatagctcttattgctgtaatgttgttcaattagagctgttcacaaggttattgagcctgacatgtggttcttttgagaaaaatttcagctacattgagagcatccctggtgtgctgttgccacacccttcatcttcagcatacccttataaaatagaaggaggagggtatggagcaccagaacaatggcattatcaaggcggcaacaaccatcaccaccttgcatcaccccaacaaactgaactatatgatcaccatggccacttcaacttgccactcaagataactccttcaatgagtagccttgaggcacttctctccaagctcccctcagtggtgccaccaacaacaacacaacaacaaccactcttgccatctaattcccagcaacaacaacgaaggccattggagttcatcatgggaatgcagaaagtggcaaaggaagagttggaacaagaagaggtgtacaggccaatatatatatatgtgtgtgtggggggggtgattgttgctgtccagtttttaaaaaaaaaaccctaaaaaattatagcagagaagatgctagtaaaagtacttactaaataaaaatcaatgtacttggttatggtgcaagtctgaggattgagacatacaaaaaacaaatgcatctactatgatataaactcgagctaatatgaacttgacataggtgagagtagcagctccttgccaggaggagggtacccccaacaccaacatcaacatcacttccatcaagatcagaataataatgtaactaggagtggagccaccaatggattttgaaatttctgtaccattaattaattagtactcctttttaaaaaaaacagatgatgatgataatggggaagaatcagaggcaatgttaatgaaatttagccctc

SEQ ID NO: 26878 - DNA, 361 bp, Glycine max
  Clone ID: TF_7796380
atcaaacaaccacaacaggaggagaacaagaaatattagacgataaagaaccgatgttcgagaagcccttaaccccgagcgacgtggggaagctgaaccgtctcgtaatcccgaagcagcacgcggagaagtacttcccactgagtggtgactcgggcgggagcgagtgcaaggggctgttactgagtttcgaggacgagtcggggaagtgttggcgcttccgctactcgtactggaacagcagccagagctacgtgctcaccaaagggtggagccgctacgtcaaggacaagcgccttgacgcgggcgacgtcgttttgttcgagcgtcaccgcgtcgacgcgcagcgcctcttcatcgg

SEQ ID NO: 26879 - DNA, 662 bp, Glycine max
  Clone ID: TF_LIB4164-006-Q1-N1-B8
aaacacatacaacattggggcataacaatcgcaaaataaattatgaaaagaaatatacccaaaatactgttatacaaatccttgacagcctccattgcagggcatgctaaaactcctcaacattatgtgagcaccgtggggaggcgggagagtctcttattttattatatataatataatataatatatattgtacatacatattctatgtattatattaatttactacttttttcagctttggttttcggtgacgatggcgtgccattattagcagcagtacaagctgtagttgatgcatttgtccctgtcccatgctggtttttctgcgattttcctactttcttggtctctggtttcacaccttgttgtctcactttcactcctcttatcatatatttgccacacttcacatctgagtatatcactatgaaatctccctcttggagtccattggctctcacaaagtcaccagtgttctcgagcaaatacattctgcttttgttgttcggccagtatctatagcgcatgttccaaacacgtgaagttccaatgtcttccattgttatggaaattccatctcttgcctccagctctggcaaatgggtttctgcctctttctgtctcctatctgatgcaactcgactctgatgacaattctg

SEQ ID NO: 26880 - DNA, 640 bp, Glycine max
  unsure (1)..(640): unsure at all n locations
  Clone ID: TF_LIB4199-008-Q1-K1-F1
ccagcgtccggctggagatactgtaacatttagccgtatggaccctgaggggaaacttataatggggtttagaaaggcaacaaattctactgcagtacaggaaacactaccatctaatatgcccaatggttctcattcaagtgaaacttcctattctggtgtttatgagaatctacctatattaagtggttactctggccttcttcagtcacaaaagggatgttcagaaacccacctaaatgcgctgtctaagaaatggaactcagctggtggtgacatgaattggcatagcattgacatgcctgaaagcagaaaaagagatgggttgccattgccacctgtgatggttcccgagaagaaaagaactcggaatattgggtcaaaaagtaagaggttgcttatcgatagccaggatgcgctggagctgaaacttacttgggaagaggctcaagatttgctccgtcctcctccaactgttaagccaagcattgtcatgattgaggatcatgtatttgaagaatatgaagaacctnctgtctttgaaagaggagtatattcgtagttcgatcaactgngtaaatgagcagtggatgcagtgtgatagttgctcaaaatgcggaagttgcctgntgatgcactt

SEQ ID NO: 26881 - DNA, 722 bp, Glycine max
  Clone ID: TF_GmC449061_1
acgagacttctactactactagtgctgttgcacgtcctcttcaccatcatcatgtaataaatatcccttaccaacaaaatccatggctggggatgaatattgttcatcaggagcatctggttccggctccagaatccctcacttcagcagctggctgcgggttgttacaccagcaccaggaggcagcaggttccaatttcatcatcaacaacaatcatcatcatcatcaacatcaccaccaccacacaacaaagcagctagacttcatggacttgtcacttggtagcagcaaggatgaagggaatttgccaggatcttcttcttctgtctatgctcatcatcatcatgcagcaagtgctagttcttctgccaatggtaacaacaacaacagcagcagcagcaacttgcagcaacagcagcagcagcctgctgagaaggagcacatgtttgataaagtagtgacaccaagtgatgtggggaagctgaaccggttggtgataccaaagcagcatgctgagaagtatttccctcttgattcctcagccaatgagaagggtctgttgctgaattttgaggacaggaatggtaagttgtggaggttcaggtactcctattggaacagcagccagagctatgtgatgaccaaatgttggagccgttttgttgaggagaagaagctagatgctggtgacatggtgtccttccagcgtggtgttggggag

SEQ ID NO: 26882 - DNA, 470 bp, Glycine max
  Clone ID: TF_GmC928_1
ctcgagaacactggtgagcttctttgctttgaatttggctccacacaatagttaatgacctttcgtttttccaccactttcattttcaaggaacatggtttttcatacacacatccatatttccttgtgcaggtgactttgtgagagccaatggactccaagagggagatttcatagtgatatactcagatgtgaagtgtggcaaatatgtaagaccctttcttattttccatttttcattttcttaacatgttttgaggtataataattttttacgatacttatataatgtttttttttttatcttctgttttaatacaaatttttgcatcggcattcttgattcctatggtaattttcttatgacctgatcataaggaagtggttcgagtccggtgaacaataaatacaaaattttgtaagaaaaaacaagtatcatgaatacaattttcataaatacaaatttttgt

SEQ ID NO: 26883 - DNA, 2313 bp, Glycine max
  Clone ID: TF_GmC5689_7
gttgttgctgaggagtttcttgaaatttgtgggatggagggttccattccaaccggtttcaaatggagatctagaagagaggtggtggattggctgacatcgacgctatcaaagcagaacctgcagggagatagaagtgtatcagctggtcataacttggtaccatctcatgaggccacaaatgacagtgtcaatgaaattattggtctgtctgctcaaataacagatgacaaggactttccaacgagtaactccaaattgtccaattcagacattgtttggtcaggagttgcgtggagatgtggcaaacaacttaagcattatcctgcttttttcaggaatggcatcaaaatagcgattcaatcctttgtttttgttatgggcaagggagagaaccattatattgcttatgtagaggatatgtatgaagacaggaggggacagaaaaagatcaaagtgaggtggtttcaccataatcaggaagtcaagggtgtagttcctgtacgaaatcctcaccctcgggaagtttttatcacaccttattcccaagtcattagttcagagtgcgtagatggttctgccacagtcttaactcgtgaagactttgaaaaatgcatgccttttttttcccccacttcaagggacagaatacatttgtgctttaggcagtttagaagcaacaaaatcaagccctttgacttgagtaaattgcgtggttactacgctcaaccaattctttcttgcttacaccttgattcaatccagcaccctgagttcctagcaagagaagatgaagagttgagtgcaggtgatgatgtgaaagtaggagtcaagaggaggaggggtgataaggggtctcctcagtcttggataagtcgccagggggttaggaagttaagtagaaataagcaaatgatggtatacaaaaccttccaggttgcaaattatgcaagatcagaaaggatattgctttctcggaagcaggttgagtgtcaaccttggtctaaccacacatacaaggttgatgacaagatagagttactttgtcaagatagtggcatcagaggctgctggttcaggtgtacagttgttcaggtagcccggaagcagttgaaagtccaatatgatgatgtccaggatgaagatggaagtggaaatcttgaggaatggatcccttctttcaagttagccaggcctgataaacttgggatgaggcattctggccgccccaccatcaggccagctccaacttatgaggaacaagaactagctgttgaggttggaagtgcagttgatgcatggtggagtgatggctggtgggagggggttgtaactagaattgacaactgtggggatgatagtgttgaagtccactttcctggtgaatgcttgctgatgaatgtgtgcaagaaggatttaagaatatctagagattggttaggggacagttggattaacattaaggcaaaacctgaaataactaaatctatattcacagctaataatagctttaacacaaagctttctgtgtccccatctattgctaaagatgtggactctgttggttttgctaattcatgtcatggtgatcctgttagtaagaagtcaaatgaaccagttgttatcaaagaagagaattttgtgtcttgtgatggctctgataaagaagagaattttgtgtcatgtgatggctctgctgaagatggggactgtgtccaggataataaaccctcttcagaaaaaagtactcaagctgataatattgatacacatatcaattgtgataatgaagagaattgtggtgataatgataatgataacaatagcaatgatggtggtggtaacaagaatgatgatgataatggcaataaagatatgggggtatttggaacttctggaccggaccaagaaactgtagagctcatggaagtggctgtataaataattttttagaactcatgcataaagttatggtagttctgattgtagagctttgccatcatctcttattgtgttgtaatctttgtcctatgttagtctgagaatgtaaatagtagttgcacggttatgtgagaatctaattgattgttaacttagttgtctttatagatgtacagtgttgagtgtaatgtgctagcatgtgttgtcttcctttccattggttgtattagagagtaggtttctttcatactgagacaaatattgttgagtaatttctattgttatctgattagtttcatttatttgagccagtagtgttctctcgcgatctagaacaaaaaaaactcgagactagttctctctctctctctc

SEQ ID NO: 26884 - DNA, 500 bp, Glycine max
  Clone ID: TF_GmC1073_6
aattcggctcgagggctcgagatcgacgcttcactcaggtcgcaaccagcgaagatgaggacgaagcaccgccgcctcctcctcctcccaagcagcaatcgtcggtcagtgcccccgaagagaaccgttcgaagcagcagcagcgcaagaggaagagaatgaagcttcaagaagaagaggaagaggaagaggagaaagaggaagagaagaagaagaagaagagaaagatcaaagacaagcaagaagagagatcgaacgaagaagaggaaccgccgcaggaagacgcaaagcccattggcgaaccggttaggttatccggaaagggaaggggccgcaaaaagcattacgaatccttcgagtacgacggaaaccaatacatgctggaggaccctatacttttcacgcctgaggacaaagatcaaaagccgtatgtggctattatcaaggacattacgcaatccctaaatggcagcatgatggtcacaggacagtggttttat

SEQ ID NO: 26885 - DNA, 425 bp, Glycine max
  Clone ID: TF_GmC44819_1
ccacgcgtcaatacggctccgagaagacgacagaagggggtgagttttaagttacattgtgttgcaattgaggagttgaggtagtgattgtaaccaaaaaaaattagaaatggagaatcatcgacgtcgtactcaagtgacaacaagcgatgatgaagacgaacaagaaaaagaagaggtattgaaacggtctcgtcctgtggaagacgctaagcctattggcgagcctcttaagtattctggaaaagggaaaagcaagaagtggcactatgactcctttgaattcaatggcatccaatatactattggggatcatgttcttttcaaacccgaggaaaagggccaaaaaccatatgctggaattattaacgacattacacagggaaataatggcaatgtggtagtgacgggacaatggttttatc

SEQ ID NO: 26886 - DNA, 686 bp, Glycine max
  Clone ID: TF_GmC986_3
atgaagcagtgacgtagcaggaatctcctcctagtgaaaagagtagaaaattttgtttggagcactctccaacagcaaatccttgacaagtcttacttcaatgggtcgttaaagccaattaacacttcacttccacttattctctttaccaactgtcacacgatgacttattccaatgaaaggtgggcggtctttaggtggtttgaagagagcacagtcaccagcaataattttgcgaccatccttataaaaccaatcaactgaagacttcaacgaagaagaagaagaagaagaagaagaagaagaagaagaaaaatcaacggttacactagagtgggcacgcgtgggggatttccacatgtgccgagtcctccttttcctctccacacctcgatcccaccttcaaacccaacgactaccatcaattccccaaccacgaacctcaaaacgcaccgtttcgacctccgcgaaaccctagatctgcatccgaaaaccctaacgcgaaaacatcctccgccaaaaatagcaacaattaaaattcggaagctctatcagggcccgaaatcgaacgcgaatcggaacgcggcgatgaaaagcgaaatttcttagccgccttacgatcttgcgagaagggaaatgcgtgcgatgcgaagcggacgcgtgggtcgacccgggaatccggaccg

SEQ ID NO: 26887 - DNA, 1307 bp, Glycine max
  Clone ID: TF_GmC126_2
ggctcgagaatgtattggccacactacattatgtagataacattagatatcacatgatgaagcaaattaggaaactgcttagcggagatctcaggaccaaaaaatttactacgaaacggtcaaatgtagtgaaccctccaagaatcccatagcattcccaaaaaatcactgataaaatcgcaggcgaagcgtcacagtcactccctctcctcacacgaaaaaagtatccccccaacccaccccaccccacccccaaccctcaacttagggttcttctgttcttcttcttcttctcctttaaccaaacaacaagaaaaaaaaatcacattccccaaaacacccttctcgctccgcatggcgaaaacgaggccaggcagaaaggacgtggactcgtacaccataagaggaaccagcaagatcgtccgagctggagactgtgttctgatgcggccctcggacacgtcgaagccgccttacgtggcgcgcgtggagaagatcgagcaggacaacaggagcaacgtgaaggtgcgtgtgaggtggtactaccggccagaagagtcgattggtggtcggagacagttccacggggctaaggaactgttcctctccgaccactacgatgtgcaaagtgcacacaccattgagggcaagtgtgttgtgcactcttttaagaactacaccaagcttgagaatgtgggtgctgaggattactattgtagattcgagtacaaggccgccaccggggctttcacccctgaccgtgttgctgtgtattgcaaatgtgagatgccttataacccggatgatctcatggtacaatgtgaagggtgcaaggattggtaccatcctgcttgcatgggcatgactattgaagaagcaaagaaactagatcattttgtatgttctgaatgttcatctgatgatgatatgaagaaaccccaagctacattttttgcatcactgggagctgatggcaaggtggagccaaagcggcggaagagatgaccataatgcagtagtagtaaacatgtgaggtgtgtttggctctagctgaatttggctggctctatggtagcttttgtgtgttgtacagcttcttctagaggctataaacatttcatgtatttgactcaggttatgtatctatccgtgttagattttatcatgacattcatctgtttttcatttgtccatgatgagacctccgatccaagtgttaattcttgagatggcatcaaaccttaaaaactaagtacagagcaattgttagtttaaaatgttggttcctttttggtaccttgcttttg

SEQ ID NO: 26888 - DNA, 579 bp, Glycine max
  Clone ID: TF_16996963
tttgtgacgggtcttacaaacaaaatggaagagcgccaccataccaaatggttggtgaagaagaagaaagttgtgccaaggagtgaaccaaatttaaatcctagagcagcagtgggtcctgttgtatccaagaggaaagctatgcaagctacaacgacaaggctgatcaatagaatatggggagagtattactcaaaccacttgccagaggatgcaaaagagggaattgctagtgagttaaaggatgaggatgaagtggaggaacaagaagaaaatgaagatgatgacaatgaggagacaatacttttggagggaaccccaaaggcacattcagcttcaaagcaaaccaaaaaattttctgctgaaacagaaataaggtgggaaggggaacctgaagggaagactagttctggatatcctgtttataaacaggcaattattcgtggggaagttatttctgtaggaagatctgtgttggtggaggttgatgaaacagatgaatttccagacatatattatgttgaatatatgtttgaatcaaagatcggaagaaaaatgttccatggtaggatgatgcag

SEQ ID NO: 26889 - DNA, 2274 bp, Glycine max
  unsure (1)..(2274): unsure at all n locations
  Clone ID: TF_GmC126_1
gctgtgtattgcaagtgcgagatgccttataacccatatgacctcatggtgcagtgtgaggggtgcaaggattggtaaaaccagtatattctgcttttttttgtttactgttattacatttgtgagtggtttttggttgtctggttctctaattttagcattagatgcgttgtttgcttggatgaaggaattttgtgctcctgcagagccatctaaaaggctgctgaccctaaacaaaaggaagaatgataaagattgcaaaatgacttcaaggagccttaggaaaatgttttcccaagtccaacagttataatgcactcatgactttcattgttattcaaactctgtcttggtctatgcacatgttttgcatgtcgctctttacaaggctttcagcttgttccgtcaaaggaaaaacaattgacaacaatgcaggaaatggagaacatataaaacatttttcttttattacatgtagctcctttgtaaacgaaatagcaggatggattttatggagtttaaacttttgatgtgtctacatcaacagtattttgtcagcctataatatcgggattctggatttctttgtttctatttatcaatatgtgtcagccaatccaaattgaatgatgcaggggctgatttcttgtgctctgataagctttgacctaatttggctacaagaattcatccattgtaaaagattgttaaatttaaggagtatctgagaagtagtgctacttttatttattttttttctgtttgtgaccctatagattttatgaaagaaacactgttcaattttggtaggttttttgtaggccttctctggtgcccctcttctaattcttctctcaaaaggactgaacgaaaaaaccttagggttcctctgttcttcttcgccccccaaaaaattttctggctcagagaaattcaaccgttctcgccattgccgaagctccaactcctcgcatttccaactcttcacccaaaaccctttttgttggaacagagtttcagagagagacccttcacaacatggcaaaaacgaggccaggcagaaaagacttggattcctacaccatcagaggcaccaacaagatcgtaagagctggggactgtgtgctgatgcgcccctctgatacgagcaagccaccgtacgtggcgcgcgtggagaagatcgaacaggatagtaggaacaacgtgaaggtgcgtgtgaggtggtattataggcctgaagagtctattggaggacgcaggcagttccatggagcaaaggaactgtttttgtctgaccattatgatgttcagagtgctcacacaattgaagggaagtgtattgtgcactctttcaagaattataccaagcttgagaatgtaggtgctgaggattactattgtaggtttgagtacaaagctgccactggggctttcacgcctgaccgtgttgctgtgtattgcaagtgcgagatgccttataacccagatgacctcatggtgcagtgtgaggggtgcaaggattggtaccatcctgcttgcgtgggcatgactattgaagaagcaaagaaattggaacattttgtttgttcagaatgttcatctgatgatgacatgaagaaaccccatgctacattttctgtatcaccaggatctgatgtcaaggttgagccaaagcggcggaagagatgaccatcacgaagaattaactcatcttgcgaatgcaactcttgctgaatttcgcgggctatgtggtagctgttgtgtgtgtattgtacagcttctaccagaggctataaaaacatcattttatgtatttgactcaggctatgtatgtattggtcttagatttatgacagacattgatctgtttcccttgtgtccagaaagagtaactcctgtcagtgttaatgtttgagaaaacatcaggccttgaatactggagtaaaaagaaatgatcaattttctgcaattggcaaaggttattttccattttctgaaatttggattcctgacaatcacctcctcggcagttgtccatgatgcgaccatcgatctctttcttaattcttcggagggccgcggttgccggggtgtgtgcggtgcactgctgctcccagaggctgtttggccaccggtgtgtctctcggactctggcgatgtatgtattggtcttagatttatgacagacattgatctgtttcccttgtgtccagaaagacgtaactcctgtcagtgttaatgtttgagaaaacatcaggccttgatcnngagtaa

SEQ ID NO: 26890 - DNA, 715 bp, Glycine max
  Clone ID: TF_GmC237787_1
cacgcgtccgctcttctccgcttgtccctctatccatcactggaagcagcgatacgctgccatggctaaaaaacgcagcgcatcagacgccaccgatgatgcacaaaacgacaccgtatcgctgcttccctcccaacgcaagaagcccaagcactctgctcctaaccccgacgcctgcttcgtcggaaagcccattccttctgccgaggcccgcgccaaatggccccaccgatacccctccgaggtgaaaaagaaagctccagctagaagctcagaagaggttacgagtgaaaacagtgaggttatgctggctaggtgtcattatcgtcaagctaaagtagatggagttgtttataacctctatgatgatgcttatgttaaggccgaagacggtaaaccagattatattgcacgaatcgttgagatgtttgagactgttgataaggaacaatgttttatggctcagtggttctacagggccgaagacactgtgataaaaaatcacggtgatcttgttgacaagaagcgggtttttatatctgatgtgaaggatgtaaatccccttgactgtattgtttcaaaagtcaaaattttcaaaaaaaacccaagtgtagatttggcttcaaagaaggcaaaattgcctttttgtgattactattatgacatgaagtacactgtgccatatctaacattttccaacctagtcaatgaaaca

SEQ ID NO: 26891 - DNA, 2169 bp, Glycine max
  Clone ID: TF_GmC1759_1
ggctcgagaaaagatagagcaaggaactcataaaagtgggaggaatgtggggttgaaagcttatgttgtgtgccaagtgcttgagattgttgtcaaaaaggaaataaaacaagctgaaagaaaatgtacacaagtcaaaatcaggaaggtcattcgaccagaagatttatcaaatgagagggcatattgaactgatatacgagatgtgtattacagcgatgaaacatatataatctctgtagaatccatagaagggaaatgtcaagtcagaaaaaagaatgatattcccgaatgcagtgctcttggtggaatcttccaaaatgtttttttctgcgagctcttgtatgatcctgccactgggtcactgaagaagttgccggctaatataaaagtaaaatattcaagtggacaaacatctgatgctgcagctagaaagaggaaaggaaaatgtatagagggagatggtgtttcagagtccacaaaggaaggaaaaacattaaatgataaacgtttagcaaccttggacatttttgcaggctgtggtggcttatcagaggggttgcagcagtcaggagtttcatcaactaaatgggctattgagtatgaagaaccagccggggatgcatttaaagctaatcatcctgaggcattggtgttcattaacaattgcaatgttattcttagggctgtaatggagaagtgtggggacacagatgattgtatctcaacatctgaggctgcagaattggctgcaaagcttgatgagaaggaaataagtagtttaccaatgcctggacaagttgatttcattaatggtggtcctccatgccagggtttctctgggatgaataggtttaaccagagcagttggagtaaagtccagtgtgagatgatattggcattcttatcctttgctgattatttccggccaaggtatttcttgttggagaatgtgaggaactttgtgtctttcaataaaggacagacattccgtttaactttggcttcacttcttgagatgggttatcaggtgaggtttggtatccttgaggctggagcatttggggtttctcagtcaagaaaaagggcattcatatgggctgcttctcctgaggatgtgcttcctgaatggccagaaccagtgcacgtcttttcggcccctgagttgaagatcacattatcagaaaatgtccagtatgctgctgtccgcagtactgcaaatggtgctcctttacgtgcaataactgttcgagatactattggtgatctcccagctgttggcaatggagcctcaaaaggaaacatggagtatcaaaatgatccagtctcatggtttcaaaagaagattcgaggtgatatggttgtcttgactgatcatatatcaaaggagatgaacgaattgaacttgattcgatgccagaaaattcccaagagaccagcacctggtctcttggcgtgaccttccagaagaaaagataaaactgtctagtggacaagttgttgatttgataccatggtgcttgccaaacacggctaagcggcacaatcaatggaagggactgtttggcaggttggattggcaaggaaatttcccaacttccgttacagaccctcagccaatggggaaggttggaatgtgcttccaccctgaccaagataggattcttactgttcgtgaatgtgctcggtctcaaggcttcccagatagctatgaatttgctggcaatatcatacacaagcaccggcagattggtaatgctgtgcctcctcctctagcatcagcattggggagaaagctcaaggaagcagtggacagtaagagctccacttagaagatgggccttctacattaggtcatgcttattgtattcataacagtcaccaagatattgcaaatcatcattccgggttccaaaaactagaaacccttgtatatagtgatatccattggtcatttgttgaggctaattccttgtttaactttcctcaaccaaggaattgaatggatgatgctcattttctatcaactaggattttcttgattagatggtattttggctgtttatgaaagaaatggttgggaattgattacctcccaatgtgtagttgaaaattgagaccaattttttttaacctgttatgaatatttgttgttgccactatttggct

SEQ ID NO: 26892 - DNA, 1508 bp, Glycine max
  Clone ID: TF_GmC1281_1
cggccgctcgagccggcgggcgggtcctggttagctcacgcaccccttctccatcgcgtgtgcttcaattccatggctaaaccgaaggctccaagacgaaccctagagtcatactcagtcaaacacataagcaaaaccattagagctggcgattgcatcctcatgcggccctccgatctgtcgaaaccgtcgtacgtagcgaggatcgagcggatcgaagccgacgcgcgcggcgccaacgtgaagattcacgtgcgctggtactaccggccggaggaatcaatcggcggtcgacgccagtttcacggctccaaggaggttttcctctccgatcacttcgatgttcagagtgccgacacaatcgaagccaagtgtacggtccacagcttcaagagctacacgaagctcgatgctgtcggaaacgacgatttcttctgtcgttttgagtacaattcctccaccggcgccttcaatcctgatagagttgccgtgtattgtaaatgtgagatgccttacaaccctgatgacctaatggtgcaatgcgagggctgcactgactggttccatcctgcttgtatagacatgactgtggaagaagccaaaagacttgaccacttcttttgtgaaagttgctctgctgaaggtcaaaaaaagttgcaaaactctcattctgcttctagacactcagatacaaaggtggatactaaacgccgtcgtaggtaaaatagtgtgatagtatataaagcataaaatgagttagatctataatggatgtactgaagatcttgcttttctaatcctgggtaggggccagacaaacacagagacaaagttatctagtagtaagctgtagtctttctactttcatggaaagagactagtttggaaatgtttgtcatgtctatttggtttgagtactcatcctgtttcctttggaagtggaggacgtgtttatgtaattatttagtgtagattctgtgtcacttctctctggtccttgttctcgggcgttttgtaaagtattttgacttatttataagcagtagacactttattctttctttttactaaaagaggtaggcaatgatctagagtttctatacaccgataatggcgccgtgttgttggcgtgaaaagaattgaggataaaaaaatatacgatattgggttgtaatttaattcagcctttcgttggcaaagacctctgaaagaacttgctagagacattgcatgccgatagtttctcacctctgtatcatctggcgtgatgacgatggagattggaaaatacgttatttttttggaccatagaaaaacaaatctatattggagtactgcctatggtttgaaccaatcaaagacgcaatacactccactaacggtgcttgtgaatggactagagtggaatgtcgcggagtgaaatagaacagaacgacattgaatgtagtaaaaatattgttcgaatattttatgatggggtagaataaaaacatcatgttattgcgaat

SEQ ID NO: 26893 - DNA, 1075 bp, Glycine max
  Clone ID: TF_GmC1007_1
ggaattcataaattaaattcggctcgagcacccatggagccacacgagtcccgttgtcatccctgtattactcacacacacacaactgctatctgctctctccacaccgtgcagcaattcctctcttccctctatccacccctcccatggcggaaccaatggctgtcgactccaatcccgaatccggtctcgacttcgagtcccctttcgcctgggggaagaagcgaggcatgggaggcaaaaagaaggacgtgcagttctacgagtcattctccttcgacggtgccgagtacgccataaacgacaccgtatgcctccagagcgggatcggcggtggcgagccccacatcgggaggctgatcaagatctgggagacccgcgacaagtccaggaaggtgaaggtgcagtggttcttccgccccgccgagatctgcaagtacttggttgggatcgaagtgaagccgaacgagttgttcctcgcgtgcggcggcgacggcgccaagggctttgccaatgtcaatcctttggaagctattgtagggaaatgcaatgttgtttgcatttctaaggacgttgggaatccgcaaccgtcaggtgaagcaaaggctgattatgtgtactatcgtttctttgatgttgtgcaattgaaagtagtggatcagatagatgtcaaggttgctgcgggaattgaagttaaaaatgtttccaacaaatgagatagtcaaaagcacgttggtgttgtgaaactcggtccaagacaagataaaagttagtgggaatggcaagtaaagtattgaagtagatatttcaggtaaaaaacagagttagcctgaaattgaaaaggtagccggcaaatatgttgatgtaattaagttattaagttctacctcccaccaaaaatcaaaagttataccgtagtagctactgtaattaagctattactactgcggctactgtaagtcatttactgctgcagatgctgctgcttagaattaggatttactttaatctgtagacatggatatggtgtgtggaaggaaaataatactaatatcctttttgaaaaaaaaaaaaa

SEQ ID NO: 26894 - DNA, 2530 bp, Glycine max
  unsure (1)..(2530): unsure at all n locations
  Clone ID: TF_GmC1073_1
acaaaatccaaattcgcgtgtcacagtggcgctgggtgtaagaatgggaaatcgacgcttgactcaggtcgcaaccagcgaagatgaggacgaagcaccgacggctactcctcctcccaagcagcaatcgtcggtcagtgcccccgaagagaaccgttcgaagcagcagcagcgcaagaggaagagaatgaagcttcaagaagaagaggaagaggaagaggagaaagaggaagagaagaagaagaagaagagaaagatcaaagacaagcaagaagagagatcgaacgaagaagaggaaccgccgccgtccgctgagagagaagtgtagtttgaggtttctgccatgaagttggcttgtgcattgtttgaggttgatgattgttttgtgaaaagtgggttctaagaccttctgaaataagaagcgtgttgtgtttctgcagggaaagagtttatattgccatttaggcggtgatcgtaactgaaaattggaaatggtgaatcgtcgacgcctcactcgggtggcgacgagcgacgatgaagacgaggcaccgccgcgtccacaacgcacgcggaagaggatgaggcttatcgaggaagataacgatgatgacgagaatgaagaagaaaaacaagaagaggtgccggaactgcctcagcctgcggaggacgctaagcctcttggcgaacccgttagggtttcgggaaaaggaagaggaaggaagaggcactatgattccttcgagttcgatggcatccaatatattctcgaggatcctgttcttcttgtacccgaggagaaaggccaaaagccttatgttgcaattattaaggacattacacagtctatcaatggcaacgtgaaagtgacggggcagtggttttaccgtccagaagaagctgagaaaaaaggtggtggaaactggcaatcgtgtgataccagggagctgttttatagtttccaccgtgacgatgttcctgcagaggctgttatgcacaagtgtgtggtgcattttgttcccagtacacaaacagcttccaaagcgtaaggatcaccctgggtttattgtacagaaggtgtatgacactgtggaaagaaaactctggaggctgactgataaggattatgaggacattaagcagcaagagattgatgagcttgttcagaaaactcttaaacgtatgggcgaactacttgacattgagcccgaagaacctgttgctgatcaggaagatctgatgaaaaataaaagaatcttaaggaaaaagagcatttcacctcttgatgtttcaaaagaggaggaaacaactcgtaagggggaccaacctttgaaacctgaaacaccatggagttgtataaataatgcctcagaacattatcgcatattagtagatttcaatgctctaacaggagatactcatcgtgacaaatggttggagaggttgcttcaacgcattcaattcatgtttaattctgatgacagcaaaaaaagggacaaaggattagggaatgccaattctgatgaaatcaacaatgaaagcaagcatagaagttcagaatcagcaactgactgtcaagataaggttcagaagagttccaagtcttttaactggccagatgttgctgtttcagccatggttgctctcgaaaaagcttctcatgatgctctctcatcagattctatgaagtacaaccaaaagttgcggcaattagcttttaatttccagaaaaatgcagtgttagcacgccgtctattgagtggagagttggagccttcaaaaatattaaatatgacacccaatgaattaaaggagggtttggttgctgaggaaaaaaccaaggagcctgacgagacccagcacttgcaaatgacagatgcccgctgctcaaaatgtatggattgtaaggtgggcttgagagagattatccaagctggaaataatgaacgttatcagctggaatgtgtttcctgtggtcattcctggtatgcctcccgggatgaggtgtctatgccgaccatagatgcatcagatccaaagggaaacataggcacagcgccataggccactgcaaaatttaaagatgtaccgatgaagctgctgagcccccgtgaatccaaagtcagccaatgacatcttttaaaagaaaagttaattgtatatccccagaaatgatttggaaagtccaggaaaggtgacgatattgaggctatgagacgtgtatctatcccggctagtgttaagtcatagctaaaaattgtttatgaatagatatagttctcttcctatttgactctgcgcatcgcatacaaaaaaacggttggttttgtgtaatacttcacataaactagctggttttacctcatacatcataagggtagtgttagccatagaattaaatttcttagtttgacttttactttgtagtattaacttgtttcaatcattaataagcaaaaaaaagaaaacactagttcccccnnnnnnnnnnnnnnnnnnnnnnnnnnnnnnnnnnnnnnnnnnnnnnnnnnnn

SEQ ID NO: 26895 - DNA, 511 bp, Glycine max
  unsure (1)..(511): unsure at all n locations
  Clone ID: TF_GmC45167_1
ggatttcttctccgcacattctgtttagggttctgctgagttgctgtccgatcgcgtttcatcgcgctcaccgtcaccggcaaggtgactacacacagggactccagttaaatgccatacacgatgaccctagaacattgaaaatcttccactctctcgtgtccagtgatacgatacggcgaggaatcttgatacgtcaaaacatggtagaagcaggggaagaggaggttattgaattcaagtggggcacaaggaaagggttgggtggcaaaaagaaggatgtgcagttttacgaatcgttcacctacgatggtgtggaatactccctctttgattccgtgtttctctacaaggaaggtgaacccgagcattacattggtaaaatccttaagatatgggagaactctgataagagcaagaaagttaagattctatggtattttagaccttctgagattttgaatttcttggaagggagtgagacactngagaatgagttgtttctggcttc

SEQ ID NO: 26896 - DNA, 663 bp, Glycine max
  Clone ID: TF_GmC189543_1
cccgcgtccgaatttattttcgcactcgccggaccactctcctcctccgcctccgccatgcctagcaagcgcaagaccagatcctccgcctctcccgctgccgcgccgccgagcaagcgcgcctccagatcctccgcctctcgcgtcgccgattccgcaccggtcaaatctgaagccgaggaagttgtggcagcttcctctgtcgtcaaagaagaggcgcaagcaagcttcacggacgttactgacggcaacgttagcgatggcgaggggactaacgccagattcgtcggagagcctgttcccgacgaggaagcccggcgccgctggccgaaacggtaccaggaaaaggaaaagaagcaatccgctgggccaaaatcaaacagaaacgatgaagacgaggagattcaacaagctcgacgtcactacactcaggcagaagtagatgggtgcatgctttacaaactttacgatgatgcccatgttaaagcagaagaaggagaagacaattacatttgtaaaattgttgagatatttgaggccattgatggggcactgtattttacggcacaatggtattatagggctaaagacactgtcattaaaaaacttgcatatctcattgaaccaaagcgagttttcttttctgaagtccaggatgacaac

SEQ ID NO: 26897 - DNA, 1030 bp, Glycine max
  Clone ID: TF_701150581_FLI
gacacaaaaaaagtgaaaccccccacaccacacccaaccctcaccttagggttcctctgttcttcttctaacccaacaagaaaaaaaaatcacattccccaaaacacccttctcgctccgcatggcgaaaacgaggccaggcagaaaggacgtggactcatacaccataagaggaaccaacaagatcgtccgagctggagactgtgttctgatgcggccctcggacacgtcgaagcccccttacgtggcgcgcgtggagatgatcgagcaggataataggaacaacgtgaaggtgcgtgtggggtggtactacaggccggaagagtcgattggtggtcggagacagttccatggtgcgaaagaactgttcctctccgaccactacgatgtgcagagcgcgcacaccattgagggcaagtgcgtggtgcactctttcaagaactacactaagcttgagaatgtgggtgctgaggattactattgtagattcgagtacaaggccgcttctggggcttttacccctgaccgtgttgctgtgtattgcaaatgtgagatgccttataacccggatgatctcatggtacaatgtgaagggtgcaaggattggtaccatcctgcttgcatgggcatgactattgaagaagctaagaaactagatcattttgtatgttccgaatgttcatctgatgatgatatgaagaaaccccaagctacattttctgcatcaccgggagctgatggcaaggtggagccgaagcggcggaagagatgaccatgtgaggtgtgtgtggttcttgcttaatttggctggctctatggtagcttttgtgtgttgtacggcttcttctagaggctataaacattgatttcatgtatttgattcaggttattatgtatctatccgttttacattttgttatgacagttcatctgtttttccttttgtccattgatgagaactccgatccaagtgttaattcttgagatggcatcaaaccttaaaaaccaagtacagcgcaattgttagtcc

SEQ ID NO: 26898 - DNA, 809 bp, Glycine max
  Clone ID: TF_LIB4164-054-R1-K1-A4
ccacgcgtccgggaaagggaaggggccgcaaaaagcattatgaatccttcgagtacgacggaaaccaatacacgctggaggaccctatacttctcacgcctgaggacaaagaccaaaagccgtatgtggcgattatcaagcgtatggctgttgagcagcttgagctgcattgacgttattttgggtctggcagccccccttttttcctctgtcgtgtgtgggacattactcaatccctgaatggcagcatgatggtcactggacagtggttttatcgtcctgaagaagctgaaagaaaaggtggtggcagctggcaatcatgtgacacaagggagctgttttatagtttccaccgtgatgatgttcctgcagaatctgttatgcataagtgtgtggttcattttgttcccatacacaaacagcttccaaatcgtaagcagcatcctgggtttattgtgcaaaaggtgtatgacacagtagaaaggaaactctggaagctaactgataaggactatgaggacaataaacagcaagaaattgatgagcttgttcagaaaactcttcaacgtttgggcaaactacttgacattgagcctgaagaacctgttgctgatcaggaagatctgatgaaaaataaaagaatcttaaggaaaaagagcatttcacctcttgatgtttcaaaggaggaggaaacaactcgtcaaggggaccaacctctgaaacctgaacaccatggagttgtgtaaataatgcctcagaacattatcgcatattagtcgatttcaatgctctaacaggagatacccatc

SEQ ID NO: 26899 - DNA, 1263 bp, Glycine max
  Clone ID: TF_GmC6253_2
ccacgcgtccgctcctcagagcccgcgtccccctgttcgttatttttctttttttttttgtttcgtttcgttcggaacgctgaggctgtgtcgttgttttagtgggtggatgggaacgacgtcgtgtgagaagaagagcgtcgtgtacgtgagctgggacgaggtgttcgtgtcgaacgacaaggggaggagggaggttcattacttgcttaaacgaagaggcggtggctcggatctggccgttttgggaaaagagaagagcctcctcagacacatgtcgtatcgctacgccattcgaaacgccgcgttgtttaagccttacttgaagctcaggtcgcgcagagaggttgttgattggctggattcaattgtttcagggcgagatttccgctggctggatctgaaattgaatgattcgtcttcaggggatgcggttatggtgggaaaacatggttatgaacctgaaattggagccttgaaggacaatcaattgcagaagatgcacagttgtacaaaagagttctcatggatagggttgccatggacgtgtaagaaaagaagaaagcactatcaggcatataaaagaaatggttttcagatatccgtgcatgattttgtatttgttctggcagaagaggacaagcgtttagttgcctacttggaagacctttatgaggattccaaaggcaataagatggttgtggtgcgctggtttcacaaaattgatgaggttggtattgctttgcctcacagttttagtgacagagaggttttcttttctctttatcttcaagatctgagtattgaatgcatagatggattggctttcgtcctcagtcctgggcattacgaaaagtttcagaatgaggcccgttgtactcacttagagccattcatctgcaaccaccagttcgataatgatgatgtgaaaccctttgatataacacagattaagggttattggaaacaggaaattctcaggtacatgtatacccaattggactcgaagtctagtgggagttccaggcaatcagatgatgacctggaacttgatgaaaatcatatgactaccgtttttatcagacctaagaagaggctgcgccttaccaaagcagatgatgccaaagaagcagttgatttggttggccttaaaacagaaaatgtgaataacagttagaataataccaaaatcaatactggaaacaattcttgggaaactgattgggcacacaaacatgacagcaaccattaaagggacaaatg

SEQ ID NO: 26900 - DNA, 460 bp, Glycine max
  Clone ID: TF_LIB3242-256-Q1-J1-H5
cctaaatggctcacgcacctcaacctcacgcaccttacctaaattttggttgtttgtaaactctatgctttgatgttgagaactaccactgagggtggttttgaaccctattttttgtttttgtttcattgtttggattctgaaatgtttttgagctggctttgtggcctacaacatgatttgaacctttgaaagacgtcgtacgtgacgaggatcgagtggatcgaagccgacgcgcgcaacaccgacgtgaagattgacgtccggtggtactaccggccggaggagtcaatcggcggccaccgccagtttcacggctccaaggaggttttcctctcctatcacttcgatgttcagagcgccgacacagtcaaagccaggtgtacggtccacagcttcaagagctacacgaagctcaatgctattcgaaacgacgatttcttttatcgttttgagtaca

SEQ ID NO: 26901 - DNA, 624 bp, Glycine max
  Clone ID: TF_uC-gmroLIB3258P128h04b1
gtgaggtcattcaacatgtattgctcattgatctgatcatgggtcttggattactggttttttgtgcttgatccatctattttggcatggttcctaagatatggtcttgcagaagaggttagagtacgggtttaatggctatcagactccagccatgctgtgagcttcccgatcaactagggtaaatatcaatatgttctgcttctcatgtggggctgcttattactatcaatttgcttagagatttcatgaaaacaatttgtataattattttgttaaaatgtttcctagaggagggctaaatttcaaagagcagaagacaaacaaaagtgtgcatttgaattattggccaccgtagctggtaaactattgcaagagagagagaatccaaccatgtctagtgatacatcatcagaaaaggatcagtctggatttgtcaaagagtgccaagatgcaaataaaccatccaaatctgtgatttctgatgaaggaagttgtgacaaaagtggtttctctcgtctttcttcacaaacaaacaacaaaaattgtggtttgaaaaaaattccacatcttgcaattgatggtgatgcagggactgcttctatagtaaccagttctacttgc

SEQ ID NO: 26902 - DNA, 1368 bp, Glycine max
  Clone ID: TF_GmC34052_1
gttcttttgtaagataaagaaagtaactcagtttgcaagttaaatgtatgtttttgtttgagttagatacataatacatagttttcttcatttttttaatgtcaaagcaaatgcttcttatcaatgttgtcttcaggcattgctttgtatgatagcatctgggaaatgtccctttggtgcttcatgtctttccagtggtgcctttctactcctgctgtgtctttccagaagtttcttgatagttcttgatatcattttgttattcattttagatatattgaagagctctctgaaaatgaatctagagagcacaatccgaggttgtcaattctaataaaaccatgggacttggacatgtttctccaacttcgaatgtcaggcctgctagaaatgctttttcagaggcgagaacatatggcaccaggttagactctctcggaggttctgatgtccaaattccttgtgtgtctcgggttcggagaagtcgtccaagaaaagatattgcgtctcttatgaaattccatccaactggaatgggtgaggctgaaaaactgagtaataagctccttgagcatagttctgatgctggtagtgacttttcagacaaagttttgaagtcaagaatgcctgcaaagtttcatcaaccatcctcttctgaacctgtgaaagagcagtgtccagtaatatgcccgattgagctacggcaggaattgaggccaaaaagggcagatccatccagccatacctcagatgacaataatatagttactgttcctactgcaaaaggagggatgaggaggaagcatcatcgtgcatggactcttgttgaggtgattaaattggtggaaggtgtgtcacggtgtggagcagggaggtggtccgaaatcaaacggctctcctttgcatcatactcatatcgtacctctgttgatcttaaggacaagtggaggaacttgctcaaagctagctttgcactgacacctgcacctgcagatgaggggataaatttgcggaagcatggtacggctcccattcctgagaaaattttgctgcgtgtaagagagcttgctgagatgaattctcaagtgcctccaaattatagctcaagccagttagcatctggtggagggagtgtgcatggagatagatcggggtacttgtaaataaatactaaattccttatcaggcaacaaaaaaaaaatataaaaaaactaatttctgaactttgttagaccaatcctttcttggatgcatagagagtaagtagatgcaatcttgtagacagttgagaaattgattagatgtttatgcactgaaacgttgaatgaatagaatcgtgttactgttttgttggttgtggaataaaaa

SEQ ID NO: 26903 - DNA, 757 bp, Glycine max
  Clone ID: TF_GmC3657_7
actggaagacagctccaaagttgaaggactgtgaactttctgatctaggagtacctcgttatcataagaggaaaacttgttacggttttgaaagatctcagcacaatgccattgttaaaaagaggaaattcgttgaccgggtttcaggagtaacttctgatggaggattcagtagtgagagtgtgtccaattcaccacagaaagggatggatggagacaagcctagctcatctgcaaaattgcatgtacctaaggctaaggattctcatgtaaagtttagcataaagtcaataaggattccagagctttatattgaggttcctgaaacttcaactgttggttcactaaagaggactatcgtggaggcagtgatggctatacttggaggtggtgcacatgttggtgttcttcttcaggggaaaaaagttagagatgacaatagaacacttgtgcagactggtatatcttgcaatgaaaatttggataccctgagtttcatgttggagcccacttcactacaagcttctccaactgtttgtgttggtgatccttcttctcaatgtgaaacatcccagcctaccaggtccacagaaattcctgtcttagattcaggaattactgataccttgcacgactcacccttgctgacatatccgggcaacctaattgaaagtaaccatgagtctacttcttcacttgcggacactacacttgacaaactaacacctgattccagagcgatagttgttgttccaac

SEQ ID NO: 26904 - DNA, 787 bp, Glycine max
  Clone ID: TF_GmC3657_3
attcggctcgaggtgagtcagaaaaccaagcgctctgagtttgtacagcgtcgaaccaggagaccattctctgtgactgaggtagaagcacttgttcacgcagttgaggaacttggaactgggaggtggcgtgatgttaagttgcgagcttttgagaatgcagaccataggacttatgtagacttaaaggataaatggaaaacattagtgcacactgcaacaatctccccccaacagaggaggggagagccagtacctcaggagctcttggacagagttttggctgctcatgctttctggtctcagcaccaagccaagcaacatggcaagcatcaagctggaccaggaaccttgaagattacagaagcctcagctgaaagaccttgtgtgtgttgaaggtgaaggtgtccacttgtgatatgatgatggtgtagaaaggagtggtggtgttgacaggaaaagaggaagacaaaaacttgtacattttgatttgattcaatttcatgtaatattctcacaccaaattctttgccggccattaattgcatgcagggttggcatttgtaaatgatttgatgcaataagattgttctaacaggaacttatgatgttctttgatttttttttcttgatttcttttgcatttatgaatgtttgtagaaatgtaaaaagaacatagaacatgacgacccaaaggaaaaggtgaaaatgttcttgttattatctttcatttcatttatggaaattattgttcccacttgtttgatacttaactttctgtttgctg

SEQ ID NO: 26905 - DNA, 1003 bp, Glycine max
  Clone ID: TF_GmC354_8
ccacgcgtccgtttggagattaaggcttaatttgttttccttttctcttaattaattttcccaagagaaaaatgcaaaccgaattgtagaggaaaatgagagaaattgtttctgtcatggaaaactagtgttttttttttttttttttttctgatgttagttcacttcggattctccgacaattcgccgatctaacttcgcccggttaaaactgcgacctgtgaacagaaggaggctttcaaattgtggctggtgaggtcaagcaacaagagtgctcatttatctgatcatgggtcttggattactggttttttgtgcttgatccatctattttggcatggttcctaagatatggtcttgcagaagaggttagagtacgggtttaatggctatcagactccagccatgctgtgagcttcccgatcaactaggaggagggctaaatttcaaagagcagaagacaaacaaaagtgtgcatttgaattattggccaccgtagctggtaaactattgcaagagagagagaatccaaccatgtctagtgatacatcatcagaaaaggatcagtctggatttgtcaaagagtgccaagatgcaaataaacattgcaaatctgtgatttctgatgaaggaagatgtgacacaggttcatctgtggtgtaccaaagcaacgagccatcagcactgtggtttgatatcattcaagatgttgcaattgatggtgctctcaaaaccatgctcctcaatgcgagcaggcgtaacagattcaaaccgagaagaggcaattgtctgtagcagggggttcaccatgcgcacgcgttgtagaacagcatttctaatgacattcccatgtgacaaaaatgatctcattcctccttgcattttagctgtcagagagagagtaaagtgaagggtgtgaaagagagagagacacagagactgagtgtgagagagagttagcggcgtggagatagaatatgcctgccctgagccctacactcgt

SEQ ID NO: 26906 - DNA, 1897 bp, Glycine max
  Clone ID: TF_GmC354_4
aggaaaacgttactagcacagttaatttagattcttctgattatccaaagcatagtaatttcaagttacacggtgatacaagtaaaggaaaggatgagttgcataagtttgagaaggtgccaattggtagtgggattgacatgtgtagttttgaggaccctttggatgaaaatcctcctgcattgatcagtttaggtggcaatgccaaattgtctgggtataatgataggattccctgtagcttgttgtccaaaagtcgtgacaatgtaccagtagttagtagagatgatgatgaaaactcttatgggtgtactcaccctattaatactaaaaccaagtcctttaggctaaagactggtataggtgataatagaataagtaaaagactggcttctaactttcagaaagttgctgaaaaaacaaaggatcatacacattctaacaatgatggagattggaagcgaacttactgcagcaagaggaactgcaataaacaccaaagttctcagatgaatattcctttcaaaaagaggaagctttttaattatcgctctgtttcaaattctaatggattgatcaggagtggtggcatttattattcacctgagaattgtatgaatcaggacggttgtggttcaccacctgggatgcacaaagaccctggaatgccatctttggaagcatgtcaacatcagacgttacgaagtagaggttctcatgtgaatcttaggatcaagtcatttagagtgccagagctttttatagaggttccagaaactgcaacaattgggtccttgaagaggacagtgatggatgcagtgactgctgtgcttggaggtgaattgcacattggtgtttttctccagggaaaaaaagttaaggatgacagtaaaactctacttcaaaccggaatttctcatcaaaacgagctggatgctttgggtttcaccctggagcctaattcttcacaaagcctaccgattgtatgtgctgcacattctcccggtcctaaagctgacataactcagcctgtaataaggtatccttccagtccagctgtaattcatcagaggattcaaggcaattctgacatgttacctgagcatcaagtaaccagtttaggtagccattttgaaaacgaccatgattcagcaccttctcctgttaatgcatctgttgagaaaggtatgaaagattccaaagaactggttactgttcctgaaatggatgaggaactagctatggtacctgtacaccagaagtcaaagcgatctgagatcgtccaacgccgaatacgcaggcctttttctgtagatgaagtagaagcactggttcaagcagtcgaaaaactaggaactggaaggtggcgagatgttaaggtttgtgcttttgataatgcaaagcatcggacatatgtggatttgaaggataaatggaaaacactggtgcacacggcaagaatatcccctcaacaaaggaggggtgaacctgttccccaagaacttttggacagggttctagtggcccacgcttattggtcccatcagcagactaagccgcagcacaagcaccatccagaaactgaaactgtcttctccttttaataataagggccagggtcaggggttgtcagcagcaagtagccatgtggatgaggagggtgctttggtttctgacttgttattagtgtcttttctttttctgctttcaataaatatttatgaagtctctctgtttatcaaccatgtaaaaagtgacgacgacaaggaaaaagaagccaagcctagaggctgcttgtaaatgatttgatgtaataaagtgctcgctaacacaattcttttgcttgtaaataattgaaattgttctgtataaaattgttatgtttttattgcttgat

SEQ ID NO: 26907 - DNA, 5494 bp, Glycine max
  Clone ID: TF_GmC3657_1
aattcggctcgagggtgaatattcagatcacagtttggccaaggcttttctggattctaaagaattcattgagaagaagaggtgctctactagtgcttcagaagaagaagaatcttgtgctgatgcttgtgatgagatgaacccattggcaatagtgcctgtgcagaccaatgatgctgcttctaaaccgggttggcccctgcttcgtaagacaattgtatctgacaggaaatgttctcaaagatcgctcttgtgccagatctcggtggtacaatgggcaatgcagttaccctctagagatctttcatatgctgcacatcaagaccataaaacaaacaattgtggcccaaataaggatcagtttctggcccttgatagcaagagtggtgctctggaagagagagttgaacacttttctccctcgctctctccacatcttcacatcttcacatcaccctctcccgaagaaacttctccccactattcctcccccgacttgtcgcaacactacgcattctcttgcagttctaggttaagcgactctttggtggagaaacaccccgagttgtgcgtcgagtttttcttgtgggcgagtcgaatcggttacgcccaccctccagtggtgtacactgcactaattgagttactgttgcaatggcgataatgatagagtgtctgacaagttcttgatgcaaataggatgatgactgggagctgctcgctcaatgttctcattcaaaagtgtcgtccggggtttatctatctattattctatctactattgtttcgttccatctcacaaaaacaagagagaaaaaaaaaagaaaaaagaaaatgaaaacgaaaacttcacgttcctgaaagagagagagagagaaagttaaggacttaaatggtttgtttcagttcgtgaattccattagatctcttgcatttgtaaacagttttgcggggtttttgctttgtacgcaacaagttgtacttttttttcctgtgtcggaaaatgagtttcatcggaaacttcgttacttgatcgaagtttggttcatcggatcgagttcgaatgctgttttttcaggagtgacaaaagaatctggtgtatttatgcttctggttattggatgagctgtatatgttttaactatggtgttgaagaagagagtagatcatggatttgatggcttacgagttcctgttatacctaaagctcctagatctgcaagaaggaggattgctttcaaaaaagcagttgaagatggtcaagtttgtgctattgaactactggcatctttagctggtcagttgttgcaggagagtgaaggttctgcttccagcaatgcatctgaaggaaatcatcatcccccctttagccaaggtgtcattgagcaagatatacaagatggagttaaaccattaaagaaggaggaaattcatcagggaagttgtgtagagagtacttttaagaccgaggtagcctcacaaaacagtagtttcaaacctctttcacatactaagactggacatgtttcagttaataatagttctgactgttgtgagaaagctgaagctgatgtgaagtctgaaattttcgaatgggataataaatttgggaattattctaatagattagtagaaacacgtgaaaaatttagggtgtccactcatggtaacataaagaatggatttaaatgggaacaggaggctggaagttcatgcattcggggatcaaatttagctgataagtgtagtttggaggatcacttagaattgtatgtatctcctgcactaattgactcgaaaagtaatattaaatctccatttcataggaaattttttcccagtgcttccttttccaggtatgggaatggcattaagttaggttttagagatgatgacgaaaactttttaaggtgcaaaaagttttgcacgaagccaaaggcttttaggtctccacgacgcattgcacaccgaagaatcaggaatttgatgtcttccaaatactggaagacagctccaaagttgaaggactctgaactttctagatctgatctaggagtacctcgttatcataagaggaagacttgttacggttttgaaagatctcagcacaatgccattgttaaaaagaggaaattcgttgaccgggtttcaggagtaacttctgatggaggattcagtagtgagagtgtgtccaattcaccacagaaagggatggatggagacaagcctagctcatctgcaaaattgcatgtacctaaggcggcggattctcatgtaaagtttagcataaagtcaataaggattccagagctttatattgaggttcctgaaacttcaactgttggggctttctctctgcactcaaattcgtggccttactttttcatttacactcactcacgcacgctcacgaaccgcgaccacataaaaggacaacaacgtgagtgtctcattaaaagcatgaaaaatgctgccaacctgccacagcggcgccggtgaccgcaccgtggtggtgggcatgaagatggactctcacagcaccgagttgctcacttgggctctgttcaaagttgcacagcctggtgatgttgtgcctgctcttcatgttcttgggaatgatgaaattgtgaatcgagaagggaaatcctcgttgttttcacttgtcaaagcatttgactctattcttgccgtttatgaaggattctgcaatttgaaacaggtggatcttaagttcaaaatatgccggggttcatcagtgaggagaattttggttcgagaagcgaatgcttattctgcaacacacatcatagttggaagttctcaaggtcttcatatatttcggccttgtatatctgtggcaaggtactgtgctaagaagttaccaaaggattgttgggttcttgctgttgataatgggaagctagatgatgatggtacagagattcatgaaaagggttgtggtaatggtgaatattctttgaggcttttttggattctaaagaattaagaggtgcctatttgtgcagaatagtctatcttctgatgagaataaccctttggtgcctgtgcagaccacttctaaaccaggttggccgctgcttcgtaagacaattgtatctgacaagaaatgttccaaggaatcactgatcccttgcgccaggcaccctgggtgccatctcggtggtacaatgggcaatgcagctaccctctagagatctttcatatgctgccataaagcaaacaattgtgaccaaaagatcattttttggctctggatagcagctcttgttccagtggatgccgaaataggaactgctacttcgcgtgaactcaattcgagaagcattccaaaggaattatgtagacttaaaggattaatggaaaacattcgtgcacacagcaaatttctccagtcaacaaaggaggggagagccagtacctcaggagctcttggacagggttttggctgctcatgctttctggtctcagcaccaagccaagcaacatggcaagcatcaagctggaccaggaaccttgaagattacagaagcctcagctgaaagaccttgtgtgtgttgaaggtgagaaggtgtccacttgtgatatgatgatggtgtagaaaggagtggtggtgttgacaggaaaagaggaagacaaaaacttgtacattttgatttgattcaatttcatgtaatattctcacaccaaattctttgccggccattaattgcatgctgggttggcatttgtaaatgatttgttacaagaagaagcttttaagaggatctgaagatgtaataagaaaaatttgtgtttggttggtctgagagatacaagatgttttattatctgagaattttaaaccccaattcggtgactttggacttgcaaaatgtgcatcaaccttgtcatcacatataacatgcacagatgttgctggaacctttggttacatggctcctgaatacttcatgtatggcaaagtaaatgacaagattgatgtctatgcattcggtgtagtgctccttgagcttctttcagggagaaagcccataagtggtgattatccaaaaggtcaagagagtcttgtcatgtgggcaagtccgattctaaatagtggaaaggtgttaaatgttagatcctagtttgggtgtatgatcatgaagagatggaaaggatttgtatcagacgtgctccaagggctaggcctctaatgagccttatctctaagctccttggaggtgatcctgatgtgatcaagtgggcaagactagaagctaatgctttggaagcaccagaaatgcttgatggtgaagcttgtccaccttccaatttgcagtcacatctcaaccttgcattgcttgatgtggaggacgactcgctctccatgtgcagcgttgagcaaaacgtctcgttggaggactacttgagaggccggtggagtcgctcatcaagctttgattaagcaaactactgcaaattgctagaagaagaaggattgtgttttttgaaatctaaatccttttgtaaataattttgctgtgttgcatgtgctgtgaatgtttttatagatgggtttaggatgagaggttgtttgtgtgtgccctcctccttcccttgcttgccaaggaaattatgccttgtaatttttaaggctagatatcctttgtcgttttactttatttggtgctagtttcaatccttaatctcaatttgattgagtgtaatatgttctggtgcgaagaataaaaaatgaaaaagttgtatcttaaaactacataatgagtactgttctcatgcattttaaagttttcactaaagaggactatcgtggaggcagtgatggctatacttggaggtggtgcacatgttggtgttcttcttcaggggaaaaaagttagagatgacaatagaacacttgtgcagactggtatatcttgcaatgaaaatttggataccctgagtttcatgttggagcccacttcactacaagcttctccaactgtttgtgttggtgatccttcttctcaatgtgaaacatcccagcctaccaggtccacagaaattcctgtcttagattcaggaattactgataccttgcacgactcacccttgctgacatatccgggcaacctaattgaaagtaaccatgagcctacttcttcacttgcggacactacacttgacaaactaacacctgattccagagcgaagttgttgttccagctaccacagaaacattagctgtggttcctggcaaaagcgctctgagtttggcatttgtaaatgatttgacgcaataagattgttctaacaggaacttatgcttttctttgattttttttttaatttatttcccataatgaatgtatgtagaaatgtaaaaagaccatagaacatgccgacccaaaggaaaaggtgaaaatgttcttgttattatctttcatttcatttatggaaattattgttcccccttgtttgatacttccttcct

SEQ ID NO: 26908 - DNA, 519 bp, Glycine max
  Clone ID: TF_jC-gmro02910008g09a1
ggctcgaggttcattacacttgatagtaacatatttgctctgtataccttgtgaacagtaaagtttagcataaagtcaataaggattccagagctttatattgaggttcctgaaacttcaactgttggttcactaaagaggactatcgtggaggcagtgatggctatacttggaggtggtgcacatgttggtgttcttcttcaggggaaaaaagttagagatgacaatagaacacttgtgcagactggtatatcttgcaatgaaaatttggataccctgagtttcatgttggagcccacttcactacaagcttctccaactgtttgtgttggtgatccttcttctcaatgtgaaacatcccagcctaccaggtgagccaaattttacgacgatttctttttatcaccacagctgatttatgaagggaaatggccaaggttaatttatggggtagaaataatgattcagttctattcagccgaatttttattgtgatactattgctaatgtcattatttg

SEQ ID NO: 26909 - DNA, 3011 bp, Glycine max
  Clone ID: TF_GmC354_1
ggggggtgaccaaacttcatcttaacacagcctcctgtgaaggtcttcaaaggatttttcaaaacaaattcaaactgcatccagttgttattattaacatgctgctactccatcgggttaatgcccataaaactgaaattacaggaaagcaaacaagaaggctctgtggccataacatatttacaagcactcaagcttattacataattcaaattagcttgagtgcccttgagaatttttcatcatcattatctaataaccaccttgtatgaaagcattcaagcgctcgacctcttgtcggtgctcgcgcaccacagcacgaaccacatctccaatggacaccatgccaaacattcctttttcatcaatcacagggatgtgcctgattcttttgtcagtcatcagttgcatagcctgcagaactttggtatcaggggtgactgtgataagtttgttctcttcagtcataatatctccaaccttagtagacttggatgatcttccctgcacgatgatctttcttaagtaatctctttcagtaataattcctgcaattgccttattcgcatcagatttcacaacaaccaaagctccaacattgttttgggtcatcgatttaacagcatcgtaaacagtatcatctgtggtgcaccaaagccaggagccatcagcacccttgcctttatcattcaagatgtctgaaattgtggtgctctcaaaaccatgctcctcaatgcgagcaggcgtaacagattcaaaccgcgaagaggcaattgtctgtagcagggggttcaccatgcgcacgcgttgtagaacagcatttctaatgacattcccatgtgacaaaaatgatctcattcctccttgcattttagctgtcagagagagagagtagagggttgggaaagatagagcgagagacagcgagtgcctgagaaagagggagaagggggtgcaaaggaaaaggacccaaaaccctctttcccattacaacaaaattgctcatcttgaatcacagggtttaaagccttgctaggtggagatccacagaaaaatgggggtgatgaagccacttgccccccagatctcttggggagaataatgtccataagctcagccccaactcctgaatcttcaatttctgattggtagttgataaagggtggcctcaagggtctgatgtggttatcaaaggttgagtggttcaacaggcccaatcttcgaggtttagggcacaccacagattccatcctcatctcctcacagcttgtcaaggccttcttctgctgataaccacactgattcatcttttttctctttcccttcacacctcaaaaacaaaaggatctcttcacaaggaacacctgagcagactcagaggctcctctgagaggaaaagaggacagaaaaaaattgggtgaatgaatcagaggagagaagaaatcaagagaaaagaggtaaaaaaatttaccaacatcttttgtaaggtgaagtataggatcaagcctattagagtcccagagctaattatagacgctccagacactaaaacaattgggtcattgaagaggacagtaatgaatgcagtgactgctatgcttggagatgaattgcacattggtgtttttctcaagggaaaacaagttaaggatgacagtaaaactctacttcaaactggaatttctcatcataacgaggtggatgctttgggtttcacccttgaacctaattcttcacaaagcctaccgattgtatgtgcaaccgttgggtccttgaagaggacagtgatggaggcagtgactgctgtacttggaggcggattgcgtgtgggtgtgattctccatggaaagaaggttagagatgacagtaaaactctacttcagactggaatttctcatgataaccacctggatgctttgggcttcgccttggagcctaattgttcacgaaaccgaccatctgcatgtgctacaacagattctctctacattcctggtgcagatatgcctcagcctttaatagggtacccttcaagtcgtgctgtaattcatcagaggattcagggcttttctaacatgttagctgagcatcaagcaaccagtttaggtaaccttgttgaaagtgatcatgattcagcaccttctccaatcaacacatcaggtgaaaaaaatttgacagattcaaaagaacttattactgttcctgaaatgggtatggaggcactagctgtactacctgtgcatcagaagtcaaagcgaactgagatcgcaccacgccgaattcgtaggcccttttctgttgctgaagtggaagcattggttcaagcagttgagaaacttggaactggaaggtggcgtgatgttaaacttcatgcttttgataatgcaaagcatcggacatacgtcgatttgaaggataaatggaaaacactggtgcacacagcaagaatatcacctcagcaaaggaggggagagcctgttccccaagaacttttggacagggtcctaactgcccacgcatattggtcccagcagcagactaagcaacagctcaagcaccactctacaaaaccttgccttctcctttaataaggacttgacaccaccacgtgcctttgttaaaagtgtcatttatcattttttcttcttcctgtatttatgacaaagtgtgtttatcactttgatttttagtacaatgtcacactttatctatcatgtaaaattagaacaaggtgatgcctatagagaatttgcgtcataggttttcactccaaagtcaaggttcggtgtgtaactggagtggaggggcacgtggatgcacgtgttgatgatagaagtttatctgcaaattgaattatggacccacagcagctaataatgttagtgtagctagagcttatccatgaataaaaaagagctaatattagtctaaatgataatattaaatgaataatagtaatacacatattggcatacttaaagtagttgagataagaaattttactttcttta

SEQ ID NO: 26910 - DNA, 445 bp, Glycine max
  Clone ID: TF_GmC144846_1
ggggttgtgaggggtttaagaacaaacacaggcttggggtagttttcaggaggattttgttttatcagacaatagcccaagtctctgggtgagaattttttgattgcctttcatcaacaaatttcttgcagacaaccaaaaataagtgttcatttttttggtgcaaacataattcaacacaagaagaaaggggggtatttgtcggcttgattttcaaaccagaagagagtggcctcaacatgggttgaagggttcttctaatgcccacttacctgttctaatcttaggtgtttgcaaacctcaaggaagtcgattagattctatctaatgactttttcttataggagtgattatctgagatatggtgttgcagaagaggttgaactatggttttaatggctatcaggtgcctgtcattcctagagcttcaaggtcagctaggggg

SEQ ID NO: 26911 - DNA, 2703 bp, Glycine max
  Clone ID: TF_GmC354_6
cccacgcgtccggggttttggagattcaaagcaacaaattgttttccttttctcttcaattcattttcctaagagaaaaaaacaaaccgaaatttcgagcaaaatgagagaaattgtttctgtcatggaaaactagttttttttttttttttgttagttcacttcggattctccgacaattcgccgatcttacattcgccggaatttcgcttcgtctggttaaaatcgcgacctctgaacagcaggctttcaaattgagtgctcatttatctgatcacgggtcttggattgctggttttttgtgtttgatccatctattttggcatggttcctaagatatggtattgcagaaaaggttagagtacggatttaatggctatcaggctccggccatgccgcgagcttcccgatcaactaggaggagggctaaatttcgaagagcagaagacaatcaaaagtgtgcatttgacttattggccaccgtagctggtaaactattgcaagagagagagaatccaaccatgtctagtgatacatcattagaaaaggatcagtgtggatttgtcaaagagtgccaagatgcaaataaaccatccaaatctgagatttctgatgaaggaagttgtgacaacagtggtttctctcgtctttcttcacaaacaaacaaaaaaaattgcggtttgaaagaattcacacatcttgcaattgatggtgatgtagggattgcttctatagtgacaagttctagttgcttagagaggttcattgcagagaaaatggtggatagcaatagccatttcaaagtggaaaatgttactagcaaagttaatttagatttttctgattatccaaaggatagtgatttcaagttagatggcgataccagtaaaggaaaggatgagttgcataaatttgagaaggtgccaattggtagtgggattgacatgtgtaattttgaggaccctttggatgtaaatcctcctgcattgatcagtttaggtggcaatgccaaattgtctgggtataatgataggattccctgtagcttgttgtccaaaagtcgtgacaatgtaccagtagttagtagagatgatgatgaaaactcttctgggtgtactcaccctataaatactgaaaccaagtcctttaggccaaagacttgtataggtaaaagaatggcttctaactttcagaaagttgctgaaaaaacaaagaattatgcactttctaacaatgatggagattggaagcgaacttacctcagcaagaggaactgcaataaacaccaaagttctcagatgaatattcctttcaaaaagaggaagctttttaattatcgctctgttgcaaactctaatggattgatcaggagaggtggcatttattattcacctgagaattgtatgaatcaggatggatgtgattcaccacctgggatgcacaaagaccctggaatgtcatctttggaagcatgccaacatcagacgttacgaagcataggttctcatgtgaatcttaggatcaagtcatttagagtgccagagctttttatagaggttccagaaactgcaacaattgggtccttgaagaggacagtgatggatgcagtgactgctgtgcttggaggtgaattgcacattggtgtttttctccagggaaaacaagttaaggatgacagtaaaactctacttcaaactggaatttctcatcataacgagttggatgctttgggtttcaccctggagcctaattcttcacaaagcctaccgattgtatgtgcttcacattctcctcgtcctaaagctgacataactgagcctgtaataaggtatccctccagtccagctgtaattcatcagaggattcaaggcaactctgacatgttacctgagcatcaagtaaccagtttaggtagacattttgaaagtgaccatgattcagcaccttctcctgtcaatgcgtctgttgacaaaaatatgaaagattccaaagaactggttactgttcctgaaatggatgaggaactagctatggtacctgtacaccagaagccaaagcgatctgagatcgtccagcgtcgaatacgcaggcctttttctgtagatgaagtagaagcactggttcaagcagttgaaaaactaggaactggaaggtggcgtgatgttaagctttgtgcttttgataatgcaaagcatcggacatatgtggatttgaaggataaatggaaaacactggtgcacacggcaagaatatcccctcagcaaaggaggggtgaacctgttccccaagaacttttggacagggttctagtggcccacgcatactggtcccagcaacagactaagtcacagcacaagcaccatccagaaactgaaactgtcttctccttttaataataataagggccagggtcaggggttgtcagcagcaagtggccatgtggatgatgagggtgccttggtttctgacttttgttattaatgtcttttccttttttgctttcaataaaacatttatgaagcctctctgtttatcaaccatgtaaaaagtgatgatgacatggaaaatgtaaaaattatctttgctcatgatgtggatgcttccctgtgtggagaggctgctgcttcttgtaaattgattgatgtaataaagtgctcgctaacacaattcttttgcttgtaaatatttgaaattgttctgtat

SEQ ID NO: 26912 - DNA, 904 bp, Glycine max
  Clone ID: TF_GmC347_1
cacaaagaacgttctatgatcaaaattgaaagttgtgctaagggtgatcttaatatagtctcctctctggaagatacttcaactaacaataacatgtcaaagtgtcgtgctctagtggcagttcctgccattaacatggaggcattggcggtggttccattctggcgcaaatctggaaatcctgactttgcacaacgccgaatcaggaggccattctctgttctagaagtagaagcattggttcaggctgttgaaaaacttggaactggaaggtggcgtgatgtcaaacaacgtgcttttgatcacgcaaagcatcgaacttatgtggatttgaaggataagtggaagacactagtgcacactgctagaatctccccgcagcaaaggaggggagaacctgttcctcaggagcttctggatagggtcttagctgctcatgcctattggtctcaacaccagtgtaagcatcaacttaaaccactgtgagtcatttcaatcattgaaggacgcagaagaacaaacacattgttgcaaaagtacagtttccagagtgaagtagtgtagttatgataaaagttgatagtatataacgtttacataatatactcatgtgattccataatttatcctccctaagcctgataatgttttggttgcttgtacatgattgttttggcctaaaggaatatggtgtcactcataccaccccttgtggtcgattgctggtatgctatcaatatgcatactagaatatataataaataatgtatagtagttaaacctcttagaacttgtttcttggttgtatcttcattgttactagccattacaatgacataaaggaatacatatgaacaaatacaaatgaatatcttatgccaatagatgtaactatagttatagc

SEQ ID NO: 26913 - DNA, 591 bp, Glycine max
  Clone ID: TF_GmC3657_8
ggctcgaggtttatctatctattattctatctatctattgtttcgttccatctcacaaaaagaaaagaaaaatgaaaatgaaaatgaaaatgaaaatttcaagttcctgaaagagagagagagaaagttgaggacttaaatagtttcagttcctgaattccattagatctcttgcattttgtaaacagttttcatcggaaagttcgttacttgatcgtagtttgttccctcggatcgttgctcgaatgttgtttttttagtgacaaaagaatctggtgtatttatgcttctggttattggatgagctgtatgttttaactatggtgttgaagaagagggtagattatggatttaatggctttcgagttcctgttatacctaaagctcctagatctgccagaaggagggttgctttcaacaaagcagttgaggatggtcaagtttgcgctattgaactactggcatctttagctggccaattgttgcaggagagtgaaagttctgctttcagcaatgcgtctgaaggaaatcatcaacctgccttcagccaaggtgtaattgagcaagatatacaagatgaagttaaaccat

SEQ ID NO: 26914 - DNA, 139 bp, Glycine max
  Clone ID: TF_8670002
acaggataaatggaaaacattattgcacaccgcaacactctcctctgatcaattgatgggatagccattacctcaggagctcttgaacatggtgttggctgctcatgctttctggtcttaccaccaatctaatcatcat

SEQ ID NO: 26915 - DNA, 1349 bp, Glycine max
  Clone ID: TF_GmC57466_1
cggtcttgtgggtagatgtgttcttgatatgctctaatgcaatgcaatataattcctcagataccatttaccatcgacaggcccgagccatgcaagagattgcaaggaaggactttgagaatctgagacaagatagtgatgatgatagtgaaccacagcccaaaattgtgcagaaaggaaggccaccaggcaagcactcaagaaagtcactgggacttggtatgcctccttctgagcgtgttggtcctgaatcttcttctgatgcaactctggcttctggtgcggatattggtagtggctccaacggttataaattcagaaaagtacccagcaaatttcagcccacagattcatctgccagggcctacaacagcacttttaacagtggagggtatactggctgttctgattgggagaatgaatttccagcttctgttgttaaagctgtgctaagatatggaaagaagcagtttgcagttgatgagaccaggcgtgatacttacaaaaatccagtgactttaggaaatgaacgaccgatgttgtccacagttgaagatgaattcaagcaacttcttgctgtaggagtacacatgaagcatagctatgcaagaagtctagcccattttgctgcaaaccttggtcctgttgtttggaagattgctgcaagtaaaatcagaggtgtgttgccagctggacatgaatttggtcctggatgggtaagtgaagatgatgggtcatcacagaggcgacacttcccagtttgtgatgagggtagaacttcagaccctcctgtaccagaggattatagaagtagattttcttctccatctggatcgctcccccttgcaaatagaccattctatcaaagtggagacatggctatagataattaccaaaatgagttgaatccagtaatcaacattcctggtgggtctgaatccataactcctatgaggattcagcaggaatccatggtgcactctgatgattttggttcacatgatcggttaggctctaattttccatcccaaatgaagatggtaagacttgctgatctaactgggacttcgagtgctggggttgttcctcaaatgtttgacatggatcccccataagcaaccccactgtgcatacaaatgttgattcttcttttcagggtcagcacttgagcaaattaagtcaattcggttctggtgatttattgtcccgcgaacctggttacagctctgataatatatcgaaagggcctgtttgcagatcatgaggccaggcatggtacttaccaacatcccgggactcttgggctcgtgcgaccgacgttgtccgaaggattggaactacaaactcac

SEQ ID NO: 26916 - DNA, 904 bp, Glycine max
  Clone ID: TF_GmC373325_1
ggctcgagctcgagccgattcggctcgagctgccattgattcaagaatttcaagaaccgggtctgaagtgtgtgagttgaagaacaagaaggagggtgtgcgtgtagggtgcaagaacacagataagaagcgaaaggtcgtttactctccacgttctgaaaatcctgaagcaccctctgatgagaaaaggagaaaaacgagttcttcaaacccattatcagaagattcaagaactgtgcgtgtagagtgcaaaaagaagcgaatattgatggaccgttgcaagaagatgcagtgttgggctatgttgaagcgtttaatggtgggaagagatgcgtgggctttaaaaaaggatattcttgatcccaaggtattgtgcgttcttcataagtctgaagccataagaaagccaaagggtttggaggatattgagtcaaagttgaagaattgggattactccgaaactgatgagtttgtggatgatgtgaagcttgtgttgtcttatgctttgcaatatcctcaaaggagtgaggttcatagaactgcaaggaggatcagtgagggttttgagatcagttggaaaactatgaaggccaagtggatgcgtgacgaacaagatttgcaagagaagagatgatgatgatgaagtcgccgggaaagaaagaaggcaagtgaggagttatctcaaaaaaggagcaatcttttgatttgctgattcaaaatatcataggaacccggaaagatggcatgtttcatcaaccgttccaatttaattaccccgttttattcatatttttatgtaaaaagtctctattgaatttcttttaagaagtttctatttctattttgagtaattaagcttaattactaccttcaaactaaagaacaaaaatacgtatattttacc

SEQ ID NO: 26917 - DNA, 2295 bp, Glycine max
  Clone ID: TF_GmC14843_1
gtcgaattattaaatgctacgaaaaatctgtaggcattcaaaaaagttgtggggaacagagatcggtgcagaaagatgaagacccccccacatgaactttcaagatcaggggaggcttagctgactgatgctgaaattgatggccttcttgaacacaatgctaatgggagatcagaacatgtgattggcaagttaaagactgtcgggagtatggttaatacagagctgactgattttgaagatgcacctaaattttcatcgcttgaaccttcattgtttggcaatcctcagccaaatgctgatggctccttgacatctggttatgataagttcaatgaaggtgataaaggccagtctggaactgacaaatgtgcagaggacacactagaaaacaatgaagttgttcactcaagccattgccatgacctcaaaatgaaagcacctgtgaaatcaaccaagttagttattaaaaataaacaaatttcagcagacactgaagatactgtcaaaatgtcagcgactgctgctaagtaagtttcaatctcaaacaaggctcaactggtgatctggaagttcctcctttatggggcctaatctagtcacagaagtaccagaaggtgaagatgacagaaaatttagttctccacagctactgcattcatattctgacaagagaagttatgatcatttccataaaagggacaagtcatataaaggtaaagtcaatcaagatggttttgaatcttttgattgtgatatgggagaacatacttctgttttcagcaaccaacatggtttaggaattggtttgtctgatgttacaagtgatcctatgcgtcaaacacggtttataaggatgaagacaacttctgaggagccaagcacttcaaacagaagaattaaaattcgacagggtcaaagttccaggggaaaatctgatcgggaagactcttctaccagaatgtcagatcaacttcatcgaagaataaggacagccagacacaggaatggtgaatatattgccaatgattctggtactttaactcgaagggtgtcaaatcaccatgtcaaaaaattgtcatggctgatgttgtcagagcctgaagagggttaccgatatattcctcaacttggtgatgaagttgtgtacttaagacagggccatcaagagtacataaagtcatattcattatctgaatcaggtccatggagatcatttacagggctaggtgcttctgaaatttgcaaggttgaagaacttgagtatgcagagctaccaggctctggggatagctgttgtaaacttaaacttagatttctagatccttcttcgtgtgtgcatggcaaatcgtttaaattaactctacctgaattgattaacttcactgattttgttattgagaaaacatggtatgatactgccatgaagagaaattggtcttcaagagataaatgcatggtctggtggagaaatgaagatgggaaaggtggaagttggtgggatggtcgaattattcaagtgcaggccaaatctgatgacttcccagagagtccttgggaaaggtatcgggtccagtacaagactgatcccaccgagaatcatctgcatagtccgtgggaactatatgattctgagatgctatgggagcatccccacattgatcatgagatcagagataagctgctttcctatttcaccaaattagaccgcagggagaggtttgatatccaagcactgaaccaagtagctgagaaattagagtttgcaaacaggtttcctgccccattctatcctgaactaattcaatcaaggttgaagaatgactactatcggagtgtggaaggtgtcaaccatgatataatgataatgttatcaaatgcggaagaatattttaaaattacaaagaatgttcagctggtgggcaagatcaggagaatatcagaatggtttagaaggaaacttgaaaggatatagaaagctcaaattggattttataggtttcttttaacattgtttttcattctttaatccaattttggagaattagttggtgggtaatttggttttataaaatgaaggtggtcataggtggttgtggtggtaaatatcagctgtcacatgtgtatatatacaaactcatccttgttaattcaattgtcgttatgaggcatcttcagcttctttatatttgaatattttgttggttttgccttggcctccactaaagctgagtttaagtttcaatagaaagtagtgtatcgtttcctagaaagcaataaaatcttccattccct

SEQ ID NO: 26918 - DNA, 1503 bp, Glycine max
  Clone ID: TF_GmC303_6
tcgcgatctagatagagtggagccatctaaattatcacagattccttgcaagttgattgagaaagacatgcacaaaggcaacaaaggtaatcatgatgtggaacagcctgctggctctctaaaggcatgttcttcagtatgctttgtcacatccaagtgtagaatttgtggggataccacatgccattgtgtaattcctagcaattcaatacaggtgtcatcagatatatcatctgaaggatctgaaggaggggatgtaattacacgtggtgctgattctttgagacagaattgcccgactaaatgtacttcacctattgagaagaaatctgatcctgattctgatggggctgtaagttctttggacagtgaacatgtttgtcctagttctcagcatgtaactcctactactgatgcctcttctggggaagtatggagcacacctgttttgcctgtccagctttctcctaaaaaggctcttcgtgctgctatgcttaaaagccgctttgcagataccattttgaaagcacagcaaaagacccttcttgatcatggtgataaaggtaatcctcaaaaaatgcagcaggaaaaggagaggttggaaaggattcagcgtgaagaaagagctaggatcgaagcccaaattaaaattgctgaagctgctgctagaatgagggccgaggaagagtcaaggcagcggagagaaaaggaaagagaagctgctcgagcagctatagaaaagatgaaaagaaccgttgatatagaacattttttggagattattaaagaacttgaaagtttgagtggatgcacgctatcttataaagccgtgggctgtagaaatggctacaaagttgcattggagacattggataaacctcagtttgagaacccattggagcggcttggtttatttatcaaggaagactttaccgcagatgaagatgaggaggttttgaacggaggctttgaagaaggggaaatttttaactgcatgaaggtgtattcagttctgccagcgctaactgtttatatcctttagacagggaaacagacaattattgtaaatgcacatattgtttggaatctagtcttttgactatatctgccttaattacctcttgtctgggaattaggtaactacacgcttgcaattttgttgccaatgatctaatcttgggcattcctttgtgttcagatacttgtgtctttttgggcaaggaatctctatgccgggacagcatgtcaagactttttctcccagtttccttaattgtttcagattcgcttttatcatgctcatcttcacacttccatttccgacctaagtctttccattttctgtcaaatattttgctgagttcctttgccatcaaatgaacatcattactgggaggattatatttcatagcatttgagaaggtcagtctgacatcagctgcaaactcctcagtgccagaataaatatttttctccagcttagatttaattgtgcccaaatcc

SEQ ID NO: 26919 - DNA, 3170 bp, Glycine max
  unsure (1)..(3170): unsure at all n locations
  Clone ID: TF_GmC11917_1
cgttcgggacacattagggtaaccaaagttccaaaccctaaacgctacgattttaattttctggttttctctttttcaatcggtgcttcctccggcggcgcgtgggagtgtctttggcgcgtgattcctagttccccgcttacctatgcttcgctcgacccgcattgtagagttcacgccggagagacggcggaatctcaccggacgatcgtgatttcgcatcttcatggcttccgcctaccggaacgaacctaattggccacggcatagaagcggtggagctggattcatgggaaaagtacctttctctaaccctaaccctaaccctaattctaaccctaaattagcgaatggcaagaagacccaatcggcgtccgatgatgcttcctctatcaaccggagatcgaacgacgccgcaactcactcccagtatgtgaccttcaacgtcgcttcgtgcaccaagaaggagctcaacgacttcaagaatcgcctcgtctcggagctcgaacaaattcagaagctaaggaatcaaatcgggtccagcgagtttcaacccgggcagagcctcaacggacatccaaagaaaccgttaggcaagaaaatttccggcaacaagcgacccttgccatctaattccgcaaaggatttgaaacggtcgcattcggaggttgggaacttgatgaagtgttgctcgcaggttttgcagaagctgatcaaacacaaacatgggtgggtcttcaacgctcccgtcgatgtagttgggttgaaacttaccgattactgcgatgtaattaagcaacccatggatctgggaactgtgaagtccaatctttctatgaacgtgtacgccacgccttccgatttcgcctctgatgtgagattaactttcaacaatgcactggcttataaccctaagggtcacgatgtgtacaccgtggcggagcagcttctggcgaggtttgaggaactgtatcgaccggtgcatgagaaattcgaaggtagcataggtcatgatcgcgaatctgaggaggaattgcaagccagttcgtggagccaagttgagccagagagggtgaagaaaaaggagaatccgatccctcctgcaaaattgcataaagaacctcccccgcagcaccctgcaagttcttcaaaccctccattggtgcagtctccggtgcgcacaccatccccaatgcgagctcctcctgtgaagcctttgaagcaaccaaagccgaaggctaaggaccccaacaagagggatatgagtcttgaagagaaacacaagttggggttagggttgcagagtttgccgccagagaaaatggaacaggtggtgcagatcataaggaggaggaatggacatttgaagcaggatggggatgagatcgagctagacattgaggctgttgacacagagacactttgggaacttgatcgattggtgactaattacaagaagatggttagcaagattaagaggcaggcattgatgggcaacattgacaacaacaacaacgatgtgcagtctaacaaaggcaacggggaattgccttctagcgagaaggttgatggggggccagttgaagtgaagaagccaaagaaagtagaagcaggggacgaggatattgacattggggatgagatgccaacgagtatgttcccccctgtggagattgagaaagataaagatgttgttggaggccatgcaagtagtagttctagtagctctggcagttcaagcagtgattcgtcttcgtcaagcgattcggattcggggagttcctcagggagtgattctgaagcagacaacgggcactcgtagtagtcagtgggtttttggaactaatggtcatgtagatgaagaaaatgcttttgcttcattggcttcctttgagggcgtggctcgaatacatggacgagggattgtgaccgttgtttgttggttcgttttgggagtagcggtttgcattgtggcgctgtccactccaggatttgtggtgtgacatatttgtacaaacaatttcgggaaccgaagtaatcatcaaaacaatttgtaggccagaaagtagtagacttaaatgtggtgaaaattctaggatagaatcgttaaaaattaggaatagaactgagagttagtgtttttgagtttaccttgtacacattacaacagtaaatagatggaagatccttgaaaaatagcctttttttgtggatagtgcaatggaaattttgggatagttaattactttaaaagatcaatcatctttcattttgtatgttgtgtgccaagcacatgcttgaacaccaaggaaaaactacaatgggaataaaggcttcaggcctgtcaataatgtaaatttttctcaccattgcttttctcttgtctggagcatcagggagctagttggcacatcattttcttgctaagtatggtcattctgtagactttgatgttcaggttgtttcctgtccccttgccccctttgctcccatccctcggggaagaatcttagcgaattcccttccctgctatgaatgtgtaatctgttttgttgggctttgccaggggtggagaaggccccaaagnagaatcattctttttaaagtcaccctatcagtcaggttagttgatgcctggtcctcaaaggttcaaaacattcctttgggggtagctgatgggtgtctccttacaaattttcagcgtttaaagggaggcatagctgaggtgtatacccgtcgaaggtttatgaagagcttgagatgtattgcctcaggactgtgataaggttgcggagttttgatactctgctcaaagataatcaaactcagtagtttttcagagttggcctggatttgcgatttagatgtaataggagaacatgggatccatcgctctccaattggctattttattttttgtagccacttggtttctgtaacctcacttgttgagcatcacctatagagcattatgaaacataaagcggatgggtcggtcatatcatgactcaaggtttagctgcttattgttcgtgacgaaggtgttgctgatatgtctttcattgtgatattggtatttgttcaactgttaaagctttagctgttggggcctgtagcatggtgtaaagctcttttattatttaaatgttaccgacgtcttggttgaaaaa

SEQ ID NO: 26920 - DNA, 1008 bp, Glycine max
  Clone ID: TF_GmC801229_1
agaatgaatatgacctaaattttttgaacttttgagaatttgaaaattttcagaaattgctgtgtgggagtaaaagctcattgtcacggtggacatgtgcagatattagaattttgtcttacggcaccaactgtacctatagaatttgctggacaaaaggaatctaggaagtgctctctttcacaaataatggggaaatcacgaaagtactcaaaaggtcatgccaccggttttgttccagattttcgccatgctgttgagactatgggtgaatcagaaggacttggtaacttgggaagggttgataatgagttgacaatgtcagaaatttcatgtgccccaaagagaaaaagggttgatgagagttttgatgtgccatttcaactgttatctttaacaaagatggcccgttctgggagaaaggacttgacactgagattaaaatccgaacttgaagaagtaaggaaacttcaaaagaaaattgctggtatgagttcaatcactactgaattatctccatatagtgacataaggagctgcagtgtgggagagaagaggcctccactggaatcattagcactgcatggtaagaagcgcccactactaaagcataacggtcctaaaacaaagagaagtatttctgggcgatttatatctgcgaaatctgctgcaccagtaactccttcatatgccgtgctgatgaagcagtgtgagacattgcttaagcgcgtgatgtctcatcaatttggtaaagtttttgacaaaccggttgacattgtgaaatggaacattccagactatttcactatcatcaagcacccgatggatttgggtactgtgaagagtaagctgatttcgtgtgaatatacaagtcttatggattttgctgcagatgtgcggctgactttctcaaatgcaatgagttataatccaccgggcaatgatgtgcatgtcatggcagagacactaagtaaatattttgaaacaagatggaaagctatagagaaa

SEQ ID NO: 26921 - DNA, 2520 bp, Glycine max
  Clone ID: TF_GmC4550_1
cgctcccgccgcgcggccatccctcttgtgtctccgccgaggcttttgctgggcgtgcacctgtgaggtctagcaagcaagaacaaattcacaattccattgtgtctactttgcttgctttgatggatggccttgactctcgtgggcaagttgttttaattggagctactaacaggattgatgctattgatggagccttacggcgccctggtagatttgaccgtgagtttaactttcctctgcctggttgtgaggcacgtggtgagatattagacattcacactcgtaagtggaagcatcctcctccaaatgagctgaaaaaggaacttgcagctagttgtgtaggttactgtggtgctgacctgaaggctctttgtactgaagctgccatccgtgcattccgtcaaaaatatccacaggtttatactagtgatgacaaatttgtcattgatgttgattctgtcaaggtagaaaagactcattttattgaagccatgtctaccattactcctgctgctcataggggagctattgtgtactctaggcctttgtctctagtagttcaaccatgtcttcagagacatttagagaaagccatgtgtagtatatctgatattttccctccagcttcaattacatcagagttgaccaaactttcgatgctctcctacgggtctgcaattccacttgtgtatcggcctaggcttctgctttgtggtggtgaaggtacagggctggatcatcttggccctgcggttttacatgagctggaaaaatttcccgtacattcattaggacttccatctcttctgtcagatcctagtgcaaagacaccagaggaggcattggtacatatatttggtgaatctagaagaacaacaccatcaattctctatttaccacaatttgatgtttggtgggagactgctcatgaacagctccgggctgttctcctgactttgctagaagaattaccatctgacttgcctatcttactgcttggtacatcctcagttgcactttctgaagttgaggaagtgcccacttccattttccctcatcgctcagtttatgaagtgaatatgccatgtgccaaagataggactttgtttttcaatcttttgatagaagctgctatgtcaatattgttggagggaatcaacaagaaatctcaagacaccggatgtctccctgaacttcccaaggcaccaaaattggctagtggtccaaaagtgtctgagctaaaagcaaaggtggaagctgagcaacatgcacttcgtagattgcgaatgtgccttagagatgtttgcaaccggattctgtatgacaaacgatttaatgccttccattatccagtgacagatgaagatgcaccaaattatcgttcaattatacagaacccaatggacatggctaccattctgcagcatgttgataatggtgactatattacaagtgctgcattcctgcaggacatcaatctcattgtttccaatgcgaaggcttacaatggagaggactacaatggtgctaggattgttagtagagcttgcgagctccgtgatgcggtgcatgggatgctctcacagatggatccagcactggttgcatattgtgaaaagattgctagccaaggtggcccagttcagttgtctgatgaattaggggattctacattccctgctactcctgttgtgcagctgggtcaaagtactagaatgagtgctcgacttcgccatgtccaaccagaagttaatatgaatcagagttacgaagtattgaagcgaactaagaagatcgctgaagtgcatgcagaagacaagtcacaagaagattcggtacccccaaagtcttcccaggagcatcaagccaatgacacaaattctgaaaggctggaaaatgtgtcaattgaaggagatttgcatggaacttttacaaataaccttgctgatggcaacagtcctgatgatgtcacaatgctagatggtgaattttcaggagaagtagagtctgtcaagcagctttttgtgaagcgtagtgaaaattacagcattccacaacttgaaaggctttacacgagagttatgaagggcgtgtttgaaaccaaaaataaaggagtgaatggggatcttaagtcttcggttttgaagtttttgttgaattttgtagaggatgatgcaaatttctaattactgggtttttcttctcctccaatgatttagaaaaaggaaagatttttactgtaaagtcgggatttttttaatttaaattaaatgtcatttgattgagtacaaaaattccctttcttctcccttcccgagagccacaattgtccaaagcgatgtatagtagtgtgtaaccatttattctgtctctattctgaattatcgtaattataggatattaggattagatgaaaatagaaagcttaaacgtcaatggtcagtcagagagatagaactttttttttgttgctgtcaacctatagcaactactattaaaaaaatatgttctctacct

SEQ ID NO: 26922 - DNA, 1564 bp, Glycine max
  Clone ID: TF_GmC5690_1
gcgtttcactcgggcgaaggagggacgcgcgagagcagcgaggtgcagagctccgcgagcttaatgcgtaagaggaaatcagaaccgttggttggggttttggagttgatcaaggggcacgaacacagctcattgttcgagcgccgtcttgatagccagggggatacggatagatacaaagacctagtgaaacagcccatggacttggaaaccatacaattgagaccccaaaagggtcactattcctcatgcaccagtgcattcttccgcgacctcctcctcctcttcaccaacgccaccgtgttcttctcccatgactccctggaatcgcaggcggggcggcagctgcaccgccttgccaccgcggagatgaagaaccacggccaagcacaatcggatcctatcccccggaagaacgattcactccctacaaatgcaccaattagctaaaccagattctctcctttacaagaacaaagcctctggtcctatattggggtggcgcaaacgcagttcaatgcgacgcaaaccttcctctgccacctttggccaaaagggtgaccaacccgtcttcaatgacaagaaggaaaggccatcttctgatgcgaagccacccatgaagccctcttcttctgatacagacgaagaggagcttcccaaagctaaggaaaagcctgttactggagcaagaagcttgaggcggagcaacaagaacctcaatagtaatagtagtaataataataataagaaaccgtcctctatctccactcctaaggcagggtcctcggggaacaagccttcggagactgttaaaccggaaaagagaacgttccaagaaatgatttccaaagcttcatagttagcctcttttgttcctctcctgtatattaattattattattattattattattattattattattattgtcaaagcatgtgtttttttgctttaggaggaggaagtaacagcagcagcaaatgttggcggaggtggtaatggtgccaaagagcagaagaaaatggtgaacaatggaaagggagacaaagggaaagaaagggcatcaaggcataataacgttggaggaggttcaggctctgcggataaaaggaataataagaatacccacgcgtccgctcagtcaaagaggagtgttggtagacctccaaagaaagcagcagagacaaatgcaggtagtgcaaagcgtgggagagaaaatagtgctagtgctggaaaggataagcgccccaagaaacgttccaagaaatgattccaaatttcatggttagcctcttttgtttgtcctctgtatattaattattattattactattgtcaaagcatgtatttctttctttattttattttatactgctaatttattgatcagctgtagcctgtagtcagttgctaggtacatgtaacagtattttgatttgggctaaaaccttgtaacaacattgtcctcttggggactgcttttcttgattttttggtttaacaggaaagtatagtcaaagcttgtgcttgttttggtcaaaaactagaaaaacatggaaaatg

SEQ ID NO: 26923 - DNA, 1606 bp, Glycine max
  Clone ID: TF_GmC12104_8
caatttgagagtgatgtatttttaatttgctcaaatgcaatgcaatacaatgcaccggagactatataccacaaacaggcgcgatcaatacaagaacttggacggaagaaatttgagaagttaaggattggctttgagcactctcagattgaactgaaatcagaacaaaaagcaggatccaattatttggttaagaagcagccaaagaagccattggcacgtgcctcacaagaacctgttggctctgatttctcctcaggggcaactcttgctactattgcagatgtacagccaacttcccatctgatgcaaggtggtagatgtgagaggtctggcaatcttgatggtattttggaggcaaatgctttctggattgatgcaaatcaagagaaagctgaagatgttttgttagggaaaggtcttctctctaagtggggaaggaagtcctttgcgcttgatgaaagtcgtcgtgcatcttacaatatgtccaatcaaccaattgttaaaccagattcaatatttatgacctttgagagaggaatgaagcatctggttactgttggacttcatgcagaatattcctatgctaggagtttggcccgttttagtgcatctctaggacctattgcttggaaaattgcttcccacaggattcaacacgcactgccagctggatgtaaatttggtcgtggttgggttggagagtatgaaccgctttctaccccaatattaatggttaataatcgtgtccaaaaagaaaatagtttggttatgaagttgcattccactactgaattaccaaagggtaaccaaaattgtaagaatgtggaatccagcatcatgcatcctgtaaatggacagatgcttgagggaaaacgtccttcaatgcctgatttcaaaggaaaacctttatttcaatcacacaaacagccttaagttgattgctagagctcatcagcttgttatggatggatttaactgggctcatgaacaaaaggtggttaccatttttagtgcacctaactactgttaccgatgtgggaacatggcttccatattggaggttgatgattgcaagggccacacatttatccagtttgaacctgctcctaggagaggagaacctgatgtcactcgtagaacgcctgattacttcttataatgtagctgttgaatgtcatactgttatatcatggttacctctactgcactaattttaggtagtagcgcatcctcatcacgagattgccgtaaacatttaaatccatggatatacgtgttccgtgcttttggggttgtccaaagactgctttgatgcataataggcaggtaacattccactgatctgttacactttgaggaattgctggacaccttgtctggagaagtcgccaagatgatgtcagaatacatattgttccagcaaaatgtggatattttttgtttgtttttcatcttttttgtctcttatgttcagtaaaacccttttatggctttacaagctatatgactggattttttttttttgtctcgtggatgtttttgtcatgttctatcattttcagttaaagttgcatgataatagtgattcatttttgttcttacg

SEQ ID NO: 26924 - DNA, 1413 bp, Glycine max
  unsure (1)..(1413): unsure at all n locations
  Clone ID: TF_GmC303_4
gaaaccagactgatatactcttagtgtcttacacacactgtggctttggcagcgcgactcgtcttcgttccttaccctcgggttgatctgtgagaggggcttgatagccctctctctctctgctgctgcaattcagattgttggcaactattttttatacagacgatttgtcttcacatggaagcattgcttgcttgagggacgcctttgtctcaaaggagttggaattttcgggttttttgtgggattggagatttagagagtgcccttgcactccctgttttatttcatcaccatgattgccactgaaactatagtaccaagtacaaaattgaagatcaagttctcaaccaaaaggatagagattgattctgggccaaaatgtgagtttggacagaaagtgtatcacaatgataaaaacaggcgctgtaattctaatgaaaattcctcagcactgaattctaacaagaggggaccaccagtaagtgttgagggccaaaaggagaaaagacaaaagattgatcggaaagggtcgatgcagtgtgctacaatacttaagagtttaatgtctcactcatatagttgggtgtttcttaagccagtggaccctgtagcattgagtattccagattattttacaatcatatctcatccaatggatttgggcacaattaaatctaagctggagaaaaatatttattctggcactgaggagtttgcagctgatgtcagactgaccttctcaaatgctatgaaatataatcctcccagtaatgatgttcatttgatggcaaaggaactcagcaaaatatttgacagaaaatggaaagacttaggtcggaaatggaagtgtgaagatgagcatgataaaagcgaatctgaaacaattaaggaaactgggagaaaaagtcttgacatgctgtcccggcatagagattccttgcccaaaaagacacaagtatctgaacacaaaggaatgcccaagattagatcattggcaacaaaattgcaagcgtgtagttacctaattcccagacaagaggtaattaaggcagatatagtcaaaagactagattccaaacaatatgtgcatttacaataattgtctgtttccctgtctaaaaggatataaacagttagcgctggcagaactgaatacaccttcatgcagttaaaaatttccccttcttcaaagcctccgttcaaaacctcctcatcttcatctgcggtaaagtcttccttgataaataaaccaagccgctccaatgggttctcaaactgaggtttatccaatgtctccaatgcaactttgtagccatttctacagcccacggctttataagatagcgtgcatccactcaaactttcaagttctttaataatctncacattatgttctatatcaacggttct

SEQ ID NO: 26925 - DNA, 383 bp, Glycine max
  Clone ID: TF_GmC1259_1
gagaatgtactaaaccgattgatgtctcatcagtttggttgggtttttaacactccagttgatgttgttaaattgaacattccggattattttactgtcatcaagcatccaatggatttgggtactgtgaagaagagaataacctctggcgaatattcaaatcccatggattttgctgctgatgtgcggctgactttcgaaaatgcaatgttttataatccagctggcaatgatgtacacacatggcagagacccttagtaaattttttgaaacaaggtggaaggccatagagaagaaaattcctgctattgatagtgtcgcatctgagccttcaagacctactcacgtggaaacagaaatttctgatcgagttcctcccccc

SEQ ID NO: 26926 - DNA, 946 bp, Glycine max
  Clone ID: TF_GmC12104_17
aattcggctcgagtgcgagaagacgacagaagggggacacttatggtgtgtttgcggaccctgttgatccagaagagcttcctgattatcatgatgtgattgagcatcccatggactttgctactgtgaggaagaagttgggaaatggatcttatactaccttagaacaatttgagactgatgtctttttaatttgctcaaatgcaatgcaatacaatgcaccagagactatataccacaaacaggcacgatcaatacaagaacttggacggaagaagtttgagaagttaaggattggctttgaacgctctcagaatgagctgaaatcagaacaaaaagcaggatccaattatttggttaagaagcaaccaaagaagccactggcacgtgcctcacaagaacctcgcttaactgatttggttttggtatttttccttgctactatatgagatgtacaaacaactgcacatctgatggatatgggtgtcaatgcagggaatgctaattagtttgcttggaaacttgtctctgctttcatactttgccaagaagagagaaaaggaagccatggtagtgcagacgttgggtgtggtttcaacatacgtggtccttgttcagctggcattggctgaaaccatgccgttgccttactttttggctacttcagttgttgtcatctctggccttgttctgaatttcttgaattactttggtatactgaatgctggaatctggcgcttttgggaagatttcattacaattgggggtttatcagtgcttccccaagtaatagtgctttccttctctcaccctaggatcaatacattatcaatttataatggcataatatctgttcacacagttggatacactattcttttatcacaacttttactacttatctcacactgcctaatttacaatctggatgcagacggacgcgtgg

SEQ ID NO: 26927 - DNA, 2375 bp, Glycine max
  Clone ID: TF_GmC533_1
tcgatcaagaagggataaaaagccggcgatgtccagttctgcaccaaggaataaagcgaagccgggtaataagaatcagaagcctcgtggatggaaccggggttcttctgggaagtttgagtctgcggtccagtctgcttcaccatccactgcgaatgctatgttgatgaaagattgtgagttgctgttgaaacggtgagaagcaaatgagtatgcttgggttttcaacacccctgtggatgtggtgaagttgaatcttccagattatttcactattattaagcgtccaatggatttgggaacagtaaaaagcaagttagctgctggagaatatgctggtccactggaatttgctgatgatgttaagcttacattttcaaatgcaatgaactataatccgtctgggaatgatgtccatctcatggctgataccctcaataaatattttgagttgagatggaaagcaattgagaagaaactgccaaaaagtgatgttctgccaatacctgcaaagccagacaatagtgaaggtgtaaaaactaaaagacaagcgcctccttcaaaaaagaggaaaattgcctcattaccccctcaacctaaagttatgccacctacaaagaaggttatgtcggatcaagagaagcatgatctaggtcgagaattggagtctcttctgggagaaatgcctatgcatatcattgatttcttaaaagaacatagttcaaatggtagagaatgtggagatgacgagattgagatcgatattgatgatctcagtgatgataccctgttcacattacgaaagcttttggatgactttttgcaagagaagcaaaagaacaaagcaaaagttgaagcatgtgaagtagaggtgttgaatgattctggaccaagcaattcctcattgcaaccatttaaaggtaatgatccagcggatgaagaggtggacattggtggaaatgagccccctgtgtcaagctattctcatgtggagattgaaaaggatacaacttacagagtgaacaaaagcctaagcccaggcagctcaaatgatacagactctgatagttcttctgatagcgaagccgatgatgttaaagcaagtccagcaaatgtagcaaaggcaccagaaaatctgggttctgaagctcagttggatgaaatgaccatggctgctgctactcttgaaagaaatcaatctgttagtggcttagatcaacttgaggataactctcagcataagccaagttcttttgattctgattgccaacaagatggggacagtgctccaactgagagacaggtctcacccgataaactttatcgagctgctgtattgaagaaacgatttcttgataccatcttgaaagctcgagaaaagacactgacacagggtgaaaagggggatcctgagaaattgcgccaggaaagggagaaactggagatggagcaaaagaaagaaaaggcaaggctacaagcagaagcaaaggcagctgaagatgctcgaaagcgggcagaggaagaagctgctgcagaagcaagacgaaaaagggagcttgagagagaagctgcacggcaagcattgctccagatggaaaagactgttgaaatcaatgagaattctcgaattcttgaagatttggaactgcttagagctgtacccactgagcaattgccaagttctgtagatgagacgagtcctgcacactctcaggatggtctgggtagtttcaagtttgggagtagtaaccccttggaacaactaggattatatatcaaagccgatgatgaagaggaggaaggagagccaccctgtattccaaatcctgtaaatgatgtagaagagggtgagattgattaaaagttatgcacatattgtatgataaattgaggatcgaagtatacttaatcttgatcccaaaaaagttcccaaattaatgcattaacataagtgggacgaagcatattttcttatggaagcattcagcttctagaagggtaatatattcagttttgggctgtgatggcaatagaggaacagtttgaacagaaactaagctatgtttggggctgtttgcaatgaaaatagaagtaatacatcaaccttcttgtttttatcaatactggctggtggctagaggctaaagcatcgcatcccttcgtagttcgtatgggttatgttgtacaaaaaaaatagaatttgggaacatacattgttgtagctccatctttggatacttcgcacttgtatttgtgtctggctattcctttattaacttataattttggttaaaattttaagggatgtttcatcttcagacattgtaaacgtttaggtatacagcgtaagttaaggaaacaagattaattgtccc

SEQ ID NO: 26928 - DNA, 745 bp, Glycine max
  Clone ID: TF_GmC7409_1
aaaaggagatctgttactgagttagaaaagattggtgcagattatatgccgccaacaaaacgccaaagagggggagggggagaggttggtttggcaaatatcttggagagcgttgtggacaccattgtgaaagataggtatgatctatcgtatcttttcttgaaaccggtgtcgaagaaggaggctcccgactacctggacgttatagagaggcctatggatctttccagaatcagggagagagtacggaatatggagtacaagagccgagaagatttcaggcacgacatgtggcagattacttttaatgcacataaatataacgacgggcgaaatccaggaattcccccgcttgcagatatgcttttggaatattgtgattatttgttgaatgagaatgatgatagcctcactgaagcagaagctggcattgaaattagagatttctaaaccatttcaaattcagatcatgatctggaggtctgtttggtagagctaaatgatttttcaaatgttgtgtaaatatggttttaaaagataccaaaatgcctcctgtatttttattaacgatatgcaaagagggttgcaagttgtaaacaagggtgatgtatcaaccatgtagctcgttaaattttcagcgtgtaacaatgtagattgagaccactaaaaagaattcttttagatgataaacaaacaaaataaaagcagaatagcagtagttatggacaaaaaatatatatatggg

SEQ ID NO: 26929 - DNA, 519 bp, Glycine max
  unsure (1)..(519): unsure at all n locations
  Clone ID: TF_jC-gmXLIB3563P012bc09d2
gcctcataacgacaattgaattaacaaggatgagtttgtatatatacacatgtgacagctgatatttaccaccacaaccacctatgaccaccttcattttataaaaccaaattacccaccaactaattctccaaaattggattaaagaatgaaaaacaatgttaaaagaaacctataaaatccaatttgagctttctatatcctttcaagtttccttctaaaccattctgatattctcctgatcttgcccaccagctgaacattctttgtaattttaaaatattcttccgcatttgataacattatcattatatcatggttgacaccttccacactccgatagtagtcattcttcaaccttgattgaattagttcaggatagaatggggcaggaaacctgtaatacaaatccaaagatattaaagtcacacatttaactagtcgctgtctctgacattnttacattntgtttacttagtttcaaggactggaaatttctagaacaggtctgtataaaaa

SEQ ID NO: 26930 - DNA, 471 bp, Glycine max
  Clone ID: TF_GmC343932_1
ggtcacaatgcctcttagcagtagaacagttttgtattcacgagtgctcttggagtagaagactaaggcattgttagtgagtaggagcaagtccctgaaaagttctacactcgacttaattgtctggctgctaattcttgaccttatagtgtcaaagtccatatgttgccggatcattttcttgtaccttcctctcttctgactatcaagtctgcgtcggaaagccggagcacctttagtttcaaatataaaatccaaaatctccatcatgtcttccaccctatccttttttaagttcctattttgatcatctacaccacatgatttggcaacttcaccacagttgctggtcgaactttctttacaccatgacacaatgtcagccgaatctaacaagtcactttccccaacacttgcttccttcatatttctgccacaatccttcctcttcctcttccctctccgtttttt

SEQ ID NO: 26931 - DNA, 400 bp, Glycine max
  unsure (1)..(400): unsure at all n locations
  Clone ID: TF_uC-gmroLIB3258057e03a1
gtaggtagataccaattttatttcatcaattccagtaattatattgtattctttagtattacaataagacttttctccctcacatacaacaacacttactctagcatcttttgttgccaatgatctaatcttgggcattcttttgtgttcagatacttgngtctttttgggcaaggaatctctatgccgggacagcatgtcaagactttttctcccagtttccttaattgtttcagattcgcttttatcatgctcatcttcacacttccatttccgacctaagtctttccattttctgtcaaatattttgctgagttcctttgccatcaaatgaacatcattactgggaggattatatttcatagcatttgagaaggtcagtctgacatcagctgcaaac

SEQ ID NO: 26932 - DNA, 2097 bp, Glycine max
  Clone ID: TF_GmC4529_1
cccggggacgagctagtgtccggcattgtgaagttgagaagatagcagaagaagaagggaagagatccattccatggcgtcgtcgtcttcaaactgaagaccggagagagtcaccgtcgtcactttccggagaacagaacagaacaagtgcataagagaatcatcgaattttcattcctttgtatagaagatgaagcgcaagcgtgggcataagaaagggaaggcaaaaggcagcactaaccatggaagcagtggtgctgatgctaacaaggaagaaacctctggtttggaggttgacacaccttcttccacggggaccgggatggatcagcagcagcattacaatcttgctaacataaatcctgatggttctgttgataaggctattgggcgtgttaaggtgaagctcaagacacctaaaatcttagactcccaacccacctcatttgatgctcccagtcccacacaaagcgatactgagagaatggaagatagtgcaaattctttgcctgatatgaaactcagtactctgtttaagagagctgctagcattaaaattaagtcttcatcaaaccacacattgtcggcttccactgagatcaccctcccaaaagaaagaaagaataagcaggaattggatgcttccttagtggttttaaggaaggtaatgaaaatggatgcagctgaacccttcaatgttcctgtcaatcctgaagctctgggaattcctgactatttcgatatcataaacacaccaatggattttggaactatatgtaacaatcttgaaaagaatgaaaagtatatgaattccgaggatgtatttaaggatgttcaatacgtttgggacaactgttacaagtataacaataagggtgactatatcttggatcttatgaggcgagtaaagaagaactttatgaagtactggacagcagctgggctatacagtgaacaatcaaaagggaccaaggagaggacttcagcagaagatattgcactttctggtgatggaaaagcagggaagggtggtcaattgaagcagaagacaaaaaagcgtcatggaagacaccataaacatgattgtttatgtgctatttgtgttctaaagcgacgtaggaaggaacgggaagagaatgctcgaattgctagaagcaattttggatctggtggtgataagcatgctaatgagtttaagcacgaggaatcaatacaagtagagagtcctggtggtgaagattcatcatcaaatatagatgaatctatgggcactgatggagatgttgatgaagacaaaggagaggtggcaaagatggagattgctgagaaggagttgtagcccttctgagagaaagcatgtgagcattgatgttgataatgatgatgacaatgatgaccatggcctagaggaaggggaggaggaggagaatggagaggaagaagatgaggaagagattgaaatgaacagccagaagggagagatgaatgaaactttaaaacatggtggaaccttggaagagaaatcaaatgttggtgatgcaaccgctctacatgatgaatatagaacaaagcaacaagaaggacaatctgcggcagtccagcaacagaagaaacacaaggggtcacaagataaacagcagaaagctaagctccttgagagcttatatagtgaaaaccacaagctttcaagtttatgtggaattctcttcccccaaaatagtcagtctgtctggagtggaccacactcactaatacagaagagaaattctgctcgtactagttcaattcacgctgctattaggactttcatggggtagcttttatcttgatcagtttattacacttcccagcagcctatgtcattaatattttagttgacatcccttcgttacatgatgtgtgtattatagtcacaatttcttggtagcaacagcagattttgtaatttttctttctgttctttttattttctcgttatgctatggaatgacgtatatgaaagaatttgtgcttcaaacccgttttactttataaatcatgaaagtaaaagtaaactgccccttgcagtcatagctcaagtggtcaagtttcgttttg

SEQ ID NO: 26933 - DNA, 1789 bp, Glycine max
  Clone ID: TF_GmC629_1
ctcgagccgcgaaaccgaaacaaaaggcagagcggtagcatttaaagggagaaccggtgccgtgaagcgttatcttatcactcaaatttagcttcggcaccgtctgtgtttctctcatctcagccatttcactttccctgtgatggacgccgatcctcctcaacttgatgatcatttggaacctttcagggtttctgtgaatcaaattctcaccacagtcaacaagcttgagaagcaagtgactgaggttgaacagttctatgaatccactgataatgttcaaggtaataactctaaaggtggctcacttgcaaaagagaagggcagggagaagcatattactggtaccaaaaagccactgcaagatgcatcacatacagaagcttcttctgcaaagagaatgcaagagcttatgcgccaattttccacaatattgcgtcagataactcagcataaatgggcttggccattcatggatcctgtagatgtagaaggtcttgggcttcatgactattatgagattattgataagcctatggattttggtacaataaaaagcaaaatggaagctaaggatggcacaggatataataatgtccgggagatctatgcggatgtaaggttgatattcaagggaaaaatggctgcaacttttacctaaaatgatgtccatgttatggcaaagaccttgctggaaaaatttgaggaaaaatggctgcaacttttacctaaagttgctgaggaggaaaagagacaattagaggaagaagcacaggcacaactagacattcagcttgctctggagaccacttatgccaataaggccaaggatataagtactgagctttgtgagattgatatgcatttgaagagtctcaaagaaatggtgattcaacagtgcagggcgttggatataattgccgagactaacccaatgttccaaccttcttctactgaagatgtggtccttgacttagatgctcagagtgactacactctatggaggttaaaggcttttgtaaaagattcactagaagagcaagtaaaggtcaatgcaggcgcaggtattaatcctaatgataaccctgatgacaagaaaaacaagaagaggcgagattctggtgattcttcgggcaagacaaacccaaaaaggaagaaactatctacattgtgattcattagttgcaacataagagacattagtttagtgtgattgagttaaagttgctgaagacaatgagttggacaataatgcaattggaacaatctggaaatccttctatagatattcactgctatgttgatgatgccaataaaattccttaatttacaacattgtttggcctcaagtgtgctttgtaggaactaggaagcgaaacctttgcaattccatgaacataatggaaatcgtttacccgttgggtctagttagtgttatcttgttctgaggatattctctaattctcaagatttgagacatctatgcctgcaaatggttagttactatatgcgtagaaagaaaatccacgtcgtggccattaaatgtgcagaagcataggaaaaactgaaaaagcttgcacaagcacaagtaccttaatggagcagcttagatcactaaattgtagggacctcaatatcattttttatttgttggcaacatatttgtatttgttaagagttgtgatgagatataaactcgacttgtacatgtgattctggatgctttttatttttgttatccgtatgaatggaagataatgtgtggaggtttataataatttatacaccc

SEQ ID NO: 26934 - DNA, 2954 bp, Glycine max
  Clone ID: TF_GmC1758_1
gaatgctcccgggatcttatactcctctcttgtctgtgcaatcaaaacaacaacattcattcatactgatcacttccttgcctattgcacattcttcatcacttcattcaacatttctctctcccttagctagtttttaccaatggcctgctgggttgtgctgcgtctctttcattacttcattcaacatttcccccttagcttgtttcccaatggctgctgcggttagtgctgcagtctcttttccatccaccaagtctacctctcttccaagcaggacctccctcattgccccagagagagttgtgttcaagaaggcttcattgcaaaacagagatgtttctagcagtggacgggtagtttccatcagagctcaagtcaccactgaggcaccagccaaggttgaaaaagagtccaagaaacaggatgaaggtgtggttgtgaacaagtttaaacccaagaccccttacattggtagatgcctgctcaacacaaagatcactggggatgatgctccaggagaaacttggcacatggtcttcagcaccgagggagagattccttacagagaaggacaatcaattggggtaattccagatggtattgacaagaatggcaaacctcataaactgagattgtattctattgctagcagtgccattggtgattttggagattccaaaactgtttctctatgcgtgaaacggctggtgtacacaaatgaaaatggagaaattgtcaagggagtctgctcaaatttcttgtgtgacctgaagccaggagctgaagtaacaataactggacctgttgggaaagaaatgcttatgccaaaagatccaaatgccaccatcatcatgttgggaactggaaccgggattgccccatttcgctcatttttatggaaaatgttctttgagaagcacgaagattacaagttcaatggtttggcatggctcttcttgggtgtccctacaagcagctcattgctttacaaggaggaatttgagaagatgcaagagaaaagtcctgacaacttcaggcttgacttcgctgtgagtcgagagcaaacaaacgagaaaggggagaagatgtacatccaaacccgaatggctcaatacgcagaagagctttgggaattactgaagaaggataacacttttgtgtacatgtgtggactaaaaggaatggaaaagggaattgatgacattatggtgtcattggctgccaaagatggcattgattggactgagtacaagaggcaattgaagaaagcagagcaatggaatgtcgaagtctattaatttctgttcacttgcacaaatatcatctcctactttatgctgcagcaagtctatcaaccctcctgcgttgtgtagatatatgacgaccctgtaatttttctttgacgatttttatactgttcatgaacaacttcattgccagttttactagtactatttttgagggatgatgcaatatagatgaatccaacttcactgtgtcatttccaaaaaaaaaaaaaaatttctgtagttcactgcttgaaaaattgatgagacacaagcatggttgggtgtttaattctcctgttgatgttgagactcttggtttgcatgattattttactatcatcactcatccaatggacttgggaactgtgaagacaaggctgaacaagaattggtacaaatcaccaaaggagtttgcggaggatgtgagactcacttttcgtaatgccatgacatataatccacagggacaagatgttcatattatggcagagcttttatcaaagatattcgaggacagatgggctataatcgagtcagattacaatcgggagatgagatatggctttgattatagggcagctccccctgcaccctcaccttgtctagaagtctgcatttatgatatgaaattttggatagatcattctgaacagactccaagactcatgagcatcactccatccagtagaactccagctccaaaaaagccaaaggcaaaagatcctcataaaagagacatgacatttgaggaaaaacaaaaactaagcactaaccttcaaagtttgccttcagagaagcttgatgctattgtacaaatcattaagaagagaaattcagcacttaatcaacatgacgatgaaattgaagtggacattgatagtgtggatgctgagactctctgggagcttgatagatttgttaccaactataagaaaagtttgagcaaaaacaaaaggaaggctgaacttgctcgagctagagcagaagctttgcagcagaatgccatccagaagagtcaggcaccagctatggcagagattccaaaagaaacacaaacagatgaaaggagtcttccccaacccttgcctgtgcaagggagaaatcaagcggataatgggagtaggtcaagcagttccagtagctccagcagtgattctggttcttcttcaagtgattctgatagtgacagttcctcagcatctggatctgatgcagggtcgcaagggacctgactatgctctgtcagatctcagatttttagagtagatagtgtcttgatgccagcctattttggttttttgaagcttccagattatggattttagtgtaacagtcgggttataaaggaagcgttctgaaggccgtgggtgatcctcctgatgcagcctgggattttttcttcccatttgtttgaactgctactccaatgctaatcgtggccttgttggaattcttgacacaaattcttgtataatatttggtaggatgtgatgatagttaggtagctagatttccgtagcatatgtacattgctaactactgctgcgcattgagttccatttataacttattttttacttttgtgctagcagattcaagatcttggtatcatacgaagataatatgtaattcattcgtgaaatctcattccgtgtagtttac

SEQ ID NO: 26935 - DNA, 392 bp, Glycine max
  Clone ID: TF_LIB3138-023-Q1-N1-B1
attaaatctaagctggagagaaacatttattctggcactgaggagtttgcagatgatgtcagactgaccttctcaaatgcaatgaaatataatcctcccggtaatgatgttcatatgatggcgaaggaactcagcaaaatatttgacagaaaatggaaagactttggtaggaaatggaagtttgaagatgagcatgataaaagcgaaactgaaacaattaaggaaactgggagaaaaagtcttgatgcaatgcttccccggcataaagattccttgcccaaaaaaaacacaattattcgaacacaaaggaatgcacaagattagatcattggcaacaaaagatgccagagtggagacacctaaattatcacagattccttgcaagttgattg

SEQ ID NO: 26936 - DNA, 1247 bp, Glycine max
  Clone ID: TF_GmC105619_1
gaacaaacaggcatagccgttcaattaattcaaaattttaaatttttgtaatatcaataagtatttacattattttggatctgggacagggtttaatttttctattgaaaacaaattccaatgaacaatgagaaaatacaattagagcgactatattaacaaccagcctgtcacctagtttaatcccacaatataatttatgctatggaacaactgtttgcccaagcacaagactaacagggataacgcaattcacgcaactacgctggatagcattggctaaagtaacaactactatgaaataataaattagttggggaaaattaactatatacaaaaataacatctttgggtctattgaagtgtccctactgaattttggtaccaggctggaggcctgcttgcactttgctttgaaagtgggcttctaaccttgtagaacatttgtaataaatggtttctggagaattataggtgcgtgcattcgcaaacattcttctggcatccgcaacaaacatctcaaatgttacataatattgctctgaatccaccctcttagacattgtcttcaaatccattggatctttgatgatgtcataataatcagggacatcccgtgcatcaactggttccttgaatggccaagcatcagcgtgatcgaacattgactttagaagtgaacgcataaacccattcaaatgtttttgattagtagcattgtcagaagaaacatttaaagttctgaatcgtgaatgaccccactgatcaggagtccacccagcctctctcaaaccagggatgtcatcaataatttttttaggaataccagcttctttcttctgaaaatcaattccagcataaacgatgtgacagtttgacagctctctgattttttcatcaattgcctgcctttgacgacggatcatagttgacaaatcagtgtaagggagctttggatcaatcttgcattccatgagaattcctccatcgtaatcctttatataaccttgccatcgatctttctccaagtgaatctcttttgtaaatccctgtttgataaaatagccaacagcattattgtcagcatatgtgaggaaatgtgtcagcccatccatatcacgtgcaaactgttttaagtgattcatcaatcgggtaccataaccctttacttgctcatcagctgtaattgcacaaaaggctatctcaccgaacctctggctagcatatgggcgatatgtaatgcctcc

SEQ ID NO: 26937 - DNA, 1035 bp, Glycine max
  Clone ID: TF_GmC399618_1
ggctcgagatctcaattactggggttccacatgatgcagttcaagtttttattcgattcttatacacttccagttgtgagaaagaagaaatggatgaattcgtcctacctttgttggtgttgtcacatgtatacgtcgtccctcacttgaagcgtgaatgtgaacagaagttagaactgagtttactcaccatagataatgtggtggatgtatttcaacttgccctactttgtgatgcaccaagacttaaccttatttgtcaccgaaaggtgctgaaaaacttcaaagttgtttcagaaacagaaggatggaaaacaatgaagttgagccacccagctctagaaaaggaaattgtcgagtcaatggtcgatgaagacattattaaaaaggagaaaatcagaaaaaataaggaaagagagatatatttgcaattatacgaggccatggaagcccttgtcacatttgtagagatggttgtcgaactattggtcctcacgacaaagactcaatagcaaaccaaccatgtaagtatacagcatgcaacggattagaattgcttgttcgtcattttgctggatgcaagttgatagtccgtggaggttgtgttcattgcaacaggatgtggcaattattggagttacactctcgattatgtgttgatcctgattactgtagagttcctttgtgcaggaactttaaagagcgaatatcaaaacaaatcaagaaagacgaaattaggtggaaaatattggttcaaaagatcttgagaacaagaggaattgggatagcatcatgctttctgccacaataactatggccatctggtgggtatatagaatgtgtttgtaagaaatggccttcaaagattaagtgtttctcgtctcaaccttattgatgaaataaataagaagcaggggaacacttttttctaatatttttatcttatttttttaaccataaaattatttgtatgtctaaagatctggacattaatttatatcttgtattcaataatagttatttagttagtatacc

SEQ ID NO: 26938 - DNA, 521 bp, Glycine max
  Clone ID: TF_GmC328_8
ctgaattttatgtatagtaataccttgagcattacttcaccacctgctttattggatgtgttgatggctgctgacaaattcgaagttgcttcctgtatgagatactgtagccgattattgcggaatatacctatgacacctgagtctgcattgctttaccttgagcttccttctagtgtcttaatggctgatgcagttcaaccattgactgacgcagcaaagcagtatcttgccagtcgatacaaagatataacaaatttcacatatgaccaggttccaggaagaggttatgggcttgcctctagctggaatagaagcaatattgtctagtgatgaactccaggttgcatcagaggatgctgtatatgactttgtgttgaagtgggtccgaacacagtatccaaaactagaagagcggagagaagtcctgggtacacgacttgcccgtttaattcgcttcccttacatgacctgtcgaaaacttaagaaggtcttaacctgcaatgactttgaccatgatg

SEQ ID NO: 26939 - DNA, 1017 bp, Glycine max
  Clone ID: TF_GmC935_2
gttaggagcgtgcgtgagaagacagcacctcatggtacggaatcggagaaagatgcttccgcggcggtgcacggcgtctatgggcagcagcaacgggagcgagagcgatgcgtcagacttggtgatgcggtgcccctcgtgcgaaggggaatacgacatggacgactcgggacccttcagggagtgcttcccggaggcccacgaggctgaggaggagctccgccgcgaaatcgaagagcttcaaaaccaaagtctccttcctcaactctcccctatcccaaactaaaagcttcaaccgccgaaatcatccccgttcccgtcgaagaattccaagccgttccaattcccgctcacaagcacctttctggttaagtcgctcttcctgttttcaaagcaatgcttgagaacatatggcagaaaggcggagtggcaccatcaagatttctgacgtatcatatgatacccttcatgcttttgttaattatttatacactgctgaagcgtcccttgataatgaattggcctgtaacctgttggttttaggagaaaagtatcaggtgaagcatctcaagacatattgtgaaaagtatttgatcgccaaaatgaattgggataaagctatttctaactatgcctttgcatatcaatacaattgcaaacaattacaaagtgtgtccttggcagtgatcttggaccacatggactcgctcactcaaaatgaatgttatgcggagctggtggacactaatcctcgtcttgttgtggaaatatatgaaacatacattggcaggctattaaatactgcaggcgcattttaggttataggaacagagctaaggaagctagtgaaatcatctttaagctggggtttgatacttcagttgggattatattcttgattggtaattagtctgttttagtattttaattgtacattatcatgcactaacagttaaacatgcaattggacctaacacctctttcattatagtattgttctttctagattaaaaaagg

SEQ ID NO: 26940 - DNA, 345 bp, Glycine max
  Clone ID: TF_LIB3056-012-Q1-N1-E9
ggaaatttctgttgtatgctgctattaaacatgcagggactccaacaactgcgttcaacaggctagttcagtgacattagcatttacattgagggtcaaggtctcattgctcgggctcataaagtcattctcgggatatatagcgtcctattaacaaagatgttcacaaatggaatgtgtgagagcaactcacctgaggtttgtttaaaggatgtgtcttcagcagcattgaatgctatgcttgaattcatgtactgtatggatctcaagtattgagcataatgatgacttgggaccattgtactccaacttcctctgttatctgacatattcttaatctttttt

SEQ ID NO: 26941 - DNA, 1443 bp, Glycine max
  Clone ID: TF_GmC523_9
ggattcggtgaactatagaaggccggccgggcgcgaataattcttcattgctctcaattatcaatggctccccaaaccatttccattctcaacctcttaccagaacctgatgtcttcattcacacttcccatggaacacgcattccagcccacgcacccattctggcttctatgtccccggttctggagaacttgatagatcgcccacgtaagcatcggagctccgagagaataatccaaatccacggcgtcccctgcgacgctgtcaccgccttcgtccgattcctctactcctccaggtgtacggaggaagagattgaccagtacgggatgcacctccttgcattgtcccacgtgtacatggtgcagcaactgaaacagaggtgcatcaagggtttgacccaccgtttgacgacggagagcgtcgtcgacgtgctgcaactcgcgcgtctctgcgacgcgccggatctccacctccgctgcatgaagctcctcgccaagaatttcaaggcggtggaagcaaccgagggatggaagttcctcgtgaaacacgacccctggctcgaactcgacattctccgcttcatcgacgaacacgaaacaaggaaaaagaaatcgaggaggtataggatggaacaggggatatacgcggagctgagcgaggcgatggagtgtttggaacacatatgctatgaggggtgcacccacgttggaccgtacgatgcggaggtgaagagggagaggacgccgtgtgggagattcgccacgtgccagggtcttcaggttctgatccgccactttgccacgtgcgagaagaaggttcgcggtggctgcgtgcggtgcaagagaatgtggcagctctttcgactccattcctatgtttgtcacgacaccgattcctcctgcaaggttcccttttgcaggcaatttcaattgagaatgcagcaagagaaaaggaaagatgatgctaagtggaaactactagcgaggaaggtggcctcagccaaagtcatgtcttcattgtcactgccaaagaggaagcgagatgaagaaacaagagtgacgatggacaatcccgggattagaagttttaaattactatgaatattcttataaataatgatgtataggacagtgtgttccgtgttagatacttgatagagcagtttctatagggagagagtattctgcttgccggtttgttctgtgtaaaagcagggtttttgatggtgtgaacttcttgtacttggctcttttacttgagaaaatggcaaattgagtggtaccttgtaagttgtaacggtaaattttgtttgtttgaacctcattttgcgttgtctgagcatttgagaatattgtaaagctagtgttcaatttgatgaattatttgtgtagaatattcaaatattcattttaaatagttatatttatccttggaatggt

SEQ ID NO: 26942 - DNA, 1444 bp, Glycine max
  Clone ID: TF_GmC523_10
ccaagctaagactcaacaatttgccattcaggtacaagaagttgttcacactatccaaacctgcttttacacagaacaaaagcagaatattctctccctgtagaaactgctctatcaagtatgtaacacgaaacacaccgtccttcctatacatcattcatcattcatcattcatggctccccaaaccatttccattcactaccacaccacccgcttcttacctcaacccgatgtcttcattcgcacttcccacggaacacgcattccagcccacgccggcattctggcttccatgtcccctgtttttgacaactttatagatcgcccacgtaagcatcggagctccgagagaattatccaaatccacggcgtcccctgcgacgccgtcaccgccttcgtcggattcctctactcctccaggtgcacggaggaggagatggacaagtacgggatgcaccttcttgcattgtcgcacgtgtacatggtgccgcagctgaagcagaggtgcatcaagggtttgacccaccgcttgaccacggagaacgtggtggacgtgcttcaactcgcgcgtctctgtgacgcgccggatctccatcttcgctgcatgaagctcctcgccaacaatttcaaagcggtggaagcaacggaggggtggaagttcctcgtcaaacacgacccctggctcgaactcgacattctccgcttcatcgacgaacacgaaaccaggaaaaagaaatcgaggaagtataggatggagcaggggctatacgcggagctgagcgaggcgatggagtgtttggagcacatatgctatgatgggtgtacccacgttggaccgtacgatgctgcggaggtgaagagggagaggacgccgtgtgggagattcgccacgtgccaggctcttcaggttctgatccgccactttgccacgtgcgagaagaaggtgcgcggcggctgcgtgcggtgcaagcgaatgtggcagctctttcgactccattcctatgtttgtcaccacaccgattcctcctgcaaggttcctttttgcaggcaatttcaattgagaatgcagcaagagaaacggaaagatgatgctaagtggaaactactagcgaggaaggtggcctcagccaaagtcatgtcttcattgtctctgccaaagaggaagcgagatgaagaaacaagagtgaatataaacaatcccgggattagaagttttaaattactatgaatattgtaatgaataatgatgtataggaaggacggtgtgtttcgtgttacatacttgatagagcagtttctacagggagagaatattctgcttttgttctgtgtaaaagcaggtttggatagtgtgaacaacttcttgtacctgaatggcaaattgttgagtcttagcttggaaaattgcatatgaagccttgcttaattttcgtcaattccgtt

SEQ ID NO: 26943 - DNA, 615 bp, Glycine max
  Clone ID: TF_9258031
tagggaatttggccctcgaggccaagaattcaagcctgaatctctttaagctagctaggaaatatgaagaaggggtttcagtttgcagggtatgataaagccaccataggaactataactcttgactgtcaaagtccctatggagagaagcgtaaccgatgtgcccttctaccacctaatgttcctattcttgctcattccttagaacgtacacaacgaaactggattgctaggtcaaattcccctactgatataattatacaagttggtgattctagctttcacttgcacaagcttgcaattgcctcaagaagcgaatatttgaaccggcttgtatttcagaggggaagcaacagagaaaaagctggtgacagcctcatcatccaaatgaaaaatcttccaggtggtaaaaaaacttttgaattagtagtcaaattctgttatggaagaaaaattgatattaccgcagccaacattgttccattgtattgttctgcacatttcttggaaatgagtgaagatgttgaagatggaaatctcatatccaaaacagaatcatttctaacctttctaatactatcttcatggaaagacacatttcgaatacttagagca

SEQ ID NO: 26944 - DNA, 758 bp, Glycine max
  Clone ID: TF_GmC248068_1
atttatggcctccatggaaataacagtagagcatccgcgcaccccttgaaaaccgtgtgttttcaatcaaagccaaggtcctcaccgatgagatgaggggttggaaccaatttgagaccatctacgaggaagaacaggagctttcttcaacctcctctccctttctttcaccatcttcctcctcttctcctcctcctcctccatcactccactccatagtcaatgcttggtctcttgactccgggtctgaaccagatgtcttgatatgtgttcaaggaacctcttttcgtctgcacaaggttcgtttgatatcacgaagttcatacctcaaacgacacctaacgggagtttctgacttaactctctccccgccgttaaacttaacggccgagactttcgccgcggtagccgaattctgttacagccgcagagtccacttaacgccgagcaacgttgccgccgttagagtggcggcggagttattgggcatgacgggggaagagaatctccgtgaagtaacggaatcgtactttgagagagtcgttggcattggcgcgtcgatggttctgcgttcgtgcgtggctctgcttcccgaagccgaaacgacggcgtcgcttgccagcaggtgcattgaagcgttggtttgggaagacgacgtttcgtgtatgagcgacgtcgtaggaatgcaccctcaggattttcaaacgggttcgtattcactgaacagacgggtacccaaccacgacgttctatacaag

SEQ ID NO: 26945 - DNA, 383 bp, Glycine max
  Clone ID: TF_GmC138527_1
gcggtttcgaacattcggaggaatttctctctcgctctctctcttcaattcaacacttcgagaatcgaaggcacagtaggtaaagagatttttcatcacacaccctactcaatcaaaaacttaagatttctgtatggtgggatcttaaaaaatatagtgattccaaatattaaatggggtgtctttgaactgatgatgaggtatgtataaactggaacagtaaatgtcaatttggatattgctgaggacctctggagagctgcagatcaatatcttctggaccaccttaagagatatttctgaggaaaatgttgcactaatgtatgtcgaaggaaggattgggatgttacttcatcaaaacatgcatgtatacggtttatgct

SEQ ID NO: 26946 - DNA, 1317 bp, Glycine max
  Clone ID: TF_GmC6774_1
ccacgcgtccgcaaccccgaaaccaaaacctccttcaaccacgctagttcaactcaaccaattacttcatattcatatatatggattcccctgcagtttcctctatccactttcacaacgcccatgtcttacccgaaccagacctttttatgcacactcccggtggtaaccgcattccagcgcacgcaaccattctggcttcggcatccccagttttagaaaacgtcattgcgtccaaccgagtcgtcaaaatccacggcgttcccgacggcgccgtcacggccttcgtagcgttcctctactcctccaggtgcacggaggaggacatggacaagtacggaatccaccttctagcattgtcgcacgtgtattcggtgccgcagctgaagcagaggtgcatcaagggactggcccagcgcttgagcacggagaacgtggtggacgtgttgcaactctctcggctctgcgacgcaccggatctctacctcaagtgcgtgaagctcctcaggaaccgtttcaaagccgtgaaggaaacagagggctggaaattcctcgagagccacgacccctggctcgaactcgacgttctccgcctcatgggcgaactcgaaaagaggaagaggagggtgaggaagtggagggaggaggagaggttgtacgtgcagctgagcgaggcgatggagtgtttggagcacatatgcacggaggggtgtacggaggtggggccatacgaggtggaggttggacgacagaaaacgccgtgctcaaagttcgccacgtgtcagggtttgcaggtgttgatacgacacttgggaacttgcaaccggctcgtgaaaggagggtgtttgcggtgtaagcgtatgtggcagctcttcaggctccactcctccatttgcctatgccagaattcatgcaaggttcctctttgcaggcaaattcgattaaaaatggagcaagagaacatgaaagatgacgcaaggtggaaactactggtgaggaaggtggcctcggccaaagccttgtcttccttggcgctgccaaagaggaaattagatcagagctagggaccatatatataaataaataatggcaagttgtgcctacatgtttcggggggattacaaaatgatcgagaaataatggcaagttgtagtgttaacatgtcattagtatttcttttctcacgggttatagccttattggtacctattttatatgaaaggtataatatactcattgagataatctctagtacttttcttcttgttttaatgctggggaaataattataatgaacgaggaaagaaaattttattt

SEQ ID NO: 26947 - DNA, 1022 bp, Glycine max
  Clone ID: TF_GmC54082_1
cgtaagctcggaattcggcttcagcaattccattctctttgcctgcctagtttcaattctgtccaatttccaaaaccaaaacaagccacacaagttcatggcaactcccaataacagactctctcttgccatggagagaactgggcaatgggttttctctcaagacataccaactgatgttatagtggaagttggagaaacaactttctctctgcacaagttcatgctagtggcaaaaagcaactacataagaaaactgatattggaatcagatgagagcgaactcaccagaatcgacctctctgacataccaggaggcccttcaatcttcgagaaaaccgcgaaattctgttacggcgtcaacttcgagataacggtccacaacgtcgccgttttgcgatgcgccgcggagttcctccagatgacggatcagtactgcgagaacaaccttgcaggccggacagaggagtttctcacgcaggtcgcgttcttcacgcttaccggcgccgtcacggtgctcaagtcctgccgccatctcctcccctatgctgacgatatcaacgtcgtgaaacgctgcgtcgaagccgtcagcgccaaggcctgcagcgaggccaatttccccagccgctcgccgccgaactggtggacggaggagctcgccctcctcgatatcgatttcttcgccagagtcatcgacgccatgaagcagcgcagcgcgaaggctcttaccgtcgccgctgcgctcatcacctacacggagcgcgccctacgagatctcgtccgtgaccacaccggcaacggaatccggtcctcagatcccggcgattccgattccagatccaaacagcggaagcttctggaagcaatcgtggatccgttcccctcggagaaagccgcgtttccgatccacttcctctgctgcctcctccgatgcgcgatctacctacgtgcctacgccggctgcaaaaccgagctcgagaagcgaatttcagcgatcctcgagcacgttaccgtcgacaacc

SEQ ID NO: 26948 - DNA, 1319 bp, Glycine max
  Clone ID: TF_GmC7983_24
ccacgcgtccgcttgaggtgaaaggcttgtcatgcttgaaaagcttaatacatactctagatatacatcatccctagaaagctatggatcatttgataaacttcaactggttattaacttaattgggttgacttgtctttcaagtttaccagagtatcaaagctgtatcatagagagcaaagggataaaagcaattgttcttcttgtgaaacgatgcttaagtaatgatattcatgtagaaaggcgaaacttcactcctcatttgcacacaacattccaggaaaggtcttgttgctgtatggataaagaagattgggaaggttccaatgttctcttattttatagtttgttgggattgtctgaaattcttcgtcagtgtgaccttctacaagataattctcagcaatattctagagaggtgacaaatattagagctcagttagttagcaaacttcatgagatctgtagtggcaactctttcagtcctggagtgagatggtatgttttgtatattctaacttattttggattttacggtttcccaaatgagttagccaaaaggattgggaaatctctcaataaggaagaatactcagatatgcggctcgttgtatcttctcatgttgaatatgaagcattggtgttattgttgaaatatgaatacttgggatgtttacatgcaggagaagaaacagtgaagaagctgaaaattcttgctaagcgctgcaaactacagcatctcctgcaaatgctttatagacaacgtccaaagtggggcacacctttccccagctttaatcttactccatctcttggttcagccggaagttgtttttcggatgctatattggaagctaaatcaaataaacttgttgggtggacatgcaacatttgttctgacacagtgccccatatgcatgttcacaaagttatattgcagtctggttgtgattatttacaaggtttattccggtcaggaatgcgagaaagtcattcacaagtcataaaagttgatattagctgggaagcattgatcaaactagtgcagtggttttattctgatgagctgcctaatcctccttctggatgcatgtgggataatatggatgatgaagaaaagctattcaatctacaccatatgtggagctttgttgacttgctgagttctggattttggaaaatattcaggaagcctgctggaatgtgattatgtcttgtcttgataatgaacagttttttattcaaattcatactataaactctggatgctattatcgcttagagaattaagggttttgatgctattattgattgaattt

SEQ ID NO: 26949 - DNA, 1102 bp, Glycine max
  Clone ID: TF_GmC68877_1
ccacgcgtccgcacatattcctcgctgtaccctcaatagggttgattttcttgcatgcaacaagaccctactttgggatttcataaaagttaattatttgtttcatgatcttcaggtcttaactccccctcattatccatggagcttctcattcgaataatatttcaaagggatataatataaaaaactatagccacctggaattctgtctctgacatggtcgatgatgacaagagaaataataatctacgacagctgctagtgatttgtctctgaaagaattaggagcttattttatttctagtgccatgaagagagcaagtgaatgggcttattctcatgagattccaagtgatgtcaccattcaagttggcgaagtttccttttcgttacataagtttccattagtttccaagagtggatacatagggaaactggtctcagaatcaagtgatgccttcattgaactctatgatgtccctggtggagcagaagcatttgaactggcaacaaagttctgctatggcataaactttgaaataagcatcgaaaacatcgctatgcttcgttgcgtggcagagtaccttgacatgacagaggattactcagttggaaatttggtgggaagggctgattcttacttgaatgaagtggcactcaagactatttcaggggctgtgtcaatcttacacatgtcggaacgcttccttccgattgcagagaaggcaaaactggtgagtagatgcatagatgctattgcattcatagcctccaaggagactcaattctgttcacctatgagaggtgacattattggtactgatggcatggcttctcaccaaaggccagtggttcattggtgggctgaggatctcacagttctcagaattgacatctttcaaagagttctgattgcaatgatggccagagggtttaaacagtttgctcttggccccatcattatgctctatgcacagaaatctctgcgaggtttggtaagactaaaaccccttaccccaaaggttttaacatacaaatagaccagggtttaaggattaatgactttgggccatggaaagaattccttctggtaatgcccttt

SEQ ID NO: 26950 - DNA, 667 bp, Glycine max
  unsure (1)..(667): unsure at all n locations
  Clone ID: TF_GmC253982_1
cggaattcccgggtcgacccacgcgtccgcggacgcgtgggggaccttataagaatctgcagaggagtgcagatgtgaatcactgcataaagttcttgagaaagaactgattcatcaaaagtatgcagattataaggcactgggtgatgtagataactctcagaaacggtatatcttacaaggtctatcccttccccaagaagataggcttcctgcggccttgcatcgaatccttctgaccgccctttcaaattcaacccgccaaagtggtcaagaagatgaaattgataagttggtaactaggatgggtgccatgcagatggcgaaatctctggatgatctcgctgatgtttgtgtaagagttgatagaaaaattttccgctgtcaccaagttattctggcatctaggtcagaatatttcaaagcaagattatcacatatgaaggacttccatgaagacatagatgagttatctgttgacatccttccttgccttgaagaacatgacttgagcatggaagctnttgagaaaatgattgagtatatgtacactggatcgtttgcaggatataaatccagatcaggctgaggaaatgttggatgttgcttctagatacttattgtttcctctcagcgggcggtggctgatgtcttgttgccacacttg

SEQ ID NO: 26951 - DNA, 1426 bp, Glycine max
  Clone ID: TF_700895650_FLI
ggctgctaaaagtcctttcttctacaaggtagatgtctattttttattggttagatttgaaaatttctgctaaaaatgtgtttgcttagttgtgtttattttgcagcttttttcaaatggaatgagggagtcggagcagaggcatgttgccctaagaattaatgcttctgaggaagctgctcttatggagcttctgaatttcatgtatagtaataccttgagcattacttcaccccctgctttattggatgtgttgatggctgctgacaaatttgaagttgcttcctgtatgagatactgtagccgattattgcggaatatacctatgacacctgagtctgcattgctttaccttgagcttccttctactgtcttaatggctgatgcagttcaaccattgactgttgcagcaaagcagtatcttgccagtcgatacaaagatataacaaagttccaggaagaggttatgggcttgcctctagctggaatagaagcaatattgtctagtgacgaacttcaggttgcatcagaggatgcggtatatgactttgtgttgaagtgggttcgaacacagtacccgaaactagaagagagaagagaagtcctgggtacacgacttgcccgtttaattcgcttcccttacatgacctgtcgaaaacttaagaaggtcttaacctgcaatgactttgaccatgatgttgcatccaagcttgtactcgaagccctctttttcaaggctgaggctccacaccgccagcggatactagctgctgagtctgcttccttcaatcgactttttgtggagcgggcatacaagtatcgccctgttaaggtggtggaatttgaacttccccggcagcagtgtgtggtttacttggatctgaagcgggaggaatgtgccaatttgttcccatctggccgagtatattcgcaggcattccatttaggcggacaagggtttttcttatcagcacattgcaacatggaccaacagagctctttccattgctttggcctgtttttaggaatgcaggaaaagggctctgttagctttgccgttgactatgaatttgctgcgaggtcaagaccaacagaggaatttgttagcaagtacaaaggcaattatgtattcactgggggaaaggccgttgggtatagaaacttgtttgcaattccatggacaacgttcatggctgaagatagtctttactttatcaatggtgcactccaccttagagctgagctcaccatcagacactgactgggatttatatgtgtaaaccttttcttctagttggtagctctgactttttttgggcaatgtgtctcattttccgataacctgctgtaatcttaactaatattcaggcaatgtgcactaggtggttagtgctggatgtgagatcaaatgaattttcgggacctt

SEQ ID NO: 26952 - DNA, 317 bp, Glycine max
  Clone ID: TF_GmC130929_1
caaaaaattcaacaccaccaagagggcgcaacaataatgtctctccagcagcaatagaattttgggagcgtcttttttatcacggttataaagcagatgtttgcattaatactgataacggtggcgttgtttatgctcattctaacattcttgccatgtctactcctgttttcaggggcatgttgaagcaagcaaattgtcatcgtcgatggcgaacaatctcaattactggggttccacatgatgcagttcacagttttattcgattcttatacacttccaggtataagaaagaagaaatggatgaattcgtccta

SEQ ID NO: 26953 - DNA, 1868 bp, Glycine max
  Clone ID: TF_GmC337_1
gcgtctccaactctcttagaatctaaaccctaggaaatttccccttttctttcaatcaaacgataccttagaaattcgtcgttttgtcttccaaattttgacaaccttcctcatcctcacctaacttcttctcatttatccctcacttatccaatccccacccaaattccccgcatcgacctctcccccctaaattcccccatcgtcgtcctctctcaccgcggaattcatctcattagccggttccgctacagtgcgtatcccatgggtaagattttccgagaaaacgcgaagccgtcggcaaattcctcatcggcgtacccctctgcggcgcccgccaccacttcgtcgacatcggtgacggagacggtgagggggtcacaccagttcaagatgacggggtactcgctctcgaaggggatcgggattgggaagtacatggcctccgacgtgttttctgtcggagggtacaattgggcgatttatttctaccccgatgggaagagcgtggaggacaatgcaacctacgtgtcgctcttcatcgcgcttgccagcgaaggcaccgatgttagggcactttttcgagttgacccttttggatcagagtgggaaggagaggcacaaaggtgcatagccatttctgagaggaactcttgagagcggggcctatacaccgttaaaataccgtggtagtatgtggggttacaagcggtttttcaagagaacagctctagagacatcagactaccttaaagatgattgtctgtctgtgaattgtagtgttggtgttgtgaggtcacacacggaaggtccgaaaatctataccatagcaatacctccttctagcattggtcagaaatttggacaactgctggaaagtggtaaaggcagtgatgtaaattttgaagttaatggtgatatttttgctgcacataaattggtactagcagctcgttcacctgttttcagagcacagctttttggtcctatgaaagatcagaatacccagcgtattaaagttgaagacatggaggctccagttttcaaggcattgcttcattttatatactgggactcactaccagacatgcaagagcttactgggttgaactcaaaatgggcatcaaccttgatggctcagcatcttctagcagcagctgatcgatatggcttagagagacttaggctgatgtgtgaagcgagtctctgtgaagatgttgctattaatactgtggctacaactctagccttggcagagcagcaccattgtttccaactgaaagctgtctgtctcaagtttattgctacctctgaaaatcttagagctgtgatgcaaactgacggatttgagtacttgaaggaaagctgcccatctgttctgactgagctattggagtacgttgccagatttactgagcattcggacatcatgtgcaagcataggaatgaagcattacttgatggcagtgacataaatgggaggcgggtgaagcaaaggctctaatatgtgaagaacactgcacagctttctgtacatccctcttctactctccgttttaaaagatagcgagagcatggttagagggagaatatatataatcttttataggatcagaggcaatttttaattttcttagcttattcatgtgtaagagatgtaaatgtaatttgtgttgttgctgttactgttctgtttcacgtgtaggtttctgtaatatcttcagtatcactttttactggaaaacatgccttgcaagtgttgatcattactttttatattctgtatgcttattattcaaatgtagtagcgtaagtgcccttgaaacatttgactggcatcatctttttctattctctatatctttacg

SEQ ID NO: 26954 - DNA, 867 bp, Glycine max
  unsure (1)..(867): unsure at all n locations
  Clone ID: TF_GmC141051_1
tcgggtaaattaggaaaatgaacaatacattattacagtgattcgattacaacggagcgttgcactgaatcggcaagaaaaagccaaacacaatgaattgagagaagaagaagaagaagattattaattacaataaataaataaatcgccgtgcaaataaaaccgttggatcgatcgagaatgagaatgagaatgagaatgaaagtgtgcgtttgatgagtatggaggaacctcagttccgcgaacatcccaaagccaaaatcgccaccattccgccgtcgcagcactccgacggcgccgccgccgaattgcgcggtgccgattgcaacctggcttccctctgcgagcatgtccaaatcgaaggcttcaattcgggttccttctctgatatcgtcgtcaatgccatgggttccacttatcacctccaccgtcttatcctctctcgcagttcgtatttcaggaacatgcttcatgggccttggaaagaagccggtgctcctgttgtggctcttcatgttgatgataagaatgttaatgatgaggcaattgcaatggctttggcatatctatacggacaccaccctaagcttaatgataataatgcttttcgngttcttgctgctgctgtctttcttgaccttcaggatttatgtggaatttggacggatttcattatttctgatctgtggactttaaacttcttggcttataaggtgtttgcggagaaccatgactatggcatgcatggggagcgtggtagaactggttgctggggctacctctggcaaagtggtggcatggaatttgaagagggggctcctaaacttttattttaaacatttcatgccattactgacttctaaggaa

SEQ ID NO: 26955 - DNA, 1894 bp, Glycine max
  unsure (1)..(1894): unsure at all n locations
  Clone ID: TF_GmC1088_1
tacaaaataatgttgttaccttcctctctctaacctgcaatttaacaactccttcgtttcttctttcttttttctaaaacctcaaaaccaaaaacacaacaccaactttcgtaacgtgtctctcccttcttcccctcctctctccggttccctaattctgccctcactgcacccaattccaattccccctcaccccccaattcggggaattagggtttcgccccattcattcatcgatgcaccaccaccatcgtcgctagggtttgcttcgatggcggaattggaggaggagcggatgggaggggatttcaagcatggcggaattggaggaggagcggatgggggatttcaagcccttctcggaaggttcttcgtgctcgcgttcgatcagcgaaaccgtgaacggctcgcaccaattcacaataaagggttactctttggccaaagggatgggtgctggaaagtacatcatgagcgacactttcaccgttggtggttacgattgggctatttacttctaccccgatgggaagaaccctgaggacaattccatgtacgtttcggtctttattgcgctcgctagcgacggaaccgatgttagggctttgttcaagttgacgctggtggatcagagtgagaaggggaatgataaagttcatagccatttcgatcgccctctcgagagtggaccttataccttgaagtataaaggcagcatgtggggttacaaacgcttcttcagaagaacacaactggaaacctcagagtatctaaaaaatgattgccttgtcatgcattgcactgttggtgttgttaaaactcgttttgagggatctaaacagggtgttattgtgccacagtcagacatgggccgggattttaaggacttgttggaatctgaggtcggttgtgacatacttttcaaggtcaaaagtgaaagcttcaaagctcataagttgatacttgcagcccgatctcctgtgtttagagcccagttttttgggcttgttggggatcctaccttagaggaagtagtggtagaggatattgagccctttatcttcaaggcaatgcttctctttgtttactctgacaaacttcctggcatatatgaggttatggactcaatgcccttgtgctcatacaccgtcatggtgcagcatctcttggctgctgctgatctctataatcttgatcggctcaaactgctttgcgaatcaaaattgtgtgaagaaatcaatactgacaatgtggccacaacacttgcgctggcagagcaacatcactgtccacagcttaaggcaatctgtttaaaatatattgcaaatcctgcaaacttgggagctgtaatgcagtcagaagcttttgtgcatttgaaagagagctgcccctcaatgctgttggaattgctggagacatttgcatcagtggatgataactcaggccagacattgagcagaaagagaagtggcagtagcatatatgggcaagatttagcagacggggcagctgctgaatcagttaatccaaatggcaggcgagtaaggaggcggacataagcatagtttacaatctgaatctgcaacctttaaaacttaaaagtgtgatatagttaaccccctagtcctgtcaatgtaagtgattcaccattttcatttccacctgatccctgagattttatatgtcaagttttctggccttcgcaccttgtctcaaggggctactttggacagcattttcaatggtagtttgacattagagcagttctaatgtagggtatatcatgtttgatgacgttaataaaaagtaaatagctgatatatttgttttttataagncgccnnggaagaaaacacacaagaaaagngaaaaaanagangaaggaaagaacnng

SEQ ID NO: 26956 - DNA, 423 bp, Glycine max
  Clone ID: TF_GmC127114_1
ccaaacagccgaagagatcgttccgcgatgcgtctaagcagaaggtcatggccgagaagctggatacgcgcaaggacagtccaatgatggatggtggctcaccagcgctcacctcttccatcgtgacagtcatcgttggttccgaccagcgactgttcgccgcgcatgaagatgtattaagtcactctccgtattttgctgaactgctgcggggccagttcttcgagtccgctaatcgccgcatcgatctgcccacggaggaacctgagattttcagttgtatcctcgagtatttgtacaagggcgactactacccacgccttgtccaagacaagcgccgccagacctggatgctcgaaggtgcaattgcctcacccgacccaaacaaacccggcgaccgcgcagctgctgtcgagccaactt

SEQ ID NO: 26957 - DNA, 877 bp, Glycine max
  Clone ID: TF_GmC6844_2
ctagaaagtgggaaagacagtgatgtcagttttgaagggcatggagaaattttcgctgctcataaattggttctagcagctcgctcacctgttttcagggctcaacttttcggtccgatgaaaaatcagaatacccattgtataaaagttgaagacatggaggctccagtctttaaggcattgcttcatgttatatattgggactcactacctgacatgcaagagcttactgggttgagctcaaaatgggctactaccttgatggctcagcatctgctagcagcagctgatcggtatggcttagagagacttaggctcatgtgtgaaacaagtctctgtgaagatgttgcaataaacaccgttgctacgactctagccttggcagaacagcaccattgtttccaactgaaagcagtctgtctgaaatttgttgcaaggcctgaaaatctcagagctgtgatgcaaactgatggttttgagtacttgaaggaaagttgcccatctgttttgactgaacttttggagtatgtggctagatttactgagcattcggacttcttgtgcaagcataggaatgaagtgatacttgatggcagtgacgtaaatggaaggcgggtgaagcaaagactatagtgcgaacactgacaagtttctctgtacaaccctctgctccttgttgcatttaaaaatttctgtgagagccatagatagagggagatgctaagcatttataggattagtggcaatttctaattttcttagcttacttcatgtctaggagatgtaaatgtagtttgttttgatgctgttgcaggtctgtctgtgataactttgctcgtaaaacatttgtcttaaaaaagaaagtattgatcactgc

SEQ ID NO: 26958 - DNA, 874 bp, Glycine max
  Clone ID: TF_GmC1493_3
cgcgcacgtaagctcggaattcggctcgagctttgcttcattttatttatagagacactctaatagatgatgaagagctctttatgtcacgttcatcattcttgccttcggtttctgaatcatttgcagcaaagttgttagctgctgcagaaaagtatggtttgccaagacttaagctgatgtgtgagtctgtactttgcaaagacatctctatagattctgttgcctatattctggctcttgctgatcgttatcgtgcaacagaattgaagtctgtctgtctacaattttctgctgaaaaccttgtcgctgtgatgcaatctgatggttttgagtatcttaaggaaaattgtcccttgctgcaatcagaactgctaaagactgtggctggatgcgaggaggaatttagtggagaaggaaagtgtcgaagtgtgtgggctcaattttctgatggtggtgacaccaatgataggagtgtaagacaacaaacctgggaaaatggtgttgaaagaagtcaaagcttatgggttcacctttcggatggtgttaacaacaatgataggagtccagggcaagaagcctgacaaggtaaggtaccatcatttgtctgttaggcttaaatggtagattaaaagttactactgcagggataagattaacaatgtaaagaaagaaggctgagatactaccgccattgtaatatgtcttataaatactgtttttctttgataatatgattacaaggatgtagtggcagcaataagtaataacattgatcattgtatgaaagtttgttgggaacattttcatgaagaaactggccatgctttacttggtgtttgtattacatgaagaaatttattttcgggctaaa

SEQ ID NO: 26959 - DNA, 1800 bp, Glycine max
  Clone ID: TF_GmC976_1
cgaaaaatgggtaaaagcaaccccaaaattcttgcgtgtccgaaacctctgaaagaaattgcaatctaatcaaagccagagtgaatgctgttgaacgctgtctgaattttttgagctaaataaaagaagaaaaacagggtgagagagaaacagagtgagagagaaacagaggatcttcatatgaagagtgaagtgagttggagaataaagattcaacaacctgggaaagccgggagagtttttcttggagggaattttggactccatccatgaaatcacaacagctcttgcttttgctgataggatgagcgattctgcatacagagtccaaaccacaccaaaccttgctcaatggagaatcgaaaacttggcttcttgcacttaccgcaaatcaaaatccgatcctttcaagatcggaaactggaattggtatttctctctccatatctatctatatatctatctatctatcttatttggaatgttatttttcaatgcagggaggagaatgatagcataaaaaacttttacactattaatttatttctatgaagttaatctatttacattttgagagcatactgcatggggtcatggtcatagtccccttgtatcatgactgttcctatttaatatctgattgaattggtgcattgcactcagaatacaaataccttaccttacttggaaatcttacgagagacttcccagaatgctaacagatggtattcacacagacatctccatcagtgcttctgatggaagtataggagctcatagagctgttcttgctgccagatcacctgtcttccgcagcatgttctcacataatcttcaggagtaagagttatcaaccataaacatctcagacatgtcatttgaatcattccatgcatggcggagaaccttgttccatttgggcagaaggatttactcagcaaagatcaaatgcaaaagccatagagtctcttggtagaatgctaacagaaggcatccacacggacatcaccatcaatgcttctgatggaagtataggagctcatagagctgttcttgctgccagatcacccgtcttccgcagcatgttctcacataatcttcaggagaaagaattgtcaaccataaacatctcagacatgtcacttgaatcatgccaggcttttctcaattatctttatgggatcatcaaacatgaagagtttctgactcataggctggcccttctgcacgcggccgacaagtatgacatatctgatttgagagatgtatgccatgagagtcttctagaagatattgacacaaagaatgtacttgataggctccaaaatgcatctctatatcagttgatgaaactgaagatgagttgcatccgatatcttgtgaagtttggtaaaatatatgaaattcgtgaagatttcaataccttcctgcaaaatgcagatagggatctgattgctgaggtcttccatgaagttcttgatgcttggaaaggattctgaagatcttgcaacttcaaagaaagataggaaggcttgttgttattcaacatacctaagaataggttgtttcaatttgttgtgcaggatttgttttgatgaacctaattctttcgctcagatgaattttttatgattttatgtacatacttatgttgtgctcttcaaatgtaaaccataaggtattattgtttacagaaaatgtatatcatataaaaagaaaagtaacatatattcaggagtgcaaaaggtcctcctgaattctgatgatacaagaaaaagaaagtgaccatgtttcctttgg

SEQ ID NO: 26960 - DNA, 1819 bp, Glycine max
  Clone ID: TF_GmC337_2
aaacaatcatttttttttttcttctgccccctttctctctctgaagcgaaaccctagaaattcatcatctttcagaatctgacaagtttcctcaaccgaacctaaattctctcaccaaatcctcacttatccaaattcgatactccaatccccacccaaattccccgcatcgactcccctccccaaaattcccccatcgccggcgtctcccgcggccgaacgcatcacatcgccgattcggctacggcgctaacagtggctatcgtatgggtaagattctccaagaaaccgcgaagccgtcggcgaattccacatcggcgtacccctctgcggcgcccggcaccacgtcgtcgatgtcggtgacggagacggtgagggggtcgcaccagttcaagattacggggtactcgctctcgaaggggatcgggattgggaagtacatggcctccgacgtgttttccgtcggagggtacaattgggcgatttatttctaccctgatgggaagagcgtggaggacaatgcgacctacgtgtcgctcttcatcgcgctggccagcgaaggcaccgacgttagggcacttttcgagttgacccttctggatcagagtgggaaggagaggcacaaggtgcatagccatttcgagaggactcttgagagcgggccttacaccttgaagtaccgtggtagtatgtggggttacaagcggtttttcaagagaacagctctagagacatcagactaccttaaagatgattgtctgtctgtgaattgtagtgttggtgttgtgaggtcacgcacggaaggtccgaaaatctataccatagcaataccgccttctagcattggtcagaaatttggacatctgctggaaagtggtaaaggcagtgatgtaaattttgaagttaatgatgatatttttgctgcacataaattggtactagcagctcgttcacctgttttcagagcacagctttttggtcctatgaaagatcagaatacccagtgtattaaagttgaagacatggaagctccagttttcaaggcattgcttcattttatatactgggactcgctaccagacatgcaagagcttactgggttggactcaaaatgggcatcaaccttaatggctcagcatcttctagcagcagctgatcgtcatggcttagagaggcttaggctgatgtgtgaagcgagtctctgtgaagatgttgctattaatactgtggctacaactctagccttggcagagcagcaccattgtttccagcttaaagctgtctgtctcaagtttattgctacctctcaaaatcttagagctgtgatgcaaactgacggatttgagtacttgaaggaaagctgcccatctgttctgactgagctattggagtacgttgccagatttactgagcattcagacatcatgtgcaatcataggaatgatgccctacttgatggcagtgatataaatgggaggcgggtgaagcaaaggctctagtatgtgaagaacactgcacagcattctgtacaaccctcttctactctccgttttaaaagatagcgagagcttagttagagggagaatatatatataatcttttataggatcagaggcaattcttaattttcttggcttattcatgtgtaagagatgtaaatgtaatttgtgttgttgctgttactgttctgtttaacgtgtaggtttccgcaatatcttcagtattactttttactggaaaaacatgtcttgcaagtgttgagcattacatatttttatatatacatagatacatatatatatatatattctgtatgttt

SEQ ID NO: 26961 - DNA, 1469 bp, Glycine max
  Clone ID: TF_GmC337_3
ttcatttctctctcgttttctctcagaatccaaaccctaggaaatttccccttcagacgaaaccctagatttcctctcacaaatctctctcagcttccccattctcgggattcggcgtccagatcacagatcccgttcaattttttttccgcatcccccgatcgggtttggattctgaagaaagttcaattccgcacaaattcgagacaattgctgctgtcgaggctcgcgttgcgcatgggtaagattctgagagaaaccgcgaggccgttctcgaattgttcgtcgtcgtcggcgtctccgttgtcggcgccgccggcaacgacgtcgtcgacgtcgttgacggacacggtgagggggtcgcaccggttcaagatcacggggtattcgctgggattgggattgggatgtacataccttttgattggggttacaagcggtttttcaagagaacagctctagagacatcagactaccttaaagatgattgtctgtctgtgaattgtagtgttggtgttgtgaggtcacgcacggaaggtccgaaaatctataccatagcaataccgccttctagcattggtcagaaatttggacatctgctggaaagtggtaaaggcagtgatgtaaattttgaagttaatgatgatatttttgctgcacataaattggtactagcagctcgttcacctgttttcagagcacagctttttggtcctatgaaagatcagaatacccagtgtattaaagttgaagacatggaagctccagttttcaaggcattgcttcattttatatactgggactcgctaccagacatgcaagagcttactgggttggactcaaaatgggcatcaaccttaatggctcagcatcttctagcagcagctgatcgtcatggcttagagaggcttaggctgatgtgtgaagcgagtctctgtgaagatgttgctattaatactgtggctacaactctagccttggcagagcagcaccattgtttccagcttaaagctgtctgtctcaagtttattgctacctctcaaaatcttagagctgtgatgcaaactgacggatttgagtacttgaaggaaagctgcccatctgttctgactgagctattggagtacgttgccagatttactgagcattcagacatcatgtgcaatcataggaatgatgccctacttgatggcagtgatataaatgggaggcgggtgaagcaaaggctctagtatgtgaagaacactgcacagcattctgtacaaccctcttctactctccgttttaaaagatagcgagagcttagttagagggagaatatatatataatcttttataggatcagaggcaattcttaattttcttggcttattcatgtgtaagagatgtaaatgtaatttgtgttgttgctgttactgttctgtttaacgtgtaggtttccgcaatatcttcagtattactttttactg

SEQ ID NO: 26962 - DNA, 2583 bp, Glycine max
  Clone ID: TF_GmC141_1
accacagccgattaaccatacacttattcatcaaagagaaaccaaaaggctcaaaacacatactaattctccaagaataagagaatccaaaagtctctacaaaaaataaccatgatgatgcatgtcctttgcttctcagtgttcctagcagcagcaatgcaaggaacactggcggctgaatacagtgtcaccaacaatgccctctcaacccctggtggtgttcgtttccgtgatgcaataggggacgaatacgccaaacaaacactttgactcagccacccaattcatatggggggtctgcagattaggagtagaatggcgaaggagatagtgaaagagcttcttcctctaattcgagtgtacaaggatggcagcgtggagcgtcttctaagctctgaaaacgtggcagcctcccctgaagatccccaaactggagtctcatccaaagacatagtcatcgcagacaacccctacgtctccgctcgcattttccttcccaaatcccaccacactaacaacaaactccccatcttcctctacttccacggtggcgccttttgcgtcgaatccgccttctcctttttcgtccaccgctatctcaacatcttggcctcagaagccaacataatagccatctccgtcgacttcagactcctcccacaccaccctatccctgctgcctacgaagacggttggaccaccctcaaatggattgcttcccacgccaacaacaccaacaccaccaacccggagccatggctactcaaccacgccgacttcaccaaagtctacgtaggaggtgaaaccagcggtgctaacatcgcacacaacctgcttttgcgtgcaggtaacgaatccctccccggggatctgaaaatattgggtggattactatgctgccccttcttctggggctcgaagccaattgggtcggaggctgttgaggggcacgagcagagtttggccatgaaggtctggaactttgcctgccctgatgcccccggtggaatcgataacccctggatcaacccctgtgttcctggggcaccctctttggccactcttgcctgctctaagttgctcgttactatcactggcaaagacgagttcagagacagagatattctctaccaccacaccgttgagcaaagtggctggcaaggtgaacttcaactctttgatgctggcgatgaggagcatgctttccagctcttcaagcctgagactcatcttgctaaagccatgatcaaacgcttggcttcttttctggtttgatggatggcttgtcatgagagattccaaacataataaatcgtgcgtgccttcacctgtcttgtctactactccagttttagattgaattttatgttttagttattattcaacaaaaacacaataattccctctccctcgttgtttttgtttttgtttttgtttgtcaccattatcaatacctatcactgtatgtggtcattattcaacaaaaggatgccgtacactcctgaattaatatttcaattttcaaattattatttaggagagcagtacgtaaacaatgctacgttgtctgacgttacatttttggttgaaggcaaacgattttatgctcatagaatttgtcttcttgcatcatcagatgcatttcgtgcaatgtttgatggtggttacagggagaaggaggcaagggacatagagattccaaatattagatgggaggtttttgagttgatgatgagatttgtatattgtggatcagttgatgtcactctggatattgctcaaaatcttcttccagccatcgatcaagaggtttttgaacggcttatgagatttagtgagtatggaattgtacatgatatatcgcttgagaatgtgtcaagtatgtatgaacttacagaagccttcaacgcaatatcattgaggcatgcatgcatcctttttatcttggggatatttgataaattgagttcaaggccagggcactctcttctgattcagcgcataacaccagagatccgtaattacttcgttaaagctcttacaaaggccaactctcaaaacgaccgactctagtatgcacccattttattcttgacctctaaccgattgtgttgtacaaaatgtatatgttgttcctttttttgtaccaggaagcaatctcctgtatggtatacagtttggctaaaagaacattctaacgccggaatcatgcttcttcttctttttaatctttttgttagcccctttctggaagtctcttattatcattacagcagcgattaaaaaaattatctaccatcacgttcatgtacgttcatttctgatgcagtgtaagtcccttctagctgtaacgtcattgtcttagatatagcaaatatgaccttcacgaacattgttttttactcgtgcaaatattgtgatggttgagactttctctttctcaagcatctaatgttgagtttatgagtagtataggttgcccaagcatctaatgtatatatgacaattagatagttgtcttcatattatataatgaaatcttaaagccttttcactaaaaaaaaaaaaaaaaaaacaaacaaa

SEQ ID NO: 26963 - DNA, 3010 bp, Glycine max
  Clone ID: TF_GmC1416_1
aattcggcaccagcttgtctcgcactctctctcccctgcccctcgcgatgcttctcgtttctccggctgatcaagttgaggacgaggttgatgcagcagactgttacaattacaaaaacatggattatgacaaatgggggctcaaaaaattcctcgagagttgggacttgtctgatgtgttattcatcgttggtaaagaggaaaaacccgttcccggcccgagggcaattttagctgcatctggaaagttttctctgtgctcctcctcctttgtcatcaacctacccactgtatcttatctacttttccgtgcactgcttcactacatctatgttggctggacccagattccccaggaacaactcggttctttgagggatttaagtctacagtttgaagtgacaccactggtgaagcagtgtgaagagactatggaacggtttaagctagataagaagttgtttgacacgggcaagaatgtggagttaacatatccatctatccgacctcattgttcaactttgccctcacttcctgtcagcactcagcaactgaaacaattgaaattaacaggccagtacagtgatgtaaacatctacattgagggttatgggctcattgcacgagctcataaaattgttcttagcttatggagtatcccctttgctcggatgttcacaaatggaatgagtgaaagcatgtcctcggaggttactttaagggatgtcccaccggaagctttcaaggctatgcttaactttttatatgatgggcaattgaatgacaaagttatagattctggtgtgggacttgtctgatgtgttattcatcgttggtaaagaggaaaaacccgttcccgctcacaaggcaatattagctgcatcgcatgagtctcagaggactcagtatgtccactcctccaagtggtttcttcaatgccatcatgtagacttattaaagaatcattgcagaggagaatttccatgaactttgactattatatcagtgcgagtactgactttgtgttattagatgagacaactttaatcaatatcattaagcatccagatctgacagtaacgtctgaagagaaagtccttaatgcaattctaatgtttggcatgaatgcaaaacagttgtttgggtgggaagtggtggatcagttaatggaaaattcaaaaccagaactcctttttggtaagaggcttcagttaatctatgacttgttgccatttgtgcgatttccactactacaatattccttacttaagaagttaaattgttcttcgcttgggaagcatccccttgcttcgaaaagtcacaaaaaggaggctatcaattttgttaaatgtgggctggcagagtcagaaaatgaagagaatgttagattccaacatagacggtccagttacagggaactccagtacatctgtgatggggatgaccatggagttctgtactttgctggaacatcctatggtgaacacccgtgggttaatcctcttttggcagagccaaggaaaattaccatcacagctagcagcccccactcaagatacactgatcccaactctttggtctcaagaacctacctgggaacatcaatttcatgggcctcgattggaaaatggacagaactgtagatggtggatgggggatctttggccaatatcagtgcgagtactgactttgtgttattagatgagacaactttaatcaatatcattaagcatccagatctgacagtaacgtctgaaaagaaagtccttaatgcaattctaatgtttggcatgaatgcaaaacagttgtttgggtgggaagtggtggatcagttaatggaaaattcaaaaccagaactcctttttggtgagaggcttcagttaatctatgacttgttgccatttgtgcgatttccactactacaatattccttacttgagaagttgcagcatagcagcattggccggcatattcctgttttccaaaatcttgttaacgaggctatcaattttgttaaatgtgggctggcagagtcagaaaatgaagagaatgttagattccaacatagacggtccagttacagggaactccagtacatctgtgatggggatgaccatggagttctgtactttgctggaacatcctatggtgaacacccgtgggttaatcctcttttggcagagccaaggaaaattaccatcacagctagcagcccccactcaagatacactgatcccaaggttttggtctcaagaacctaccagggaacatgttttgctgggcctcgattggaaaatggacagaactgtagctggtggatggtggatcttggccaagatcatcagcttatgtgcaactactatacctcggggcagaactattctaaggcagttcccggattttggcatgttcagggcccacgtgacgcatcgatccgggtattttcgggtttcgatcaaagtaatcggattatatgtaaccctggccagtttgccttgcagttgataattggccttatagctctacttcccttcatggattaacaatatgaataccatacaatccaaattatttgcaccaactcctgcatgtacggtattggttccttgttaacttaaagattttaaactgttcatggatcaagggtcgtagttctaagatcatatataagtatttatgtagattgtagtatcttatgtattcctaaaaaattaatctattggcccataattggccccaacgctctgcttcccttcaggtatttccgggttgtgctcacaggaaccaccaccgatgccaccaatccctggaatttctgcatttgttacttggaattgtatggctacttcctttaaaagcctagccatgccaataccataccttcctaaaatacaattccagctccttcatgtacattatggtttgcttattgactaaattatttgaatcaagtcatggataaagggttgtggttctaagagaagatatagtaaaacgaacgcgtgggcgc

SEQ ID NO: 26964 - DNA, 1194 bp, Glycine max
  Clone ID: TF_GmC130_1
acggttgcgagaagacgacagaaggggatacagaatacagattgacagagtccaacgttgcattgcagaggtttggtgtttgtcatgtcataaggcatgggcgatagggtggaaacgcttgccagattagcccagtggaaaatcgacaacttcggactttgttcctacaaaaaatctgaccccttcaaggtcggaatctggaactggtacttttcaatagtgaggaataggtacctctacatacatctttttccagaaccttcgcaggttttgaaggataacccaccctttgctcgattcattcttcgagtctccaatgccggatcatcccgcagctttcatatttcccctgttcaagaaaagctgcttaggacacatgacgactttgtctggcctgtggatacaacttttgttggtcgcttcatcattgatgttgagtttctagacctaaagatatgccctcctaatggtggagaaactagtcctgtatggccatctgatggaaattctcaatccattgcatttcaaagtagcattcttcgttgcctctctcgtatgcttgatgaggctatacatgctgacctaactatcatgacagccgatggaagcacgttgagagctcataaggcagttctctcagcaagttccccagtgttccagagcatgtttcatcacaacctgaaggaaaaagagtcctccacgatccatatagaagacatgccactcgagtcctgcacggctcttctaagttacttgtatggagcaatcaagcaagaagatttctggaaacaccggcttgcattgcttggagctgctaataaatatgacattggaagtctcaaagacatctgtgaggagagcctcctggaagatctcagcgcaggaaatgttcttgagatgctaaatgaggcttggctttatcaattgcacaagttaaagaaaggatgtttggtgttcttatttcaatttggtaagatacatgatattaaagatgaaataaataattttttccagcatgcagatagggagctaatgctggagatgtttcaggaggtgctttcaatttcgaacccgatataggttaactcatggatcctgtatatgatatatcgatgtgtataataaagtttgttgtttctaccgcaaaaaaaaaaaaaaaaaaaaaaaaaaaaagcggccgctctagaggatcca

SEQ ID NO: 26965 - DNA, 1530 bp, Glycine max
  Clone ID: TF_GmC141_3
attcggctcgagctcgagccggataatgtgtccgattttattagggtaggtggaattcagagactgcaggatggagagtttattgttcaggcaactaaagattgtgttgcaaagacattgaaaagattagaagagaagattcatggccgagtgctgaaccatttgttatatctcatgcgagtttcagaaaaggcttttcaaagacgagttgctttaactcttgctcacctttgttctgcagatgatcaaagaaaaatatttattgattataatggtttggagttgcttatggggcttcttggctcttataaccccaagcaacagcttgatggagctgtggctttatgcaagttggccaataaagctatgactctgtctcctgtagatgccgcacccccatctccaacaccccaggtctatttgggagagcagtatgtaaacaatgttaccttgtccgacgttacatttttggttgaaggcaaacgattttatgctcacagaatctgcctccttgcatcttcagatgcatttcgtgcaatgtttgatggtggttatagggagaaggaggcacgagacatagagattccaaacattagatgggaggtttttgagccgatgatgagatttatatacactggatcagttgatatcactcttgatattgcccaagatctcctccgagcagctgatcaatatcttttagaaggacttaagagactctgtgagtacacaattgcacaggatatatcactggagaatgtgtcaagtatgtatgaactttcagaggcctttaacgctatatcattgaggcacacatgcatcctttttatcttggagcactatgataaattgagtggaaagccaggacactctcatctgattcagcgtataatacccgagatccagaattactttgttaaagcccttacaaaggccaattccaacatcctgccgtaatgcgctgttatattattgacatctaaccagttgcgatgtacataatgtggttgatgttctttttgttgagcctgcgaagtaaatctcctggatcaagtacagcatggcttaaaaaatatatctaacatcaggtcatgtacgttcatttctgatgctgtgctagtcccgtctagctgtaacgtcattgtcttagatatagcaaaaatgaccttcacgaacattgtttttttctcctgcaatattgtgatggttctggcttgatagttctctttctcaattgatttggcattacaattgttgagtttatgagtagtataggtttcccaagcatctaatgtatatatgacaattagatagttgtttgtgattgctgatgaatgtattgtaaattaaatgcaaatgcatttaaagaattcgtcatttaagccatgctgaattcagttgctgcttataaaaattggctctttgtctatgcagtcaagcggcaacggaatcgaggtttcacgtacaagaattgctatgggtccctaccaacttttagaattcatggaaaaaattattttaccccagttc

SEQ ID NO: 26966 - DNA, 2318 bp, Glycine max
  Clone ID: TF_GmC328_2
ggctcgagcggctcgagcaactcacatctaccgttcttctctctaaagacaaccataataaaacacaatatctcaattaaaaaacataatttcggttaagaaggtggaacgcatgagctaacaaccaaactaacaaataccgcaccaaacaaaaactaaaaaacgaaatcaaacggaatttaattactaattccaagtttccaacccttaaaataaattatttaaatcgcttagcgcaacaattcacagcttgtgcttttatgttgttttcctaacaaaaattaaataaatagaagcatcttctgttcttttatttcaccgccattcatttcattgacatatagggcttgcgttcttcttcttcttcctttctctgcttgcagttgcagaggtaggaggggggcggtgattgtgttgtgtgctttagaggatgaaagatttcaattcggatctattcgacccgggaacggtgatggactcttcctcctccgattactctcgcagtgcttcctcttccgacgccgatttcgggttcgctttcaatgacagtaatttctccgacaggatcctccgaatcgagatcatgggggaccccgtcgaggcccgacccgattccgacggttgcaccactatcgccgactgggctcgccaccgcaagaggaggcgcgaggatatcaagaaggataacgttgttgatcttactttattgcctgacgagcaaattttgaacgggaatcagcctgatatggatgattttgtaccctccgagaatcaagatgaagatgcggttgcaatggttgaagaacccccttcaggtgatgaggcggcaaatagcaatgattcaaattggaatatggattgctctgcagttgtgagagttaaaacactacacatcagttctcctatcctggctgctaaaagtcctttcttctataagcttttctcaaatgggatgaaggagtctgagcagaggcatgtcaccctcagaattaatgcctctgaagaggtttctctcatggagctactgaattttatgtatagtaataccttgagcattacttcaccacctgctttgttggatgtgttgatggctgctgacaaattcgaagttgcttcatgcatgagatactgtagccgattattgcggaatatacctatgacacctgagtctgcattgctttaccttgagcttccttctagtgtcttaatggctgatgcagttcaaccattgactgatgcagcaaagcagtatcttgccagtcgatacaaagatataacaaagttccaggaagaggttatgggcttgcctctagctggaatagaagcaatattgtctagtgatgaactccaggttgcatcagaggatgctgtatatgactttgtgttgaagtgggttcgaacacagtacccgaaactagaagagagaagagaagtcctgggtacacgacttgcccgtttaattcgcttcccttacatgacctgtcgaaaacttaagaaggtcttaacctgcaatgactttgaccatgatgttgcatccaagcttgtactcgaagccctctttttcaaggctgaggctccacaccgccagcggatactagctgctgagtctgcttccttcaatcgactttttgtggagcgggcatacaagtatcgccctgttaaggtggtggaatttgaacttccccggcagcagtgtgtggtttacttggatctgaagcgggaggaatgtgccaatttgttcccatctggccgagtatattcgcaggcattccatttaggcggacaagggtttttcttatcagcacattgcaacatggaccaacagagctctttccattgctttggcctgtttttaggaatgcaggaaaagggctcagttagctttgccgttgactatgaatttgctgcgaggtcaaggccaacagaggaatttgttagcaagtacaaaggcaattatgtattcactgggggaaaggccgttgggtatagaaacttgtttgcaattccatggacaacgttcatggctgaagatagtctttactttatcaatggtgtactccaccttagagctgagctcaccatcagacactgactgggatttatatgtgtaaaccttttcttctagttggtagctctgactttttttgggcaatgtgtctcattttccgataacctgctgtaatcttaactaatattcaggcaatgtgcactaggtggttagtgctggatgtgagatcaaatgaattttcgggaccttactttttctttcacttacatttacaagagtttgagtagctacaggaaggacgtttctcgtt

SEQ ID NO: 26967 - DNA, 1182 bp, Glycine max
  Clone ID: TF_GmC120817_1
ctcgagccgttttgacacagttcaaccctggtctttctgcctgtgattctcccttcttctccttcgatctccgcactttcccaatagccacagcaacacactcagttactcaccagtcaccaccgacatcatgtccgattcgaaggtcgaaaccatcgccagattagcccaatggaaaatcgacaacttcggaccctgctcctacaagaaatcagaccctttcaagctcggaatttggaactggttcatgtccatagagaggaacaggtacctctacatacacatctttccggagccttctcggcttactaaggaacagccacccgtggcacgcttcatcctgcgagtctccaacaactctggccctacccgcaaattttacatttcccctgttcatgaaagggtgcttaggacatgtgaagactttgtctggcctgttgatactgcattccttggtcgcttcgttattgatattgaatttcttgacctgaggacctgccccgtgaatggtgaaaccagatctgtatggccatctgatggaaaactgcaaactgttgcagctcaaagcactcttcgatgcttgtcccgtatgcttgatgaggctatacatgctgacctcaccattatcactgcagatggtaccctgagggctcataaggcagttgtatctgcaagttctactgtgttccatagcttgtatcttcacaatggtgatgagaaagagacatctacaatccacatagaagatatgtctcaagaatcctgcatggcccttctgagttacttgtacggcactataaagcaacaagatttctggaagcacaggcttgcattgcttggagcagccaataaatatgagattggtgatctcaaagatgccagtgaggaaagcctactggaagatcttaactcgggaaatgttctggataggttaaatgatgcttggctttaccagttgcaagcgttaaagaaaggatgtttctcatacttattttattatggtaagatttatgatgttagagacgaaatggatacctttttccgacatgcagatagggagctaatgctggagatgtttcaggaagtgcttacaatttcgaaataggttgccatgaaactcttagcacccttgtatcttgcaaatgatggatccttttgtgcaatcatgtttttttactttcc

SEQ ID NO: 26968 - DNA, 1551 bp, Glycine max
  Clone ID: TF_uC-gmrominsoy195d07_FLI
tgagaatcaagatgaagagcctgatgcaatggttgaagaacctcattctggtgatgaagctacaaacagtaatgattcagactggagcatggattgctctgcaggtgcagttgttagagttaaaacactgcatatcagttctcctatcctggctgctaagagtcctttcttctataagcttttctcaaatgggatgaaggagtctgatcaaagacatgtcaccctcagaattaatgcctctgaagaggttgctctcatggagctactgaattttatgtacagtaataccttgaccactactacggcacctgcattgctggatgtgttgatggctgctgataaatttgaagttgcttcatgcatgagatattgtagccgattattgcggaatatgcctatgacacctgactctgcattgctttatctggagcttccttctagtgtcttaatggctgatgcagtccaaccattgactgatgctgcaaaacagtatcttgctggtcgatacaaggatataaccaagttccaggaagaagttatggccttgcccctagctggagtagaggcaatattgtctagtgatgatctccaggtcgcatcagaagatgctgtatatgattttgtgttgaagtggtctcgacagcagtaccctaaactggaagataggcgagaagtcctgggtgcccggcttgcacgactaattcgcttcccttacatgacctgccgaaagcttaagaaggtcttgacctgttccgactttgaccatgacattgcatccaagcttgtactcgagggcctatttttcaaggccgaggctccgcaccgccaacggtcgctggcagcagaagactccgcttcttcaaaccgtcgttttgtggagagggcatacaagtaccgccccgtgaaggtggtagaattcgaacttccccggcagcagtgtgtggtgtacttggatctaaagcgggaggagtgtaacaacctgttcccgtccggccgggtttattctcaggcattccatttgggtggacaaggttttttcctatcagcacattgcaacatggaccaacaaagctctttccattgctttgggctgtttttgggaatgcaggaaaagggctcagtgagcttcgccgtcgactatgagtttgctgcgaggtctaggccgacggaggaatttgttagcaagtacaaaggcaactacgtgttcacagggggaaaggccgtcggctatagaaacttgtttgctattccatggacttcgttcatggccgaggatagtctttactttatcaatggtgtcctccaccttagggctgagctcacaatcaaacactgaccccaatttctagtggtaaactcacattctattccagttggtagccttgacctttttttagatctcgaattctcattttctgttaacacaagtaaatgagtaatctatcaaaagcttaaatatacaggcatgtgcactaaagtggctagtgttgcttgtgattgagaagatataactaggaccgttatatgttatctagtattctaggttaagtg

SEQ ID NO: 26969 - DNA, 1017 bp, Glycine max
  Clone ID: TF_GmC1416_4
aattcggctcgagctcagcaactgaaacaattgaaattaacaggccagtacagtgatgtaaacatctacattgagggttatgggctcattgcacgagctcataaaattgttcttagcttatggagtatcccctttgctcggatgttcacaaatggaatgagtgaaagcatgtcctcggaggttactttaagggatgtcccaccggaagctttcaaggctatgcttaactttttatatgatgggcaattgaatgacaaagttatagattctggtgctttgttgctccaactccttctattagctgatcaatttggagtgacttttcttcaacaagaatgctgcaaaatgcttttagaatgtctctcagaggactcagtatgtccactcctccaagtggtttcttcaatgccatcatgtagacttattaaagaatcattgcagaggagaatttccatgaactttgactattatatcagtgcgagtactgactttgtgttattagatgagacaactttaatcaatatcattaagcatccagatctgacagtaacgtctgaagagaaagtccttaatgcaattctaatgtttggcatgaatgcaaaacagttgtttgggtgggaagtggtggatcagttaatggaaaattcaaaaccagaactcctttttggtgagaggcttcagttaatctatgacttgttgccatttgtgcgatttccactactacaatattccttacttgagaagttgcagcatagcagcattggccggcatattcctgttttccaaaatcttgttaacgaggctatcaattttgttaaatgtgggctggcagagtcagaaaattaaaagaagtaagttcttccccttagtttgtctccttagcttcttcattggggtatttaagtcaggcactgccctttgactgtgtaatttttcaatatttagactgtagcctctgcagtaaataacaatagcttatttggttgtgaaaataatctgccctcttattaattattg

SEQ ID NO: 26970 - DNA, 1264 bp, Glycine max
  Clone ID: TF_GmC976_2
acctgggaaagccgggagagtttttgttggagggaattttggactgcatccatgaaatcacaacagctcttgcttttgctgataggatgagcgattctgcatacagagtcgaaaccacgccgcgccttgctcaatggagaatcgaaaacttggcttcttgcacttaccgaaaatccgatcctttcaagatcggaaactggaattggcatttgtcggtggagaaaaacagggttttgtttgttaaattgttcccagaaatatccaatcttacgagagacaaccccccaattgcatctttcatcgttcgggtggttagttctgttggagatcgcaaggccatcacacatccagaaataaaggacaaagtgttaaagaacaacgaggattttgtttgggcaattgaggttccactaactggaaaattcattattgacgtagagtttcttgatttgaagactgcatccccaaacggaggagaaggcataatgtattccttgttccatttgggcagaaggatttactcagcaaagatcaaatgcaaaagccatagagtctcttggtagaatgctaacagaaggcattcacacagacatcaccatcaatgcttctgatggaagtataggagctcatagagctgttcttgctgccagatcacctgtcttccgcagcatgttctcacataatcttcaggagaaagagttatcaaccataaacatctcagacatgtcacttgaatcatgccaggcttttctctattatctttatgggataatcaaacatgaagagtttctgactcataggctggcccttctgcaggcggctgacaagtatgacatatctgacttgagagatgtatgccacgaaagtcttctagaagatattgacacaaagaatgtacttgagaggctccaaaatgcatctctatatcagttgatgaaacttcctgcgaaatgcagatagggatctgatttctgaagtcttccatgaagttcttgatgcttggaaaggattctgaagatcttgcagttcaatttaagtgtgttttgttctgccttcaaaaggacatgaaagatgaaactgcaaatgtggaccaccaagttttgctcacataactctgatttttgaagtcttccatgaagttcttgatgcttggaaaggattctgaagatcttgcagttcaatttaagtgtgttttgttctgccttcaaaaggacatgaaagatgaaactgcaaatgtggaccaccaagttttctcacataacta

SEQ ID NO: 26971 - DNA, 1247 bp, Glycine max
  Clone ID: TF_GmC130_2
cccacgcgtccgtaatgagtgagtagatgttacaggagaatttataattgctcttcttcttatatactatggtatatgacataagtttggaagtcaaaatggtttagacacagtccaacgttgtaggtttggtgtttgtcatgtcataagacgaagaaaggcatgggtgatagggtggagacgcttgccagattagcccagtggaaaatcgacaactttggaccttgttcctacaaaaaatctgaccccttcaagctcggaatctggaactggttttgaaggataatccacccttttctcgattcgttcttcgagtctccgcagcttcatatttcccctgttcaagaaaagctgcttaggacacatgatgactttgtctggcctgtggatacgacttttgttggtcgcctcatcattgatgttgagtttctagacctgaagatatgccctccgaatggtggagaaactagttctgtatggccttctgatggaaattctcaatccattgcatttcaaaataacactcttggttgcctttctcggatgcttgatgaggctattcacgcttgcttacccatcatgactgctgatggcagcacattgagagctcataaggcagttctctcagctagttctccagtgttccagagcatgtatcatctcaacctgaaggaaaaatagtcctccacaattcatatagaagacatgtcacttgagtcctgcacggctcttctaagttacttgtatggaacaatcaagcaagaagatttctggaaacaccggcttgcattgcttggagctgcaaataaatgacattggaagtctcaaagacatctgtgaggaaagccttctggaagatctcagcacaagaaatgttcttgagaagctaaatgaggcttggctttatcaattgcataagttaaagaaaggatgtttggtgttcttatttcaatttggtaagatacatgatattaaagatgaaataaataattttttccagcatgcagataaggagctaatgctggagatgtttcaggaggtgccttcaatttcaaacccggtataggttaactcatggatcctgtaaatgatatatcgatgtgtataatcaagtttgttacttttttattgtacagtgtaacttttcgtaatacttaactgtcctctgcctaaaggcctggaggttaagggtaaatgaaagtgtatttgagtgatcatttacaaggtatattatttagtacttatgg

SEQ ID NO: 26972 - DNA, 2130 bp, Glycine max
  Clone ID: TF_GmC1467_1
cccacgcgtccgctccacccaacaaaccacctctccttcctctcccccaaaatttttaatcaaaattcaaattccaaattcctcagattcgcaaaaatccctttctgcgtcgtcgcattgtatgagcctcgaattccgatcccgataggcatggccggagcggcgttatcgccgccgacgagttcgaagtcggtgacgcagacggtgaacgggtcgcacaagttcgtgatcgagggatactccctggcgaaagggatgggagtggggaagcacattgcgagcgacgtgttcacggtgggagggttccactgggcgatctacttctaccccgatggcaagaatcccgaggacaattccgcctacgtctccgtcttcatcgcgttggcgagcgaaggcaccgacgtcagggccctcttcgagctcacgctcctcgaccagagcggccaggggaaacacaaggtccacagtggttatctttcccaggctctccttatatggaaaattgatgctagatcagtctgaaagtatgctgttgtgttgacatgtgtaaaatcttgatctctttttgtgctttcatagggggtacaagcggtttttcagacggtctttgcttgaaacctctgaattcctcaagaatgattgtttgaaaatcaactgtacagttggagttgtggtttcagcaattgattgtccacaacttcactctattaacatcccggaatctgacattggatcacactttggtgcactattggataatatggaaggttcagatattacttttgatgtagctggggataagttccctgctcataagttggtgttggctgccagatccccagaatttcgatctaaattttttaatggtttagatgaagaaaagaatgagattattgtaacagatttagaaccaaaggtttttaaggtaaaaactatatgtttcccctttccatattttctttccctggtagcatcaagcttgtttaggatttattctgttattctgtatttttctgttagattttcttgttaggtttctttttcttgatagaaaaaggatcttacaggagttcaagtcttcaagaggtaaagtacaactagggaggatgaatatcctgatttttcctctttttacaggccatgctgcactttatctacaaagatactcttacagaagaggtggacacggtttcatcaaccacaactagtgactttccggtttctgagatattgacagcaaaattgttagcagcagcagacaagtatgacttgggtaggcttagattgatgtgtgaatctcgtctttgtaaggacatttgtgtgaattctgtagccaatattttaaccttggctgatcattgccatgccacggagttgaaagctgtttgcctaaaatttgctgctcaaaatctagcagctgtcatgagatcagatggatttgagcatatgaaagaaaaaggcccatggctacaatcagagatcctgaagacaattgctgggtgtgagggtgatggttgcagcgcagtggaaaagtctcagagtgtatggggccaactttcagatggcggtgacatgaatggtagaagggtcaggcagagaatctgatacctgttgcacactggtatctctctgattctttggtaaaatgcaggtgataatgccgaaaaattggggggtaaaaaagaaaaaggcaaagaagacgaaaaacccttttctcttctgtccaacttttccatgttccaatggaaagtttagaaaaagcgggtagactagatgtataaaaagagatgtcattagtgtgtgtacgttgttagtgcagagtggtcattgaaaatgaacttatctgcagtagactattgatattgactatactttggaagtggatatttggttgctggactttatctcttccatttgctttccccttttctgtactcgattccaacagaatgttagtagaagtaggttcattaggatggctattgttataccatgtacaaaatattcattttgtaacaattgttttttcatggcacacctgccatacaaagagccagtgattctggtttggtggtctgttttgattgacgttgatgactaaaaaaaaaaaaaaaaaaaaacacgccccgc

SEQ ID NO: 26973 - DNA, 2229 bp, Glycine max
  Clone ID: TF_GmC1493_1
ggctcgaccgaaaaagaagaaaaaaaaaagcaaagaaaatcctgtttcccgataaaaaccccgtccgtacatggtctggtcacgcggatcgggttgattgagatgcacaccgcgagcaggagcaacggcggcggcggcggcgtgctggcgtcgcggacgagttcgcggtcggtgacggagacggtgaacgggtcgcacaagttcgtgataaagggatactcgctggcgaaggggatcggagtcggaaaacacatcgcgagcgagacgttcacggtaggagggtaccagtgggcgatatacttctaccctgacggcaagaacccagaggacaactccgcctacgtctccgtcttcatcgcgctcgcctccgagggcaccgacgtccgcgccctgtttgagctcacgctgctcgaccagagcgggaatgggaagcacaaggtgcatagccacttcgatcgctcgctcgagagcggcccctacactctcaaataccgcggcagcatgtgggggtataagagatttttcaaacgggctcaactcgaggcgtcaactttcctcaaggatgactgcttgaagataaactgcactgttggtgttgtggtgtcttccattgattgttccaagttaaacacaatacaggttcccgaatccgatattggggcacatttcgggatgctgttagagaatgaggagggatcagatgttactttctctgtcggtggagaaaggtttcatgcacataagcttgttttggctgctcgatcaactgcatttgaaaccgagttttttaatgggatggaggaggatgatcatgatgtagttgttactgacatggaaccaaaagttttcaaggctttgcttcattttatttatagagacactctaatagatgatgaagagctctttatgtcacgttcatcattcttgccttcggtatctgaatcatttgctgcaaagttgttagctgctgcagaaaagtatggtttgccaagacttaaactgatgtgcgagtctgtactttgcaaagacatctccatagattctgttgcctatattctggctcttgctgatcgttatcgtgctacagaattgaagtctgtctgtctacaattttctgctgaaaaccttgtcgctgtgatgcaatctgatggttttgagtatcttaaggaaaattgtcccttgctgcaatcagaactgctaaagactgtggcaggatgcgaggaggaatttagtggagaaggaaagtgtcgaagtgtgtgggcccaattttctgatggtggtgacaccaatgataggagtgtaagacaacaaacctgggaaaatggtgttgaaagaagtcaaagcttatgggttcacctttctgatggtgttaacaacaatgataggagtccagggcaagaaacctgacaaggtaaggtacaccatcatttgtctgttaggcttaaatggtagattaaaagctactgcagggataagattaaccaattgtgcggactggcaaaaggttagaaatgcaaacaatgtaaagaacgaaggctgagatactgcctccattgtaataatattatgtcttataaatactgttttttctttgataatatgattacaaggatgcagtggtagcaataagtaattacattgatcattgtatgaaagtttgttgagaacattttcattaagaactggtcttgtttacttggcggttgtatttcatgaagaaatttgttttcgagctataaaaatagccgtattttctggtctaaaatgaaaatttgttgggaacattttcatgaagaaactggccttgctttacttggtgtttgtattacatgaagaaatttattttcgggctataatctgatcttcattgcatgcagtgttgtttttcttttcttttaacgggggatagtggttgactggttgcgaatagtagattcatcttgtaacgttagtgatgtatcttttaacatcaatgaatgctagcaagttaacaaaatgagatgaagtgacaaaacaaaagttcttggttacctttggttgtatctatagatcttttctcttttagggttggaggttgtacaccccgtttgctgaacacaggacaactcatttatgattgctgtagctttacaccgtgggaatcttcatccttgtgaattgtgaaacctatggatcaaattagacttgtatatagcccttaaaccatcaatataatgtggctttatctaa

SEQ ID NO: 26974 - DNA, 1301 bp, Glycine max
  Clone ID: TF_GmC141_7
ggctcgagaaaagggcccacgcgtccggttgctttggctcttgcacatctttgctcttcagatgatcagagaataatttttatcgatcactatggtcttgagttgcttattgggcttcttggctcatctagctctaagcagcaacttgatggtgctgtagctttaagcaagttagccaataaagccttgaccttgtctcctgtggatgctgctcctccttctccaacaccacaggtctatttaggagagcagtatgtaaacaatgctacattgtctgacgttacatttttggttgaaggcaaacgattttatgctcatcgaatttgtcttcttgcatcatcagatgcatttcgtgcaatgtttgatggtggttacacggagaaggaggcaagggacatagagattccaaatattagatgggaggtttttgagttgatgatgagatttgtatattgtggatcagttgatgtcactctggatattgctctagatcttctccgagcagccaatcaatatcttttggaaggacttaagagactctgtgagtacacaattgcacaggatatatcgccagagaatgtgtcaagtatgtatgaactttcagaagccttcaatgcaatatcattgaggcatgcatgcatcctttttatcttggagcaatttgataaattgagttcaaggccagggcactctcttctgattcagcgcataataccagagatccgcaattactttgttaaagctcttacaaaggccaactctcatgacaaccaactgtagtatgcacccattttattcttgacctctaaccgattgtgttgtacagaatgtagtagatgttattccttttgttgtaccaggtagcagtctcctgtatggtatacagcttgggtaaaagaaatatctaacgccggagtcatgcttcttcttctttttaaatgaggtgtaagcccctttgtgtctgtaacgtcattatcatagatatagcaaatatgaccttcaggaacattgtttttttctcatgcaatgtgacggttatatgacttaacagttcttctctcagatagctacgttcagggaattaccattgttgactttatgattatatgtgtaaatattgtttcccgtgtatatatgaacaagaagttttctgcaaggaaattgtgccgctggggttacttctgccagaccattaaaaactgtcacctgacatggaatgtgttgtaaattattgttgcaaatacttcattcaaatattcaaagtcgaaggcatgctgctgatgcggcccaaaattgttctt

SEQ ID NO: 26975 - DNA, 1867 bp, Glycine max
  unsure (1)..(1867): unsure at all n locations
  Clone ID: TF_GmC44146_1
gacccatgcgtgaaatgcttattattacaaacaacagaaataacaaatcaaaatactcaaaggatttaaaatgacagaggccgacacagatgatgttggtacgaagtgtaacttctcgttcgcattcaacaacatcaatttctcagaccgaattctcaacattgaggttatacccgaccctcatttcatccgcgcccaatcccattctctctctaccctcgctccaaatcgtaagagacgcagactctctcttatgaaagccaatgatgtcctcttgcaacctgaggaaaaattaaattgtaatttaccagatgcagaggaagttgtggcaatcactgaggcatcactttcaggtgatgaagtttctcatggcaatgattcatcattgggcatgagttggtcaaaagttcttagagttaggaccatacagataagttctccaattcttgcagaaaaaagccccttcttttacaagttgttttcaaatgtgacgcgagagtctaagcaacaaaatgtgactcttcaaatccatgattctgaagaggctgccgttatggacctacttaattttatgtatagtaatactttatcaagaacgacatctgctgctgtattggacgtgctgatggctgcagataaatttgaggttatgtcatgcataaggtattgcagtaggatgttggggttaatgcctatgacctgtgagtctgccttactttatttggatcttccttcaaacattttgacattagatgcaattcaaccactggtagacacagcaaagttgtttcttgccacacactacagagacataacaaagtttgcagatgaactgctgaatttacccttggctggcattgaagcagtgctatctagtgatgacctccagatgccttcagaggatgttgtctttgagtttgtgctcaagtgggctaggatacattatccaaaaattgaggaccggaaagatgtccttgaagcacgccttggtcgactcatccgttttccatacatgagctcccgaaagcttaagaaggtcttaacatgcaatgacttccatcctgactttgcatcaagggttcggctcgaggctctcttctacaaggcagagacaccatatcgacaacggtctcttgctgcacaagatgctggcaccacctactctcgattggtggagcgagcttacaagctccgccatgtgaaggtggttgaatttgcattgccccgtccacggtgtgtggtatacctggacctaaagaaagaagaatgtgcacaattttttcctaatgctcgaatttactctcaagcattccccctaggggagcaatggtttttcttgtcagctcgctgcaatatggaccagcaaaatgcatctcattgctttgggcttttcttagcagtgcaattcaagggatcagtatctcttcatgttgactatgaatttgctgctagatcaaaatcgactgaggagtatataagcaggtgcaagggagattatactttcacggcgggcaaggctgtagggtataggaacctgtttggtattccatggactgcattcatagcagacgatagccattttttcatcaagggattacttcatctaagggctgaacttactattagacaatgactcctttgtaggattggtgctctctactttctagcttttgatgactaatgtcctatatttttctgtctctaactgcattaaggagatgaaagaataggatttggtgtaattatacatactaataatttgattgtagaatagttccgaactggtgtagacattgactgtcatgacattgcttactcgaactggtgtaaatactgaacgatgtcacactatcacattcataattna

SEQ ID NO: 26976 - DNA, 544 bp, Glycine max
  Clone ID: TF_GmC581776_1
gcaagatcagaaatatttaagaacatgctagagtgcgatgaatgcaaggcagcaccaagtaacgccataactatacccgatttgaaccatgaagaactagagtctctccttgagtttctgtacagtgggacattgaatgtggaaaaattggagaaacatgtctacgctttgtcacaagcagctgataagtatgtgattccacatttgctgaaacacttcgaaagatatatgctgagttctataagcacttccaatggtcttgaggcactaggaattgcggatacttgttccaacctcaaagtgaaggagccaaccttgaactttttagttaaaaacattgagcacatggtgtcctcacctaaatttgaagcttttgtccataggagcccacatcttaatgtggagctagttgcaagggcgtttgtgaatggtgccaaataatcaaaattgtctccaccaatgttttttcctttttcaatttaataatgtatttatccaagcctataaacataataatataattcatgccttgttctcttcaaaa

SEQ ID NO: 26977 - DNA, 975 bp, Glycine max
  Clone ID: TF_GmC129068_1
tgtttctctctcttccactctctctccaacaaaaaatatctatctatcataataccctcactcacgcatacacaagaatttttcccatcctaaaaccatgaccctccattcaccattcaccgagcgaatcccataaaaacaacacccacagtaccatcatcatcatcatcatcatcaacaaaaaacggatgaacccaaccttctcccttccctcactattccatctctctcaccttttccctttaacaatccctctctctctttctctctctcttgctcttgcttttgcttagcaataagttacaaccaccaaccctagagagcgttgaggcgacaacacagtacatcaggaacagcaaacaaggcagtaacaaacaacagcaacagttaccatcaccaccaccatcatcaccatgtcccttgaagagtcgctaagatctctttctcttgattacctcaacctcctcatcaacgggcaggccttcagcgacgtcactttcagtgtggagggccgcctggtccacgcgcaccgctgcatactcgccgccaggagcctcttcttcaggaaattcttctgtgggccggacgcgccgtgcggcctcgaccctgccggaccgcgaggcgttaactcctcgcgctccggggtaatccccgtcaactcggtgggctatgaggtgtttctcctcatgctccagtttctctacagtggccaggtctccatcgtgccccagaagcacgaggccaggcccaattgcggcgagcgcggctgctggcacacgcattgcacctccgccgtcgatctcgccctcgacaccctcgccgccgctagatactttggcgtcgaaccgctcgcattgctcactcagaaacaactggcgagcatggtagagaaggcttcaatagaggatgtaatgaaagtgctgttggcatcaagaaagcaagacatgcagcaactatggtcgacatgttcccact

SEQ ID NO: 26978 - DNA, 2619 bp, Glycine max
  Clone ID: TF_GmC141_2
ccttcacgcccgaacttattcaccaaagagaaaccaaaaggctcaaaacacaaccatgatcaatcatgctctttgtttcttagtattcctatctgcactccatgcaacacatgcagttgaatacactgtcactaacaacgcactctcaactcctggcggcgtggctttccgtgacaaaataggggctgaatacgccaagcgaacacttgactcggccacccaattcatatggaggatctttcagcaaaacaacccttctgacagaaaaaatgtgcagaaggtaagcttattcgttgatgacatggatggtgttgcatatactagcaacaatcaaatccatctcagtgcaagatacgttggaaacaataaaggggacgtgaaaacagagataacaggtgtgctgtaccatgaaatggtgcacgtttggcagtggagtgggaatggtcgtgctcctggtggattaattgaaggtattgcggactatgttaggctgaaggcaaactatgcacctagtcactgggtgaaagcagggcaaggacagaaatgggaccagggttatgatgttactgcacgcttatttggactattgtgatagtctcaaaagtgggtattgtggcacggctttaactcgagccgaatcggctcgagcactaatcttgctcatgagaacagcagcattaaaactcgtgtcaggaaggaaggcgggattccaccgcttgttcatttgcttgaatttgcggatacaaaggtgcaaagagcagctgctggtgcattgcgaacccttgcttttaaaaatgatgaaaataaaaatcagattgttgaatgcaatgcccttccaactcttattctaatgcttcgctcagaagatgctgctattcattatgaagcggttggtgtcattggaaatctggtccactcttcccctgatataaagaaagaagttcttcttgctggagccttgcaacctgttattggactacttagctcctgttgctctgaaagccagagggaagcagcattgttacttggacagtttgcagcaactgattcagactgcaaggttcacattgttcagagaggtgctgtccgacctctgatagagatgcttcagtcctctgatgttcagctaaaagaaatgtctgcctttgcattggggagattagcccaggacacacataaccaagctggtattgtgcacaatggtggtttgatgccattactgaagcttcttgactccaaaaatggctctttgcaacataatgctgcatttgctctttatggccttgcagataatgaggataatgtgtccgattttattagggtaggtggaattcagagactgcaggatggagagtttattgttcaagcaactaaagattgtgttgcaaagacattgaaaagattagaagagaagattcatggccgagttctgaaccatttgttatatctcatgcgagtttcagaaaaggcttttcaaaggcgagttgctttaactcttgctcacctttgctctgcagatgatcaaagaaaaatatttattgattataacggtttggagttgcttatgggacttcttggctcttataaccccaagcaacaacttgatggagctgtggctttatgcaagttggccaataaagctatgactctgtctcctgtagatgccgcacccccatctccaacaccccaggtgtatttgggagagcagtatgtaaacaatgctaccttgtctgacgttacatttttggttgaaggcaaacgattttatgctcacagaatctgcctgcttgcatcttcagatgcatttcgtgcaatgtttgatggtggttatagggagaaggaggcacgggacatagagattccaaacattagatgggaggtttttgagctgatgatgagatttatatacactggatcagtagatatcactcttgatattgcccaagatctcctccgagcagctgatcaatatcttttagaaggacttaaaagactatgcgagtacacaattgcacaggatatatcactggagaatgtgtcaagtatgtatgaactttcagaggcctttaacgctatatcattgaggcacacatgcatcctttttatattggagcactatgataaattgggtggaaagccaggacactctcaactgattcagcatataatacccgagatccagaattactttgttaaagccattacaaaggccaattccaatatccagccgtaatgtgctgttctactattgacatctaacccgttgcaatgtacataatgtggttgatgttctttttgttgaacctgcgaaggaagtctcctggatcaagtacagcatggcttaaaaaaaatatctaacatcacgtcatgtacgttcatttctgatgcagtgtaagtcccttctagctgtaacgtcattgtcttagatatagcaaatatgaccttcacgaacattgttttttactcgtgcaaatattgtgatggttgagactttctctttctcaagcatctaatgttgagtttatgagtagtataggttgcccaagcatctaatgtatatatgacaattagatagttgtcttcatattatataatgaaatcttaaagccttttcaatgg

SEQ ID NO: 26979 - DNA, 2112 bp, Glycine max
  Clone ID: TF_GmC1802_1
ctccacaaaaacaaacagaaccacaaagacaggttttgttgctcttctgtggttcttccagagagagagagagagggttgaagaggatgttctgagaggaccgctttatctgaaaaaagatcttggtttgcagaaagtcatctttcagagagagagagagagagagagaaagaggtgtaatagaaaaagagtgttgtcttttgtttgtttgtaactttacattgaattccattatttttttctctctctctcttgtgttactcgctacaagctatatgactataaccgactccatcttttaccgtggaagaaggaaatgaatatcacaagtggaagaagacacagaaggcgctaggagcatagctactttaagagagaacaaggagcaagagaagaaaacaacaaaaacaaaagcttttaggttgttctttctcttgtgtcatggcttcttcaaagaccaccaacccaacaacaactactacacaattggaaccactcccaccacctcaacaacgccatcctcctcctcctcatcatcagttgcaacaacaccaccaccaccaccatcatcatcaacaaattcatgaccatcatcaaatttcttttggaatgatgcaatcctcttcttcattttcctctatccccggaaactaccttataagcaaggattccggagcttatgacttgggtgaattggatcaagcctttttcctctaccttgatggacaagcagacccttctagtgttcaagaccaaagacaaaactcatcatcaggaatgaggcctccaactctcaacattttcccctctaagcctatgcatgtagagccatcatcatccaaggccaaggctaacatagagctagtttctccacaaacaagtggatcaaagaggccatcagagccgtcgatggagttggccaaccctcgaaacgaaactgcttctgcccctcagccacccaaacctgtcaagcgagagagcaaccgcaaaggtccaacgtcaagttctgaacatgaaggacctaaaacaccagatcctaagacactcagaagacttgctcagaatagagaggcagctaggaaaagcaggcttaggaaaaaggcatatgttcaacaactagagtcgagtaggattaggctgaatcagctggaacaagagctacaacgtgctagaactcagggcatgttcttgggtggaggcgcacttttgggtggagagcaaggccttcctgtcactatgaatactattagcacggaggctgcaatgtttgacgtagaatatgctagatggcaagaggagcaccaccgcatagtgtgtgagctaagagctgcagtgcaagagcaccttcctgaaaacgagcttagactgtttgtggacaattgtttggcgcattatgatcaagtgatgaacctcaagagcttagtggccaaaacagatgtgttccatcttgtttctggcacgtggaagaccccagctgaacgttgcttcatgtggatcggtggtttcaggccatctgaactcatcaagattattgtgcgtcaaattgagcctctcacggagcaacaaatattgggcatatgtggattgcaacaatctacacaagaagcagaagaggctctctcccaagggctcgaggctcttaatcaatctctctcagacactataacatcagattctcttagttatcctcccaatatggctaactatatgggacagatggctgtagccatgaacaagctctccactcttgaaggtttcgtgagacaggctgataatcagaggcaccaaaccattcaccgtctgcaccagatcctaacaacgcgtcaagcagcaaggtgttttctggccatagctgagtacttccatcgtcttcgagccctcagttctttgtggctggcacgccctcgccaagaataggctcagtactccctagctctagctagctatatatgcatgcccttaacttatatatatagcttcttaatttctctttaattataaattaaatgttatatctctcttcatcactcctctctcccactgcatcatgggctgtatagatacagtgatatatagacagatcattaatatagaatttaatgttaacaacta

SEQ ID NO: 26980 - DNA, 1891 bp, Glycine max
  Clone ID: TF_GmC6275_4
acacaccaatccacttattcacattcaatttatattgtcaattgtttacaggattttcactttgcaatgggagcattgcagtgttattggtagtatgtgaaatacacaacagcaatgaacacacgtacaaaagtgcagctagcaggatttgtttccttatagaaaattggattgatgatccacttgtagctagcaggatatataatcatatcttgattccaggcagaatctcacaactagaataccgagctctctgcatcatctttggtgaaacacattggtggcttgatcctaaaaacatttccatgcagccctcctttttcaactagaataccgagctctctgaatttaatccataaaataacaaataaaaattctcgtcgtattaatcattgatctagcctcttctctctctctctctctctctctctgtctatgaacacaacccttctttccttccgcgacgacaacaacaacgatgaccaactacgcaattccaaccgacacaccttgcaccaaccttgagttcatctcacgcgccaattctgaaccaacacagtgacgggaaggaagggtcttgcgttgctctgcggtttgatagatagctgccctgttggcatgaagatttgagcgggaaaataataagacaacatacataacgttttctcaaagtggtttttttattttattttttttatcataagacggcagtttgcctgcactgatcagttcttagagcatgaattcagcatccccgcagtttgtttcctcaagaaggatgagtgtgtacgatccgatccaccagattagtatgtggggagaaggcttcaaaagtaatggaaatttaagtgcagccatgcctctaattgatgagacagacatgaagtttgatagtcagtcagaggatgcttctcatggtatactgggagagcctaataagtatgaccaagaagctaacaaacctactgataagggtgacaatgacaagtatgttagtcctgccattttggactttgaggaatctgtatttaatttggatatacaaagacgtcttgcacaaaatcgagaggctgctcgtaagagtcggttgaggaaaaaggcctatgtgcagcagttagaatcaagtcgtttgaagttgatgcagttggagcaagagcttgaacgtgcaagacagcaggcaacaaaactgcagggaatttatataggcggtgggttggattctaatcatctgggttttgctggatcagtaaattcaggaattacaacctttgagatggagtatggacattgggtgaatgagcaaaatagacaaatcacagaactgagaaatgctttaaatgctcatattggtgacgtagagctcaggattttagtagatggtatgatgagccactatgccgaaatgtttcgcatgaaatctgctgctgcaaaagcagatgtcttctatgttatgtccggcatgtggaaaacaacagctgaaagatttttcctatggattggaggctttcgcccctctgagcttctaaaggttcttggccccctgattgaacccctgacggagcaacaacgtttggatatctataaccttggacaatcatgtcaacaagcagaagatgccctttcacaaggtatggacaaactccggcaaacacttgctgatagtgtagcagctgggcagttcatggaaggaacatatattccacagatgacttctgcaatggacaagttgaaagctctggtgagctttgtgaaccaggaaactttgcagcaaatgtctcgaatacttacaatccgtcaggcagctcgatgcttgcttgctttgggggaatatttccaacgcctgagggctttgagctcactgtggtctaatagacctcgtgaacctgcttag

SEQ ID NO: 26981 - DNA, 554 bp, Glycine max
  Clone ID: TF_LIB4198-005-Q1-N1-F7
ctcatgaataaattatttaaaactctacaacatatttttttgtcactaaatggaaaaaggacctagtaaaaggcttaaaattttatgattttcataataaacccaacctatgattagaaaggctatataatgaatggtaaaactagaatgttccccaggaaatttttactacaaggatttcactgaggtgttataactagacaagcctaataagaagaacaaataagccgttggatgcaaatgcatcaaatagctactattcctgagagacaagaagtctgttgtcaactcacattaaactaaaggaagcatcccttgatgcctcatatctacaaacctgtccttacaggtacagatgtcagaatgaagccgatgatgttcggcgaatctggtatctaggttcaggaggtggattgcttgacaacattttctctagctcctgctgtctcctcagcttttcgttttcctcttccaaacgagagactttgtgctccaattcagttgtgtaagcctgtttccttgctctagaacgggcagcagattcccgattcttg

SEQ ID NO: 26982 - DNA, 1770 bp, Glycine max
  Clone ID: TF_GmC1880_2
ggagaaaagaggaaacgagaggagcattgcagaggtggggaacctggaatggaatctctgatccattttgtgtgttgaatttgattttgtattgttatagattacagatttggtgggcaatggatagggacaacaaatctcctccaccttcttctctttatgtgaaatcatcatcttcatccttcagccacgacgacataagcgccatgccggagaatccacccaagaacagaggccacagacgcgcccattccgagattataaccctaccggacgacctatccttcgacgctgatctccttcccgacgacgacaacgacttgctctccctctacctccaattcgatcagctcgattcctcttcacttcctcctcctcctcctcctcctcctcctcacaacaacattaatgaaaggtcaactagggttagacaccaacacagccactccatggatggctccatccacctggagatgctgctctctgccgcctccgccgccgatgacgtctccggtggcatcgacaccaaaaaggctatgtctgctgacaagcttgctgagcttgccttagttgatcccaagcgggctaagaggatatgggcaaatagacagtctgctgcaagatcaaaagaaaggaagatgcgttacatttccgagcttgaaaggaaagtgcagacattgcaaactgaagcacatccttgtctgcacaattaactcttttgcagagagatacacatggaaatgactgctgactgaagcgagttgattgtccgattgcttccatggagcaacacgtcgagatacacatggattaactgatgcgttcagtgagttgaagttgcgattgcaaaccatggagcaacaggtccacttgcaagatgcattaaatgatgcattaaaagaagaaattcagcatttgaaagcactgactggacaagttatgccgaatggaggaccggttaattttgcttcatttggtggggggcaacaattctatcccaacaatcaggctatgcacactcttttagctgcacaaaagtttcaacaacttcaaattcattcccaaaagcagcagcagcatcaacttcagcagcaacagcaatttcagcatcaacttcagcagcaacaacagtttcaccagcagcaacaacagctgcaactgcaacaacagctgcagcaacagcaacaacaacagcagcagcaacagcaacaacaaacagcagcaacaggaacagtaacatcaacaaacgggggacatgaatagggaggggacacagatagcacctcatcaaatgtaaatccttctgcggcagaggattttagagactacaaattgctttctcttcatcacttttaattacccttttgtttagagtttgtttaggtcacagtcattatatttcttattcatgaaacactacagatagtcctagttagagattgagaattatgcattggatcttggctatgcaaaattctttgccacctttggttgtggatcagcggggcggatttatgtttgttaagtctttcaattgctttcgcctatggctatgcctgcacaagtggtctgtttagattcacaatttccgcgggaattgctgtatgttctcctaaactagcatcccaccgaaaacacttgggttgtctggcacttaacagagggggttccattcaagtttcttttaggttgttgatgttaaatttctacatttgctctaacaatttttataattattctcagaaattttacattctcaggaatcatttt

SEQ ID NO: 26983 - DNA, 520 bp, Glycine max
  unsure (1)..(520): unsure at all n locations
  Clone ID: TF_jC-gmro02910021c05d1
ggctcgagctttttcaccttccccctttgtttctcaacatcattctcctcattcccctacctacccccaattttcccttctgtatttctctttttcaattctcgatttcccttctcccttttgtggcttcataatccagatcctctactggctctacgtcttgtcatgaactaactccctctcaatcccctaccctaattcctccaatttccccatttttttttctaattaatcagatttgcaaaatcctaatttctctatcctaacaaaacccccaaattcaaacaaatccaatggcttcgattccgcgtccggctgcgatggacgagagaaagaggaagcggatggagtcgaaccgcgagtccgactgacgatcgcggatgaagaagcagaagctgctcgaagacctatccgacgtancgagtcgccttcaaggcgagaacgtgcgcttagcgcagagcataaaggcgaaggagggagcgtacgttgagatcgaagccgcgaacgacatcctcagagc

SEQ ID NO: 26984 - DNA, 1410 bp, Glycine max
  unsure (1)..(1410): unsure at all n locations
  Clone ID: TF_GmC1347_1
ngaatctcgataaataaattattttctcttctccaaaattcaactcaataatcccttccctggttcccatcatggacgaattagaagaaaccctactcacccaaatcgactgggaatcgttcctcgacgacatacctgaacttaacgtcgatgattttttgcaggacgacaacgccgttcctgttgttaccgacaatcattcctccccgaacgacgaccccgttttgtccgagatcgagaacatgctcatgacgcaggccgaaaacgacgctgtcgttttgcccgagacgccgtcttcggaggccgggtattacaagctcttcgaggagattctggtggaggagcccaaggaaggacccgtgagcccgccttcaaaaatagagtccgaggaaggctccgacaaagacaagaccgatgatgctgcttccgatgaacccatgtcgaagaaattaaagaggcagttgaggaacagggatgctgctgtgaggtcaagggagaggaagaagttgtatgtgaaaaaccttgagatgaagagtaggtacctagaaggggaatgcagaagactggggcatttgctccagtgctgctatgctgagaacaacgctttgcggctttgcttgcaattgcgtggtacatatggtgcttcaatgaccatgcaggagtctgctgtgctcttgttggaacctctgctgttgggttccctgctgtggtgcatgggcatcatatgccatctcagtctgcctctaatgctgtgggttgcagcagtacttccaagagaaaacatcgagcagaagggcctaagaagggtaactcaaaaaggatcagaaagtaagatctctgagtgtttccagatgcaatcatttttaaagagtagaaaaagccgagcttcaagaacaaagatgaaattcaattttatagtgttctaatgttctataacttctgaagtgggggctctaaggttttctattcatctcttctttctttcgttcgttttctcttttgttttattggatttataaatacggtcgaacttgttagaggttctgtgatatgcttttttaggtgctgttcttgtaacttatattgggaccataacatgttgcgttcttatctttaacatagacgtcgttttgagtttttggcagttcaatgaaacttattgtttgcaccaaacctgctctaaaaaaaatgtaaattttctgcttatgccaaaatcagaacaaatttataacatggaaattccaacggactcaccaaacaagaagattcacttttatgcatgctaaacagagagtgattttaagatgtcaaaataataataatatccaagtcccgtgtggtcattattggtgaagaatgtgttatgaagctgacctaatgcagttcatgttaattagatgtcattttaaa

SEQ ID NO: 26985 - DNA, 2126 bp, Glycine max
  Clone ID: TF_GmC726_2
ccgtctttatgtccctttatttttttgagggttaaaaactgctgtgaaatatttttctaggattttggctaatcgtctatcagctgctcgctcaaaagagaggaagatgcggtacatttctgaattagagctcaaagtacaaacacttcagacagagacaaccacattgtctactcagtttaccaaattacaggtgtgtacggtctgagttgagccaatattcccttttcttcagtttttcaattatattttattgtgttgaataatgtttgcttctagcattcatttattcttttctttcctttcttttgttgtgcttgtctacagatggataattcagagctgaaaagtgagaataatgagtacaaattgaggattcaagccttggaacagcagtcccaactaaaagatggtatgcatatgcatttctcttctactttatctattagctcaaatctgctctagcttgttccacccagtaaagggtgaacttttccaactttatacagaaataacttatatttatcatctggttcaatgatctctgattttcatttagtaaatggattttatgtgtgataacacggttcaatattgtgttggttctcaacatgtaaatggctgatgttaattcactaaaagttgagtgattttctatccaattatgttcaaaatctctgcacaactgcgcctttgaaatctacctgtctggtctaggaatttgattcaatcttgcagaatgcaaagtacatttgcactagtagtctagtaccatgtttttctaaagttcttgttttgcatttcatggcctctttagaactgcatatgagaaaatgttagtgtaattttgccaacacagatggtgtcacttaaactctccttgatgccaaaatagaaagaaaaagagagagagaacacgatactaggaagggaattctgatagtcaaggttcaaatgttctttttattgtacatactaaaataatagaactctttatatatgatgtttcgattcttaatggaaaatagttgaaaactacactaatttcgttattaccacaaaacttctgttgtcttcatgcctaatgcctttatcagcagtgacttctttactagatgtttctttgtaatgcaattatacactgtaaacttgtatctccaagaccaaggcattggcaatatgtttttagcagcttgaacttgtaactcaatatgtatctccatttcatcagcctctcccttctaaaatgcactgtactgccttgtttttgtgctggagatgaatactttagctgtgctatccatcatttgtgtgcttgttttggcagctctgaatgagaccttggatgctgaagtgcggcgtttaagacgcacagttgcagaacttggtggagagtctcttctgctcaagtcgcatggctcaacagcttgctattagccaacaagtgttcccagttacagcaccagcagcaccctaaccagcttagacatgttcaactggacaatagccattcccaggagcagacacagactcagtcacagtgccacaatggcaaagctactgcctactgattagcactctgataccatgtatgctcaatgtttgtgatatgaatctgaataggatattgcatgaccaaacaagctcaagtaaaaaaaaaaaagactcgattctaagagaggacccgttaacaaaaagaaaagttcaaaagatacaagaggcaaaaggagtctgtgaatgcaattcctatctaataaggttgtagttcgacttgtgcaagcccaaggatatgattatatgaagactcaaaatagtgtataattgttaactttattgcctaagatttgtagttattatttgtaaatctaatgatgatttgagatagatttcattagaatttatgattgattttattaagatttgttttaattgatttttttaaaatttgtttcgtctattaaaatgaagattctatcatttgtttggatatgtttcttattattatgatttgttttctatttttcttcttctatcatttaaactcacaattgtttaaatgaattaagagctttcatctggctcatgtaatttaagttagattttgaatgaaatatcaaatatgagtt

SEQ ID NO: 26986 - DNA, 700 bp, Glycine max
  unsure (1)..(700): unsure at all n locations
  Clone ID: TF_LIB4390-054-R1-K2-B7
cttcgaggagattctggtggaggagcccaaggaaggacccgtgagcccgccttcaaaaatagagtccgaggaaggctccgacaaagacaagaccgatgatgctgcttccgatgaacccatgtcgaagaaattaaagaggcagttgaggaacagggatgctgctgtgaggtcaagggagaggaagaagttgtatgtgaaaaaccttgagatgaagagtaggtacctagaaggggaatgcagaagactggggcatttgctccagtgctgctatgctgagaacaacgctttgcggctttgcttgcaattgcgtggtacatatggtgcttcaatgaccatgcaggagtctgctgtgctcttgttgggtaaggcttgcgattgcaagctgtattaccttttattgccattgctgttttgttttgggcattcagtggagacaacaacaactttgcttgattaatttgctttcatgatttggcatggtttagccttccactttggttgttntcttaaaatgaattatatgctaatacttcattgtttcatgtattggcatcgccagagcccagagcattaataagttataaacctgtcttcaatgaccaaagtttttgtgaacataaatacgttataacccttgtcttcattgaccaaagttttttgtgaacatatccatgaaccatgctaacttgatattaaatat

SEQ ID NO: 26987 - DNA, 438 bp, Glycine max
  unsure (1)..(438): unsure at all n locations
  Clone ID: TF_LIB3138-098-P1-N1-A10
ccggaattcccggtcgacccacgcgtccgcccaaatggagtacaggccctgcaaacattgaccatgacaaattcaagcagtgctcagcagggggcgatcctccagtacgcgcagacctctgacggacagcagatactcgtnccgagcaaccaggtggtggtgcagactgcatcaggagatatgcagacctaccagatccgtaccacaccatctgccacgtcacttccacagaccatggtgatgacttctcctgttacccttacatctcagacaacaaagacagatgacccccaactcaaaagagaaatacggctgatgaaaaacagagaagctgcccgggagtgccggcggaaagaagaaggagtatgtgaagtgcctggagaaccgagttgctgttctggaaaaccaaaataaaaccctaatagaggagctaaagac

SEQ ID NO: 26988 - DNA, 1227 bp, Glycine max
  Clone ID: TF_GmC505_1
ggctcgagtaatggttggcacaattcggctcgagcagtcagagtatattcctcgggaaccaagagagccttctggttctggagccgatcaagaaactacaaataaagatgttaataagatgctaagacgcctagctcagaatcgagaggctgcccggaaaagtaggctgcggaaaaaggcttatgttaaacaattagaatcaagccgtttgaagctcatgcaattggagctggaaattgggaaagcaagaaagcagggtctgtatatgggcactgcattagatgccggctatataggatcaacatcagaaacaataaatccagggattgttgcttttgaaattgaatatggacaatgggttgaagagcaagaaaggcggaatgaagaacttagacatgcatttcaaacacaagcacctggtgtacagctcaacgtagtggttcagagtgtcttaaatcattactcaaatcttttcagaatgaaagcagaggctgtaaaggctgatgtcctctatttactctctggtgcgtggaaaccatcagtggagcgaattttcctttggattggaggctcccgtccatcgcagcttctaaacatcatcgtgcctcaacttgagcctttgactgatcaacaaattgttagtattaacaacctccgcctatcgtctcagcaagctgaagatgctctttcacaaggattggaaaaacttcagcagagtttggtccacgacatggcagttgatccattgggtgtaggaaacttgggacttcagatggctcgtactatggaaaaatttgaggcactagaaggttttgtaaaccaggcagatcaccttaggcaacaaactctgctgcacatgtcacgcatcctgtcaattcaccaagctgctcgcggcttgctggctctcggggaatactttcatcgtcttcgtaccctttgctctctctggtctgctcgttcatgtgaacttgcctaggctccttagaggaagagacctagctgctctgcttcaactgaatcatctcttctgtgcttttcaaaacagttactcgattttggatatgaatgagttaatgccgtgtaccagcatgaagcaaaattatgtgatttgctgctcttgtgagtgtgcttgtacataaacagtgtatcatctttagtactatattatatatattatgtaaaactttctagtatctttcggaataaaatgtccattatgttactttt

SEQ ID NO: 26989 - DNA, 1184 bp, Glycine max
  Clone ID: TF_GmC293864_1
ctgtctggtgggttaaaccttagtcacatcccaaatgccaaaaccctaggagagagaaagagacagacacatacagagagagagagagacgttgagttgaaattgaatgatcgatggcgacttcgaattcacgaaaatcagaaacctccccttccccttctcccaccaccaacttcatccccatccccgccgcccccgcccctaaaaccgtcgatgacgtgtggcgggagatcgtggccggcgaccgccgtgagtgcaaggaggaggcccccgacgacgactacgacaaggagatgatgaccctcgaggacttcctcgccaaggccgaccaagaccaagaacccgactacgacaacaacaactcaagatgccaatgccactcaccgagaggctcggcagcggcaccctcttctccttcgaccaccttcccacgacgccgtttcacgactccgccgccgcagaaggctccgtcataggcttcggaaacggcgtcgaggtcgtcgaaggggggagggttaaaagacggcgtcccgttttggagcagttggataaggccgcgcagcagagacagaggaggatgataaaaaaacagagaatctgctgctaggtccagggaacgcaagcaggcataccaagtggaattggagtccttggcggtgaaactagaggaggaaaatgacaagctcttgaaggaaaaggctgagaggaaaaaggagaggtacaagcagctaatggaaaaagtactccctatcgcgcagaagcaaaagccaccatgtatactccgtagggctcgctccttgcaatggtagatcaaattttccagtggtgcaggacaggaactgaatattaaccacatcagtggtggggaaataagcaaattaatcattatctcttaaaaatcatagttctcagcctaacggttagtctcaagggcaatcgtggttaaagatgtgaagagatagaaggaattggaacctgaatcgccaagaaaaattccttattacttaagaaacaacatttgcttattctcaggaggtaaaagcagaaatatggagttggaccgtgtagtttagatacaaattaaacatcctgtttgctaccctgcgcagaatgccaatgtgtaatagtagagggcataggggatttgtagactagtatataatattataatgtagtcatggctt

SEQ ID NO: 26990 - DNA, 3283 bp, Glycine max
  Clone ID: TF_GmC217_1
ctcgagccgctcgagccgctcgagccgctcgagccgctcgagccgatggatgcattccggcatccgctctccgcgacattcgcctatggctctcccagcccttcgccctcctccggttgtggggcatcttccacgggccgcatgcctcccgccaggcggaagctgcgctctcccgaggggtggatgcattgcagcaatcacctgcggcagcagtgcattacggcacgcgctgcgcatcttaacccccgggcaatcagctcgagctcccctcgccatcagtgattattgctcacggctgcgagctctgagttctttgtggcttgctaggccaagggagtgaagcatttcacagctccattagtggacttctttcatacctgacccccttaaagactgatcgttgaatcttgtgctctgaatgagttcaatggaagctggtgtcttttgacaatgaattcctctagaagcctagttgtatttcacagccccattagtggacttctttcatgcctgactcccttaaacaccgatgatcattgaatcttgtgctctgaatgagttcaatggaagctggtgtcttttgacaatgaattcctcttgaagcctagttgtgatgctataaacattaaatgctatgatttttctactctgccaactgctggtgtggtgcaacatttttctttaagcttttgtggttttaaaatagtctcaataatttgattatataggtgtatgatagatagaagctgttgaagggaaaaatgtagaaatagtgtatctgtatttttaggttatagctgttcattgtatttcagaaatcagcttttatttgagggggtatttacctctctttagtttcatttcctgcttaatggtttgtggttggagagaaaatgaaatgtctagaaatggctcttgtctcagtcaccaccgcaaattcttcgaagtatattctcttacgcactctctctcgttctcacgctttctccttcgctctccaccgtcaattccaactactctcgtcttcctccgctgtgctccgccgtcttccccggttcctcgccgcctcccccggttctccgctcccaccttccgaaaacgattccagcaggcaccttgactcgttctccatctagtgagatcggtttcttcttctgggtgtgttgcttaaatctgtggaaagttcatttttttttccgattttcatgtgaccagggtcttttggggctaataaggtttgtggagagagaagatgatcgttgtgctgagcatgattattgatgggtagcagaagtagaacggtaaacgttaacaactaaggacactgacaaggttctgaacgggatgccaagctacgctcctccattgccttcttctaattccatagccatggaagcaactaatgctcatccttcccgcatttctgaatttggaaccctggagcaatctcttggatttcgtgttgaagataccattaatcttagcagaaatccgatgtttaatcaaatgaaatcaaatagccaagctctaggtgctgatattcaatttggtgctttaaataagtcaattgcaacatcagatataaacctctctgctgctattgctgcgtctcaagcattggtattccaaaaagattcacaaccaactctggcttcaacatctgctggtcgtgagaactggggagagaccaacttggctgatgctagccctaggactgatacttcaacagatgatacagaagacaaaaatcaaaggcctgaaaggggtgaatccagtggatcaaaagataaatcagatcaaaagacattaagacggcttgctcaaaatcgtgaggctgccaggaaaagccgactgaggaaaaaggcatatgtgcaacaattagagagcagtaggttgaaactgacccaacttgagcaggagctccagcgagcacgccagcagggaatatttatttcaagtactggagatcaggcacagtcaatgagtggaaatggcgctatggcatttgatgtagagtacgcacgatggttagaagagcataatagacaaaccaatgagctaagggctgcaataaattctcatgctggagatattgaacttcgaaccattgttgacaatttcatgacacaatttgatgatatcttcaggctgaaaggtattgcagcaaaagctgatgttttccacattctgtcaggaatgtggaagactccagctgagaggtgtttcatgtggattggaggctttcgctcatccgaactactcaagcttcttgaaagtcagttggagcctttaaccgagcaacaattgatgggcatctacaacttgcagcagtcatcccagcaggctgaagatgctctttcccaagggatggatgcattgcagcaatcactgtctgagacattggctaatggttcacccagcacatcaggctcctcgggaaatgtggcaaattacatggggcaaatggctatggccatgggaaagcttggtactcttgatgggtttcttcaccaggctgacaatctgcggcagcagacattacaacaaatgcttcgaatattaacgaccaggcaatcggctcgtgctcttcttgccatcagtgattatttctcacggctgagagcgctgagttctttgtggcttgccaggccaagggagtgaagcatttcacagccccattagtggacttctttcatgcctgactcccttaaacaccgatgatcattgaatcttgtgctctgaatgagttcaatggaagctggtgtcttttgacaatgaattcctcttgaagcctagttgtgatgctataaacattaaatgctatgatttttctactctgccaactgctggtgtggtgcaacatttttctttaagcttttgtggttttaaaatagtctcaataatttgattatataggtgtatgatagatagaagctgttgaagggaaaaatgtagaaatagtgtatctgtatttttaggttatagctgttcattgtatttcagaaatcagcttttatttgagggggtatttacctctctttagtttcatttcctgcttaatggtttgtggttggttgcacataaggctccatggtgtatgtatttatacgttctcttttggtatattagaaagacattactaactaaaaattgttttttgggatttttgagcagatgttgctacatctttatccaaaattcaagatagaatacagatcttctttgctgttcttttctggatgtctctagtcgtttgggcttccgcctgggatgggaggaatag

SEQ ID NO: 26991 - DNA, 2592 bp, Glycine max
  Clone ID: TF_GmC420_1
ttcccgggtcgacccacgcgtccggcagaacaagacatttagagattggaatcatccgtgttcctctctctcatctctctttctctctgttccctcggtttccttactttgaagtttaatccaatccaataatccaataactacatacaaagttgaacaataccaccatcatagcgtatcatcatcagaattccaaggtggatttgcttcatcttttactccggcttcatgctgcatgagtaaaggccgttatgttatgctcatggtggatttttgtgcaactgggactaggggaattgatgatgtggtggtggtgagaatgatgtatggggagtagaactaccaggagggttgttggtgttgaagatgacaagggagctgaaagaggaatgcctagctccaattctgagttatcccactgatcctttgactttcttcttctctctacatccagaaattggattgatcctttctctctctctctctctctatctccattcaaggcctcttcctttcactttaatccaacaataataattattcgcaaaaaaaaaaaaaaaatacacgttgaacagataccatcatcattcatcttcatctcccacatcatcagaatttcaagactcagtttttgactcactaagtaagtagccaaacaatttctcgggttcctgttcaagttgattcctttgataagttaccaacttcactcgataaaaacccattaacaaaccaaacagagtgacaaagtttgcaattacaaaaggttcaattatcaaatctggtcagtggtgatacggaacaccaggaagagtctgccatggctgacgccagtcctagaactgatatttctacagatgttgacactgatgataagaatccacggtttgatagaagtcagtcccttgttgctgtggcttctgactccagtgacagatcaaaggataaatcagatcagaagactctccgcaggcttgctcagaatcgtgaggctgcaagaaaaagtcggttgagaaagaaagcttatgttcaacagctggaaagtagtcgcttaaagttgacccaactggagcaagagcttcagcgagctaggcagcagggaatctttatatcaaactcaggtgatcaagcacattcaatgagtggaaatggggctatggcatttgatgtagaatatgcaaggtggctggaagagcagaatcgacaaattaatgagctaagagcagctgtaaattctcatgcaggtgatacagaacttcgcatgattatcgatggtataatggcacattatgatgagatatttaggctgaaggccaatgcagctaaggctgatgtcttccatttgctgtctggaatgtggaagacaccagcagagaggtgttttctatggcttggtggttttcggtcatctgaactcctcaagctcctggtaaatcagttggaacctctgacggagcaacagttagtgggtattaccaacttgcagcatggtatcttaacaagcagaagatgcattgtctcagggcatggaagcattgcaacagtccctttctgagacattatccactggatcacctggctcctctggttcatcagggaatgtggcaaattacatgggtcaaatggctatggccatgggtaaactagggacacttgagggattcattaagcaggctgacaacttgcgccagcagacgttgcatcaaattcaccgcatattgacaactcggcagtcggctcgtgcactacttgcaatacatgactacttttctaggttgcgtgcccttagctctctttggcttgcccgcccaagagactgatgggggtaaatagtgtgtcattaattttcatggatctggcaccagaatcctttggcataggttttttactcttgcaattttactgtgttgtagttttcacattactgatattagtttcagtaagttattatctagaaactgaattggtgacatgacaagggtatgtattttgtttattactactaacgtaataatattgtctattgtaacacagttgaaggaatttagatgattttatacaaaaaaatggttgggatgtgatgaataagatagggacacttgaagggttcattcaacaggctgacaatcttcgccaacaaactcttcaacaaatgcaccgtatactgacaactcgccaatcagctcgtgcactccttgctatacatgactacttttcgcgtctgcgtgcactcagttcactctggcttgctcgccctagagattgatgggcgcggtaaatagtatggcaaattaattttcatggatccatcactagcaatacttggtcatcataactcttgacaagttttcttgtgttgttttgttgtactctttgtatcactgatgttagtgcttcattgagtcagtctagaaacgaaattggtgacaagaagtatgaatattactaataatattgtccattgtaattgaagggctttgttttttccatataaatatagttgggccatatgatatattttaagggttgtttcagtcgccatagtttacccttggatctgagttcatacaaaattgttgagtttattctttt

SEQ ID NO: 26992 - DNA, 479 bp, Glycine max
  unsure (1)..(479): unsure at all n locations
  Clone ID: TF_jC-gmro02800043g12a1
ggctcgaggttagataatcagtttcaggtgcaatcagaggatgatactcatggaatatttggcacatctgtgaagtacgaccaagacactaacagacttactgataagacacaacgacgtctagcacaaaatcgagaggctgctcgcaagagtcgattgaggaaaaaggcatacgtgcagcagttagaatcatgtcgtgtgaagctcttgcagttagagcaagaggtagatcatgcaaaacaacagggattgtatattggcaacggattgggttctaataatttgggttttgctggctctgtaaattcaagaataacccttttcaagatggagtatggaaactgggtggaggaacaaaatagacaaattttggaactgagaactgctntaagttctcatatcggtgacatacagctcgggacacttgtacaaggcataatgaaccactacaccanactctttggcatgaaatctgctgc

SEQ ID NO: 26993 - DNA, 1618 bp, Glycine max
  Clone ID: TF_GmC107_2
ggctcgagctcgagccgcttgatacttgatacagctgttaactttcccctttgaaatcctttctgagttctgcgccaactgaatcaagcagatcgaactccgccatagtcttcatcgagacagagatcggaatctgattcccaaacgggcacagtatgagcgtcatcgacattctaacccgagtcgattccatttgcaagtcgaacggttgagacttgccactccaggtcagccaaatgggcttgttttctcctcctggacctccttgcagactctcgattagaaaccttccttcttaggcgcttcacatcaatagcgtttgtgctttgttcacaaggacctgcttcatcatcctcatcagatggctcacgtgaggaaccacttgtagtggtggtggccccttttacttgattatctctcgcgtttggtttattagcagacaatgggcaagtacgacaaatacgacgtcgaaaagcaccgcgatgccaatgtctccggcgacgatgcctttgccagactatacgcctccgtcgacgccgacatcgtggccttgcttcagaaagcagaaagtgcttctaaggagaaaggtaaggcatctgctgttgcgatcaacgcggagattcgtcgtactaaggctcggttgctggaggaggttcccaagttgcagagattggctgtgaaaaaggtaaaagggctttcgtcacaagagtttgctgcccgtaatgatttggttcttgcattgccagatagaatccaagcaatcccagatggggctcctcctgtgccaaaacaaactggaggctgggcagcttctgcctcccgtcctgaaattaagtttgattcagatgggcgatttgatgatgaatacttccaacaaagtgaacaatcaagtcaatttaggcaggaatatgaaatgcgtagaatgaaacaggatcaaggtttggatgtgattgctgaaggattggatacattgaaaaatatggcacatgatatgaatgaggaactggatagacaagttccactgatggatgagattgacactaaggtggacaaggcatcctctgaccttaagaatacaaatgttagacttaaagacacagtgaaccagcttcgatccagtcgaaacttctgtattgatattgttttgttgattataattttgggaattgctgcctacttatacaacgtactaaagaaatgatgtgtacaaaggctgatggatgttcgaatggtttgccttgtattttgaggatatcttctgatttttttattttatttctaccattgtgaaaatttcctgcgacttgagaggcgtgcccttgtgctttataagcagtcctgtgtaatgtgtatgcagtcatgtcagataccattagtatgtgtatgttaaatagttgctgcttattttatacacttgttttggtatatgttatagtattataaattgacgctgatgaattaggaagggagtttaatgtcaatgtcgtgacagtctatacatgttgggttgtgattagatgattttgtaaaactttttgcactgggttgtgattagatgattctgtaaaactttttgcactgggttgtgattagatgattctgtaaaactttttacact

SEQ ID NO: 26994 - DNA, 891 bp, Glycine max
  Clone ID: TF_GmC128657_1
cggctcgagctgagttagttctatttattctccatcagagttttttctccaaggccctgcaatcttttgttcatatatacattgctacataaaccatgcaggccagggagatcacaggactcaattatttactcccttcagacccttgtccttaccctggtcactacagcatggttcagaacaccatccccacatttcaactccacaaactctcaaaccaattctatggtttgcagaaacctcctcctaaagtgcttgcagacttcagcccccctcagtcctcatgcatcagcagcaactcaacctctgatgaagcagatgagcagcagcaaagcctcatcaatgagaggaagcacaggaggatgatatcgaaccgcgaatcggcacgccggtcacgcatgaggaagcagaagcaccttgatgagctgtggtcacaggtggtttggctcaggaatgaaaatcacccagctcatggacaagctgaaccatgtgtctgagtcacatgataaagttgctcaagagaatgttcagctgagagaagaagcctcagaacttcgccaaatgatatgtgacatgcagctacacagtccataccaccctcctcccttgagtcccattgatgatgatgtttctccctatgtcaaatctgattcctcaatcacagactctttggacctgcttggttgaatttgaagacaaggccaaagtttttatcattatatctcttcaatttttcttctttttaagttcttcttctgtgtgtgtgtgaattgttgtgggaagtacaaaatagtagtagtctttgcctcccttttgagatgtatgaggtgaaaccataacataaacggcaatgacatgtttttttgagtttctaattttaaaaaaaaaaaa

SEQ ID NO: 26995 - DNA, 1376 bp, Glycine max
  Clone ID: TF_GmC6275_3
cttagatagattgatgcctttatttttatctttgttttgaactactatgattactgttttctgtataggagtatgtgttgaatgattattgagttgcagcactgatcagttcttagaacatgaattcagcatccccgcagtttgtttcctcaagaaggatgagtgtgtacgatccgatccaccagattagtatgtggggagaaggcttcaaaagtaatggaaatttaagtgcagccatgcctctaattgatgagacagacatgaagtttgatagtcaggtgcaagtctatgaaatccgtgctttgtttcattggcaaataaaaatgcctattctgcctactaaccaaattcgtttgtgctgtttaatacccagtcagaggatgcttctcatggtatactgggagagcctaataagtatgaccaagaagctaacaaacctactgataagggatctaatatggtcaaacatgcagatacaaagacgtcttgcacaaaatcgagaggctgctcgtaagagtcggttgaggaaaaaggcctatgtgcagcagttagaatcaagtcgtttgaagttgatgcagttggagcaagagcttgaacgtgcaagacagcagggaatttatataggcggtgggttggattctaatcatctgggttttgctggatcagtaaattcaggaattacaacctttgagatggagtatggacattgggtgaatgagcaaaatagacaaatcacagaactgagaaatgctttaaatgctcatattggtgacgtagagctcaggattttagtagatggtatgatgagccactatgccgaaatgtttcgcatgaaatctgctgctgcaaaagcagatgtcttctatgttatgtccggcatgtggaaaacaacagctgaaagatttttcctatggattggaggctttcgcccctctgagcttctaaaggttcttggccccctgattgaacccctgacggagcaacaacgtttggatatctataaccttggacaatcatgtcaacaagcagaagatgccctttcacaaggtatggacaaactccggcaaacacttgctgatagtgtagcagctgggcagttcatggaaggaacatatattccacagatgacttctgcaatggacaagttgaaagctctggtgagctttgtgaaccagttttttgggttaagggtattgttgaagttatttgaagctattgatcttgctgatcatcttcggcaggaaactttgcagcaaatgtctcgaatacttacaatccgtcaggcagctcgatgcttgcttgctttgggggaatatttccaacgcctgagggctttgagctcactgtggtctaatagacctcgtgaacctgcttag

SEQ ID NO: 26996 - DNA, 1398 bp, Glycine max
  Clone ID: TF_GmC486_1
tatatatctaatcttgattattccatgtgttagctagcttctactacttaagtaacattttaatattttctctaatgtatttggtaggttaacatgggattaccctccacacaaaccagtactggctcaaagagacaaccagagacatccatggccaagcccaatccacacactgaagccccttctgcacctgagccacccaaagctgtaaagcgagagggcaatcgcaagggaacaacatcaagctctgagcaggaagcacccaaaacaccagatcctaagacactaagaagacttgctcagaatagagaagcagcaaggaaaagcaggctcaggaaaaaggcgtacgttcagcaactagagtcaagtaggattaagcttaatcagatagaacaagagttacaacgttctagagctcaaggcatattaatgggcggaaatacacttctgggtggggagcaaggctttcctatggccatgagtggaattagctcagaggctgcaatgttcgacgtggaatatgcgagatggttagaggagcaccaccgcatagtgtgcgagctaagagctgtactccaagaacaccttcacgaaaacgagcttcgtttatatgtggacaattgcttggctcactatgaccaagtaatgaacctgaagagcatggtggccaaaaccgacgtattccaccttgtttttggcgtgtggaagaccccagccgaacgttgctttatgtggattggtggcttcaggccatctgaactcatcaagataattctgggtcaaattgagcctcttacggagcaacaaatacttgggatatgtgggttgcaacaatctacacaagaggcagaagaggctctttcccaagggcttgatgctcttaatcaatctctctcagagactataacatcagactctctgtggtgtcctccaaatatgactaactacatgggacaaatggctgtggcaatcaacaaactctccacccttgaaagctttgtgagacaggctgataatctgaggcaccagacaattcaccgtctccaccaacttctaacaacacgccaagccgcgaggtgtttggtggcaatttctgagtacttccatcgtctcagagccctgagttctctgtggtcaactcgtcctcgccaagatcagtagtgagtggtggcggccggcggtaatagtgacattccataactctcaagctatggctagatagctatatattagatatatatgaccttgtagcttcttaatttctcttaacttataaatttaatattttctcaattttattttggtaccaccctcttgatttctctccctctggactttcccatctatatgtatatagatatacattaacaaattaaaaatagaagtaattgtaatgtt

SEQ ID NO: 26997 - DNA, 2566 bp, Glycine max
  unsure (1)..(2566): unsure at all n locations
  Clone ID: TF_GmC299_1
aattcggctcgagggattcgtggtggacctccatctgagcagtaactaagtagccagatcttaaggttgctttgccaaaaaattatgctaaaacagggatttctgttggctattcttctggaatacattgtaaatcatttgatggagcacatgatgctggattcaattagtgcaccccgntggttttttttttttctttataaaaataatataaaaccacgtgtccgcccacgcgtccgattttattttgacgaatatgccctgatgcttccgccctgtgtagctgcgtgcctacctccatcgcatcatacgatatggatagggtgttctcagtggacgatatctccgatcacttctggcagccgcctatccctgtctccgccgcccaaacttcctcccagatgagccgcagcgcctccgagtgggccttccaacgcttcctccaggaagcttccgcctccgcaccctctcctccgtcttcttcctccgccgccgacgtcgtattcgtcgagatcgaagatcaacctaaacccgcccctccccctccgtcaaacggcgccgttctccccaatgcccctggtcccgtcccccttgactccgacgaataccaggccttcctcaagagcaagctcaacctcgcatgcgccgccgtcgccatgactaggggatctttggctaaatctcaagacccgtcccctttttctgaaggatctattccttctgaaaatgatccatctaagttacaagataaagataccaatgtaccagttgggattccttccatacctgccatgcaaaagaaacctgctgttgcaattaggccatctacaagtggatcatcaagagaacagtcagatgatgaggacattgagggagagacatctatgaatgcaaccacggacccgccgattgtaaaacgagtaaggaggatgctatctaatagggagtcagcccgacgctctagaagaagaaagcaggctcatttaactgacctagaagacacaggtttcccaattaagaagtgaaaattctaccttgttaaagcgcgttacggatgttagacagaaatacagtaatgctgctgttgacaacagagtactttagatgagctgtataatagagactgtctctgaagttcaaggactagatcgcagactgaattactggggtgaacgacttgggtcttccaattattgagccatcatccttggcagtcccatcgtttcacgaatgtcagtctgacagaccatgacgtcgtactggtccagagcgaaaagcaaccaaaaatcgccgctgtcaccccgacaatcagaatcgtttaggagacattcctttgactgaaaccgtgcagctgaatggtgcatcagtggtatgtgacatcaaaacggggagaccaacttcccggcatagggtggctagcttgaaacatcttcagaagaggattcgtggtggtgtaccctcacggtgacccctgctaacggacaacttataatggattttgatctacttcatcattttcttgtttctgctagtgataacgacgggcgcactattagtattaatgggctcgttaccctggaatatcttcagaggcgcattcgtggtggtgcagattcacatggaactaattgtaatagtgagcaattacgtaatacgggaattcacgattgacaacacagacggtaatgatgtcaaaagagtagttagggcaaggtgtaagaaggagcaagttcccgtcgacagaataagaatgtagattctgttaactaatctaatgacgagttttctcaattaagaggtgaaaattctaccttattaaagcgccttactgatgttagtcagaaatacagcgactctgctgttgacaacagagttttaaaagctgatgttgaaacattaagaacaaaggtgaagatggccgaagagaccgtcaaaagaattactggattgaacccattgcttcatgccatgtctgatatatcatcactgggcctgccatcatttgatggaagaagcccttcagacacttcagctgatgcagctgttcctgtgcaagatgatccacatcatcacttctatcaacccacatctactaatcctattcccagtcatgatccgatagtcaacaatggattggggggcatttcttcaattgaaaatgtgcagcagaatgctgcagtagtgctaggtgggaacaagatgggtcaaacagcatccctgcagcgggtggctagcttggaacatctataggagcggattcgtggtggacctccatctaatggggagcagtgactaattagccaaatctcctggatgctttgccaggaaattattctaaaacagttatttctgttggttataactagaggcctattcttctggaatacattgtaaatcaattgatggggcacatgatgttggattcaattagtgcaccccgtatttttttaaaaaataatataaaatgaactttactttctagtttataaaaaaaaaaaataaaaaaaaaaaaaaaaaaaaaataattaataaaaataaaaataataatgggtcgtccgcttattat

SEQ ID NO: 26998 - DNA, 1158 bp, Glycine max
  Clone ID: TF_GmC1611_1
acgagccccagaagagtacactaaagagacaaaaaacttgtgtgcctttctcccaagttaattgtgtggaggagttacaaatctttctaaaccacagtgcaatacaccaaaacaatggcagataaagatgctttttgctacccttatcatattcatgattgcacatcaccacaagagaacttgcccaataaagggccttttcattcagaaatgcttccctaaaattctaggaaaggagctggttacacatcggtgaagccacttgatgcaaagacactgagacgtttagctcaaaacagagaagctgcaaggaaaagccgtctcaggaaaaaggcttatgtgcagcaactagagtcaagtagattaaagctcacacaccttgaacaagaccttcaaagagctcgctctcaggatgagtttatgggatgtggtggtgctggtggcagtataagttctggtgagtttaattagccttatctcttgttggttttttaaactcaatttcatttttctgatacctcagattggaacaaagatagaagggtgtgaatatgtcaaaattttctggcacatcgtatatatgattatggagcatggaaaaacttgttacaatgagtacctgaaagatttagttggcgtgatcttttgactcttttttacactttggaacatgagacaaagaattaagagactcgttagggagcagcaattgctgttattgacacgtaacttcttcctagctatgtcctttgaatcttttttagtgccaaaaataaataaaaagtcaaatttaaccaaaatctagaatcaggtggagaagtcttggaatttgaccaaaatctgtggcctaattcacgtttgaatccacattattcttcctagccataattaagtggatttcgttgggctgctttacaaatgaatgccagcgtctcctagaagaaaaatatttatttatttttcttttcaatcttctatgttctcttgtgtctttatgttttattgtaaatgtaaatctaggttttatgtgcatgatgaggctttagctgaagagaaatagaaaaaaaaaagtttgagtttaagagaaggtgcacgtggcatggatgtagataaagtctccatacaattgactctatcttctagttagctaatggctta

SEQ ID NO: 26999 - DNA, 1213 bp, Glycine max
  Clone ID: TF_GmC80973_1
agccagaaatgaactccacaaaacagaaaaataggtcatgggactctttttcaaatgccatgacaaatccagttggtgttccctcaggcaaagacagtgctgcttttcagagttcaggattgcaatgtacaccacatgaagcagatgctcttccaccagctgcaagtgaaaagcatgattcagtagaattgggtttacaggatgcaaaatcctttcctgaaaaaaaggacatttcacatgcaaagtcatctgcctctgaaactgatacaaaacgtgctaaacagcaatttgctcaacgttcacgggtccggaaacttcagtacatagcggagctggaaaggaatgtacaagctttacaggcagaagggtctgaagtctcagccgagcttgagtttcttaaccagcagaatcttatcctgagtatggagaataaagcactcaagcaacgtttagaaaatatagcacaagagcagcttatcaaatatttggagcaggaagtactggaaagagagattggaagattacgtgcattgtatcaacagcagcaacaaccaccacagacacagccacaacagcaaccatctggtagtcacagacgctcgaacagtagagaactcgaatctcagtttgcaaacctttctctaaaacacaaggacaccaattcagggcaagaccctgctctcagaatttagatttgcagtagctgtagccttgttcggcctctacattcaaccggtgttgccacacccgcgatagaattgtttccttcccttcccatgcatgggattgtgcagagatttccatcctatgccctctctctgcctgccagctttgctgatttcatccttctcttagtctttccgttttctatttacttatattattaccatttaatgtgcacctggtggtcattgccgaaatcttattctatttgtcagttgacctaccagaggtggtaaccaacatttccaagctttcaacccccactgtattttcagtgaatatgtagctgtataccccctcttgtgaatctccactattgtggaatttggcccagtgcaaatagcaaatatctcagggccatttgaatgtgccttatttgtatggataatgtttagctaatgcttgtaatgttattttaatgaagttaatgttttcttaacatcttgtttggtagcaatgagaaaattgatctaggccattattttggtcc

SEQ ID NO: 27000 - DNA, 768 bp, Glycine max
  unsure (1)..(768): unsure at all n locations
  Clone ID: TF_LIB4280-018-R1-K1-F1
ccggtnccggaattcccgggtcgacccacgcgtccggggatagaaagattgcgcgtttttgttttacaaacagagcatcgatcggaaagaacacacagaagacaatggccacacagacgcaagatccacgttcaaaccctaaccctaatcccaatgcaatgtcggcaacgccatcttcctccttcttcatccgcgccgccggcggcaacggtccctccgccgctcccgtcgccggctccggcgagtcgcactcgcaccaccggagggcgcactcggaggtcagcttccggctgccggatgacatgattgacttgtcgccgtcggatccgttcaacggcggatcctcgacggcgagcttcgaggagatcggatccgaggacgacctgttctccacctacattgacgtcgagaagctcggggctggacgcggcggaaacggatcggatcagagcggttatggaaatggcgccggcagcagctgctacaacgacggcgagaagagtccgagcaccgccgctgcgcggccgagacaccggcacagtagctccgtcgacggttccacgtcgacgagcatgttcggagagatcatggatgcgaagaaagccatgcctcctgataagctcgcagagctttggaacattgatccaaagcgtgccaaaagaatactggctaatcggcaatctgccgcacgttcaaaagaaagaaaggcacgctatatacaagaacttgagcgcaaagtccagacccttcagactgaagcaacaacac

SEQ ID NO: 27001 - DNA, 435 bp, Glycine max
  unsure (1)..(435): unsure at all n locations
  Clone ID: TF_LIB3242-186-Q1-J1-C6
cactaagctagaattcatctcgagcggagccgattcgactacacaccacaaaagggcactaattataattttaaattttgaaagtgaaataatcccggactgacactaatattgtcatagactgggcacaaacttttaatatatacttcaattcttttatgtcaaactcgtatgccctctcatcattactattatgaaggattctttctaatagagagtcanccatactctcaagaatgagaaaccaggctcatttaactgatcttgacacacaggtctcccaattacgaactgaaaattcttcggtgataaagcaactcacggatgtcagccacaaatacaataatactgcattttacaacagaatacttaacactgatgttgcaacattaataacaaacgtcaagatctgttaagaaacagcaaaaataatta

SEQ ID NO: 27002 - DNA, 304 bp, Glycine max
  Clone ID: TF_LIB3056-014-Q1-N1-C12
gtcgagccgattacgttagagagtggacggcattggattcacagagtacaggtcgatatacgagtgcctctggtggggaggtggttagaactgcatagaggatgcatactaggttgattctgaataaggaatctgctgctaggtcacagtcatgatgacaggcatacgcacatgaactggagattaaagtgtcacgattagaagatgcgaatgtaaggattaaaagactaaatgaaatggagagcgcattgacatctgtgccaacagctgaacctagaccgaagctacagcttatcagaactag

SEQ ID NO: 27003 - DNA, 3306 bp, Glycine max
  Clone ID: TF_GmC2191_1
tacggctgcgagaagacgacagaagggtaatatattttttacaggcaattttctttttgagacatgtaccgaaagaaacatgttttaaaataaacaagttttacccttatactaaattactaatgcattattatattatttaatgaatttaattttttaacataattaaagtcattaagtaattatccataaaagtatttatagtaacaatgcatcaaaattagttaaaaaaaggtttaggaagtcagattgagtcattgaccaatcaacctaattcaactcaattcaagtttggtatctgcgtctccagtactgtcggatgccccaatttcttcaactcgacctattctctctcctactgttaacgttttctgtttttctttaagatggcgatgacgacaacgacggagtccgatctcgattacgagcttcgctatctcagtctcgccgtaaccgataccttcactgctttccaaaacctcttaccggatgcgatgacttccttttcagcttgtggactaatagaccctctttgttctcaaaacctcactcccaagcattccaccatcactgcaaccattgattctcagtcatcgatttgcgccactagtaatgttgggagcccagtctcagctaataaaccagagggcagagagaatcatacgaaaagagccacaagtatttagtctgagccatctgatgaggatgatgaagcaggtgcttgtgaacagagcacaaatatagctgatgtgaagcgccttttaatgaaggttactaatcgcgactctgttagaaacacaatttcaaggttgcatctttaattctctactgttcactaataagctgtaaaacttattgaagataatgcatccctatacaagcagttcacggatgcttagccaacattttcgtgaggcagatacgaataaccgagtgctgaaatcagatgtagaagctttgagagccaaggtgaagttagcataggatatggtgactaggagctcttttactacgttaaacaatcagctttttcagactcaacatcatcaaatgagcacaccccagcaactgaacacgactaatctgcggcgcatggcgcatgtttcgccaacaatcaccgttcatggaaatgatgtctcgtacaataatggtggacagaattcagcacttggaaacttggatatgagtttcaatgacatcaatgaagtcatgaacgatgctatgagttgtggaactatttggccactcgactagacagactctctctgtagcttccaattagatcgatccatcttttatattttacgtcttgtctaatttgattagtaggctatatatgttaatgtcaagctatgctatttgtcttcgcttgattcctctttaatgatgcctgtttaaaatggcgtcttctttcgttgtatgtagttttgtataaaaggacttgattgctttatccatttctgattgtaattgcaaaacaaaatgttttctaattagggtcatgccaatgcttatggagcatttggctgacaaaatataatacatgagttaattttgatttagtcatcgatttgcgccactagtaatggtatgagcactagtgcactacgtacattattacttgcatgccaagtgccattcatcttagcatattattattagaggaaaaaaggttgcgcacagtatgcaaattaaattaaaagtcatactaatagtaatttgtgattgaatgacgttacatggtaaactttttaacattctggattgaattgcaaactgtgcagttgggagcccagtctcagctaataaaccagagggcagagagaatcatacgaaaggagccacaagtggttcctctgagccatctgatgaggatgatgaagcaggtgcttgtgaacagagcacaaatccagctgatatgaagcgccttagaaggtatctcaaagataaagcattaaacttaggttgtgtttgggtaaatttttctgtgagaagacgactcacagaggtgcataagttggttttagccgagaggaattcaattaattttactttcttatttttttcccctgatattttaaattatgttatggttttaggaaggtttctaatcgcgactctgccagaaggtcaagaagaagaaaacaagcgcaattgtctgaccttgagttgcaggtaactgatctgttgggagagtacatgaatggtatttaatttgataagtctttaataagggaatgaaatatagtgatattaattcttagagctatattttcgtacgaacagttgttgataaagacagtggaacgttactagcactctgaatctctttgtttttggaatttaagcattaacattcaatatttggtaaaatgcacaagaagcaatacaatgtttttttcgtttgaattttgctttctcaggttgaaaaactgaaagtggaaaatgcaaccctatacaagcagttcacggatgctagccaacattttcgtgaggcagatacgaataaccgagtgctgaaatcagatgtagaagctttgagagccaaggtataataggttcttctgcaatattattctatagctaagaaaaggagattacaactttataaaagcagggaaaagtagtaataaccaagaatgaaggaagcttggtttttaattaaggttgatgaaaaatatctcaatagaatttcaactgagtactgctccgaagaattaagataagctaatctgtctaggttaatttaaaaagagttttaagagagttattataaaagtgtataaaaatgtttgatattgtctggctggcatatataggtgaagttagcagaggatatggtgactaggagctcttttactacgttaaacaatcagcttcttcagacacaacatcatcaaatgagcacaccccagcaactgaacacgactaatctgcggcgcatggcgcatgtttcgccaacaatcaccgttcatggaaatgatgtctcgtacaataatggtggacagaattcagcacttggaaacttggatatgagtttcaatgacatcaatgaagtcatgaacgatgctatgagttgtggaactatttggccactcgactagacagactctctctgtagcttccaattagatcgatccatcttttatattttacgtcttgtctaatttgattagtaggctatatatgttaatgtcaagctatgctatttgtcttcgcttgattcctctttaatgatgcctgtttaaaatggcgtcttctttcgttgtatgtagttttgtataaaaggacttgattgctttatcc

SEQ ID NO: 27004 - DNA, 510 bp, Glycine max
  unsure (1)..(510): unsure at all n locations
  Clone ID: TF_jC-gmXLIB3563P051cd04a1
ttctgaaccaacacaatgatggaatggaagggtcttgcgttcttctgcggtttgatagatagctagccatgttggcatgaagatttgagcgggaaaataataagacaacatacataacgttttctcaaaacggcagtttgcctgcactgatcagttcttagagcatgaattcagcatccccgcagtttgtttcctcaagaaggatgagtgtgtacgatccgatccaccagattagtatgtggggagaaggcttcaaaagtaatggaaatttaagtgcagccatgcctctaattgatgagacagacatgaagtttgatagtcagtcagaggatgcttctcatggtatactgggagagcctaataagtatgaccaagaagctaacaaacctactgataagatacaaagacgtcttgcacaaaatcgagaggctgctcgtaagagtcggttgaggaaaaaggcctatgtgcagcagntagaatcaagtcgtttgaagttgatgcagttggagc

SEQ ID NO: 27005 - DNA, 860 bp, Glycine max
  Clone ID: TF_GmC420_3
gaaattggactgatcctttctctctctctctctctctttctcctcaacgcctcttcctttcaatttaatccaacaataataattattcgcaaaaaaacgttgaacagataccatcatcatcacccacatcatcagaatttcaaggtcttgtattgcaaggttattgaggatatgatggtgtgtgtggagtagagccggtgtttgtgtagaagatgaaaagggaacagcaagagggatgccgagctttgattcacaattgcccaattccaatgcatgctatacagagggaagcgcaattgattctttttgtgtgtttgactttgatcaatcagttggatatcgcatagaggattgtgttgccttgaggggaaactcagtttttgactcactaaaagtaagtagccaaacaatttctcggggtcctgttgaagttgattcctttgataagttaccaacttcactcaataaaaacccattaacaagccaaacagagcgacaaagattgcaattacaaaaggttcaattatcaaatctggtcagtggggatacggaacaccaggaagagtctgccatggctgacgccagtcctagaactgatatttctacagatgttgacactgatgataagaatccacggtttgatagaagtcagtcccttgttgctgtggtttctgactccagtgacagatcaaaggataaatcagatcagaagactctccgaaggcttgctcagaatcgtgaggcagcaagaaaaagtcggttgagaaagaagcttatgttcaacagcttgaaagtagtcgcttaaagttaacccaactggagcaagaacttcagcgagctaggcagcaagggaatcatta

SEQ ID NO: 27006 - DNA, 808 bp, Glycine max
  Clone ID: TF_GmC76867_1
ggctcgagatctaatttaaaacacctctatcttctagactccatcatcatcttcctctattggttgttctatgtctgctcatgaactaactccctctcaatcccctacctaatccctttcaatttccccatttttttttcctaataaatcagatatgtaaaatcctaatttctctaaccctaacaaaacccccaaaattcaaagaagaagctggagatctgcgcgagttcaagatcgtcggagggaggaggagatccagtggtgatggatgagagaaagaggaagccaatggagtcaaaccgcaagtccgcacgacgatcgcggatgaagaagcagaagttgcttgaagacctaaccgacagaggaggaagcatatgttgagatggaagctccgaatgatcctcagagcacagaccatggaacttgtcggctggttaaggtttctgaactccattctcgagattgccgatgaggtcggcagcggtggtgaatccttcgagattctgcagattttgaactctctcttgatgccttggtaaatccctcaccctatgatggcgtcgcctgacatgtttctccatggaaatcaaggcttgtttgcttggtagtatttcaataggctaggtttattgttgatgttccttcgagatgtatttttttctatataaaaagaattgagatttgttttgaaagatgaagattgaagggagaagaagataagtgtaggtctgaaggatgactggaaaaagggttttaatgtttgatttatgtattttttatgtattttgacagttttctaatgggtagt

SEQ ID NO: 27007 - DNA, 385 bp, Glycine max
  Clone ID: TF_LIB3056-004-Q1-N1-G6
agggaacaaataaagacggcagtttgcctgcactgatcagttcttagagcatgaattcagcatccccgcagtttgtttcctcaagaaggatgagtgtgtacgatccgatccaccagattagtatgtggggagaaggcttcaaaagtaatggaaatttaagtgcagccatgcctctaattgatgagacagacatgaagtttgatagtcagtcagaggatgcttctcatggtatactgggagagcctaataagtatgaccaagaagctaacaaacctactgataagatacaaagacgtcttgcacaaaatcgagaggctgctcgtaagagtcggttgaggaaaaaggcctatgtgcagcagttagaatcaagtcgtttgaagttgat

SEQ ID NO: 27008 - DNA, 1050 bp, Glycine max
  Clone ID: TF_GmC114277_2
ttaaccttgagagaatttcctctccttttcctggttcacaaagctcacaagtgcttctagtctctccattgcagtatccatttggggaatgtgagttccttcaactagttgtcctggtcctacagagtcagcgagcatttgctgaagtttttccataccttgtgaaagagcatcttctgcttgctggcatgatttttcaaggccataagcatcaaaccgttgttgctctgtcaaaggttctctgagagggaccagcacctttagaagttcagaggggcgaaatcctccaatccacaagaaaaatcgttcagctgttgtcttccacataccagacataacatagaaaacatctgcttttgctgcagcagatttcatgctaaagagtttggtgtagtggttcattatgccctgtacaagtgtcccgagctgtatgtcacctatatgagaacttaaagcagttctcagttctaaaatttgtctattttgctcctccagccagtttccatactccatcttgaaaagcgttattcctgaatttacagagccagcaaaacccaaattattagaacccaatccgtcgccaatatacaatccctgcagttttgttgcctgttgttttgcatgatctacctcttgctctagctgcacgagcttcaaacgacatgattctaactgctgcacgtatgccttcaaacctttttcctcaaacgactcttgcgagcggcctctcgattttgtgcaagacgtctttgtgtcctctggatggtctgtcatggtaggctccctactatggacaggcttatcagtaagcctgttggcatcttggtcgtacttcacagatgttccaaatattccatgagaagcatcctctgattgcacatgaacctgattatctaacttcatctccacctccccaattatggatgtggatacagttaaattattagtatcattacttttgaaagtttcttcccacatgctaatttggtggataggatcatatacacccattcttcttgaggaaacaaactgtgaggatgtagcatccat

SEQ ID NO: 27009 - DNA, 795 bp, Glycine max
  Clone ID: TF_GmC667331_1
ggccccatcttgcacacacacacgtactagtactacacatttacacttttttccttcgttaaaaaatccctttcctgttgccctgggttgttgtagctacccttcagagcaaagaaagagagaaaaaaatgtctcttccaagacccagtgagggtaaagccccttctcagctgaaagaaggagtagcacctgctgctgctgcagcctcatcctcttcttcatggaataataggctacacactttccctcctttgtctctacacaacaagagtagcaaaattgaagacagtgatgaagatatgttcacagttcctgatgtggaaaccacaccagttagtgttcattctgcagcgactcttcaaaatagtaaccttactcaacgtaatgtgacagaccctcaatttcaaactggctttcctggaaagcgccgcaggggaagaaaccctgcagataaggaacatagacgcctcaagaggttgttgcgaaacagggtctctgcccaacaagcccgcgaaagagagaaggtttatgtgaatgacttggaatcaagagctaaagagttgcaagataaaaacgctatcttagaagaacgtatctctactttaatcaatgagaacaccatgctgcggaaggttcttatgaacgcgaggccaaaaactgatgatagcattgaacaaaagcaagaccagttaagtaagagctaacaagcaaagctagagggtgcgtcaaagtaaggcattcaagagatgcatttatgatttattttagacactagaaattgtaaatttataaata

SEQ ID NO: 27010 - DNA, 2098 bp, Glycine max
  Clone ID: TF_GmC383_1
ggctcgagacgagctttccacttacgttccgtccgaactcctgcgagaggacggcaacaggggacgaccttcccattgtttcctcaccgtgaacaacacaacaccacccactcacaattccttttttctaaagcctaacgaaccctaattcttgattattcctcaattctttcgttcccttcccatcttggcggacacgcaaattccccttcttcctcatttcgcaaacaaattcctcttccaagcatccccaattttcttttaatctattttttcgccttgttatttcacccatttaaacctgtggcttcttttcgacgccccccccccccatgtgtcagaatggattagtgtaaattattgaaagatacccatatataaaagcatgggtagtagtgacatggacaaaactccgaaagagaaggagtctaagacacctccagctacatcacaggagcagtcatcaacaactgccatgccaacaactaatcctgactggtctaactttcagacgtattctcctatacctccacaagggttcttggcatcaagtccccaagcccacccatatatgtaggggcgtccagcattatatgccttcctatggcactccaccacatccctatgttgcaatgtatccccatggtggcatatatgctcatccatctattcctccgggatcttatccttttcagtccttttgccatggcttctccaaatggtattgcagatgcttcgggaaatgccccaggccgcatcgaagttggtggtaaacctcctgaagtgaaggaaaaattacctatcaaaagatcaaaaggaagtgctagtggtggtaatttgaatatgtggattacagggaaaaataatgaacctggtaaaataccaggagaatctgctaatgggattcattccaaaagtggtgagagtgcaagtgacggaactagtgaaggaagtgatgagaactcccagaatgattctcaattgaaatcaagggagaggcaggactcttttgaagatgaaccatctcaaaatggaagttcagtacatgctcctcaaaatggggtacataatagacctcagacagttgttaatcaaactatgtctatcttacctatatctaccacaagtgctcctggagcagttcctggtcccacaactaatttaaatataggaatggattattggggcacaccaacttcgtccaccattcctgcattgcatggaaaggttccttctactgcagttgctggagggatgattgctgctggatcacgagatggtgttcagtcacaagtttggctgcaggacgaaagagagcttaaaagacaaaggcggaagcagtctaatcgggaatctgcacgcagatccaggttacggaagcaggctgaatgtgatgaactagctcagcgtgctgaagctttgaaagaagaaaatgccactctccgatcagaagtgagccagatcaggagtgagtatgagcagctacgttctgagaatgctgccctcaaggagagacttggggacatacctggtgtcgcgacgcctgggaaggaggatcttaggtctggtcagaatgatcagcatgtgagtaatgacactcaacagagtggtcagacagaggttgtgcagggtgttcattaggatcttgcttcctgctgcatgttgctttttaggtagataacctaaccaagtagcaacagcaagttctagtttttggttcaaattgtattaaaggtgatcatatgtagtattaggatctatttatgtcatatgatccctcattcctaatttgtcatgtttatgacggccaaaaacttgtattgtagttagtgtgtgaatacttggttataccttctctgctacttcaaaagttagtgttagcagtaagaaagtatgattagtgaaactagttattgtccattatatggattgccgtgcttctgcgcaaataatttaatcaggaagatatattaaggaaatggaaatgaagttcagccctgagaaagttatggtttgagtatagccagtcaaccatcgtggattttataagaattttgtattgcattatgaattatgaatacataatcacctatttatg

SEQ ID NO: 27011 - DNA, 1834 bp, Glycine max
  Clone ID: TF_GmC754_1
acttatatgtactgtacctctttattaatttgcgtttgcatgttctaaacaaatttgaactcgcgcggtggctgctcaaattcaacagacacatccatctcatcctcacctcagtatcataagaataataagctcttgtcactgttacaaaaggaacttcatttaccagcttcgctttcgaatttcaatttccaggaagaagaaaaagatggtgattgaggagggcgagatgaagtcccaaggtgaggtggaatcatggctccagcaagaagcgaagaagaaccaccattctccattattctcatcttcttcatatctgggaagacaaacatcatcgatatactctctcacactggacgagttccagcacagtctatgcgagagcggcaagaacttcggctccatgaacatggacgagttcctcagcagcatctggaacgctgaagagaacagccaagccatcaccaacaacaacgtccctctgtcgtcgaccctaacaatattaaggaaacagccaagcctccctcgccaaccctcactgtccctccctgctcctctttgtaggaaaaccgttgacgaggtttggtcccagattcaaaaagaacaaaacaagaacaacaacattagcaatgttcttaatgataataccgagtctgcccctcgccaacccacttttggtgagatgactttggaggattttttggttaaggccggtgtagttcgggaaacaacgtgtgcaccgccactaccggtgtctcactctcatcagccgcattacgcgaataataacaacaacgttgcaatggctccttcttttgttggtaggcatgttggtgcagtgagtaacgtggttgcaccgggttatcaacaagttgttggggaggcttctggtgggtatggtaagagggatcataatggtggtgggtatcattgttttggaggtggtggtggtgggtatggggtggggcccacaatgggaatgggtgggcctgtgagtccggctaattcgtctgatgggatagggaatgatggagggcagtttgggcttgacatggggggtttgagagggagaaagagggtggtggatggtcctgtggaaaaggtggtggagagaaggcagaggaggatgatcaagaatagagagtcagctgccagatctagagccagaaaacaggcatacacagtggaattagaagcagaactaaaccagttaagagaagagaactcccaactgaaacaggcgctggccgagctcgagaggggaagaaaacaacagtgttttgaggaagtgaacgttagtgttaaaaccaaagctcagaaagcaaaagagaaactgagagctttgagaaggaacatgagttgtcctttgtgaagaaactgcacggtaatggtagcagtgaaatacttggattttagtacgcacaacaagagtttgttgtgatgcatctactacttgtgtggctaaacgaagaaatagtcatgacacaaatcaagaggggagaagaaaactaaagaactactcaagtcaaagccggttgaagaaacagagaaacaaaaggtcggagttatgaaatttaattataaagccaagctgcaagagtcctcaagttcaagatcaacgaaggattagatcatccaatttggaaacttctttatcatatgataactagttactcaaatgtacaacatagttattgtattgttgatgacatttcatcttgtttacgcttaccagttaccacacccttgtttagttactgatttgatcgttggtcggcactattgccagatataagtaattaattaccagaatcaatctaattatttatgaaac

SEQ ID NO: 27012 - DNA, 1951 bp, Glycine max
  Clone ID: TF_GmC299_3
ccacgcatccgaaaaaatgactatgtttagcatcgaaaacataaatgcttctggtcttgaggagttgattgtactatcatgtgctgatatataaccaaatgtttggcctaccagataaactgattataatattaaattttgaaagtgaaataatgcgtgacttacactaatattttcataaactgtgcacaaacttttgatgtagacttgaattcttttatgtcaaactcgtatgcaatttcatcattactattatgaaggaaaggttgcacaagtattataatttttgtgttattggttgagctagctaaatgaatctggattttattgtttcttcctaaacagattctttctttattttcctttattagaaggcattcattttgttcagttcaggtactggtacaaattctgccttgtttaatttaaagcctaacaatttgtctttcaggatgctttctaatagggagtcagccagacgctcaagaaggagaaagcaggctcatttaactgagctggagacacaggtctcccaattacgaagtgaaaattcttcgttgttaaagcgattcacggatgtgagccagaaatacaataatgctgcagttgacaacagagtactgaaagctgatgttgaaacattaagaacaaaggtgaagatggctgaagagacagtgaaaagaattactgggttgaacccaatgcttcatgccataactgagatgtcatcaatggcaatgccatcgtttgatgaaagtccttctgagacatcagctgatgctgctgtttctgtgcaagaagacccaaatcatcaccgttgtcaacccacttctaataatgggttgggaggcatttcttcaattgaaactgtgcagcagaatgttgcagcagtggtaggtggcaacaaaacggggagaacaacttccctgcatagagtggctagcttggaacatcttcagaagaggattcgtggtggtgcagattcacgtggacctccttctaatggagaacaataacatagtagttaaatttacattatgctttttatgaggaaactattctaaaactcttgtttctgctagttgtaagtaagagcaaattcttattgatgtatgtgaatcttattgagcatattctgctggataatcctatttttcttttttttttttgtgtgtgtggactcctccaaatcttaattcatggctgatggggacaaaggagtgtaactagtgttggtagaggtcgccttatccaaattggatattgtttgcttcctccttactcgttttacatcagcagggtccgtgttgtcattcatagatgtctctccctcaatgtcctcatcatctgactgttctcttgatgatccacttgtagatggcctaattgcaacagcaggtttcttttgcatggcaggtatggaaggaatcccaactggtacattggtatctttatcttgtaacttagatggatcattttcagaaggaatagatcctttagaagtagtctgagattcaactagagaaggattagtcggctgtgatccaccttcagaaaaaggggacgggtcttgagatttagccaaagatcccctagtcatggcgacggcggcgcatgcgaggttgagcttgctcttgaggaaggcctggtattcgtcggagtcaagggggacgggaccaggggcattagggagaacggcgccgtttgacggagggggaggggcgggtttaggttgatcttcgatctcgacgaatacgacgtcggcggcggaggaagaagacggaggagagggtgcggaggcggaagcttcctggaggaagcgttggaaggcccactcggaggcgctgcggctcatctgggaggaagtttgggcggcggagacagggataggcggctgccagaagtgatcggagatatcgtccactgagaacaccctatccatatcgtatat

SEQ ID NO: 27013 - DNA, 754 bp, Glycine max
  Clone ID: TF_GmC609_3
attggaatggacttgtggaatgcatcttctggtggcgctgaagctgcaaaaatgagacataatcaatctggtgccccgggagttgcccttggtgatcaatgggtacaagatgaacgtgagctgaaaagacagaagaggaaacagtcaaaccgagagtcagccaggaggtcaagattacgcaagcaggctgagtgtgaagagttacaaaagagggtggaatcgctgggaggtgagaatcaaactctcagagaagagcttcagagactttctgaagaatgcgagaagcttacatccgaaaataattctatcaaggaagagttggagcggttgtgtggtccagaagcagttgctaacctggattaaacagcaacacatttcagttcctcagtgtagtgtttgatggtaacggcaaaatttgatagattcttaattaagacgaatctgcagctggaattttcttatcaatggcccggccttcttaattgagaataggatataatgtttttttttttctttgtcatactaatttatatcattaaccctcaattgtaattgcccttgtgattttacatgtcatttgtttgtaatattaaccagtaccgtagaatagaaaatgtaggctacttgagcactttttgtttagaacttagtattgcaagtgatgttaagaatcctgcttcaacttttcaaatcttcactagttgactatggagtcatttttgttctactatgcatgtgcttgagctgattgatg

SEQ ID NO: 27014 - DNA, 857 bp, Glycine max
  unsure (1)..(857): unsure at all n locations
  Clone ID: TF_GmC143038_1
ggggcgaagcatggcctcatggccacccaaacctacagtgcgtttgtgtgtgcgtgcgagggcgatggcctcggccccatgtgattgctggccccggccttcttcttcttcttcttcttccattgaacatgtctggaacgacatcaaactcgcctctctctccaattcctccgttgacttagacttgaacaacaacaactcactctgtctccgtttcttctttccttaaccaacctctttccacttttctcactctcacttctacttcctcttcctcctctgtctttcacaaacatgaccactctcttctctctgtctccgaccccaacaccctgcaagatcaacgccatacgcgtgtgatcaagaatcgagaatccgcggttcggtccagagccagaaaacaggcttatagaaaaggcttggaagttgaaatttcccgtttaacggaagagaattccagactaaaaagacaattgaaagagttgcagcgctgtttgtgctcctctcacactcccagaatggccgctccgtgtagaacctcttcatctccattttgagaaggaaaggaacccgtgaatatggcatgactcttgcatgttttcaactttcaaatgtttgtgaaagaaacacaaggattataaatggattgaattttaatagggttttttttttgaggaagagttttgataaccctggttttgtagttttgactaagtttgtctagtagttgggatttgagtaattaacatggaatcttaaatttaagcttcgttaccattattgtatatattaaaaaaaaactggctgctttctgttagcaagactaataaannnnnnnnnnnnnnnnnnnnnnnnnn

SEQ ID NO: 27015 - DNA, 1291 bp, Glycine max
  unsure (1)..(1291): unsure at all n locations
  Clone ID: TF_GmC535_1
cggctgcgagaagacgacagaagggaacctcactttttttctctataaaatccaacctaaacactctaagagaaccttctcccgataaacctttttcaccttcccctttgtttctcaacatcattccccaatttccccttctgtattgtttttcttcatttctctttttcaatccccgatttcccccttcttcgttttgtgtcttcataattcagatcctctcttcaatctagggttcctggcttaacgaacaatcaaatgtttaaggaagaatttctatgacgattcgcaaccccatgcgacgaatccgtctcctccactccttctccgtcgtcttcctctactggttctacgtcttctcatgaactaaccccctctcaatcccctaccctaattcctccaatttcccccttttttttctaattaatcagatttgcaaaatcctaatttctctatcctaacaaaaaccccaaattcaaacaaatccaatggcttcgattccgcgcccggcgagttcgggatcttcggagggaggaggagatccggctgcgatggacgagagaaagaggaagcggatggagtcgaaccgcgagtccgcacggcgatcgcggatgaagaagcagaagctgctcgaagacctatccgacgtagcgagtcgccttcaaggcgagaacgtgcgcttagcgcagagcataaaggcgaaggaggaagcgtacgttgagatcgaagccgcgaacgacatcctcagagcacagaccatggaactcgccgaccggttaaggtttctgaactccattctcgagatcgccgatgaggtcggcggcggtggtgaatccttcgagattccgcagattccggaccctctcttcatgccctggcagatcccccaccctatgatggcgtcacctgacatgctcctccatggaaatcaaggcctgtttgcttgatagtacttcaattaggctaggtttattgttgatgttccctagtgttttggtgaataaagaaagggaatggtgttagatgtttatgagttatatcgtgtgttggtgtgctgttttttttttttaagatctgtgtctatgttttgtgtgtgcactatcgtcgttatatagttgaattgaatgtatctgctttgtcacagtgactggtattgtggtgttgcaaattgcggttgtttgtatgaaagtctaaaattgattttgaagagaaagggattatgcttagatattttattataaaatcaaagaaacttttcagctatggnnnnnnnnnnnnnnnnnnnnnnnnn

SEQ ID NO: 27016 - DNA, 851 bp, Glycine max
  Clone ID: TF_GmC535_2
cggccgctcgaggcggcgggccgcccttgcgtgtcacctttttcaccttccccctttgtttctcaacatcattctcctcattcccctacctacccccaattttcccttctgtatttctctttttcaattctcgatttcccttctcccttttgtgtcttcataatccagatcctctcttcgatctagggtttctggcttaattaacaatcaaatgtttaaggaagaatttctatgacgattcgcaaccccatgcgacgaatccgtctcctccactccttctccgtcgtcttcctctactggttctacgttttctcatgaactaactccctctcaatcccctaccctaattcctccaatttccccattttttttctaattaatcagatttgcaaaatcctaatttctctatcctaacaaaaaccccaaattcaaacaaatccaatggcttcgattccgcgtccggcgagttcgggatcttcggagggaggaggagatccggctgcgatggacgagagaaagaggaagcggatggagtcgaaccgcgagtccgcacggcgatcgcggatgaagaagcagaagctgctcgaagacctatccgacgtagcgagtcgccttcaaggcgagaacgtgcgcttagcgcagagcataaaggcgaaggaggaagcgtacgttgagatcgaagccgcgaacgacatcctcagagcacagaccatggaactcgccgaccggctaaggcttctgaactccattctcgagatcgccgatgaggtcgacggcggtggatgatccttcgagattccgcagattccagaccctctcttcatgcactggcagatcccccaccctatgat

SEQ ID NO: 27017 - DNA, 767 bp, Glycine max
  Clone ID: TF_GmC6275_5
cggacgcgtgggcggacgcgtgggcggacgcgtgggcggacgcgtgggttctgaaccaacacaatgatggaatggaagggtcttgcgttcttctgcggtttgatagatagtcagccatgttggcatgaagatttgagcgggaaaataataagacaacatacataacgttttctcaaagtggtttttttattttattttttttatcataagacggcagtttgcctgcactgatcagttcttagagcatgaattcagcatccccgcagtttgtttcctcaagaaggatgagtgtgtacgatccgatccaccagattagtatgtggggagaaggcttcaaaagtaatggaaatttaagtgcagccatgcctctaattgatgagacagacatgaagtttgatagtcagtcagaggatgcttctcatggtatactgggagagcctaataagtatgaccaagaagctaacaaacctactgataagatacaaagacgtcttgcacaaaatcgagaggctgctcgtaagagtcggttgaggaaaaaggcctatgtgcagcagttagaatcaagtcgtttgaagttgatgcagttggagcaagagcttgaacgtgcaagacagcagggaatttatataggcggtgggttggattctaatcatctgggttttgctggatcagtaaattcaggaattacaacctttgagatggagtatggacattgggtgaatgagcaaatagacaatcacagaactgaggaatgctttaatgctcat

SEQ ID NO: 27018 - DNA, 2194 bp, Glycine max
  Clone ID: TF_GmC853_1
gcagtcgtgatttatattttgaaaattaaggagccagtgaaagtactgcacaaaatagttcatctcattattatttctatgaattctacatattcagaagccgagtcccatggtttaatacatttgtatagacaggttctctagacttatgcgagtcgattttcttatttgcatagatatggtttccaggataatgctctgctttttctccaccgctgtcttactgtgtgtcgagttgcccttgatcgtgcaaggcataaagttttaagcattacgcagagttattgattgctatgggtgattggtgagtggaagattagtttgctgagtctgtggaaggtgttgagcaaagaaaaagttctatctctggtggtccagttctcagaccaccaaaccagaaacatggtataccaccctctcaccctaatatcaatatttcaccttcagcaactccttgttcccgatattctcagcgattgcgttctccgggttcctcccattcgaggtctttgtctcaatctcccattttctcgttggattcattgcccccattgagtccttcccctgctgctgttacctccatgtttgactcaatctcaacaactgatatgtctgtggaggaaagtaatgtttcctctcaggtgcccctcaatggagggcatgcccttcttcctcctaggaagggacacaggcgctctagtagtgattcccctttgggaatctctggttttatgcagtcttctccagttccctccggaggagagagctcggggttcgagaagccgattcagttggtcttgaaggcgtcctttagggacagcctggatgggggtcatgctaatgagcctgttaatgggaggaaggaggaggctgcggatgatttgttcagggaatacatgaatttggacaactttgataatctgaactttcctggcatggaagataaggacttggatagcaggaccagtggttccaagacagttgagagcagcgataatgaagttgagagtcatgtcaatgggaaggcgagtggggctcagggggcaagttcaagctgctcggaggaaaggagggaaggagtcaagaggagttcaaatggggaggttgcaccgggttcccggcatcggaggagtttttcgttggatagttccatagggaactttaacattgaagatggattgcctaagcttcctccttcgaaaaatcaaatgggtcagcactcacctagcaattcgatggacggcaaaatgtcagaaacctccacggagtttggaaatggcgaatttagtgcagaggaggtaaagaaaataatggaaagtgataaactagctgaaattgcttcgactgatcccaaacgtgcaaaaaggattttggctaatcgtcaatcagctgctcgttcaaaggagaggaagatgcgatacattgctgaattggaacacaaagtgcaaactcttcagacagaaacaaccacattgtctactcagtttaccaaattacagagggataactctgaccttaaaagtgagaacaacgagtgcaaattaaggcttcaagccatggaacaacagtctctattgaaagatgctctgaacgagactttggatgctgaagtccggcgtttgaggcgtgctgttgcagaacttggcggtgaatccctcacaagttgcatggctcgacagcttgctattaaccaacaaatgttcgagttacagcatcagcagcccagccaacagagacattttctactgcaaaatcaccatactcaggaagagatagagtctcgatcacagcagattcaaggcaatgaattgcatccccaggcacagattcagtcacagcagattcaacgcaatgaattgcatccccagccttaaattgcagagaaatatgttgcctattaatggtgccaaatagtggaagcaaaatacttttggacgtggagctggtgaggtataagtataatctcaatcgtacataagcagtgatctagcattagtttgcttgaagtttcataagatcggttcatcatctttatttaatttattattttgactgttttacctgcatacaaactcggactatcctattcatgtagtaaaccttattgtcatgaatacaacccacctttctctattgagaggggtcatgttgttgcataatctatgttactctacaaaaaaaaaaaaaaaataaa

SEQ ID NO: 27019 - DNA, 1803 bp, Glycine max
  Clone ID: TF_GmC609_7
aaacaaaacacacttacataaaaaatcatccttatctatgccacttccacttggacttccacctcacccactttctctgcgccatggaaacagtacgttgtctggcatgtgtacttgttcaaggtgacatatgacctaaacaattattagaacttaatctgatcacaaggcagtttttttgagctgatctggatgggaaccggtgaagaaagcacagctaaagttcctaaaccatcttctacttcttcaattcagataccactggcaccttcatatcctgattggtcaagctcgatgcaggcttactatgctcctggagccactccacctgcattttttgcctcaaatattgcttctccaactccccattcttatatgtggggaagccagcaccctctaattccaccatatagtactcctgttccatatccagctatatatcctcctgggaatgtctatgctcatcctagcatggcaatgaccctgagcaccacacagaatggtacagagtttgtaggaaagggttctgatggaaaagatcgggtttctgccaaaagttcaaaggctgtgtctgcaaacaatggttccaaagctggaaacaatggaaaggcaagctcaggtcccagaaatgatggcacctcaacaagtgctgaaagtgggtcagagggatcctcggatgctagtgatgagaatactaaccaacaggaatcggctacaaacaagaaagggagttttgaccaaatgcttgttgatggtgctaatgcacggaacaattctgtgagcatcattcctcaacctggaaatcccgctgtgtcaatgtctccaactagtcttaatattggaatgaacttgtggaatgcatctcctgctggtgacgaagctgcaaaaatgagacagaatcagtcttcaggagctgttactcctccaaccataatgggacgtgaagtcgcgctgggtgaacactggatacaagatgaacgtgaactaaagaaacagaaaaggaaacagtctaatagggagtctgctaggagatcaagactacgcaagcaggctgagtgtgaagagttacaaaagagggtggagtctctgggaagtgagaatcaaactctcagagaagagcttcagagagtatctgaagaatgcaaaaaacttacatctgaaaatgattccattcaaggaagagttagaacaattgtttggaccagaagcagttgctaatcttgaataaatcaacttcttattatcatgccaagcatcgggcggaaaatgtccaactcctaggaggaggatgatttgcagctgaaatttttatcaatggcgaaaatgaacataggatataatttttttcccttggtttactatttacaccattaacccttaattgccaccccccttatgttttgcccatttagtattgtaaaacaaatcatagcaaaatattattttcaacactttttttggacagatttttttttatgtaggtcatagtaaataaccttgacttacattatttattgagacttacgtgcaattcagtgataataaatattgtatcaaagagagtgttccagtcacaatgtaactccagaagttgatcttgaagctaaagtaaggctggaccaaggattgtgtgccttcttcagatgtcacggtgcttttgaggaagggtaatatccagaagggtccagattgtgttcaaagaaatgacatatttttagtatttgcttgtgccgatgaatagataattttatgctaattgggcacttctattcggtgttcagtagtttcacattcactttcaaa

SEQ ID NO: 27020 - DNA, 3281 bp, Glycine max
  Clone ID: TF_GmC1648_1
tcagtcaaaaccgaaactagtagcctgcctcttgtcagcattttcccgaactgaaacctcagtgcgctgcatattcggacgagggcctcctcataaatcctccagagtctgggcgattaacccttggagctggaccagatgatcttcccacgcgtccgcccacgcgtccgtacggctgcgagaagacgacagaaggggaagacaatttttttttcccttgtttctttgttgatcgttttggatttgaaaaagactttcttattttcttttcatcaagttgctggcatggctttttggttctataaattctccggttgaagcatacagagtccccttccactttcttccttctttctcatcactcttttaagatatttttgttacatagtttatggtctacgagagccctgcctctgtagagtgtagaccaacctccttttctttgctttgagctcgctcgatcttcttccatttcatgtcttgttttattttattttatttatttaagccttttaaatgcccaacattttgttcttgatgtttgagattgatgtattcaattctgagtgaaatcttcttttccgggtgtatgatcaattccactgtgagacgcaggacccatttagttcaatccttctctgttgctttcctttactggctctactacgtttcatgatttctaaccccctctccaattattaattaaataaaaccctattatatatctcttacatatttttatctgcaaaaaaaaataatctttttttgttcttgttcttgtttagtgtctgggtcctgcgaactccaagtacaagaagggtcaatttttgtttttctgttaacttttgattactatggcttgttcaagtggaacatcttcaggggcgacgtcgtcgatgcttcaaaataactcaggttcggaggaggagctgcaggcactgatggagcagaggaagaggaagagaatgatatcgaaccgcgaatcggctaggcgatctcgaatgaggaagcagaagcacttggatgatctagcatcgcaggtgactcagctcaggaacgagaaccaccagattctcacatcggtgaacctcactacccagaagtacttggcggtcttgtttcttttaagatatttttggtcacatagtttatggtctgcctctgcgtagtgcttcaacagccccctgctcgctcgatcatcttgattattttttaagccttttaaatgcccaacatcttgttcttgatgtttgagattgatgtatccaattcttagtgaaatcttcttttccgggtgtatgatcaattctactgtgagacgacgcaggacccatttagttcaatccttctccgttgcttttctttactggctctactacgtttcatgatttctaattattattaattaaataaaagcctattatatctcttcttacatatttttatctgggtctgggtcctgcgtagtccatttttgtttttgttaagtattggttactactatgactatggcttgttcaagtggaacatcttcagggacgtcgtcggagctgcagggtatgatggatcagaggaagaggaagagaatgatatcgaaccgcgaatcggcaaggcgatctcgaatgaggaagcagaagcacttggatgatctagcatcgcagctgactcagctcaggagccagaatcagcagcttctcacgtctgtgaacctcaccagccacaagtacttggcggtggaggctgagaactctgttttgagagcacaagtgaacgagctcagccacaggttggactctctcaaccagatcatccacttgttgaatttctttgagcccgatgctagtactagtaccttcttcaacaaccctttcaatttcagcctcccgattatggcttcagcagacatgttgcagtactgagacagagagaagagaggagggggtgtgatgtttgttagggaattcatatcatagagcgggtaagcctgcttgttgggtgccgcttctgtagtcttccagatcaccctattattgttgcaactgtacttccctatattattagacttgtattatttgtcatatgagaccaagtcatataatttgcatgtaattttagtgtcaatgtaaaagagtttatgaaaatggggtttgaatttttaaccgtaaagacatatctctttcccctgccaccaaattgtgtttttgactccataaaattctcttttgaaactggattatatgatgcatctctagtgacaggctgaacttctgattcttttgcactggatgaaatattgcttctctttccaactacattttgattcccccgcttatccaattggaaactagtagaagttctactgctattattatgaacatgggaagactcaattcgaccctgctttattccagcaatattttctgcattctcacttggcagtgaaccttgtgataagtttcctcgagcccctggttggctgtcaacagaatgatgcctgatctcatttttcataaaggaatcagaagtttctggagcagtttgaactggcatttgacctccagggttatgactgtggatgcagatgcagtggcatctgtatagaaccaatctgtatggcaggtacgggtgatggtatcaaagatggaccagaaaacagaccaaattgaagcttaatgggtacctcagcttgacttggagcattagaagatgagtagtgaggggcaacagtaactggactcggtgttgtactatgttgggtcaacaggccattagatgcttcctcattaactaaactctcagacaccacaggggaaagagaattactaggctgaatgaccaaatcttgagcaggcttcctcgagtcctggaagccagtggaagtgctgttaagattcacttgagaggtatcattaacaggttggagggccttgccattatcacgtgcattatcataagatacacattcttctgaagcctgtggtgccataaatgtcgtttcttcatctttcaatgtcctttcaaactcttcattaggcatcccaacctgtacaccctcatcaaatcctaatacaaggttatccatcaagtggggcaatcctttctcctgcaaatgcatatcttcaaaatcttggttgagttgagcatgatcatctccttcatgcacttcatcttcttcctgataatcttcatcttcatcatattcctcttgttcctggaactgctcattattctcagtagtccattcatcatcatccccactagagacaggacatggagtaact

SEQ ID NO: 27021 - DNA, 2286 bp, Glycine max
  Clone ID: TF_GmC217_2
aaaatcgtgaggctgccaggaaaagccgactgaggaaaaaggcatatgtgcaacaattagagagcagtaggttgaaactgacccaacttgagcaggagctccagcgatctcgccagcagggaatatttatttcaagtactggagatcaggcacagtcaatgagtggaaatggtacttaaacattgtgtacctccgattgtatgttttgagggttaaacatattggagtagttttaggggatgttttgaggctgataataataatccatagtcagtgcaaaaacgattgacacttggtttgacattcaattaacaatatgtgcatcccgaaattagtgtatatgtaaattttgcattggcaatttggcagaaacctgataaaggcacctctattgagttgctgtccctaaccaacatggaatttctacatgctaaaatatttatggttgatttaagtgcttcatctagttctctgatattattctttttcgtgaaacaaaccaaagttcctgtaaagatatagtaccatctctaagttggattccatttacgttggttcatatttttcattgacaaacattggttatttggttgcatcttgcatcatttcagttgcactgaagtactgcattcttctgatacaccatagagcttggtgttatttgctgtgattgattgcatcatacgtgatgcaagcctattatgtgatttttgaactctgacaacatggtactcagtagcatggatggtcatgggcagggttttgcaaaagtttgtgctctgtttcaaatcctaaatcaatttaataatcttgttgtacaggcgctatggcatttgatgtagagtacgcacgatggttagaagagcataatagacaaaccaatgagctaagggctgcaataaattctcatgctggagatattgaacttcgaaccattgttgacaatttcatgacgcagtttgatgatatcttcagactgaaaggtattgcagcaaaagctgatgttttccacattctgtcaggaatgtggaagactccagctgagaggtgtttcatgtggattggaggctttcggtcatccgaactcctcccaagggagaagtttctcttatctatgttttgtaaatgttttttctggtttgaaaattgcttcactaatatctggttgaacattgattgcattccatgcttcccaacaatataaagtgagaaaagcaacaaaagaatcaaaatagataggacctttttttcttgacattattgaaacctaaaattcaagatatagtttcggaactttcccaattgaagaaatatcagttttaaccgttttgtgtttacgataattgattctgttgttgagttttaaagttcatagactttttatcacgttatgctgtctaagattggattgaaactgttgcagcttcttctaagtcagttggagcctttagccgagcaacaattgatgggcatctacaacttgcagcaatcatcccagcagactgaagatgctctttcccaagggatggatgcattgcagcaatcactatctgagacattggctaatggttcgcccagctcatcaggctgcctcgggaaatgtggcaaattacatggggcaaatggctatggccatgggaaagcttggtacacttgaggggtttcttcaccaggctgacaatctgcggcagcagacattacaacaaatgcttcgaatattaacgaccaggcaatcggctcgtgctcttcttgccatcagtgattatttctcacggctgagagcgctgagttctttgtggcttgccaggccaagggagtgaagcatttcacagccccattagtggacttctttcatgcctgacccccttaaacaccgatgatcattgaatcttgtgctctgaatgagttcaatggaagctggtgtcttttgacaatgaattcctcttgaagcctagttgtggtgctataaacattaaatgctacgatttttctactctgccaactgctgctgtggtgcaacacttttctttaagcttttgtggttttaaaatagtctcaataatttgattatataggtgtatgatagatagaagttgttgaaggggaaaaatgtagaaatagtgtatctgtatttttaggttatagctgttcattgtatttcagaaatcagcttttatttgagggggtatttacctctggttggttgcatatatggctccatggtgtatttatgtatggatgtatatatacgttctctcttggtatattagaaagacattaccaact

SEQ ID NO: 27022 - DNA, 1215 bp, Glycine max
  Clone ID: TF_GmC114277_1
acatgaccttaataaacacgtatttacaacttctcaatgctggaaaaatgcgagcagccggaagaggatgaggagtttaagggtgttttgctagaattaatgctaatgtttgatgactgacttagtaagttcttgaggacgattagcccaaagtttgctcaaagcccgcaggcgttgaaaatattcacccaaatcaagcagaaatcgaccagtctgacgtgtggtaagtattcgatacatttgcctcaatgtttcttgtcgtagatgatcagcctggttcacaaagctcacaagtgcttctagtctctccattgcagtatccatttggggaatgtgagttccttcaactagttgtcctggtcctacagagtcagcgagcatttgctgaagtttttccataccttgtgaaagagcatcttctgcttgctggcatgatttttcaaggccataagcatcaaaccgttgttgctctgtcaaaggttcacttagagggaccagaacctttagaagttcagaggggcgaaatcctccaatccacaagaaaaatcgttcagctgttgtcttccacataccagacataacatagaaaacatctgcttttgctgcagcagatttcatgctaaagagtttggtgtagtggttcattatgccctgtacaagtgtcccgagctgtatgtcacctatatgagaacttaaagcagttctcagttctaaaatttgtctattttgctcctccagccagtttccatactccatagagccagcaaaacccaaattattagaacccaatccgtcgccaatatacaatccctgcagttttgttgcctgttgttttgcatgatctacctcttgctctagctgcacgagcttcaaacgacatgattctaactgctgcacgtatgcctttttcctcaaacgactcttgcgagcggcctctcgattttgtgcaagacgtctttgtgtcttatcagtaagcctgttggcatcttggtcgtacttcacagatgttccaaatattccatgagaagcatcctctgattgcacatgaacctgattatctaacttcatctccacctccccaattatggatgtggatacagttaaattattagtatcattacttttgaaagtttcttcccacatgctaatttggtggataggatcatatacacccattcttcttgaggaaacaaactgtgaggatgtagcatccat

SEQ ID NO: 27023 - DNA, 358 bp, Glycine max
  Clone ID: TF_GmC322_1
gtcactcttctgtggccggtgtgaatgcccgcaagcgtgacaagcccctgccccctatcgttatcgatgaccctagcgacatcgtcgccatgaagcgtgctcgtaacactcttgcagcacgaaagtctcgtgagcgaaaggctgctaagttggaagaacttgaggataagattgctaagctggaagctgagcgcgatcactggaagaggatcgctcttgcgcaaaccggcatgcaataatggattaaaagtggaatttctttcctttgccaacacgggatttcgttggtttgttactgtgttttaatcaggtttcattgattcttatagtcaatcagtcaattaaattgcttctcttg

SEQ ID NO: 27024 - DNA, 509 bp, Glycine max
  Clone ID: TF_jC-gmst024169c09b1
ccacgcgtccgggcgcgacatccagagcgccggcggcggcggcggcggccgtcagccctccatgggcgagatgacgctggaggacttcctctcccgcgccggcgtcgccgtcgatgccgccccgcattggatgcaccagtacccgcagcagcagcagcagtacgcgctgccgcggcccctgccgcttcccggcccggctctggacgccgcgtaccacggcgaccggcccggtgttttcctctcgcactcgcaggtggccgggcggaagcgcgccgccacggcggccgtggccggggacggcgtcgtggagaggacggtggagcggcggcagaagcgcatgatcaagaaccgcgagtccgcggcgaggtcccgggccaggaagcaggcgtacaccaacgagctggagaacaaggtggcccggctggaggaggagaacaagcgtctcattgagctcaaggtgctgaaaccactggagccactggagccgccaccggcggagcagaacaaga

SEQ ID NO: 27025 - DNA, 783 bp, Glycine max
  Clone ID: TF_GmC137634_1
ggcccctggtggtggggtccagagtttgagtgtgcaaggtggagggattggtggtatggttggtttggcacctggttctgttcatgtagctactggctctcctgctgctaaccagctgtcctccggtgataggattgggaagagcaatggtgatacctcgtccgtgtccccggttccttatgtctttaatggtggtctgcgagggaggaagagcgggggagctgtcgagaaggtgattgagaggaggcagagaaggatgataaagaatagagagtcagctgccaggtcgcgggctcgcaaacaggcttataccatggaattagaagcagaagttgcaaagttaaaagaggagaacgaagaacttcagaaaaaacaggcagaaattatggaaattcagaaaaatcaagttaaggaaatgatgaatttgcaacgagaagtgaagagaagacgcctaagacgaacacaaactggtccatggtagagtgaacactcgactacgattgaagcgttaaaatatatgtacataattataaaaacgtatccagttgtagattgaggctgtggtagtttttagattagcacttgaaaactttcacgtcttacttctcttttggacacatgttagggagggtatcacagtaccatgagaatatgtttcagcacacgtccaatttcttgccatcattggttagacaatcttcttttgcagtatagcactttcgctgaatttgattcggtgagattgtgtccaaaataagcactatattaacggtagtttagatc

SEQ ID NO: 27026 - DNA, 1756 bp, Glycine max
  Clone ID: TF_GmC1880_1
tgaaacggcaaagcaaaggtcgcagctgctgctgaatctggtttaacgcaacgcaacattctccatcaaatcaaatcaaagttccagatttggtggcaatggataatagggacaacaaatcgcctcctcctctcccaccttcttcttcccgttacgtgaaatcggaacaacaagcttcattatcagcatcgtcgtcgttcagccacgacgacataagcggaatgccggagaatccaccgaagaaccagagggcacaggcgcgcccattcggagattataaccctacccgacgacctcaccttcgacgttgatctccccgatgacaacgacttgctttccatctaccttcaattcgatcaactcgattcctctccacttcctcttcctcctcccggctcgagcaacagcattgctaataataataataataataataataagaataataataataataatgaaaggcctactagggttcgacaccaacacagcctctccatggatggctccatccacccggatatgctgctctccgctaccgctgccgctgccgatgatgtctccggtggtggcatcgacaccaaaaaggctatgtctgctgacaagcttgctgagcttgccttagttgatcccaagcgggctaaaaggatatgggcaaatagacagtctgctgcaagatcaaaagaaaggaagatgcgttacatttccgagcttgaaaggaaagtgcagacattgcaaactgaagcaacttccttgtctgcacaattgactctcttgcagagagatacaactggaatgactgctgagaacagtgagttgaagttgcggttgcaaaccatggagcaacaggtccacttgcaagatgcattaaatgatgcattaaaagaagaaattcagcatttgaaagcactgactggacaagttatgccaaatggaggaccggtaaattttgcttcatttggtggggggcaacaattctatcccaacaatcaggctatgcacactcttttagctgcacaaaagtttcaacaactccaaattcattcccaaaagcagcatcaacttcagcagcaacagcaatttcagcaacaacagcaatttcagcagctgcaacagctgcaactgcagcagcaacaacaactgcaactgcagcagcagcaacaacagcagcagcagcaacaacagcagcagcagcagcagcagcagcagcagcagcaactgcaactgcagcagcagcagcagcaacaggaacagtaatatcaacaaatgggggacatgaatagggaggggacacacctcatcaaatgtacttcagcggcagaggattttagagactacaaattgctttctcttcatcactttacccttgtgtttagagtttgtttaggtcacagtcattatatttcttattcatgaaacggtacagatagtcctagttagagattgagaattatgcattggatcttggctatgtaaaattctttggcacctttggttatgaatatgcggggcggatttatgtttgttaagtcttacaattgcttttgcctatggctatgcctgcataagtggtctgtttagattaaaaatcacgttgtctcgcaatttccaccggaattgccatatgtactcctaaactaggataccaacgaaacacctggggtgtttagtagagggggtttccttttaagtttctcttaggttgttaatgttaaatttctatatttgctatgacaattttaaaaattattctcag

SEQ ID NO: 27027 - DNA, 885 bp, Glycine max
  Clone ID: TF_GmC299_5
ctcgagccgaatcggctcgagacgacagaaggggactgattataatattaaattttgaaagtgaaataatgcgtgacttacactaatattttcataaactgtgcacaaacttttgatgtagacttgaattcttttatgtcaaactcgtatgcaatttcatcattactattatgaagtgctttctaatagggagtcagccagacgctcaagaaggagaaagcaggctcatttaactgagctggagacacaggtctcccaattacgaagtgaaaattcttcgttgttaaagcgattcacggatgtgagccagaaatacaataatgctgcagttgacaacagagtactgaaagctgatgttgaaacattaagaacaaaggtgaagatggctgaagagacagtgaaaagaattactgggttgaacccaatgcttcatgccataactgagatgtcatcaatggcaatgccatcgtttgatgaaagtccttctgagacatcagctgatgctgctgtttctgtgcaagaagacccaaatcatcaccgttgtcaacccacttctaataatgggttgggaggcatttcttcaattgaaactgtgcagcagaatgttgcagcagtggtaggtggcaacaaaacggggagaacaacttccctgcatagagtggctagcttggaacatcttcagaagaggattcgtggtggtgcagattcacgtggacctccttctaatggagaacaataacatagtagttaaatttacattatgctttttatgaggaaactattctaaaactcttgtttctgctagttgtaagtaagagcaaattcttattgatgtatgtgaatcttattgagcatattctgctggataatcctatttttcttttt

SEQ ID NO: 27028 - DNA, 2133 bp, Glycine max
  unsure (1)..(2133): unsure at all n locations
  Clone ID: TF_GmC1081_2
ccacgcgtccgcggacgcgtgggtttcaggattttggccaaccggcaatcggctgcgcgatccaaagagcggaagatgcggtacatttcggagctagaacacaaggttcagactctacagacagaagccaccacactatctgcacagcttactctgttacagagagattcggctggactcactaaccagaatagtgagttgaagtttcgccttcaatccatggaacaacaagcaaagcttcgagatggtatttctgtcctttaattcatagtctatctatcagattttctctccattttgttttattgatttgtggctgaaatctgccaggcatcactagttaattattcacctatagcattggttgaacttgtagttgcaatgttgcatagattatatatatatatatatatatatatatatatatatatatatatatatatatatatatactatttatcagngaatgttaatcgctagtttgttaagtttttggtagcaaatgtgattaaacctgcaaccggtaggcaaccacatttgaactcatgacaatcagggcatttcacagcaagaaataaatttcaacaggaaggagacagtggaagtctcatcatgttaaaaggtgacattggtgagaaaccgcgaccaattgggataatatggggaggaactgctaacagaggccgccttaagttaaaagttgggcaacctcctgagaattggactagtggggtggatctagggcgtcttctcaatctacttgaacttgatctgataacgactgatgaaggacttcaagtggcagtgcaagaacaaagagctgtgtcagccacagtaattggctctacagtcggtgattcctcacctcctgatggtgtacttccaaaagataaagctgaagacaagtatgagccacttggtcttcaaattcagtccattcccttaggagttgtacctagtagccaagacatgaaaccatcaataatggagactgaatttaaattagaagatggaatcaaggttggtcccagtatcgaacaccagttcattccgagcttcattgggcggtctccattgcataaaaacagcatacaggacagaactgcaacagagaacttgtcttcattgaggaataactgtgatgaagatttgtgtgtttcactgcagctgggtgacaatgaagcaaagagaaggcgttctgaagcctcaactagtactgaggaacctcagtgaaacagattatttgcataagctggaaaaactgacttataagtctaatcacctcagaatgtgttgtttatggccactgtggtactgtgtttatgcttagcagctctgacagtgtgcaatgatgtgattggagttcacattgtcattgaagttcaagtaaatttgtgaccttggagagccatttagttcctaaaatgcttgaatttctgaactgaattatgtcacttttcaattaacatgggcatacattgccaattaactgttgctcacatcacatggccctgaccatggtttatatgctgtgataaactgatgggagttggatttttatcatgtccttttgcttcccccatcctaggtctgcaaaaccttccacataaataaaaagagtagtgctagcaattttttaatgccacagctgaactaagtggcgattcgcatggttctggctgtttgattcctcaacattctgtcaatcctctgatgttccagcaacagcagcagcctcctactgcatcccaacaaaacattcatcttcaacagcagcaacagcagcagcatcagaatggtaatgccaactcaaattccgacttaaaacaatagtttgggaaggagttcctgcagctgcatggttggctcactgcagtcagtttcgcatatttacaaaaaggttttccttagttgttatggtctcaagtttgatttgcattattacctgtccagctcagacagaaagtccatatacaagttctaattcctgtcttttatctaaattattatagagcatatttaatttcagtatatatattaaattgtaagcattatttggacatgatttgttttatgatggcattttagagaaactgttcaatctttctttttgtaaagaatgaccattctgtt

SEQ ID NO: 27029 - DNA, 671 bp, Glycine max
  Clone ID: TF_GmC749653_1
cagattctcaacataccttacaatcagacccttaaaccatcatcttgaaaaatagttctaaatttcccaccatggttcctagtgagatcagaggagtccactatctagcacctgaaaatccattcctagttccaccaaactttagccttctgcaaagtgacatccctaatctccatcttaacaccctcctaagcaactttccaaactgccacttccctccttcaggccatgaatttgttgttcctccctcttcatgcctcagcagcaactcaacctctgatgaagctgatgaaatccagttcaacatcatcgacgaaaggaagcaccggagaatgatatcgaaccgagaatccgctcgcaggtcaaggatgaggaagcagaagcacctggatgagctgtggtcacaggttgttaggctcagaactgagaaccacaaccttattgacaaactcaaccatgtgtctgaatcccatgacagagtcctccaagagaatgcacgcctcaaggaagaagcttccgctcttcgccaaatgctagcagacatgcaaattggaaccgcttttgcttgcaccatggaagatttggaggaccttccatgcaacacttctcaactcaaacctgatcccttaaaccaatcaatcactcctgcagacatgattcatgaatgaggc

SEQ ID NO: 27030 - DNA, 2796 bp, Glycine max
  unsure (1)..(2796): unsure at all n locations
  Clone ID: TF_GmC1716_1
ctctcagaatataaatattanagtgtcattcctgtggtgcattgtatcacctattctgtgttttgtgagttgttatcaatatgtacccctaatcaatgtcagactgaaattatgcactgaattgctactggatttggcaatcagttggggtaatatctaggatgagatgtgctttgtccctggattgctcaatctgtaaaaaaaacattgattcgatggtataaaactattaattttatccctttcaaattggttcacccagcaagttttcaagtgtgtttggtctctagtgtagtgaatagtgactgtattataatttaaaatgtctactatatcttctatttaagtcagtatggacactggctttacgtccgggctctttccctcgttttttaagagagagaaagtagagagagagacaaacacaactcccacaattgctttgccaaaccttaatttcagggcacttccaagctaccaggaccagttgttgttgttcttccctttttgtgttttttgattcagcgatttttggttttcgttttttttttttcacaaggagaaagttcgatgtctttaagttgaataacttgttgggacatatttgactcggtgctttttcttttggtgcttgcctcatgggaaacagtgaggaagagaaatctgttaaaactggaagcccttcttcttcacctgcaacaactgagcagaccaaccaacctaatattcatgtctatcctgattgggctgccatgcagtattatgggccaagagtcaacattccaccatacttcaactcagctgtggcttctggtcatgctccacacccatacatgtggggaccaccacagcctatgatgcaaccttatgggccaccttatgcagcattttattcgcatggaggggtttatactcaccctgcagttgctattgggccacactcacatggtcaaggagttccatcttcacctgctgctgggactccttcaagcgtagaatcaccaaccaaattatctggaaatactgatcagggtttaatgaagaaattgaaagggtttgatgggcttgcaatgtcaataggcaattgcaatgctgagagtgctgagcgtggagctgaaaacaggcagtcacagagtgtggatactgagggttacagcgacggaagtgatggcaacactgcaggggctaatcaaacaaaaaggaaaagaagccgagagggaacaccgaccactgatgcagaagggaaaactgagctacaaaatggtccggcttccaaagagactgcatcttccaaaaagattgtgtcagctactccagctagtgttgccggaacattagttggacctgtagtttcttcaggtatggccacaacactggaagctgaggaacccttcgactgttcattctaaggcaaattccacaagtgccccacaaccttgtgcagttgtgcgtaatgaaacttggttacagaatgagcgtgagctgaaacgggagagggagaaaacaatctaaccgtgaatctgctagaaggtccaggctgaggaagcaggccgagactgaagaattggcacgaaaagttgagatgttaactgctgagaatgtgtctctgaagtcagaaataactcgactgactgaaggttctgagcagatgaggatggaaaattctgcattgagggaaaaactgataaatactcaactgggacaaagggaagagataactttgagcagcattgacagcaagagggctgcacctgtaagtacagaaaacttgttatcaagagttaacaattccggttctaatgatagaactgcagagaatgagaatgatatctgcgagaacaaaccaaattctggtgcaaagctgcatcaactactggatacaaatcctagagctaatgctgtagcagctggttgaaaccagtaactgcactggctaattatgtaattttggcatattacaagcccaaaattacagcttggtgctaacagttttcagagggatggatcagctgaattttacaatctaattccatctatatagaccagaactaattctttgcttgtgagtttcttagggcataaactctgtattttactagatttcacagaattgaatgacaactttaaaagtttgtaaattgaagagtattagggatttagtttagactttaagagaggcttgtcggccgctgtataattggttgtgtattaactatattggtgtgatctttctaatggtatcttagtcaaggcattctgacttttggttagttttggttttgtatactttaaagcaattcctcatgttgtggctgtggttgccttttaccatgtgtttgttaccacttagtgtgcatttggattgaattaattttagaaatgttaatctgaatgataaaaaatgtaaaatgaagagaactagagatttcagattggatggggtttgttgaaccgctacataattgcgtatgtattaacgattggtgtggactttcaaataaaaaaaaaagaaaaaaaaaaaaaaaaaaaaaaaaaaaacataatactagaaaaaaaaataaagactaacaaaatgctatacaataattcatattatcagtatatctggcaagaagttaatgttaaataactcgtacaacaatgacacaaatggaaaaagaagttttttgcgtatttgaatactgcttggaaataactaagaatcaactttttgaaaaataacaaattggccctaaccgaaaagccataaaaaaaaaatgggcaaccaaaatagaaaaatgagacaacaacctaaaa

SEQ ID NO: 27031 - DNA, 935 bp, Glycine max
  unsure (1)..(935): unsure at all n locations
  Clone ID: TF_GmC306390_1
cctttctccctcctcagctcctccacctctagtttcagaaaaacctcgtcactctgcccccatgctttctctccctccctccgaccccttctccaccttctccgccggcttcacgccgtgggaccacgatgaggattcccacgccctcttctcccccaaacccgtctcttccagctccggctctgacgacaaatccgaaccgaaccaacatgtatccgcctcctccacggcgatggaggagcggaaacggcgccgcatgatatcgaaccgggaatcggcccgcaggtccaggatgcggaaacagagacacctggagaaccttcggaaccagttgaacaagtgcagggtcgaaaaccgggaactgagtaaccggttgcagttcgtcctgcaccacttgaaccgcctccgaaccgaaaacgaatggttacactccgagcgaaccttgctccgccaaaaagtcgccaacttaacacaaattttgattttccaacaattccaaactttctcccctgcatggacatgcaccaacaacaacacctcgctcatgacaattaatcaagttaattaaaccctatatatatatatagagagagagatttataataaggtcttggtaaaaaattccaagtggtctaagatgtcctatatgtaattattgttaaaagttagataaagtcttaaagagatggtaaagggtgggatttttgggaaaaatattaggcaaggttttggaaaatattagttcatctttttcaaaaccaaaaggattattgtatattgccgattataatatatctgtgtaaggtattagttgggaaaatttttatttcattaaaaccaaaccatnggggtttttntntntnaccgaatataatnttttgttttaaaaaatacttttctttttttgtttccnaaaaaaaaaaaaaaaaaantcg

SEQ ID NO: 27032 - DNA, 678 bp, Glycine max
  Clone ID: TF_GmC535_3
tacggctgcgagaagacgacagaaggggaagcggatggagtcgaaccgcgagtccgcacggcgatcgcggatgaagaagcagaagctgctcgaagacctatccgacgtagcgagtcgccttcaaggcgagaacgtgcgcttagcgcagagcataaaggcgaaggaggaagcgtacgttgagatcgaagccgcgaacgacatcctcagagcacagaccatggaactcgccgaccggttaaggtttctgaactccattctcgagatcgccgatgaggtcggcggcggtggtgaatccttcgagattccgcagattccagaccctctcttcatgccctggcagatcccccaccctatgatggcgtcacctgacatgctcctccatggaaatcaaggcctgtttgcttgatagtacttcaattaggctaggtttattgttgatgttccctagtgttttggtgaataaagaaagggaatggtgttagatgtttatgagttatatcgtgtgttggtgtgctgttttttttttttaagatctgtgtttatgttttgtgtgtgcactatcgtcgttatatagttgaattgaatgtatctgctttgtcgtagtgactggcattgtgtatcgatataaaattatgtttctgtttaaaattacaaattggagtaagccgaattcagaat

SEQ ID NO: 27033 - DNA, 881 bp, Glycine max
  Clone ID: TF_GmC2191_3
ggctcgagcggcaaataaaccagagggcagagagaatcgtaccaaaggagccacgagtggttcctctgagccgggtgatgaggatgatgaagcaggggcttgtgaacagagcacaaatccagctgatatgaagcgccttagaaggaaggtttctaatcgcgactctgctagaaggtcaagaagaagaaagcaagcgcaattgtctgagcttgagttgcaggttgaaaaactcaaagtggaaaatgcaaccctatacaagcagttcacggatgctagtcaacattttcgtgaggctgatacgaataatcgagtgctaaaatcagatgtagaagctttgagagccaaggtgaagttagcggaggatatggtcactaggagctcttttactacgttaaactatcagcttcttcagacacaacaacatcaaatgagcacacccccgcaactgaacacgactaatcttcgccgcatggcgcatgtttcgccaaccatcaccgtccatggtaatgatgcctcatacaatggtgtaacagttggtgaacagaattcatcagcacttggaaacttggatatgactttcaacaacatcaacaatggagtcatgaacaatgctatgagttgtgggactatttggccacttgattagactctagctatgttatttgtcttgtctaatttgattagtagcctatgttaatgtcaagctgtgttatttgtcttcgcttgattcctctttaatgatgcctctgtttaaaatggtgtcttctttcgttgtatctagttttgtataaaaggacatgattgctttatccatttcccggaaggtaattgtaaaaagccccaaataaaaacttgccggatatatcatctaatagacagac

SEQ ID NO: 27034 - DNA, 1444 bp, Glycine max
  Clone ID: TF_GmC1471_2
ctctccctctttcctatcacactttctagatagctagcctgtaagatatatatatagatatttcatatatatcctatggtccgtgagtgcccttgttctgtaccaaccctttcttccacatgttgagtttcagcatcgtcctctcttgagtccccatatcaaatacccaccgaattcaaccccccatataacaaatctcctcccatcccatttttcagcaccaaagtttgaaacttttctcaattgggttgaggagagtttgactcaaatttttatttttctaacgaagcagtagctattagaagtgcaaaaattaaatgtccaacatcttcttgttgatgtttgagattcatgtatccgattctcagtgaaatcttcttttccgggtgtatgatcaattccactgttaggcgcaggacccatttagttcaatccttctcagttgctttcctctattggttgtactacgtttcatgatttctaaaccttccttagtctaataatcatctactactagttattattatcatcatcatatataataaaatctatctgcaatattatttttctgagtttgtgtctagttagtgtctgggtcctggtcctgccaattgtgtcaattaattgtattgaatcataaaagatggcttcctcaagtggaacatcttcagggtcatctctgcttcagaactctggttctgaggaggatttgcaggcggtgatggatcagagaaagaggaagagaatgatatcaaaccgcgaatctgcacggcgatctcgcatgaggaagcagaagcacttggacgatcttgtttcccaagtggctcagctcagaaaagagaaccaacaaatactcacaagcgtcaacatcaccacgcaacagtacctgagcgttgaggctgagaactcggtgcttagggctcaggtgggtgagcttagtcacaggttagagtctctgaatgagatcgttgacgtgttgaatgccaccactgtggcgggttttggagcagcagcaacatcgagcaccttcgttgagccaattaataataatagcttcttcaacccgttgaatatggggtatctgaaccaccctattatggcttctgcggatatattgcagtattgagatccatggtctctgagtctgagatttgatgaggatttcttcttcttcttctaggtttgagtctgttgagaaattgtaatcactaccatatggtgataaggaataataataatgaatgtgtatcgtaaaacggatgggattgttgggtgctggttctgtaaatgtggcatgggccattactgtaatttgtcaccctcctttcctatattattataataataatattgacctacttctctgtcttgatattctttttattttttgtttttttatgaataaatattaatttttattagaaagattatttgaagagatttt

SEQ ID NO: 27035 - DNA, 751 bp, Glycine max
  Clone ID: TF_GmC1471_4
cggctcgagcggctcgagcggctcgagttctaatagctactgcttcgttagaagtgcaaaaattaaatgtccaacatcttcttgttgatgtttgagattcatgtatccgattctcagtgaaatcttcttttccgggtgtatgatcaattccactgttaggcgcaggacccatttagttcaatccttctcagttgctttcctctattggttgtactacgtttcatgatttctaaaccttccttagtctaataatcatctactactagctattattattattattattattatcatcatcatcatatataataaaatctatctgcaatattatttttctgagtttgtgtctagttagtgtctgggtcctggtcctgccaattgtgtcaattaattgtattgaatcataaaagatggcttcctcaagtggaacatcttcagggtcatctctgcttcagaactctggttctgaggaggatttgcaggcggtgatggatcagagaaagaggaagagaatgatatcaaaccgcgaatctgcacggcgatctcgcatgaggaagcagaagcacttggacgatcttgtttcccaagtggctcagctcagaaaagagaaccaacaaatactcacaagcgtcaacatcaccacgcaacagtacctgagcgttgaggctgagaactcggtgcttagggctcaggtgggtgagcttagtcacaggttagagtctctgaatgaaatcgttgacgtgttgaatgc

SEQ ID NO: 27036 - DNA, 2109 bp, Glycine max
  Clone ID: TF_GmC609_2
ttggacttccacctcaccgttttcagccactttctttgcgccatggaaacaggtaatctgccagtttttccatatttgaagtaaggatattcatcttatgaccaagagtgtcaatctttcggattaagagttattgctttagttttatctagagtaaaggaccagctagtgagatgctatagatccttaattcaaatctcatcaaacctcactgcatggaaacagtacgttgtctggcatgtgtacttgttcaaggtgacatatgacctaaacaattattagaacttaatctgatcacaaggcagtttttttgagctgatctggatgggaaccggtgaagaaagcacagctaaagttcctaaaccatcttctacttcttcaattcagataccactggcaccttcatatcctgattggtcaagctcgatgcaggcttactatgctcctggagccactccacctgcattttttgcctcaaatattgcttctccaactccccattcttatatgtggggaagccagcaccctctaattccaccatatagtactcctgttccatatccagctatatatcctcctgggaatgtctatgctcatcctagcatggcaatgaccctgagcaccacacagaatggtacagagtttgtaggaaagggttctgatgaaaaagatcgggtttctgccaaaagttcaaaggctgtgtctgcaaacaatggttccaaagctggagacaatggaaaggcaagctcaggtcccagaaatgatggcacctcacaaagtgctgaaagtggttcagagggatcttcggatgctagtgatgagaatactgaccaacaggaatcagctacaaacaagaaagggagttttgaccaaatgcttgttgatggagccaatgcacggaagaattctgtgagcaccattcctcattcttcagtacctggaaatcccgctgtctcaatgtctccaactagtcttaatattggaatggacttgtgggacgcatctcctgctggtgccgaagctgcaaaaatgagacataatcagtcttctgcctcagaagctgttactcctccaaccataatgggacgtgaagtcccgcttggtgaacaatggatacaagacgatcgtgaactaaagaaacagaaaaggaaacagtctaatagggagtctgctaggaggtcaaggctacgcaagcaggctgagtgtgaagagttacaaaagagggtggagtctctgagaagtgagaatcgaactctcagagaagagcttcagagagtatctgaagaatgcaagaaacttacatctgaaaatgattccatcaaggttatacagtaaataaccttggcctacattatttatcgagacttcatgcaattcagtgataataaagattgtatcgaagagactgttccagtcacaatgtaactccagaagtaggtcttggaccaaggattgtgtgttgtgccttcttcagatatgacggtgcatatttctccaattcggggtttggtcaaaatcttgaaaaaatcgtaatcatgaatcatcccatgatcgtaagttgaggatagtgcttgccattgggtcgagcttctggaagggcattggcttggcatattcagaagccagatagtgttcaaagaaatcccatatttttagtatttacttgtgccgatgaatagatgattttatgctaattgggcacttctgttcggtgttcagtagtttcactttctcaacttctgctgatgtttacatgccgctttaatttccgagcaccttgtaagaggtaaccatggaaccatgtgtttgttctaccaatttatatttgagctttaaacaccaacacatttcagttcctcagtgtagtgtttgatggtaacggcaaaatttgatagattcttaattaagacgaatctgcagctggaattttcttatcaatggcccggccttcttaattgagaataggatataatgtttttttttttctttgtcatactaatttatatcattaaccctcaattgtaattgcccttgtgattttacatgtcatttgtttgtaatattaaccagtaccgtagaatagaaaatgtaggctacttgagcactttt

SEQ ID NO: 27037 - DNA, 602 bp, Glycine max
  Clone ID: TF_GmC6779_2
cccacgcgtccgtgaaatctgggggctggcaggattcttttgaagatgaaccatctcaaaatggcagtttggcatatactgctcaaaatgggggactaaatacacctcatacagtagtcaatcaaactatgtctatcatacctatctctgcaggtggtcccacgcgtccgtacggctgcgagaagacgacagaagggataggaatggattattggggtacaccagcttcatccaacattcctgcacttggcagaaaggttccatctactgcagttgctggagggatggttaccgttggatctcgggatagtgctcagtcacaactttggctacaggatgaaagagagcctaaaaggcaaaggcggaagcagtctaacagggaatctgctcgtaggtccaggttgcgaaagcaggctgagtgtgatgagttagctcagcgtgctgaggctttgaatgaagaaaatgcttctctccggtctgaagtaaatcgaatcaggagtgattatgagcagctagtctccgagaattcacctctcaaggagagactgggggaactacctgcgaatgatgatcatcacaggtcttgcaggaatgatcagcat

SEQ ID NO: 27038 - DNA, 1694 bp, Glycine max
  Clone ID: TF_GmC1711_1
aaagagacatgttggaaattttactgtattagactcataatataatacaaataatttatacttgtatttccacttgttcttcagcaaactcacaaccacaacccaaccaacccacctgaactactgaacaacaacctcttcttcttctctctctctctttagcataatcattcatcaccacacaagagaaaaaagaaaaagaacaaagaacaaataaacctttttttttttataaaaaaagaaagaaaaggaaataaagttttttgttttttcgatgaaccagaagttcatcggaaagccgccggcgacggtggacctggatcggatgccggagcgtgggtcccaccaccggcgttcccactccgacacctccttccgcttcgccgcgaacttcgacgaccttctcctcttcgacccctccgacttcgacatctccggcctcccgtcgccgctccctctgccatctccggtctccgccggcttggttccgatgtccgtcgactccgacgagtccggcaaacagccgaggccggccggggcgtccgccggcgggcacctgcggagtctgtcggtggattctgacttcttcgacgggctcgggttcggcggcgacgagagaggcgccgggaaaggaggcggcggcgagcggagggtggggcaccaccggcacagcaactcgatggacgggtcgtcgacgacgtcgtttgaggcggactcggcgatgataatggacggtgtgaagaaagctatggctcctgataaacttgctgaacttgctcttatggatcccaagagagctaagaggattcttgctaacaggcaatctgctgcaagatccaaggagaggaagattcgttacacaagtgagttggagaggaaggtgcagactcttcagactgaagcaactaacctttctgcacagcttaccatgcttcagagagacactacagatttgactacagagaataaggagctcaaactgcgtttagaggctttggagcaggaagcacagcttagagaagatctcaatgaggcattgaaggaagaactgcagcgccttagggcacaaagtactcgtttgggtgctattggtggtaacccttcttttggtgggatattcaaccagttggcttcccaattagccatgcaacagttgtctaattctgcaccccatcagcagacacaacaccagccacaggttggcatgcctcctcctccctctggacagaaccaccctaacttcatggacttcaatcagcagaagtaactcataatagcagtagcagtaaatgattgattacatgaatgtataactggtgagacttgtgaagggtatattgtgcagttcagtgtctttagtcctgtgttgtttatcttcagctctaggatgtgtactttacgcagttctaggttagaagcgcagcctctgaaatgttgtgttatagctcttgggtgaatgaagttaacataaatatgtagaaagacttgttgataatactatagatggtgaatgaagtttattaattagcttctggaattaaaaagggtgaatgagggtaacataaaggtgtagaaagactagttaataatagtatagatggtgaatgaagtttattaactagcttctggacttaaatagcatgctatatatgttaaaagttaaagcagaaagcatcttctcggtatgccttgct

SEQ ID NO: 27039 - DNA, 2623 bp, Glycine max
  unsure (1)..(2623): unsure at all n locations
  Clone ID: TF_GmC726_1
ccgcgcgtccgggtgccccacaaccaaatcatcgtcttcatcgctctccgacacttgaacctctcatgttgttcctctagaaacctcttccgctccaccgtggaattttcctgcttctgtagcacaaaaccacacacacacacaaactctgctttaatattattcacgcctgtcctttgtcgtggtgctggttacaagatagggtttgcactttttaatcagaaactagccatgaccaggtacagaaaactactgtgttagttaaaaaacattcatcgattattagcaactttttcagtagtagtgtagccttgtaggtgaactgtgtgttaggattttgaagtttgattaatagccgtgtgtagaaactagaaaggttagtgattgttgtagaatcaatggtaggtgttgatcagagtaatatgaatatgaatcgaaatagtggtgtatttggttcatcatctgggggtgctcttagacccccaaatcgattgaataatcaaatgggtgttgctgagaaccagaaccagaaaccctatggtatgccaccctcacaccctaataccaatattctgaattcatccgtttaagatgcacggtcggagaacctggtggagagtctctccgctcaagagcgtttgggttctcccaatttgagtcctgcgtcgtcccattccaggtctttgtctcagccctcttttttctctctggattccttgcccccattgagtccttccccttacaaagaaccttccttttctgactcaatttcgaccgacgtgtctgctgaggaaagcttgcctacctctcatgcccctttgcctaatcgtggacacgcgcttcagcttggccattctcttcctcctcgtaaaggacataggcgctctaacagtgattcccctttaggaatcgctgattttattcagtctgcccctcaatatgatacctgtgggacttggagctattgtgaaaataatgcttataggggagggaactctggttttgagaagccgattcagttagtgttaaaggaaccaattaaggatatggaccgtgttgatggttttggtggagaacctatggttgggaggaaagaggatgatgcactggatgatttgtttagtgcatatatgaatttggacaatattgatggtctcaatttttctggtatggaagataaggatttggatagcagaactagtggttccaagacagttgagagcagtgataacgaagttgagagtcatgcaaatggcaaagtgactggttctcaaggggctagttcccgctgttctgaagagaggagggaaggagtgaagaggagttctaatggagacgttgcacctggttcccgacaccggagaagtttctcattggacagctccataggaaatttccatattggagatgaatcgcctaagcttcctccttcacaaaaccgatttggtcaacactctcctagcagttcaatagatggtaagacatctgaaacaagcatggagtttggaaatggtgaattcagctcagaggagctaaagaaaataaaggagaacgataaacttgctgaaattgccatggccgatcctaagcgtgctaaaaggattttggctaatcgtctatcagctgctcgctcaaaagagaggaagatgcggtacatttctgaattagagctcaaagtacaaacacttcagacagagacaaccacattgtctactcagtttaccaaattacagatggataattcagagctgaaaagtgagaataatgagtacaaattgaggattcaagccttggaacagcagtcccaactaaaagatgctctgaatgagaccttggatgctgaagtgcggcgtttaagacgcacagttgcagaacttggtggagagtctcttctctcaagtcgcatggctcaacagcttgctattagccaacaagtgttccagttacagcaccagcagcaccctaaccagcttagacatgttcaactggacaatagccattcccaggagcagacacagactcagtcacagtgccacaatggcaaagctactgcctactgattagcactctgataccatgtatgctcaatgtttgtgatatgaatctgaataggatattgcatgaccaaacaagctcaagtaaaaaaaaaaaagactcgattctaagagaggacccgttaacaaaaagaaaagttcaaaagatacaagaggcaaaaggagtctgtgaatgcaattcctatctaataaggttgtagttcgacttgtgcaagcccaaggatatgattatatgaagactcaaaatagtgtataattgttaactttattgcctaagatttgtagttattatttgtaaatctaatgatgatttgagatagatttcattagaatttatgattgattttattaagatttgttttaattgattttttaaaatttgtttcgtctattaaaaagaagattctatcatttgtttggaaatgtttcttattattatgatttgttttctattttaaatcttctatcatttaaactcacaattggttaaatgaattaagagctttcatctggctcatgtaatttaagttagattntgaatgaaatatcaaatatgagtttctccaaaa

SEQ ID NO: 27040 - DNA, 1342 bp, Glycine max
  Clone ID: TF_GmC463_1
atacccacgcgtccgtacggctgcgagaagacgacagaagggggccaacctttttttttattattttttttctataaaacctaacctcagcctcaattatcacgttcttcttctttaccatagagccctttcttctcttcccccattttttcctctttcttcctcgcctagctagctccagaaaattaggatctgcttcagatctagtgtttccctgtcccaaatcacgagtccattgagtttgattttgtggatgaaaagcatagatagggcttttgcaaaactctccaatgtttcttgaaattatatgaccatgcgtcgaattcgtatgctgcactccttctccgtcgtgttcctctactggttctacgttttctcatgaactccctcttaaatccgtgattaattagatctatctccttagttaatccttgtcttttccaataattaattagatctgcgtctcctttttggattagtttcttttttggttctgttatcaaatcaaataaaaaatctccttctcggaaatggcatcaccgatccaacaacaacaacgctcgactactacaagttctggatctgaaggaggagatccgcatatcatcgatgagaggaagcggaagaggatgctgtcgaaccgcgagtcggcgcggcgatcgcggatgaggaagcagaaacagctggaggatctgaccgatgaagttagcagattgcaaagcgcgaacaagaagcttgcggagaacatagaggccaaggaagaagcgtgcgtcgagaccgaagcggcgaacagcattctgagagcacagacaatggaactggccgatcgattgcgcttcttgaactccatccttgagatcgctgaagaggtcgaagggttatccgttgagattcccgagattccagatcctctcctcaagccctggcagattcctcatccgatacaaccgattatggccaccgcaaacatgtttctgcgttgatcattcctgaggattttactttaattagggttattcagtgcggtagtaactttctctgttatgtgtattatattactattagtgttatctgtctgcatcaaaagtatcgtgtggtcatcaatgcattgggttcctgagagagatgaatgtgaggtacagggtgttgatggctggtagtggcagtgtgtgtccctttgcgcgacttgtaatcattttttatggtggctgttttattttaattaaaagtaatctcatcttctatgtttgttgttttatttttataattaaatctaatcatcgttatcctaaagcaatcatcttcattggtggtgttctaatacaagcggcggaccttctat

SEQ ID NO: 27041 - DNA, 1372 bp, Glycine max
  Clone ID: TF_1905784
cctcttccgaatgggctttccagcgcttcctccaagaagccaccgccgccggtacctccacttcatctccccctcagccacctacaatgacggcgtcttcctcgtcatcttcgcaccaaaacgacgtcgtggagatcaaggatgagaatctttctattcctaatttaaatcccagtacggcgttgaattcgaagccggcgtcgtcgtttggcctcgcacctccgccgaatattgccgttgattccgaagagtatcaagcattcctcaaaagccaactccatttggcttgcgccgccgttgctttgactcgcggcaagagtttaaaccctcaggattcaggctctacagctcacgacaaaggatcagagactgctagtgcagctcaatcaggatctcacgtctccactttaggatctggtcaggaagtggcaaaaattcaagataaggatgctggtggaccagttggaattccctccttgcccccggtgcaaaagaaacctgtggtgcaggtgaggtcaacaaccagtggttcatctagagagcaatctgatgatgatgaagctgaaggagaagcagaaacaactcaaggcatggatccagctgatgcaaaacgtgtaaggagaatgctttcaaatagagaatcagccagacgttcaaggagaagaaagcaggcccatctgacagaactcgagacacaggtttctcaactcagagtagaaaactcctctctactgaaacgtctgactgacataagccagaaatacaatgaagcagcggttgataatcgagtcttgaaagcagatgttgagacattaagaaccaaggtaaagatggctgaagaaactgttaaaagagttactgggttaaatccgttattccaagctatgtcagagatttcctcaatggtaatgccatcctactctggtagtccttcagacacatcggcagacgctgctgtacctgtgcaagatgatccaaaacatcactactaccaacagccgccaaataatcttatgccaacccatgatcctagaatccaaaatggtatggtagatgttcctccaatagaaaatgtagagcagaatcctgcaacggcagcagttggggggaacaagatgggtagaacaacttcaatgcagcgggttgctagcttggagcatctgcagaagcgcatccgtggtgaagtgagttcctgtggaactcaaggcaggggagagcaataaacacggttaaagccaccagctgcaccgaagattttgcacagcatgttgataaaatcatactgttccaattccaaccgtggcaggaattgcccattctttgtatgacaatgccttcttggatgagactaatgcattgacatctcttttct

SEQ ID NO: 27042 - DNA, 528 bp, Glycine max
  unsure (1)..(528): unsure at all n locations
  Clone ID: TF_6913416
gcaccaggatgcattgtcgaatgattcaaatagctccactaattactctagcaaatattcacctgactacacggataatattgataatcaaagtggaatagacagaagatctgaagatgatgttgccagacacacagcaataacaccaatcttaaaaaagaatataacaaagttttacgagcctcttgttgacaataataccgtatataattatgaggatgatcctgttgaatacaaaaaagctagaaagcgtattcaaaacagggaaagtgcttctagagtcagaagtaaaaagaggaactatgttggagatctcgaagttgaaatgaatatgattaagaaagaaaatgctgatcttaaagtgaagaatgcagctttaaaagctgaaaataacttgttgaaacaacaaacttgcttcttagaaaaaatgattatgaagaccggcccacaatctataacaaatacaccagctaataatgtggaacaaaactntcaagagtgcctattacctcttgttaacaaagctga

SEQ ID NO: 27043 - DNA, 2782 bp, Glycine max
  Clone ID: TF_GmC470_1
ccacgcgtccgctcctccatttctcagaaaccctctcgaatgactgagtcaatgcccgccgtggaaccgtcgccggagcctccggcgtccgatatcgtgttcgatgacttctccaccgacttcagcgccttccccatcccctccatggactcgctcttcaacactactgatgggctccccttcccctccgatctcgaattcggcatggatttcaacaacaacaacggagaattcgaaatcaccttcgacgacctcgatgacatctacatcccctccgacgccgaggatttcctcctccccgacgcctgtaaccctaattacgcctccgtttcgccgcccatcgacgattcctccgcgaagaattccgattccgacgcatccgcggtttccggcgacggcgtttccaggtttttcaattcgcaagtgtcggaatctgattccgccgataatgttagggttccgagcgttccttcgccggaggctgaattctgcgaacgggaggagtcttccaacggaccggtttcgtcgcagggttccggcaacggcggatcgggtgtatacgaggccatgcactcgccctcacctgattctggcccttacgagagagacataacatcgtttcatgcacatgcagctacaaacaatggtgtgaaaatggaggaagttccagcttttgatctgaagaggaagaaagggagttgcgagggaagtgctaccaagcacagaaggttctcttcctcggtggagaataataataataacaccgagaaacagtctcagtctggtttgaatggaattgacgatgaggatgagaaaaggaaggcgaggttgatgaggaacagggaaagtgcacagctttctaggcagaggaagaagcattacgtggaggagcttgaggagaaagtgagatcattgaattccatcattgctgatatgagtagtaagatgtcgtatgtggtggctgagaatgctactcttagacagcaagtgggtgctgctgctggtgtcatgtgtcctcctcctccagcacctgctcctgggatgtaccctcatcatcctccaatggcacccatgccttatccgtggatgccatgtgctccttatgttgttaagcctcaagggtctcaggttcctttggttcccattcctaggttgaagcctcagcaacctgcttcagcccccaagagtaaaaagagtgagagtaagaagagtgaggggaaaactaagaaggttgctagtattagtttgttgggtttgtttttctttatcatgctttttggtgggcttgttcctgttgttgattttaggtttgggggtttagtggacaatgttcccggtactggtagttctaattatgttagtgatagggtgtatggtcatggtggagggaaggtttggtctttgaatggtcctaggaatgggtctggaagagatggggatgtaggattttctaatgggaggtttagtgtttctgacagagtgaagaattatgagaagagaggccggaatttaagagaagaaaggcatgatcggaaaggcccagatgattccagtcgtcagggcaatgctagtgagccccttgttgcttctctgtatgttcctaggaatgataagatggtgaagattgatgggaacttgattatccattccattatggccagtgagaaagccatggcatctcaaactgctgaggcaaagaaggacaagagggaaactgggttggccattcctaaggatttggattctgcattggctattcctggagttggaagaagcagagatcaacatccacatgtgtatagggtttctcctgaacagaggaaggctcttggctctggttcaaccaaagctttgaaggaccatatgaagtcctctgcaactgatggtaaaatgcaacagtggttccgtgaaggtcttgcagggccaatgttaagttctggcatgtgcactgaagttttccagtttgatgcttctccaagtcctggagcaatagttcctgcaacatcagtagccaatgtttccaccgaaaaccatcagaatgctaccagtgttaagaagaccaggaatagaagaacccttcatgagctcccagagccgcttaatgggtctagtctgaacataactgaagaacaagtgaaaaatttgcagaaagaccacttccatggtaacaagtcttctatggtggtttcagtccttgttgatcccagagaggctggtgatggtgatgttgatgttgatggcatgatgaggccaaagtcactctctcggatttttgtggttgtgctaattgatagtgtcaagtatgtcacttactcgtgtggtctgcctcgtgcttctcctcatttagtgactggttatgtatgacaatccatccttcggtaaaaagttttgatgcagccgaagcatctaacctgagttgttctagtttctgtaacaaaggatgtgggggactgggaaggaaagaaactcatctccagttttgtacatattaacatatttaaagtagcagtcttaaaaatgtacctgagagaatttagaagctgggcttgaccaactgcgtgtactgagttgagacctttcttagaaacttaataatatatgccccccttaagttttaaagtggatcccttgtcatgcgttgttgaatttatagttgaaatgtgtttggcttgattttggataattatgattttacacagttgatttttttttatcaaagcacgagcttgattttatgatggttatttttctgtaaaattgatttagattaaaaaaaaaaaaa

SEQ ID NO: 27044 - DNA, 1201 bp, Glycine max
  Clone ID: TF_GmC9561_1
ggttctccagctagagcaagagcaaaaaagataaagaaaaagaaaaaaagacggctagaaacgcggcatggcggcgtacgcaggttggctcgacgaatccggcatcggcctcgaacctaatcctcgtcgtcgccttgtccgccatcttcgcctatatctcccctgtctcctcttctctccgatctgcacccaatggacgacattctcaagtccttcagccccaagtcggtcgacgacgtctggaatgacatcgttaccggcgccaccgtccacgacgccgtctccgccaccgctaccgactatgccgacgccgccatgaccctcgaggatttcctcaccaaggccgtaactgaggaagacgtcagaggggctcctcctcctcctcctcctcctcctccttcttcctttctccccttccctgccgatggctcttcctcctccgttgagcctttcgccaatggcgttagtgccgcgccgtcgaattcggttcagaaagggaagagaagagccgtggaggaaccggttgacaaggcaacgcttcagaagcagaggaggatgatcaagaatagagagtctgctgctaggtccagggaacgcaagcaggcttacacatctgagcttgagtatctggttcaccagctagagcaagagaatgtgcagttattaaatgaagaggctgagatgagaaggcagaggaaaaagcagcttttcgagtgcatcattccaattgaggtgatgcctaaaccgaagaaaaaacttcgaagagtaaattcagcacaatcattgtgatctgtttgtcatcactaatggacagactaggctttgtggcctggtgtagatataaggagggaaaggtttgagagattgcatgccattgcaggttctcggagttacattgttgtatagagaaaataggtgcagccaaataattccaagtaatttgattcagcctgaaagtattctattgatccactgcttgtggaagatccataagaagatccatggttctgggtgtgttttgcccggatttggccttgtaggaaaagttgaaataataatttgtgttaacttgtgcaatttgaatgccatgcttgatttggtagggggtgaggtacaggtgagaggaatggatgaaaaatgatcgctagattcgacataatctgtttttagattaaaagatcacctatatgtcacatgattc

SEQ ID NO: 27045 - DNA, 1851 bp, Glycine max
  Clone ID: TF_GmC299_4
ccacgcgtccggggtgttctcagtggacgatatctccgatcacttctggcagccgcctatccctgtctccgccgcccaaacttcctcccagatgagccgcagcgcctccgagtgggccttccaacgcttcctccaggaagcttccgcctccgcaccctctcctccgtcttcttcctccgccgccgacgtcgtattcgtcgagatcgaagatcaacctaaacccgcccctccccctccgacaaacggcgccgttctccccaatgcccctggtcccgtcccccttgactccgacgaataccaggccttcctcaagagcaagctcaacctcgcatgcgccgccgtcgccatgactaggggatctttggctaaatctcaagacccgtcccctttttctgaaggtggatcacagccgactaatccttctctagttgaatctcagactacttctaaaggatctattccttctgaaaatgatccatctaagttacaagataaagataccaatgtaccagttgggattccttccatacctgccatgcaaaagaaacctgctgttgcaattaggccatctacaagtggatcatcaagagaacagctgtatttctgactaacatcagtaaggcgctttaaaggtagaattttcacctcttaattgagaaacctgtgtttctaggtcagttaaatgagcctgctttcttcttctagagcgacgggctgactccctattggatagcatcctccttactcgttttacatcagcagggtctgtgttgtcattgagggagagacatctatgtcctcatcatctgactgttctcttgatgatccacttgtagatggcctaattgcaacagcaggtttcttttgtatggcaggtatggaaggaatcccaactggtgcattgatatctttatcttgtaacttagattgatcatttccagaaggaatagatcctttagaagtagtctgagatccaactagagaaggattagtcggctgtgatccaccatcagaaaaaggggacattgagggagagacatctatgaatgacaacacagaccctgctgatgtaaaacgagtaaggaggatgctatccaatagggagtcagcccgtcgctctagaagaagaaagcaggctcatttaactgacctagaaacacaggtttctcaattaagaggtgaaaattctaccttgttaaagcgccttactgatgttagtcagaaatacagcgactctgctgttgacaacagagttttaaaagctgatgttgaaacattaagagcaaaggtgaagatggctgaagagaccgtcaaaagaattactgggttgaacccaatgcctcatgccatgtctgatatatcatcattgggcctgccatcatttgatggaagaagcccttcagacacttcagctgatgcatctgttcctgtgcaagatgatccacatcatcacttctatcaacccacattgaataatcctattcccagtcatgatccgatagtcaacaatggtttggggggcatttcttcaattgaaaatgtgcagcagcagaacgctgcagcagtggtaggtgggaacaagataggtcaaacagcatccctgcagcgggtggctagcttggaacatcttcagaagcggattcgtggtggacctccatctgagcagtaactaagtagccagatcttaaggttgctttgccaaaaaattattctaaaacagttatttctgttgcctattcttctggaatacattgtaaatcatttgatggagcacatgatgctggattcaattagtgcaccccgtttttttttttttttttataaaaataatataaaatgaactttaccttc

SEQ ID NO: 27046 - DNA, 1092 bp, Glycine max
  Clone ID: TF_GmC311753_1
attaccatgggctaaaagctagcaagtagaaaccatcatgtttctggtgccaccaagggccagatacacttttttttctgttgagagattgcagctgaatttcattggggggtgcagaaagaaaacatggatgatggaaatgctgagctttctgataagctttcagataataatgttctatttttgaatccagagtcatgtagcagttttcaggcttcaagtagcagcagaacatgcacacacactcacacttgcaatccacctggccctgatgctgctcatacacacacatgctatcacacacacacccaagtttttgcaccagaagatgatggcaggaagcactcaaactccaagcaaaaaaggccttctggaaaccgagaagcggttaggaagtatagggagaagaagaaggcacacacagcatacttggaggaggaagttaagaaattgcatatggtgaatcaacaactagtgaggaagctacaagggcaggcacttcttgaagcagaattagcaaggttgaggagcattttggcacgacttagggggaaaatagacagtgaattgggtgcttggccctttcaaaaacaatattgtaacacttcttacattttcaaagaaggggatgctggtcttgagtgtcagaagaacaatttgccatgcttccatccacatgtaggatcatcatcccaggtcaacatttgtgcatgtggaaaatccatgattccattggatggaaactgccaacctgaaatggtagattgccaagtagatgcaaataacatgaccagtactgaaggacaaactgtggataacatcatgtcatctgcatctcaagacggatagtttagccagacaaaaatgtctttcttgtgagtttctatccaattgctatcacagatgatttgtttgtttagcatttgtagttgataggtaagatgaggtacataaaaatataatcactgttaccctaaaaggtatgtatgtaaggaccagcccaatagaaagtgagacctaaagcaaaaaaaaattgagagagactttatctatgttaaagaaaagagtgatatgtgtgaccttttattcagc

SEQ ID NO: 27047 - DNA, 796 bp, Glycine max
  unsure (1)..(796): unsure at all n locations
  Clone ID: TF_GmC128657_2
ctccttctcaaaccaattgaactctctccatcactcattactactactcttcctccaaacaattaaggcctcaataatcttcttccttccaaaaaaaaaactatgcaaaccaaggaagtagtctcaagcctcagttacttactcccttcaaacccttgttcctaccctcctagcaacaactacacctccatgatccaaaacagcattcccacatttcagttccaaagattctctaaccaaatatatggctgcaacaacagccacaacactacctatcaagttcctgacttcagtcctcaatcctcatgcatcagcagcaactccacttctgatgaggctgatgaccaaaacctaagcctcatcaacgagaggaagcacaggagaatgttatcgaaccgcgaatcggcgcgtaggtcacgcatgaggaagcagaagcaccttgatgagctctggtcacaagtggtgtggctcaggaatgagaaccaccagctcatagacaagctgaaccatgtctcagagacccatgaccaagtgctccaagagaattctcagctcaaagaagaagcctcggaacttcgccaaatgattagggacatgcagatacacagtccttgcggtggcccaaactccttcataacccctttggaagatcatgatgttgatcatgtgccttcagcatatctcagatctgatgattcttcaaaccaattcaattcgtgtaacaacaacatggacctccttggctgaatttgatcaagcaaggngaagccaaatttttaattatcatcatcttcat

SEQ ID NO: 27048 - DNA, 1082 bp, Glycine max
  Clone ID: TF_GmC299_2
caagcttaatctcgcatgcgctgctgttgctatgactcggggatctttggtcaaatctcaaaaccctgacagtggaccacaggcatctaatttttctgaagttggatcgcatgctaccttaaaaggatctggcccttttggaaatgatgatccctctaaattacaaaataaagatatcaaagcacaaattgggattccttcctcaccttccatgcaaaacaaatccgctgtcgtcgcaatgaggccaacaataagtggatcatcaggagaacaatcagatgatgaggaagcggaaggagagattaatatgactggaaacatgactcctgttgatgcaaaacgagtaaggaggatgctttctaatagggagtcagccagacgctcaagaagaagaaagcaggctcatttaactgagctggagacacaggtctcccaattaagaagcgaaaattcttctttgttaaagcgcttcacggatgtgagccagaaatacagtaatgctgcagttgacaacagagtactgaaagctgatgttgaaacattaagagcaaaggtgaagatggctgaagagacagtgaaaagaattactgggttgagcccaatgctccatgccatgactgagatgtcatcactgggaatgccattgtttgatgaaagtccttctgagacatcagctgatgctgctgttccagtgcaagaagacccaaatcatcacctttgtcaacccacttctaataatgggttgggaggcatttcttcaattgaaactgtgcagcagaatgttgcagcagtggtaggtggcaacaaaatggggagaacaacttccctgcatagagtggctagcctggaacatcttcagaagcggattcgtggtggtgcagattcacgtggaactccttctaattgagaacaataacataatagctaaatttacattatgctttccatgagggaattattccaaaactcttgtttctgctagttgtaagtaagagcaaattcttgttgacttgttgtaaatcaatttgatgtatgtgaatcttattgagcatattctgctggataatcctatttttcaattt

SEQ ID NO: 27049 - DNA, 1100 bp, Glycine max
  Clone ID: TF_GmC6779_1
tttttcacaggactctcaattaaaatcagggggccggcaggattcttttgaagatgaaccctctcaaaatggcagttcagcatatactcctcaaaatgggggactaaatatacctcatacagtggtcaatcaaaccatgtctatcatacctatctctgcaggtggtgctcctggagctgttcctggtcccacgacaaacttaaatataggaatggattattggggtacaccaggttcatccaacattcctggacttggcagaaaggttccatctactgcagttgctggagggatggttactgttggatcacgggatagtgctcagtcacaactctggctacaggatgaaagagagcttaaaaggcaaaggcggaagcagtctaacagggaatctgctcgcaggtccaggttgcgcaagcaggccgagtgtgatgagttagctcagcgtgctgaggctttgaaggaagaaaatgcttctctccgttcagaagtaaatcgaatcaggagtgattatgagcagctactctccgagaatgcagctctcaaggagagacttggggaactacctccgaatgatgatcatcatcataggtctggcaggaatgatcagcatgtgggtaatgacactcaacagagtgggcagacagaggccgtgcagggtggtcattagcaccaaccaaccacttcatgctgcctttcagggagataatctaacttaaatagcaagagcaagatcttgtttcggatagcttgtagttcaaattgtattaatgctgaccatttatcgtcttaagatctgtttaatgttatgtgatccttcattcctaatttacctttttttttactcattcaaaacgacctggattgtatgtagtgtgtgaattctgtgtcataccttatcttcagcttcaaagttagtgttctcattaagtaagcaatatagttaacggtgttgtccattatatcatttcatgtacaaatgatttatcaggaaaataaagaagagaaaatctctgatgctttgaaaaaaaaaaaaaaaaaaaaaaaaaaaaaaaaaaaaaaaaaaaaaaaaaaaaaaaaaaaaaaaaaaaaaaaaaaaa

SEQ ID NO: 27050 - DNA, 1896 bp, Glycine max
  unsure (1)..(1896): unsure at all n locations
  Clone ID: TF_GmC1611_2
cggtnccgattcccgggtcgacccacgcgtccggttttgttcttgtgatgaaattgagtttcttctacttagttagaaacttttaatttcaacttcagagaaggtgagaatggtctaagaagccttgcatggcgagccaaagaattggagaaacgggtttgtctgagtcgggaccttcaagtcaccatgttccttatggagttcttcatgggattagtacttcatcaggcctaatcaatcaagggtctgcttttgattttggggagttggaagaggcaattgttctgcaaggaattaagataagaaatgatgaagccaaagcatcagctttattcacaggcaggccttcggccacactggaaatgttcccctcatggccaatgagattccagcaaacctcaagaggaggttcaaagtcaggaggggaaagcactgattcaggatcaggagtgaacactctttcaaccaaaaatgagctaagatttgaaacagaatctccaataagcataaaagcatctccttcagatcatcatcaggcttttgatcagcaccttcaacagcagcagcaacaacaacaacaacaacaggagacagcaacagcaggcacatcatcacagaatcaatcagcagccaaatcacctcaagaaaagaggaaaggagctggttccacatcagagaagccacttgatgcaaagacactgagacgtttagctcaaaacagagaagctgcaaggaaaagccgtctcaggaaaaaggcttatgtgcagcaactagagtcaagtagattaaagctcacccaccttgaacaagaccttcaaagagctcgctctcagggtgtgtttatgggatgtggtggtgctggtggcagtttaacgagaggagccgcaatgtttgacatggaatatgcaagatggttagaagaagatcacagactaatgggggagctgaggaacgggttgcaagcaccgttatcagacagtgatatgagagtgatggtggatggatatctttctcactatgatgagattttcaggcggctcggtgtggctgctaaatctgatgtcttccaccttatcaatggcatgtggacttcccaagctgaacgttgtttcctctggattggtggttttagaccctctgatctcatcatgatgctgattcagcagttggagccactagctgagcaacagataatggggatgtatggcctgaagcattcctcacagcaagcagaagaagcactctctcagggacttgagcagttgcagcagtcacttgtggacaccataactggaggcccagtggttgatggtgttcaacaaatggtcgttgccatgagcaagcttgccaatcttgaaggttttgttcgccaggctgataatttgaggcagcaaactcttcatcagctatgtcgattactcacagttcgtcaagcagcacgatgctttattgttattggagagtactatggacgtcttcgtgcccttagttctctttgggcatcaagaccacgagagaccttgatcaacgacgataactcatgccaaacaactacggaaatgcaaatagtccaacattctcagaattatttctcaagtttctgagagatgtaattaaaacccattagcctgaaagaagtttgctcgccataattaaggggatttcgttgggctgctttacaaatgaatgtcagcgtcttcctaaaagaaaaatatttatttattttttcttttcaatcttctatgctcccttgtgtctttatgttttattgtaaatgtaaatctagtttttatgtgcatgatgaggaagctcctactttagctgaagagaaatagaaaaaaaaaagtttgagtttaaaaaaaaaaaaaagggcggccccttcaaaggaacccagcc

SEQ ID NO: 27051 - DNA, 1790 bp, Glycine max
  Clone ID: TF_GmC1716_2
aattcgctcgagcacacacagctctttccctcttttttttagagagagaaaatgcagagttaaccaccttaaccttaattgcttctccaaaccttaatctttttttttttatttttttatttttttgaggatacttggagctaccaggactagtttttttttttttacccttgtttctttttttgacgtttaggataataattggccaattgggtatctagtcagttgagacatttttcaagaagtagtaaagctccttctacaatattttttgacttggtgctttccttttggatcttacaatgggaaacagtgaggaagagaaatctactaagactgaaaagccttcttcacctgtaacaatggatcaagcgaatcagaccaaccagaccaatattcatgtctatcctgattgggcagccatgcagcatattatgggtcaccatgcatactaccgggccacactcacatggtcaaggagttccatcttcacctgctgctgggactccttcaagcgtagaatcaccaaccaaattctctggaaatactaatcagggtttagtgaagaaattgaaagggtttgatgagcttgcaatgtcaataggcaattgcaatgctgagagtgctgagcgaggagctgaaaacaggctgtcacagagtgtggatactgagggttccagcgacggaagtgatggcaacactgcaggggctaatcaaacaaaaaggaaaagaagccgagaaggaacaccgatcactgatgcagaagggaaaactgagctacaaaatggtccggcttccaaagagactgcatcttccaaaaagattgtgtcagctaccccagctagtgttgcaggaacattagttggacctgtagtttcttcaggtatggccacagcactggagctgaggaacccttcgactgttcattctaaggcaaattccacaagtgccgcacaaccttgtgcagttgtgcgtaatgaaacttggttacagaatgagcgtgagctgaaacgggagaggagaaaacaatctaaccgtgaatctgctagaaggtccaggctgaggaagcaggccgagactgaagaattggcacgaaaagttgagatgttaactgctgagaatgtgtctctaaagtcagaaataactcgactgactgaaggttctgagcagatgaggatggaaaattctgcattgagggaaaaactgataaatactcaactgggaccaagggaagagataactttgagcagcattgacagcaagagggctgcacctgtaagtacagaaaacttgttatcaagagttaacaattccggagctaatgatagacctgcagagaatgagaatgatatctgcgagaccaaaccaaattctggtgcaaagctgcatcaactactggatacaaatcctagagctaatgctgtagcagctggttgaaaccagtaactgcactggctaattatgtaattttggcatattacaagcccaaaattacagcttggtgctaacagttttcagagggatggatcagctgaattttacaatctaattccatctatatagaccagaactaattctttgcttgtgagtttcttagggcataaactctgtattttactagatttcacagaattgaatgacaactttaaaagtttgtaaattgaagagtattagggatttagtttagactttaagagaggcttgtcggccgctgtataattggttgtgtattaactatattggtgtgatcttcctaatggtatcttagtcaaggcattctgactttgggt

SEQ ID NO: 27052 - DNA, 1060 bp, Glycine max
  unsure (1)..(1060): unsure at all n locations
  Clone ID: TF_GmC306557_1
ctcttcttatctctctgctattggttctttgaggaatcaaagcatatattgttttgaaacttgatgagtgaagtccctggttcccggtttaggtttatgacccacttggttcaatctttctccgttgtcttcctctactggttctatgttttctcgttgatctccagtttcccatcgcatattattattatataacttagtaatatagttatcagtgtctctgggtcctgcgtcctaattaggattagtttattttataatatgtccatgtccatggcctcatcaagtggaaactcctctattagcacaaaatctcagagctcagggtctgagggtgatttgcaggtcgtgataacagacgagaggaagaacaagaggaagcaatcgaatcgtgaatcggcgagaagatctcggatgcgaaagcgtaaccacttggaccaactcactaagcagctctcacagctcgcaaagaacaacggcgaaatcctcgccaccatagacatcaccacgcagcactatctgaacgttgaggcagagaattccattctaagggcccaaatgggtgagcttagccaacggctccaatcgctcaacgacatcgtccacgacatcatcatcaacacaaccaccacctacgaaagggactgttatctaacaagcgcacaaaatttcaccaccaccacctacacgctctgtcttaaccaacccgtttttcagtggtgaattgtcaccctcgtcctctgtggatcttgaccataaaagaaaggaaaagtgtgcgtctgggtgaatcttctcttggaggaatcaatgtcaatcagtgaaaaaaaattaagttcatattagtacagtacttagggtggggctatgttaattgttaaacagaatttgcgcaaagtgcttattgaaaatgacatagtggcctgcaactatatttcagatcactagtactaatcgatcactcttgtccaatatcatggaaaaacagatttcagtgctagtgtaatttactattatttattatacctgtatgtatctattccatggtatgtttgcttnnngt

SEQ ID NO: 27053 - DNA, 1657 bp, Glycine max
  Clone ID: TF_GmC4292_1
gaaggaagagacttcaacttcagttcagttgtgttgtctgacaaaacgaacagcaattgggagcagatgcaagatccatcttcaaaccctaattccaatccaaatcccaatcctcacaacgccaatgccgcatcccagttaccgcgtccgccgcaggccacggcgtccaccgccgtcgccggcgccttctcgtcctctctattcgcgcgctccggcggacctcaccaccggcgagcccactcggagatgagtttccggctgccggacgatatgatggacctctcgccgtcggatccgttcgccggcgggtcatcgacggcgagcatggaggagatcggatcggaggacgacctgttctcgacgtacattgacgtggacaagctcagtggcgcgaacgggtcgggcggtgccggaaacggagcggatccgaccggcgaacgcgagaagagtccggcgaggccgcgtcaccggcaaagtagctccgtcgatttcggggaaatcatggatgcgaagaaagctatgcctcctgataagttagctgagctatggacaattgatcccaagcgtgctaagagaatacttgcaaatcggcaatctgctgctcgatcaaaggagagaaaagcgcgctatatacaagaacttgagcgcaaggttcagactcttcagacggaagccacaactctttctgcccaattgacattataccagagggacacatctggccttagtactgaaaatacagagcttaagctccgtctgcaagccatggagcaacaagcacagcttcgcgatgctcttaatgaagcattgaagaaggaagttgagagacttaaggttgctaccggtgaggggatgagccacactgaatcctttaatctgggaatgcaccagatgccattttccggatcaaatttcattccaatcccgccacaatcaggtccttctggtcaccagaacatgcagatgccaccatttggtcactccccatccacaatgccaactcatcaactgcatcaaacaagttctcatccatattcagaaatattgcaaaatgaacagcttggtcgtttccaagggcttgacattagtagcaaaggatcaactctcgtgaagtctgaaggcccctcgctctctgcaagtgagagtagcagtacattttgaatttgacagaaaatgcttgacctgctgacttatccatgctattcattgctcatagggttgacatttagtcaactagtgaaggtacctcatttcatgattcagatttgaggattaattcttaactatttattctaagggttgctcgccaaaaaggggaagcacccttggggttttgttgcaaagttcacagtaatcatgtttcagcatggcatttggtgtttctgggcgctggaatattgggaatgaaaggtcattcccattgtatctttgtatttgtatcatcgtttacgtgatagcatgtaaactgtgtgatttattgttgtgttttacttcattcatagtccaagatggactcttttttttttttctttgtataattagttttagatttattcatagtcgttgtacaatccaagagttttgggtacttgttgtattaaacttcttctgagataagaccttttttttgaaaaaaaaaaaaaaaaaaaaaaaaaaa

SEQ ID NO: 27054 - DNA, 703 bp, Glycine max
  unsure (1)..(703): unsure at all n locations
  Clone ID: TF_GmC1521_7
tcgcatgccacgccgcaacgtaagcctcggaaattcggcctcccacgcgtccgctctccccctctttctcttttccggtgacatggagtccaagtggggtggcgcccccgccagcatcatggcggcgaatttcgacgacttcaagtggatcgcctccatgttcgatcccggaaacgacgacgtcaagcccttctccgacgcagctttccaaaaccaggatgcagtaactgcattttcaacttgtggtggagtaacagatgatacccttgttcgttcccaaaacctcactcccattcaatccaccatttctgcaactattgattctcagtcttccttttgtggtaccgttccagtgtctgctaacaaaccaaacgtgagagataatcaagtaaaaggggtcgccaccactacaagtggttcctcacgtgagccatctgatgaggatgatgaagcaggtccttgtgaacaaagcacaaacgctattgatatgaagcgccttagaaggaaggtttctaatagagagtctgcaaggaggtccaggagaagaaaaacagcccatttggctgacctggagtgggcagttgaacggctgagactgggaaatgcanacctattttagcagcttacagatgccagccaacaatttcgtgacgctgatacgaataaccgagtcctaaaatcagatgtcgaagctttgagagct

SEQ ID NO: 27055 - DNA, 1776 bp, Glycine max
  unsure (1)..(1776): unsure at all n locations
  Clone ID: TF_GmC1716_3
cccacgcgtccgcccacggctcgagttttgaggacacttggagctgcgagcactagttttcccttttccccttgtttgtttttttaggataataattgaccaattgggtatcttgtcagttgagacatttttcaagaagtagcaaagctccttctacaatatttgacttggtgctttccttttggatcttacaatgggaaacagtgaggaagagaaatctaccaagactgaaaaaccttcttcacctgtaacagtggatcaagccaatcagaccaaccagaccaatattcatgtctatcctgattgggcagccatgcaggcatattatgggccaagagtcaccatgccaccatactacaactcagctgtggcttctggtcacgctcctcacccatacatgtggggaccaccacagcctatgatgccaccttatgggcctccttatgcagcaatttacccacatggaggggtttatactcaccctgcagttcctattgggccacatacacatagtcaaggagttccatcttcacccgccgctgggactcctttaagcatagagacaccacccaaatcatctggaaatactgatcagggtttaatgaagaaattgaaagagtttgatcacggggacttgcaatgtcaattggcaatggccatgctgaaagtgcagagcgtggaggtgaaaacaggctctcacagagatggagaagggaaaactgagatacaaggcagtccaatttccaaagagactgcagcttctaataagatgttgggagttgtccctgccagtgttgcaggaacaatagttggacatgtagtttcttcaggtatgaccactgcactggagctgagaaatccttccagtgttcattctaaaacaagtgccccacaaccttgtccagtattgcctgcagaagcttgggtacagaatgagcgtgagctgaaacgggagaggcggaaacagtcaaatcgagaatctgctagaaggtccagactaaggaagcaggctgaaactgaagaactggcacgaaaagttgaatccttgaatgctgagaatgcaacactgaaatcagaaattaatcgactgactgaaagttctgaaaaaatgagggtggaaaatgctacattaaggggaaaacttaaaaatgctcaactgggacaaacccaagagataactttgaagataattgacagccagagggctacaccntgtaagtacagaaaacttattatcaagagttaataattccggttctaatgatagaactgtggaggatgagaatggtttttgcgaaaataaaccaaactctggtgcaaagctgcatcaactgctggacacaagtcctagagctgatgctgtggcagctggttgatacagaaaaccagtaattgtactggctgatcaggtagttttggcatattacaagcccaaaattactgctaacaatttcctgagggatggatcagctgaattttagtatccaaatccatcaaaatcagaactaattcattgtttacttaggacctaaactctgtattctattagatttgacaaaaatggatgaccaagtttgtaaaatgaagagaactagagatttcagattggagggggtttgttgaaacgctacataattgcgtatgtattaacgattggtgtggagactttctaatgatatctaagtaattattctgccttattatttgtttggtttgtattttgtgctagctaaaaaaaaaaaaaaaaaaaaaaaaaaaaaaaaaaaaaaagggcgc

SEQ ID NO: 27056 - DNA, 674 bp, Glycine max
  Clone ID: TF_GmC1716_5
ggatactgagggttccagtgatggaagtgatggcaacacttcaggggctaatcaaacaagaaggaaaagaagccgtgagggaacaccaaccactgatggagaagggaaaactgagatgcaaggcagtccaatttccaaagagactgcagcttctaataagatgttggcagttgtcactgctggtgttgcaggaacaatagttggacctgtagtttcttcaggtatgaccaccacgctggagctgagaaatccttccagtgttcattctaaagcaagtgccccacaaccttgtccagtattgcctgcagaaacttggttacagaatgagcgtgagctgaaacgtgagaggcggaaacaatcaaatcgagaatctgctagaaggtccagactaaggaagcaggctgaaactgaagaactggcacggaaagttgaatccttgaatgctgagaatgcaacactgaaatcagaaataaatcgactgaccgaaagttctgaaaaaatgagggtggaaaatgctacattaaggggaaaacttaaaaatgctcaactgagacaaacacaagagataactttgaacataattgacagccagagggctacacctataagtacagaaaacttactatcgagagttaataataattccggttctaatgatagaactgtggaggatg

SEQ ID NO: 27057 - DNA, 597 bp, Glycine max
  Clone ID: TF_GmC118795_1
gctcggaatccggctattcggctcgatgaagctaacaatagccttgccaggaatgagccactactcaaaaggcagcaaacacttggggaaatgactttggaggatttcctagtaaaagctggggtggtacaagaatcatcatcactattcaagtcttcattactatatcaaaatcagattggtaacattgcaagtaatgggccattgagtgcaagttataggttcaggcatgtaatagggacaggatctagtgtgtcttgtaatgggcttgaaacacaaaacatgttggcacagaataacaacttagttataaaggatgtcactacaaatggtgctgtggagaaatgtccaagcttaggagaatcaagtgggaagggtaataggaagaggatcattgatggccctcctgaagtggtagtagagagaaggcagcgcagaatgttgaagaatcgagaatcggcggcgcgttctcgagcaagaagacaggcatatacagtagagcttgaagcagagctgaatctgctaaaagaagagaacgaaaagctcaaacaaactctggccgatgctgaacgcaagagaaaacacgagatttctcag

SEQ ID NO: 27058 - DNA, 709 bp, Glycine max
  Clone ID: TF_LIB4200-004-Q1-K1-C12
ccacgcgtccggttgctttcagtcttgaagtactaaaaaagttgagtgtgaggtgtgaagtgaattttaacagtgataattggtaaatggggacccaaactatggggactcatggtggtggtggagacagtaatgggaaacagtcaccactccagcctctggtgcggcaaaactcaatgtacagtctcacacttgatgaggttcagaatcaattgggcgatttggggaagccgctaactagtatgaacattgatgagcttctaaaaaatgtgtggaccgctgaggcaagtcagaccattggtatggacaatgagggcacagcacaagctagtcaagcttctctgcagcgtcaggctagtctgtcattaaccggtgcactaagcaagaagactgtagatgaggtttggagagatatccaacaaaacaaaatcgtaggggagaagaagttccaagacagacatcctactttgggagaaatgacattggaggatttcttggtgaaagcaggtgttgttgcagataatcagatggcaatgccatcgtctctgatgggaacaatgtcagatacgcagactcctggaagaaaaaagagcacttctgaggacatgatagagaagactgttgagaggagacagaaaaggatgataaaaaatcgggaatctgctgcccgttcaagagcaaggaaacaggcatacacatatgaattgga

SEQ ID NO: 27059 - DNA, 735 bp, Glycine max
  Clone ID: TF_GmC4092_7
caaaataactcaggttcgaaggaggagctgcaggctctaatggagcagaggaagaggaagagaatgatatcgacccgcgaatcggctaggcgatctcgaatgaggaagcagaagcacttggatgatctagcatcgcaggtgactcagctcaggaacgagaaccaccagattctcacatcggtgaacctcactacccagaagtacttggcggttgaggctgagaactctgttttgagagcacaagtgaacgaactcagccactggttggagtctctgaacgagatcatccacttcttgaatgccactgatggtggtccaccaccaccaccaagctccttctttgagcccgatgctaccttcttcaacaaggcttatctgagccagccgattatggcttcagcagacatgttgcagtactgagtgtgatggttgttggtttcttttaggttttagtctgttagggaaaattgtaatcgctggcagatagtgagtacgataaggaataatgatgaatgtgtaacatatcataaagcgggtaagcttgttggggcccctgtagtcttcagagatcagatcaccctattattgttgcaactgcacttccccatactagacttattatttatgtcatatcaccaaatcatataacattaagtttaatttagtgtcaaagtaaaagaatttatcaaagtggacttggaaactttaatcaaaattttaggtttatttttgttt

SEQ ID NO: 27060 - DNA, 968 bp, Glycine max
  Clone ID: TF_GmC12723_1
aattcggctcgagcgagcatgtccaatattcttcttcagagctctagctctgaggaggatttgcagcttctaatggaacaaagaaaaaagaagagaaagcaatcgaatcgcgaatccgcgagaagatcaaggatgcgaaagcagaagcacttggatgatctcattgcacaagtggaccacctcaagaaacaaaagagcctaaccctcatgaaagtggacatcaccacaaaacactatctcgaggttaaggctgaaaattccattctctgggcccagaagactgaactcacccaaagccttcaatcactcaatgatatcatcgatctcatcaacaccaccaacggggtctaccacacggattgctatgatatcaataatcataataatcataacaattattacaataataacaataatttcatgaatcccatgcacatggcatatcttaaccaaccaattgtggccactgcagacaacatgtttctgtggtgaacaaattaagattttgtgctagtgtgttgttctgttgggagttgcgtcacggtggaatcattcatgagtgatggtaaggtaaatattagtggtacctactactagggtgaggcaatgtttattaagaattgggttttgttaattggtgttcttagctgattgattaagaatattatattattggagtgtgagaagaacttgcttgctacatatgatatgattaaatagtggaatcaaatcacatagtggcatttatgcatagttctgttgttgttaggttaggacaggtcaggtcaccaaagtggcatggtacttgccactgtccaatgttttggaaaaatggatgtcggtgtaagcgtaactgtgcaagtgtgccttctctatttttttcttttctttttatatcattaatatgatatgtaatgttatgggtgtgcttttatataaaaatggtattggttcttgcccccgaaaaa

SEQ ID NO: 27061 - DNA, 933 bp, Glycine max
  Clone ID: TF_GmC1005_1
ggatcagaactaagaagaagacatggcatcgtccaaggtagcgacgacgacgacgacgacgacgaattcggatatttcgagccagcaggtatgggacggcgccaccatggagatggagtctcaagacaacatgaacatgagcatgagcctccaggatttgttgaccgaaaacgacgccgtgccaccctctcatagtcatggaaggggaaagagaaaaaccctagtggaggaacccctcgtcgtcgataaggtcactcttcagaaacagagaaggatgataaaaaacagagaatctgccgctaggtccagggaacgcaagcaggcttacacagttgagctagaatctttggttacacatctcgaggaagagaatgccatcttgttaaaacaagaggccgataggaaaaggcagaggttcaatcagctcatggagtgccttattccagttgaggaaaaacgtaaaccaaaaccaatgcttcggagagtgaattcatcccaatggtgatgtaatatgttgcttgtcctaatggactagttttcaagtcctggtgtatagataccaaacaaatgatgcatgatagtgttgaaaggataaatatgaaaaagagaggaaaagattttttttatatatacatatagctttgctgattattttccaggatcacttggagttacattgctgcagagagaaaatagatgcagccaaataattcaactaatttgattcaagctgaagcttattattggaagatccttgaattgatggatattgcggggatagatctttattgggggaagggagttgaaattagaatttatgtttaatgttagattgtctgctttttgatatttcagggagggaacactgataaaccttgaccatgtacaaacaagtatcgataagtggtatatacatgtgttatctatactgct

SEQ ID NO: 27062 - DNA, 1197 bp, Glycine max
  unsure (1)..(1197): unsure at all n locations
  Clone ID: TF_GmC295_1
tttcgtctttgtttccgtctctattttccttctaaatctctggttgctgtggttcccaaaacccacttattggttcctctgcaggaatcaaagcatagtatattattgttttgaaacttgatgtttggcattgatgactgaaatccctctttccgagtttattaggtttatgataaactcctccttcaaacccaggacccactgggttcaatctttctccgtggcctccctctacgggtcctatgtttcctaatggacctccactttcccgtcacatgtcctgatggtttaaataaggggtaacctataagggctttgggctccggcatcagctaattgcaattgttaatggttagatttttgtgcacgactttttcttttctcatttctccttttatcaccgagccaatcttatgagtgtgtgatttgcaggttgtggtagacgagagaaagaagaagagaaaacaatcgaatcgcgaatcggcgagaagatctcggatgcgaaagcgtaagcacttggacgaactgacgaagcaggtttcacagctcgcaaagggcaacggcgaaatcctcggcaccatagacataaccacacagcattatctgaacgttgaggcagagaattcgattctgagggcccaaatggaggagcttagccaacggctccaatcgttaaacgacatcgtcgacggtatcatcaacctcaccaacgcaaccaccgcctacgaaagggactgttatctaacaagcgcacaaaatatcaccaccaagaacaacacgctctgtcttaaccaacaagccgtttttcagtggtgaattgtcaccctcgctctgcctttgtggatctgacaataaaaataataatttgttctcttggagttgcttcggggaggaatcaatcagtgaacaaaaaatgaaaagttaatgtgaattagtacagtacttagggtggggctatatatatgttaagtgggagattgatagataaacagaatttgtgcaaagtgcttaatgaaaatgacctggtggcctgcaactatatgtcaggcaggtcattagtactaatggatcactcttgtccaatatcatggaaaaagagatttcggtgcatgctactgtagtttactattctatcgtgtgcttgctttaatgctacagcacttagctcttcatttttgattttataatgnaaaaaaa

SEQ ID NO: 27063 - DNA, 878 bp, Glycine max
  unsure (1)..(878): unsure at all n locations
  Clone ID: TF_GmC295_2
tttctacgcgtccgcttccttaatctctttgttggcggtctctattttccttctaagtctctggttgctgtggttcccaaaacccacttattggttcctctgcaggaatcaaagcatagtatattattgttttgaaacttgatgtttggcattgatgactgaaatccctctttccgagtttattaggtttatgataaactcctccttcagacgcaggacccacttggttcaatctttctccgttgtcttcctctactggttctatgttttctcattgatctccactttcccgtcacatgttctgataggctcgagaaggtgtaaactattagtgtctctgggtcctgcggattatttgttcttcattttttttatatgtccatggcctcatcaagtggaaactcctccattagcacaaaatctcagagctctggctccgagggtgatttgcaggttgtggtagacgagagaaagaagaagagaaaacaatcgaatcgcgaatcggcgagaagatctcggatgcgaaagcgtaagcacttggacgaactgacgaagcaggtttcacagctcgcaaagggcaacggcgaaatcctcggcaccatagacataaccacacagcattatctgaacgttgaggcagagaattcgattctgagggcccaaatggaggagcttagccaacggctccaatcgttaaacgacatcgtcgacggtatcatcaacctcaccaacgcaaccaccgcctacgaaagggactgttatctaacatgcgcacaaaatatcaccaccaagaacaacacgctctgtcttaaccaacaangccgttttcagtggtgaattgtcaccctcgctctgcctttgtggatctgacaataaaa

SEQ ID NO: 27064 - DNA, 1573 bp, Glycine max
  Clone ID: TF_GmC153952_1
tgacgacagaaggggtactaaaaaagttgagtgtgaggtgtgaagtgaattttaacagtcgttttcgggtcacggccccccttgctttgcggtctcgcgctcgcggcccgaacggcaacacaaaaagactcccacttcggccgtgaaaacctttgtgcattacccgacgcttcttcttttcttgttttcgctccaaaacccattgcttcaatcactaatactccactttcagatcggggtgtgtctctctccaacacgcacaaaaaaaggatttgaagatttggataagttgctttcagtcttggggtactaaaaaagttgagtgtgaggtgtgaagtgaattttaacagtgataattggtaaatggggacccaaactatggggactcatggtggtggtggagacagtaatgggaaacagtcaccactccagcctctggtgcggcaaaactcaatgtacagtctcacacttgatgaggttcagaatcaattgggcgatttggggaagccgctaactagtatgaacattgatgagcttctaaaaaatgtgtggaccgctgaggcaagtcagaccattggtatggacaatgagggcacagcacaagctagtcaagcttctctgcagcgtcaggctagtctgtcattaaccggtgcactaagcaagaagactgtagatgaggtttggagagatatccaacaaaacaaaatcgtaggggagaagaagttccaagacagacatcctactttgggagaaatgacattggaggatttcttggtgaaagcaggtgttgttgcaggtgcatcttctaatagaacaaataccagtactatagctggagttgattcaaacgtggcagtaccacagtttccttcacaagcacagtggatacaatatccacaagcacaatatcagcatccaccacaaagtttaatggggatgtatatgcctagccaaggtatggtccagccattacacttgggggctggagcttcattagatgttttgtttgcagataatcagatggcaatgccatcgtctctgatgggaacaatgtcagatacgcagactcctggaagaaaaaagagcacttctgaggacatgatagagaagactgttgagaggagacagaaaaggatgataaaaaatcgggaatctgctgcccgttcaagagcaaggaaacaggcatacacaaatgaattggagaataaagtctcgcgcctggaaaaggaaaatgaaaggctgaggaaacgaaaggagctagagcagatgttgtcatgtgcaccccctcctgaacctaaatatcaacttcgccgaatagcatcagctccattctgagatctgtacctagttgtagcggtttgtatatttgagtatcagggaattctccttgtggattactgtgtggttgaatccagtatgtcaagaatagctatgtgatgcatttgcatccaatgacttgcttttaattgttaagttctttataactcctctgtgaaggttctttagaaaaaaatgtaaaatattgtagttttaccattcacaatatagcccttttaatcatgccttgagaggt

SEQ ID NO: 27065 - DNA, 1256 bp, Glycine max
  Clone ID: TF_GmC2191_2
ataccccacaagctgctgctctcattcccttttccctccctattctctctcctactgttaacgttttctgtttttctttaagatggcgatgacgacaacgacggagtccgatctcgattacgagcttcgctatctcagtctcgccgtaaccgataccttcactgctgtccaaaacctcttaccggatgcgatgacttccttttcagcttgtggactaatagaccctctttgttctcaaaacctcactcccaagcattccaccatcactgcaaccattgattctcagtcatcgatttgcgccactagtaatgttgggagcccagtctcagctaataaaccagagggcagagagaatcatacgaaaggagccacaagtggttcctctgagccatctgatgaggatgatgaagcaggtgcttgtgaacagagcacaaatccagctgatatgaagcgccttagaaggaaggtttctaatcgcgactctgccagaaggtcaagaagaagaaaacaagcgcaattgtctgaccttgagttgcaggttgaaaaactgaaagtggaaaatgcaaccctatacaagcagttcacggatgctagccaacattttcgtgaggcagatacgaataaccgagtgctgaaatcagatgtagaagctttgagagccaaggtgaagttagcagaggatatggtgactaggagctcttttactacgttaaacaatcagcttcttcagacacaacatcatcaaatgagcacaccccagcaactgaacacgactaatctgcggcgcatggcgcatgtttcgccaacaatcaccgttcatggaaatgatgtctcgtacaataatggtggacagaattcagcacttggaaacttggatatgagtttcaatgacatcaatgaagtcatgaacgatgctatgagttgtggaactatttggccactcgactagacagactctctctgtagcttccaattagatcgatccatcttttatattttacgtcttgtctaatttgattagtaggctatatatgttaatgtcaagctatgctatttgtcttcgcttgattcctctttaatgatgcctgtttaaaatggcgtcttctttcgttgtatgtagttttgtataaaaggacttgattgctttatccatttctgattgtaattgcaaaacaaaatgttttctaattagggtcatgccaatgcttatggagcatttggctgacaaaatataatacatgagttaattttgattt

SEQ ID NO: 27066 - DNA, 1875 bp, Glycine max
  unsure (1)..(1875): unsure at all n locations
  Clone ID: TF_GmC1471_1
ctcgagccgaaacgatctctctttttctctcatacacttttttataataaaaaagcttttcaacttattttcccatgaagtgatcccaaagtatattagagcttactttgtttcttgtctcggatttcataattgataattaattaatttcaccaacttgttggcttttttagttctataaattccccgcttgaatcacacagagtcctctcttccactctctccctctttcctatcacactttctagatagctagcctgtaagatatatatatagatatttcatatatatcctatggtccgtgagtgcccttgttctgtaccaaccctttcttccacatgttgagtttcagcatcgtcctctcttgagtccccatatcaaatacccaccgaattcaaccccccatataacaaatctcctcccatcccatttttcagcaccaaagtttgaaacttttctcaattgggttgaggagagtttgactcaaatttttatttttctaacgaagcagtagctattagaagtgcaaaaattaaatgtccaacatcttcttgttgatgtttgagattcatgtatccgattctcagtgaaatcttcttttccgggtgtatgatcaattccactgttaggcgcaggacccatttagttcaatccttctcagttgctttcctctattggttgtactacgtttcatgatttctaaaccttccttagtctaataatcatctactactagctattattattattattattattatcatcatcatcatatataataaaatctatctgcaatattatttttctgagtctttgtgtctagttatccgtgtctgggtcctggtcctgcctattgtgtcaattaaattgagaatggtgtcttgtattgaatcatatatctatcatataaacatggcttgctcaagtggaacatcttcagggtcattatctctgcttcagaactctggttctgaggaagatttgcaggcggtgatggaagatcagagaaagaggaagagaatgatatcaaaccgcgaatctgcacgccgatctcgcatgaggaagcagaagcacttggacgatcttgtttcccaagtggctcagctcagaaaagagaaccaacaaatactcacaagcgtcaacatcaccacgcaacagtacctgagcgttgaggctgagaactcggtgcttagggctcaggtgggtgagtttagtcacaggttagagtctctgaatgagatcgttgacgtgttgaatgccaccactgtggcgggttttggagcagcagcaacatcgagcaccttcgttgagccaattaataataatagcttcttcaacccgttgaatatggggtatctgaaccaccctattatggcttctgcggatatattgcagtattgagatccatggtctctgagtctgagatttgatgaggatttcttcttcttcttcctaggtttgagtctgttgagaaattgtaatcactaccatatgtggtgataaggaataataataatgaatgtgtatcgtaaaacggatgggattgttgggtgctggttctgtaaatgtggcatgggccattactgtaatttgtcaccctcctttcctatattattataataataatattgacctacttctcataataatattgaccattatattattttattacccaaccttccaatattattaataaaaagattagttaaatactaaaaacaaaaaattacttnanaaannnnnnnnnnnnnnnnnnnnnnnnnnnnnnnnnnnnnnnnnnnnnnnnnnnacncnngnnnngggaatgggatcggagtcatttcannnnnannnnngnnnttttcgnnattggngtatcgggatgcattttcg

SEQ ID NO: 27067 - DNA, 1665 bp, Glycine max
  unsure (1)..(1665): unsure at all n locations
  Clone ID: TF_GmC1471_3
ggctcaagcattggctcaaggctcgagctcgagcctccctctttcctatcacactttctagatagctagccaaccagagtaagatctaaagatatttcttatatatcctatggtccgagagtgcccttgttctgcgccaaccctttcttccacatcttgcgtttcaacctcttcctctcttgagtccccttatcatcaaatacccttcttcttcaacctccaccaaattcaacccccacataacaaatctcctcccatcccatttttcagcaccaaagtttgaaacttttctcaattgggttgtagagagtttgactcatcaatttttatttttttatttttattttctctaaccaagtagaagtgcaataattaaatgtccaacatcttcttgttgttgatgtttgagattcatgtatccgattctcagtgaaatcttcttttccgggtgtatgatcaattccactgttaggcgcaggacccatttagttcaatccttctcagttgccttcctctattggttgtactacgtttcatgatttctaacccttccttagcttaataatcatctatctaaaatatcataatatcttctactagctagttttatttttattatcacaataaaatctatctgcaatatattgttatttttattttctgagaaatttgtgtctagttataagtgtctgggtcctggtcctgcctattgtgtcaattaaattgagaagggttgtattgtattgaatcatatatcgtatcatataaacatggcttgttcaagtggaacatcttcagggtcattatctctgcttcagaactctggttctgaggaagatttgcaggcgatgatggaagatcagagaaagaggaagagaatgatatcaaaccgcgaatctgcacgccgatctcgcatgaggaagcagaagcacttggacgatcttgtttcccaagtggctcagctcagaaaagagaaccaacaaatactcacaagcgtcaacatcaccacgcaacagtacttaagcgttgaggctgagaactcggtgcttagggctcaggtgggtgagttgagtcacaggttggagtctctgaacgagatcgttgacgtgttgaatgccaccaccactgtggcgggttttggagcagcagcatcgagcaccttcgttgagccaatgaataataataataatagcttcttcaacttcaacccgttgaatatggggtatctgaaccagcctattatggcttctgcagacatattgcagtattgattgagatgcttcatctctgagatttgatgaggatttcttcttcttcttcttctgggtttgagtctgtcgagaaattgtaatcactaccatatgatggtgataaggaataatattaataatgaatgtgtatcataaaaacgggtgggattgttaatgttaggtgctggttccgtaaatggggcatggggcatgggccattactgtaatttgtcaccctcctttcctatataataataataataataataataatactgacctctctatgttattattctcccaatcaaaaaaaaaaaaaaaaaaaaaaaaaattttgttatttttaatcgaatgatttgttttaaaaacaaaacagaaaaaaaagtncggacaagggctgctgattctacttcag

SEQ ID NO: 27068 - DNA, 1503 bp, Glycine max
  Clone ID: TF_GmC726_3
ggtcgaccacgcgtgccccacgcgtccgcccacgcgtccgcccacgcgtccgcccacgcgtccgagatgactcgctcagagagaagaaagaacgaacaattttagcttcaaacacacacaaacacatcgtcatcatcttcatcactctccgacacttgaaactctcatgttgttcctctagaaacctcttccgcaccaccgtggaattttcctgctccttttgcacaaaacacacactctgcttctattataattcatgcttgtccttgtccttgtccttgtgctggtttttttctagatagggtttgcactttttaatcagaactagccaagaccaggtacagaaagtactgtgttagttaaaaaaaaaaaaaactttcatcaattattatcaactttattcggtagtgtagccttgtaggtgaactatgtgtcaggattttgaagtttgattctcttttatattgattgaatagttgtgtgtagaaactagaaaggttagtgattattattgagtcaatggaaggtgttgatcagagtaatatgaatcgaaatagttgtgtatttggttcatcttcatcttcatcatcagggggtgctcttagacccccaaatcgattgaatagtaatgttatgcttattaatcaaatgggtgttactgagaaccagaaaccctatggtataccaccctcacaccctaataccaatatttatctgaaacaagcatggagtttggaaatggtgaattcagctcagaggagctaaagaaaataaaggagaacgataaacttgctgaaattgccatggccgatcctaagcgtgctaaaaggattttggctaatcgtctatcagctgctcgctcaaaagagaggaagatgcggtacatttctgaattagagctcaaagtacaaacacttcagacagagacaaccacattgtctactcagtttaccaaattacaggtgtgtacggtctgagttgagccaatattcccttttcttcagtttttcaattatattttattgtgttgaataatgtttgcttctagcattcatttattcttttctttcctttcttttgttgtgcttgtctacagatggataattcagagctgaaaagtgagaataatgagtacaaattgaggattcaagccttggaacagcagtcccaactaaaagatgctctgaatgagaccttggatgctgaagtgcggcgtttaagacgcacagttgcagaacttggtggagagtctcttctctcaagtcgcatggctcaacagcttgctattagccaacaagtgttccagttacagcaccagcagcaccctaaccagcttagacatgttcaactggacaatagccattcccaggagcagacacagactcagtcacagtgccacaatggcaaagctactgcctactgattagcactctgataccatgtatgctcaatgtttgtgatatgaatctgaataggatattgcatgaccaaacaagctcaagt

SEQ ID NO: 27069 - DNA, 520 bp, Glycine max
  Clone ID: TF_GmC143038_2
ggggtgaagcatggcctcatggccacccaaacctacagagattttttgtgtgcatgcgagggagaaagcgatggcctcatcgccatgtgattgctggccccatctctctcctccttcttccattgagcatgtctggaacgacatcaaactcgactctctctccaattcccctgttgacatagacttcaacaacaaccactctgtctctgattcttcttttcttaacctcacttccacttcctcttctgtctttcacaaacatgaccatgaccactctcttctttctgtctccaacacttccttcgaagcctccggctctaagaaaaccaccctgctagatcaacgccatgcgcgtataataaaaaatcgagaatccgcggttcggtccagagctagaaaacaggcttatagaaaaggcttggaagttgaaattgcccgtttaacggaagagaattccagactaaaaagacaattgaaagagttgcagtgctgcttgtcctcctctgataaccctcccact

SEQ ID NO: 27070 - DNA, 1177 bp, Glycine max
  Clone ID: TF_GmC463_2
tttccggtccggattcccgggtcgacccacgcgtccgctcttcccccattttttcttctttaatccctcgcctatatcttcagaaaattagatctgcttcagatctagggtttcccttttccaaatcacgagtccgttgagtttgattttgtggatgaaagcatagggatagggcttttgcaaacctctccaatgtttctcgaaattatatgaccatgcgtcgaattcgtatgctgcactccttctccgtcgtgttcctctactggttctacgttttctcatgaactccctctcaaatccgtaattaattagatcgatctccttccgtagttaatccttgtctctttttcaataattaattagatctgcgtctcctatttcctttttttgttttgttctgttatcaaaatcaaataaaaaatctccttctcggaaatggcgtcgtcaatccaacaacaacgctcgactgcaacaagttctggatctgaaggaggaggagatccgcaaatgatcgacgagaggaagcggaagaggatgctgtcgaaccgcgagtcggcgcggcgatcgcggatgaggaagcagaaacagctggaggatttgaccgatgaagttagcagattgcaaggcgcgaacaagaagctggcggagaacataaaggcaaaggaagaagcatgcgtggagaccgaaaccgcgaacagcattttgagggctcagacaatggaactggccgatcgattgcgcttctttaactccatccttgagatcgctgaagaggtcgagggattatccgttgagattcccgagattccagatcctctcctcaagccctggcagattcctcatcccatacaaccgattatggcccccgcaaacatgtttctgcgttgataatttcttttgctctttctcgtttggggattttagtttaattagtgtggtaacttttctctgttatgtgtattattactattagtgttatctgtttgtgtcaaaaatatcgtgtggtccgcaatgcattgggttcctgagagagatgaatgtgaggtcaggtacagggtgttgatggctggtagtggcagtgtccctttgtgcgtcttgtaatcgtttttaaatagtcgtgttttattttaatcaaaagcaatcatcttcaatggtggttgttttatttttatttata

SEQ ID NO: 27071 - DNA, 651 bp, Glycine max
  unsure (1)..(651): unsure at all n locations
  Clone ID: TF_jC-gmro02910074b08a1
ggctcgagctcctctcctccatcacctctagtttttgtataacccccgtcactctgctcccttaattaattagccaccatgctctccgccctcactccttccgaccccttctctcccttctcccccttctccgccggcttcacgccgtgggatgacaacgacgattcccacgccctcttctcccccaaaccggtctctgcttctagctccgcctctgactataaatccgaaccgaacccaaccgaacacgtatgcgcctcgtcctcggtgatgatggacgagcggaaacggcgccgcatgatatcgaaccgggaatcggcccgcaggtccaggatgcggaaacagagacacctggagaatcttcggaaccagttgaacaagtgcagggtcgaaaaccgggaactcggtaaccggttgcagttcttcctgcaccacctgaaccgcctccgaaccgaaaacgaatggctccgctccgagcgaaccctgctacgccaaanagtcgccattntaacacanatnttgatttttcaaccaattcaaaccaccttctccctgctgcatgaccacatgcaccaacaacaacacacctngctcatgacaantaatccagtantantaaanananattatatatatatatatattatatat

SEQ ID NO: 27072 - DNA, 2539 bp, Glycine max
  Clone ID: TF_GmC1081_1
gtcgtgggtgtagagagagaaagcagaaagagagttctttttttcttctggttcttggtttggtttgttgctcttgttctagagagagagagagggataagtgcctgctccttcggcatttccgtcagacaaagttaacacttccaagaccgattaatcaattcgccccttcaccattccctattacatgaactctcccaagattttaatttgaagctgaaagaagaatgggagaaaatgaagaagcgatgcagaggcttcactttctgaagcagccgttaaacatggagcaacttagcatcccgcaattcaacccctcgcaaatgcgcgcgaggcagcatcatcatcagaatcagttcgacggtgggaacagtaacaagcgggctggtataccaccctcccacccgcacccgatccctcccatttccccctactctcagatcccggtgtcgcgtcagcacaacaacatttcccctacacccacccacacccgatcactctcgcagccctcgtttttctcgctcgactccctccctcccctcagcccttcccccttccgtgactcctcctcgacttccgtgtcggaagctgctgacgtgtccatggaagatcgcgacgtgagttctcattccctgttgccaccctcacctttctccagaacactcaacaacagtaatttaccattaccccctcggaaagcgcatagacgctctaacagtgatattccgtttgggttttccaccgttttgcaatcttctccgccgcttatccctcttcggaaccccgtttcagcgaaacctgctcagttggtgaaacgggaaacaccgtgggacagggttgttgagcataatactaatactaataataataataatgtagagggatccggggagaagaaatctcctgaaggggaagtggtggatgatcttttctctgcttacatgaatttggatagctttgatgctttgaactcttctggaaccgatgataaaaatggaggcgaaaatcgcgatgatttggatagtagagccagtggaactaagaccaatggtggagacagtagtgataattcggctcgagtatgagagtgggcatggagggagtgagaagagggaagggatgaaaaggagtgctgggggtgagattgcacccactactaggcactataggagtgtctccatggatagtttcattgggaagttgaatttcgatgaggagtcgcccaagctgcctccttcccccgggcagagaagtgctctgatgtcgcctgctggtggaattgatgggaattcggcggccttcagcttggagtttggaaatggggagttcagtgggcctgaactgaagaaaattatggccaatgaaaagcttgctgagattgccttgatcgatccaaagcgtgccaaaaggattttggccaaccggcaatcggctgcgcgatccaaagagcgaaagatgcggtacatttcggagctagaacacaaggttcagactctacagacagaagccaccacactatctgcacagcttactctgttacagagagattcggctggactcactaaccagaatagtgagttgaagtttcgccttcaatctatggaacaacaagcaaagcttcgagatgctctaaatgaggctcttactgctgaggttcaaagattaaagattgccacagctgactaagttgctacagctgaactaagtagcgattcgcatggttctagctgtttgattcctcaacattctgtcaaccctctgatgttccagcagcagcctccttttgcatcccaacaaaacattcatcttcaacagcagcagcaccgccagaatggtaatgccaactcaaattctgacttaaaacaatagtttgggaaggagttcctgcagctgcatggttgtttctttatatattcgctgctgattcattgcactctcggtttcgcatatttacaaaaggttttccttagttgttatggtctcaagtttgattcgcattacctgtccagctcggacagaaagtccatatacaagttctaattcctgtcttatatctagattatcatagagcatatttaatttcagtatatatattaaattgtaagcattatttggacattttatgatgacattttagagaacctgttcaactttccttttgtaaagaatgactattctgttgtggatctgttccaattttccgatcggagtatgtggaagatgtagcgatcctgagagaagcagagcctggagtcggactccgccgaaagcttctcgaggatacggcgggagacggcgccggtgttgccggtgacggcgctgaactccgccaggacgaccgtgcctctggccaccaaagcgtagaagatcgccatcggcagaagattagggagaacgttctctgcctctagctagatcttcgacttcgcagcattggaaaaccacaacgagattgttgttatcaaatcggacgcgtgggcggacgcgtggccgcacgcgtgggcgaacgcgtggacggacgcgtgggcggtagaaaggg

SEQ ID NO: 27073 - DNA, 779 bp, Glycine max
  Clone ID: TF_LIB4280-015-R1-K1-G1
ccacgcgtccggttgggcttgtgggtagacacggatgtgctaaagttttcacttttgttttgacacacgttgctgatttttttctcacacgagttactccaactcaaggggaattgttgatgtggtggtgagaatgatgtatggggagtagaactacctggagggttgttggtgttgaagatgacaagggagctgaaagaggaatgccgagcttcaattctgagttacccaattccaattcatgctatacagaggggaacacaattgattcttttcgtgtttctgactttggagcatttgatcagtcatatcacatagaggatgctgttgacctcagtggaaacccagtttacaattcactaaaggtaaatagccaaacaatttctccgggttctgttcacattagtagccttggtcagttgccaatttcactcgaaaaaagcccattgacaaatcaaacagagccaccgcataggttgcgattacagaaggttcaatcatcaaatcctggcacaatattagttggtaatacagataactgggaggagtctaccatggctgatgccagtcccaggactgatatttctacagatggtgacactgatgacaagaatcatccgtttgatagaaatcaagcccttactgctgtttccgactctagtgacagatcgaaagataaatcagatcagaagactctccgcaggcttgctcagaaccgtgaagctgccagaaaaagccgcttgcgaaagaaagcgtatgtcccacagttggaaagtagt

SEQ ID NO: 27074 - DNA, 729 bp, Glycine max
  unsure (1)..(729): unsure at all n locations
  Clone ID: TF_GmC6275_6
cttagatagattgatgcctttatttttatctttgttttgaactactatgattactgttttctgtataggagtatgtgttgaatgattattgagttgcagcactgatcagttcttagaacatgaattcagcatccccgcagtttgtttccccgagaagtatgagtgtgtacgatccgatccaccagattagtatgtggggagaaggcttcaaaagtaatggaaatttaagtgcagccatgcctttaattgatgaggcagacatgaagtttgatagtcagtcagaggatgcttctcatggtatactgggagaacctaataagtatgaccaagaagctagcaaacctactgataagatacaaagacgtcttgcacaaaatcgagaggctgctcgtaagagccgattgaggaaaaaggcctatgtgcagcagttagaatcaagtcgtttgaagttgatgcagttggagcaagaacttgaacgtgcaagacagcagggaatgtatataggtggtgggttggattctaatcatctgggttttgctggatcagtaaattcaggaattacaacctttgagatggagtatggacactgnggtgaatgagcaaaatagacaaatcacagaactgagaaatgctttaaatgctcatattgggtgacgtagagctcaggattttagtagatggtttgatgagcccctatgccgaaatgtttcccatgaaatctgctgctgc

SEQ ID NO: 27075 - DNA, 1475 bp, Glycine max
  Clone ID: TF_GmC9762_1
aacttcgcgtccgcatctatcctcctcctaaaaattggtcaaaatctatccaatctctttgcatattccttcttatcatcatcttcttcttcttctctgttgcctctagaattgaaaagttcttcttcctgcccatagtctttgacacccttttccaacctctagattttttcttccctctataattatctccttcacagaaaccttcttatcccacatatcatcaattaccttgttcctctcaaagtttgattctttttctcttgaattggattgttataatttttgttcatacttacatgttatgcagttatgaatgattgagagacaacacaaatgtcttctccagtgatctccgagatcctcctctctggcttcaccataaactcttccctaagacgcaggacacacttggtgcaatctttctctgttgttttcctccactggttctacgttttctcatgaactaaataaattaacctcgtacatagtataaacatagtacgtaccgtgttcttttttcaataccatagcttattcaagtcattaaacctagctagcaaattagggttattatttctcacaaaactctggttctaatagcaaactagtgcatggcttctcctggtagaagtggaacctattcatctgggtaaaaggtctcttcaaaactctggttctgaaggagacagagacatcatggaacagaggaagaggaagagaatgctatccaatagggaatcggcacgtagatcgaggatgaggaaacagcagcacctggaaggtctcagtgcccaattggatcagctaaaaaaggagaacacccaaatgaacacaaacataggcatcagcacgcagctgtacctcaacgtggaagctgagaacgcgattctgagggctcaaatggaagaactgagcaagagattgaactctctgaacgaaatgataagtttgattaactccaccaccaccaccaacaactgcttgatgttcgatgaggcacaggagactacgactcagttgttcaatgattgtggcttcatggatgcttggaattacggaataccactcaatcaacaaatcatggcttacgctgacaatgacatgttgatgatgtattgattggtgaaattaattttgagttggagtttttgtgaatcctggtgctaatcctttgtaacacaactacaacacgtgtttgttgtctcttgttttaatttgtttttttgtttttgtttttcttgtaataagtaatgtctattgttttcagtttatgttatgtttagggttgtctttgtgtattttaagaggggttattttttcttctcgaaaatgtaaaaaatcgagcttttattttccatgtagtagtatatgtgattttcgtgaatttccactcatatcaattaaatctccagcttatgcatagtataatattccatatttgttatgatatttaaaaacggacgcgtgggcgt

SEQ ID NO: 27076 - DNA, 1389 bp, Glycine max
  Clone ID: TF_GmC9762_2
agccttccgccgcgtccttcctcctcctcctcctaaaaattggtcaaaatctatcctatctctttgcatattctttcttatcatcatcttcttctctcttgcctccagaattgaaaagttcttcctctgcccatagtctttgacacccttttccaatctctagtttttttattttcttccctctataattatctccttcacaaaccttctatccctcataacatcaattaccacaaacccaagccttgtacctctcaaagtttgattcttttctcttgcccaaagcgatttggattgctataatttttgttcgtactacatgttatgcagtcatgaatgattgagagacaacacaaatgtcttccccagtgatcagcgagatcctcctctctggcttcaccataaactcttccctaagacgcaggacacacttggtgcaatctttctcagttgttttcctccactggttctacgttttctcatgaactaaattaactgacctcgtacataggagtataaacatagtactcgtgttcttttttcaatactacatcacattcaaatcattaaatctagctagcaaattagagttattatttattatcattgcacaaattaaatagcatactagtacatggcttctcctggtggaagtgggacctattcatctggttcaagttctcttcaaaactctggttctgagggagacagagacatcatggaacagaggaagaggaagagaatgctatccaatagggaatcggcacgtagatcgaggatgaggaaacagcagcacctggaaggtctcagtgcccaattggatcagctaaaaaaggagaacacccaaatgaacacaaacataggcatcagcacgcagctgtacctcaacgtggaagctgagaacgcgattctgagggctcaaatgggggaactgagcaagagattgaactctctgaacgaaatgataagtttcattaactcccccaccacaacaactgcttgatgatgttcgatgaggcacaggagactaccactcagttgttcaatgattgtggcttcatggattatgcttggaatggaataccaatcatggcttccgctgacaatgaaatgttgatcatgtattgatcttgagttgtagcccaacacccacgtcttctcttgttttaattttttttttttttttattgtaatagtgatgtctattgttttcagtttatgttatgtttagggttgtcttgtcttgtgcgtatttcaagagggggattcttttttcttctcgaaaatgtaaaatatcgaccttttattttccaggtagtgattttcgttcctttccccttttttaaaaaaaaaaaaaaaaaaaaaaaaaaaaaaaaaaaaaaaaaagaa

SEQ ID NO: 27077 - DNA, 1943 bp, Glycine max
  Clone ID: TF_GmC1737_1
gcaggagtccgttgagcgtccgcttatgagtacgaatttgaagtttaaaactgtttactgtttcaggcgttgataacatttctttatacattaacctcctattatttttgtttggttcaaagaaaaaaaataaaaactagaactgtctattctgtttgctgtttcaatgatttctgtattcgcaactgagtatgttcttttgtatttttttcgaagtggaaaatgattaaatttatgctccctttttggtagatagtaaagttaggatttttatttcagcaatgtacgttcagctgttcggttgtaatgacccgcagggtgtttgtttgttgatggcttttatctttttttttgctctcatgtcatttcttatgtgcgtgccctgagcatctattctgtattactttgattcccttgaaatctgatctggcttatctttttttttttcttcttttgggaccaattttcacccactatttccaccctccacttcaaatttacttgctttgtgtttgtgagtgcctgttatcaaatctccaaaagctcaaagaaactggtattgtgttcggcataaggaattaggattgatttcagggtgtattctgtacctttttcatttttatctttgttttttcatttgtgctttctgaagagctttggagatgtatgatatagaattgtaggtttgtgttgttagggttgagaaaaatgggatctcagggtggggcagtgcaagagccaaagactactacccctttggctaggcaagggtccttgtataatctgacccttgatgaggtgcataaccaacttgggaatttggggaagccacttggcagcatgaatcttgatgagttgctgaagagtgtgtggagtgctgaagctggtggtggtggtgaggcttctggctgggactttggtgttggtgatgctactaacatgccgcatggcaaggctgctgcttccggctcctctctgaatcctcaggggagcctaactttgtctagggatcttagcaggaaaactgttgatgaggtttggaaagatatgcaactgaagaaggtcactaatagggataaaaaaatccaggaaaggcaagctacactgggtgagatgactctggaggacttcttggtgaaggctggagtggttgctgaagctttgcctaccaagggtggggctatgtcaggggtcgattcaaatggggctttctcacaacatggccattggttgcaataccagccgctccctgctgcgacgcagctcccgaatgtgagggggggtgatggggcggcccccgccattcagcagcctttccaggttggagtgaatctggttttggatgcagcatactctccgctcgtgcgtacgataatggggacgttatcggatacacaaactccaggtcgaaaaaggggtgcctctggtgttgtggtggagaaaactgtggagaggaggcagaagaggatgattaaaaatagggaatctgctgctcggtcacgggcaagaagacaggcatacacacaagaactggagattaaagtttcacgattagaagaggagaatgaaaggcttagaagactaaatgaaatggagagggcattgccatctgtgccaccacctgagcctaagccaaagcaacagcttcgcagaactagttcagccatcttttgatatcttaattgcaatgaattcctaattcttgcccatgctatcacatcacatagctctcatgtgcattatactcccgcctcttcaagtttggttatagatgggaggctattgtttgtgatgctatcagttctccccagcttgctctattctactaatgtttacctcttatgtatattttgattacaacttaagctgctctataaatatacttactctaattttgggcccatttgtgggaattatgaaattataagtcttactttttattt

SEQ ID NO: 27078 - DNA, 1148 bp, Glycine max
  Clone ID: TF_GmC11345_1
ggtgccacagagacggcgcttcagccgacctacaggggaatgagacataacaaggtttcggttagtggtggtttggaaagagaagatgctttcacacagcaacaaattgttaaactgaaaaaaaatgaggagtttggcaatgtatgcagaccaaacaatagtaaaaccaaccaacttcgtgggactctaaatggaaactgatcaattaggcaaaggaaagtaggtgagaacaataaacaactaccaaaacgacaacctcatccattaaaagtaaacttaaaacactctcaaagacaagtgcagaacaaagaccaacacccacaacatccaccacgactttttccaatgcgagtaaatgtgacttttgttagtgctcctacgcatttgttgaacaatgctcatgtaacagctagccctggcagtaaaatatcacctgatgttattacaaggagtaataatgttgataactctccaatatcaccgcattatgtaatcaacaggggaaggaaattcagtgccatagagaaagtggttgagaggagacaaaggagaatgataaaaaatagagaatcagctgcgagttcaagggctcgtaagcaggcctacactttcgaactagaagctgaggttgcaaaacttaaggaattaaacagagaattacaaagaaaacaggaagaaatcatggaaatgcagaaaaataaggatctggaccctgcatgcagaccaagggtaagtaaaatacactgcttgagaaggacacttactggaccatggtagattatgtgaatgtgagtcattgtttccaagtgacatctacacgaaggaagccattatgtcataagggctggggtatatatatgtatgtgagacgtgaggtaattgcagtccaaaactagatagggtggtagctattgttagtgttattatgtataggaactaggagagttgagttgtacattaaacttgtatctttggataacaaattattattatatgcttgaatgttattttcttttgtgttgcaggatgatatacaagaaaacacaaaagctttttcgtgttagtaaacgatgcgtattcgtgttgtaagttttcatagaggttgttgatttatcctaaattaaaaattagagattcttctcagcttt

SEQ ID NO: 27079 - DNA, 2417 bp, Glycine max
  Clone ID: TF_GmC858_1
gttcttcttctccttgtggccttcttccctctaacattccctgtggtttctctgaacatatttatataaaggttgtgctatagccttagaggctcatttggtttaatttgcctatgtcatatcatatgtactccttttttcatttcctctctcatttttggagtatttgattttatatgcatatatatacacacacattacaggtatatatatatatatataatcataaaatatataccaagttatgttttttgtttatttgtttatttatatatttctctctttcatttttgtacttcttctttcatcttttcatctttcttgtcttagagttgtgttgattgattggtgtgacccaaaaaaatggctcaattgccaccaaaaattctcaaacatgacacccaattggccagacttctcttctcctcaccaaaagaatcctttcctcaaaaaccacgtcatcaaaccaaaaccctcaatgggtgaaggagtttcttgagtcctcactgggaggccgcggggccccccggcggccggtgagcgactccgtcactttcctggaggcaccattgttggaccaccttcttggaaaaggtggcggtgtggtgggtggtggcggcggcaacaaagagtgcgagagagtttatgatgtacaattcttatccatgtttattgatgaagctctcagggaacaataacaataataataccatgatggcacacacgttgtcctcctcctacccttctacaccccctgatcacaacagcatcaatgatgagaaggaaatggaaaataaggaagaggaagagaaaaagcaagtacaacatgaaacagatgatgaagataaaagcgaatgcaaacacgaaatcacacaacttcccaacactaatgacactaataatactactaccaagagggtcaaaagaatcttggcaaatagtaatgcaaatgcaacatgttctagtgagaaaatcacagaccccaagagggtcaaaagaatcttggcaaatagacaatctgcgcaaagatcaagagtgaggaaactgcaatacatatctgagcttgagcgaagtgtgacttcattacaggccgaagtttcagtgttgtctccacgggttgcatttttggatcatcaacgtttgcttctgaatgttgacaatagtgctttgaagcaaagaatcgcagcgctggcccaagacaagattttcaaagatgcacatcaagaagcactgaagagggagatagagagacttaggcaagtttatcaccaacaaaacataaagaagatggacaatgctgcagggtcaccaccatcccaatccccaccatctccatcaccaaaaccacgatgtgaaactcacactgaaaaggaacagcttatcaatgtttgaagtttgaatttgaaccctccatttgaagactcactcactcaccctttatagactatgatcaaattaacatatcaaccacctagcttgttcaaaaaaatatcaaccacctagtgtatgctagtttagatgatctgtgattcctttcaatattaaaaaagaaattgcagaattttgaaaataggagaaaaggagaaaaaaaatatgtacaaaacttgaatgcatttataggtgattttggtattattatttttttatcagaatctgagttttatctcgataatctgtgtaattcatcaaatgccaacacaaatgccaacacagattaagtaaaaccctaattttgattagaaaataacaccaaaatacctattaaagtgcaattaagttttgtgattagaagaaaaaaaaaatgttgtgtgactgcttgtagttgtaatgtaatgaatgtcatcacgtactgttgggtagagagagggtgagaatttttattaggcaatcgatgatttgatgaagggaaatgttgttaaatgagaagagggtcatcacattacattataatgtggtgtggtgaggccacattggtggtggtaggcttttgctatcaaactgagacagtcacgtgatgtgtttactttaaagaaaagggggaccactcaagttgcatgattgagaatgcagggaaacacatgtgcaccagtgacatcaaagagagggtggaagaaaaaaacagttgtgtctgctttaactagattctttcagttattttttattatttcttattattatttgttttcttcttgattattttcttttaatttaatttttattttttcttgggttttttttcttccaatattcaagttggaaaacaaagactagtgggcgtgtgtgttgggatggatgaaaggaaggtatgtcattatcagtgaaagtctcatggctcttctctgagttttgttgcactttgtgttactgcttttaaggcatgtgattatctttatttgacgagttaatttgagagggaa

SEQ ID NO: 27080 - DNA, 2051 bp, Glycine max
  unsure (1)..(2051): unsure at all n locations
  Clone ID: TF_GmC16145_1
gtgggtgcgggacaagcaaacgaaaagtaaatcaatcaatcgttggaatcactcaaatgaaaggtacttcatggtatcgctattttctcttttcttattactttttcttgttagggatttgttctttagtgcaattgcaaatcacacattagttgtatttagtgaactattaggtgctttccggtttgaatttgggtgtttcccttgaaatcgatgacggcgagctttttttctccaagcatgaagtggtttcgagtcccaacatgggtaagcatccctgcagcggttcaatggacagtttcttcgacgagcttatcaaggacacgcacgcctgcacccacacccacacctgtaaccctcccggccccgatttctcccacactcacacgtgctaccatgtccacaccaaaatcgtccccgcccctgaggaggaccatgtcgccaccgatgacaccgccgagtccgccgagaagaagtcgtcgtcgtcgaagaagcggtctctggggaacaaagaggccgtccggaagtaccgcgagaagaagaaggcgcgtgcggcgtcgctggaggacgaggttgtgaagttgagggctctgaaccagcacttgatgaagaagctgaaggggcaggcggctctcgaggccgaaatcgcgaggctcaagtgtttgttggttgacataagggggaggattgaaggggaaattgggtcgtttccctaccggtggctggttcttatgtgatgaacccttgtaacttgccgtgtgatgatagggtggattgccttcaccctgatgggaggattggggagactgcggctttgaatggggaagagtttgatggttgtgaatttgagaacctgcagtgtctggcaagccagaatttggggctcaaggatcttcgcgcttgtggggttggggttggacacacagggtctaatgtaaattcttctgccttatcaaagaaaagaaaagggggatctcgtgctgcaacagctggttgaagaattgataatttggtggttttcatccttggcatggtaatatctccttccaatatctcgttaccagttgcagcatcagctatccatcaagtcattttttaaaaataattctctctttttgatccactactgcattataatggttcgattggctgctctactatggaagattagtcatagattaatgttttatttaaacaaaatagagtagttgatctgcagccagcatagcttatggccgagacagatttggtgcttctctttgcaattaagtttactggttttttttattatgcatgggacaagttaaactgccatcataaaagtttctatgctctgtcaattttaaatctgtcaagtatgtgagtagtttttactttgtttaataataataggatataaagtggtgatttttctaaattcgctagtttttcattgctggattacagaacttagggaagatggggtgtgtttcatctttcagtacttagtgatgtggacaggtgagacaccaatgtcattttgtgtaatataaaatcttgtgagtgaaataataaagttggcttgtatggttgtcggcgttgttcattgtttttcttaataatatgagaggtttacttctgtctttagcatttttgctggacaagggtagaaggaactgttgtcctctaactgaagattttgcatattggcatgtcttctacaagttaagacagacaagtgaatggttttgtatttgagggcgcaagtagctgtttcaaatcgatgatgggaaaagcatatgtgcctgtctgcacttagagaacaagtcttgaatagatttcgatagttataaatgctcttgttgatcctctcttaggcagggaattaaaaaaaaaaaaaaaaaaaaaaaaagcataaaaatgctcttttttttcctctttnggaatgaaaaataaaacattacattattgtatcttctacttcgaccgccgttttggacaaaatttgtaataattttactttgcgttagagtctctatagtaaataattgcttaaataaattgtttatctt

SEQ ID NO: 27081 - DNA, 1080 bp, Glycine max
  Clone ID: TF_GmC16145_2
gtggacccagaataaggagaagaggtagtggtcttggccctacgcgaattatcatcgtagaacaatcagacattcacacattctcgatcacatgtaagtctgagactagaagaatacgtataaattagaaccgattgaaagtaatcaatccgtggattctctgaacttatcgcttcttcccggtttgaatttgggtgtttccgtttcaatggatgacggcgagcttgatttctccaaccatgaagtgttttcgagtcccaacatgggtgagcttcccagcagcggttcaatggacagtttcttcgacgagcttctcaaggacacgcacgcctgcacccacacccacacctgtaaccctcccggccccgatttctcccacactcacacgtgctaccatgtccacaccaaaatcgtccccgcccctgaggaggaccatgtcgccaccgatgacaccgccgagtccgccgagaagaagtcgtcgtcgtcgaagaagcggtctctggggaacaaagaggccgtccggaagtaccgcgagaagaagaaggcgcgtgcggcgtcgctggaggacgaggttgtgaagttgagggctctgaaccagcacttgatgaagaagctgaaggggcaggcggctctcgaggccgaaatcgcgaggctcaagtgtttgttggttgacataagggggaggattgaaggggaaattgggtcgtttccctatcagaaaccaacgccgaatgcgaaccctccggtggctaacttgcctggttcttatgtgatgaacccttgtaacttgcaatgtgatgatcgggtgtattgccatcaccctgatgggaggattggggagactgcggctttgaatggggaagagtttgatggttgtgaatttgagaacctgcagtgtctggcaagccagaatttggggctcaaggatcttcgcgcttgtggggttggggttggacacacagggtctaatgtaaattcttctgccttatcaaagaaaagaaaaggtgggacgccattcatgccatgaactttctgattatagggggaattgaaatgtttgatttgttactagttagtaaa

SEQ ID NO: 27082 - DNA, 556 bp, Glycine max
  Clone ID: TF_LIB4391-035-R1-K1-D6
accccgtccattgcaaagacgcgggcccaaattccatggctctggaaagagaggatacgctagaacaatcacgtgttattgcatctggtcatcgtggatacagaccagcacactcaacagcgacagaaccaacaacagcatgtgatggtagtagacggagggactagccaagtggcctattcttctcactaccccactgcttgcatggcggcttctgccacgcccgctgtagctgctccttccccatctgacgctccagctggcttatgtacttctgcacaccagcttgactaccatcaggcacagaatgtacaccaccaacagctaaaacaccaacaacagcatgttcaaatgttcatcggccaaccatactgcactaaattgaccgaacaatagactatggaaaccatacgcttcctcttgctcgtataaaaaagataatgaaaactgatgaagatgttcggatgatactagcacactctccgtgcatatgagcgaacgctagagagatgtacatactatagttagacgagcgatcttggatccacacagtact

SEQ ID NO: 27083 - DNA, 1452 bp, Glycine max
  unsure (1)..(1452): unsure at all n locations
  Clone ID: TF_GmC6781_2
cttctccaatgtccgattctctcaccgatcttgcgccaaatacaaattcgttacatcctaacccagggttccgacgagcatggtggacggtccgacgagtccaggcaatggtagccatgagagtggcgagcatagccctcgctctaacgtgcgcgagtaggacaggtacctccccatcgctaacataagccccatcatgaagaaggcactacctacgaatggtaaaatcgccaaggacgccaaagagactgttcaggaatgcttatccgagtttttaagatcaacctttcagacacatgtattgagatggatggattacattcagcacaagcaagaatttgtaggtttatttgagaaaatattgttgcagaagcctggatttgagcccccggtaacacatcctgctggagttgtggaagctgatttaaaatcaaacaacactgagcaaagcgtaaagaatgtcagcaagacccccggccgggttcggattcgggccatgagattgcgggtgggtgggggagggagtggaggggcaaggtttgggtttccgaagtaaactcaagcaaggataaaaacaaagctgagggaaaggcaacaggaggaaaatcaactggagacaaagaacccaccaaagccaaggcaaaacctgctgacaaagaagtggctgagaaagagaacgaagttagcgtcagtttgcttaatattcaagttggattaattcgcaaagcatggaagcatccatctgcagatagtttgctagttgaggagatagatgttggggaggacaaagtgcggcaggttgttagtggtttggcaaagtactgcaatcctgatgagttgacgaatcgtcgtgttgtacttataacaaatgtcaaacctggaaaactacgggatgtgatgtctcaaggattggtcttatgtgcttcggatgaaggtccaaccattgtggagcccttgctccctccagaaggatcacagattggggaacgtatttctttttctgggattgatggaaagccagaagatgtactaaacccaaaaaagaaacagctggataagattacaccgcatcttttcactgatgacaagggggtagccacatacaagggaataccatttatgacgtctggtggaccatgcacatcatccattcccagagcaactattaaataatggagatatggcccattcattgttcttcgccactcatagatttttggtaccacaaaatatttgaagttttgattacgttaatgagacgttactatcttgttgacaagcttatgctgcacttgcacttgcatgctctttaatgctaccaatataatcttgaatccaatgattcttgaggtaataccatagtaactttctccacattgtaaaaagaacgaaagactttaaaattatacaacctaccaaccaagggttattatgcaaaannaaaagnaaagg

SEQ ID NO: 27084 - DNA, 353 bp, Glycine max
  Clone ID: TF_LIB3242-495-P1-J1-F3
ggaatgcgtatcctagttcatcagtttcatcaccagcgaggcctctgataagtgtgagagggaaaagagaaagactattaacggtgatgatttgctctgggccatggccactcttggttttgaggattatatcgatcctcttaaaatttacctcactagatacagagagatggagggtgatacgaagggtttagccaagggcggagactcatcttctaagaaagatgttcagccaagtcctaatgctcaggtagaatgcacccacgaatgtgcgaatcatgcttgactgcatttgtgggaatatgtgtagaatacaataacatctgattttggaatctttttgttgtgaaatc

SEQ ID NO: 27085 - DNA, 2560 bp, Glycine max
  Clone ID: TF_GmC17763_1
ggaaccgggtattgcgcacgctccttctttggagactgtttccgacatagggtgaaactgaaactcccgtgtcggggtgtttacactgcactgtcacaatgacttcctccaactctcttttttgtctctcttcgttttctttcttcccacgcgtccgccaaaaccgaaaagaagaaaaacgctgaaatccccaaaatcgaaaagaagaaaaccaaaagcgctgaaatccctctaaccgatggcaaaacgaagagggatagagaaatcgccaaagaggagaacaagaagaagactaagaaacccaagctcagcaatggcacttcaaaacagcgagacgagggatccaaaaagggagtagcagaaggaaaaggagaagaggggaaaatgaacgtgtttccgatgaatcgcatcagaacgatgattaagggcgaagatcccgatatgcgtgtttctcaggaagcattgttggccatcaacaacgctgtggagaagttccttgagcaattctcgcaggaagcttatgctttttgtgttcgggaccgcaagaaatgcctcagctacgatcacctagcacatgttgtaagtaagcaaaggagatatgactttctctctgattttgttcctgagagagtaaaagctgaggatgcattaagagagagaagtgcagcaggaaaaggaggaagttaaaaaatctaaagcaagctagtggagaatataagcttatactttatttaatcatgtaacattttgtaatggaaacatgcatcatgatgagtaatgctgtactttaagtttccatattgtatttattttagtaatcctattcccgtaagtgtatatgatttttcagtgactatgcatgtgcttgactctgcttgggtagagccacgcgttggtacggctgcgaaaagacgacacaacgtggcatcacgagagtaagtgagtgagagaaggagattctgatttgatctctcagatctgagcttaccgtcgccggaatccaactcaacctgggtcggattcttgggtatcatcgcatcgccattcgttttagcctctcaataagagattttagttcgcttcaaattcgaggtttgatttgaagttgaaagttggaatagcttaactgttgtgtaaaacaaccaacacacacgagcatgggaagccaagacaacaacgtagaattgtcatccaattcatttctagcttacaaatctgctaaggtgtttgttgctggtcaccggggtcttgttggctcggccattggtcgcaagctcacccaacttgggttcactaatctagtcttgcgctcccatgccgagcttgatctcactcgacaatctgatgttgaagccttctttgcttatgaaaaacctgaatttgtcattgtagctgcagccaaagttggtggcatccatgccaacaacacctaccctgctgatttcattgccatcaacctccaaatccagaccaatgtcatcgattctgcatatcgcaatggtgctaagaaactgttgtttttgggttcctcttgcatttaccccaaatttgcaccccaacccgattccggaagatgctttgcttactggacccttagagcccacaaatgaatggtatgccattgccaagattgctgggatcgaaatgtgtcaagcttacagaattcagcataagtgggatgcaatttcgggaatgcccaccaacttatatggaccatatgacaattttcatcccgagaattcgcatgtgttacctgctctcatgagaaggtttcatgaggcaaaggtcaatggtgctaaggaggtggttgtgtggggcaccggaagtccattgagggagttcttgcacgttgacgatttggcagacgcggttgtcttcatgatggaaaagtatagcggactggagcatttgaatgtagggagtggaaaggaggttactattaaggaattggctgagttgatgaaggaagtggtgggatttgaaggggatcttgtttgggattctactaagcctgatgggactccaaggaagctgatggatagctccaaacttgcaagcctgggttggacaccaaaagtctcactcaaggatgggcttgctgatacctacaagtggtacttggagaacgtaaatctatgattcagatggttaagcagaatgtgccatgtcaaattttataggtacttgtcatttcacaacgaagaattttttgttaaaaaaataattatccagagaacagtacttgaccaatttttctgtaccaattatgtcatgtgcaatgaaaatttcagtgctttttttcgtgttttcaaaagatcatgagattaagaaccatttgttggaaactatgaacagagtttttatttgcacatcatattaaagactcaaagtcgtgcatcaaataagtgttataattattgcgtgatgactattcgacacaaatggtggtgctccttcaaggcttctgaagtgtttgttgaataattttcattccaataagattcctttgtcaaaatctactgtggattataacttgaatgctttctcgtggatgagcatg

SEQ ID NO: 27086 - DNA, 426 bp, Glycine max
  unsure (1)..(426): unsure at all n locations
  Clone ID: TF_jC-gmro02910071g08a1
ggctcgaggaacgcagggttaactctaatatgaacatttcacatgcccttgcaaagatgactggtgcttcggctgatatcatcctaacatcctcgtcagccttcataatcttcttgatccttgccaggggaagactgtggttcttggaatcacactgaagagaacaaaaggcgaacacttcaaaaaaatgatattgctgctgcaatcacaaggactgacatctttgatttcttggttgacattgtgcctcgtgaggacttgaaagatgaagtgcttgcatcaatcccaagaggaacaatgcctgttgcagggcctgctgatgcccttncatattgctacatgccgcctcagcatgcgtccaaagttgagctgttggtgtattatggggtagcctgtgatggacccaacatgtatgctcagcagtct

SEQ ID NO: 27087 - DNA, 573 bp, Glycine max
  Clone ID: TF_GmC78471_1
agggggtgggcacacgacaaaataaaaataaaaactttcccactttgcttcttcgtcttcttcaacgacaaaataaagtggggtttcgccttcttctccaaaatatgaggaagaagctagatactcgtttccctgcggctaggattaagaaaattatgcaagctgacgaggatgtagggaagattgcaatggctgtgcctcttctagtctctaaagcactagagctatttctgcaagatttgtgtgatcaaacatatgagataactttgaggaggggggcaaagactatgaatgcttttcatttaaaacagtgtgtgcagacttttaatgtctttgattttctgaaagatattgtcagcaaggttcctgatttaggctcttctgttgcaaccggtgatgaccatgctgtcactaagaggaggaaagttgccggagatgatgataatgacagcgacgaggaactcaagagaaataagaagccagagcctggacatagcagtggcagaggaaggggtaggggtcgtggccgtggaatcagaactgtagatcaagagatagggttcacatgcccaa

SEQ ID NO: 27088 - DNA, 657 bp, Glycine max
  unsure (1)..(657): unsure at all n locations
  Clone ID: TF_GmC240_1
gccgcgtcgtagctcggacggaggaagaagaaagcggagtatcgatacaactggaattcccgaagggtcgggtgaagaagattatggcgctggacaaagacgtgaagagggtgagctcagaagcgttgtttctggtgtcgcgctccacggaattattcctccaattcctggctgaaaaatcggcgcaggttgcgattgaaaagaaacggaagaccgtgaatctggaacatataagagaggccgtgaagaggcaccagccaacccgggattttctcctcgacgagcttccgccgccatctcagcccaccaagcccgataggcccactcagcctgccggtcggcccaaattggatcctcctccccgtggtactcgccgcatcgatctatttttccggaaaccagaacttgacaacccagcccaagcccaaccacctgaaaatccagctcaagctcaaccgcctgaaaatccagaccaagaccaagcccaatcgccagtacccgtagatgagtcttaggttttgtttgtttatacacctgcgtttgagattttgtatccgatctgaatctgagataacatctaacaatgcattagcgaaaatatgggattctaattagttattcgcatattctattatggtccatattcnnncnnnnnct

SEQ ID NO: 27089 - DNA, 1670 bp, Glycine max
  Clone ID: TF_GmC1633_1
tcacggctgcgagaagacgacagaaggggcctccctttttaattgaaaccaaaccaaaccaaaccaaaccaaacctctctttctcagtttctctctcttagggttttctcctcccccattgacccaccgtccatcgcaaaggaagtcgcgcccaatttccatggtttgtagattaaatcttaaagcagtaagtcatcatggataaatcagtgcatactcagcagcaacatcagcatgggatggcgcgttgccacagttgctagccaaatggcctattcttctcactacccgactgctcccatggggggctccagcacccctgctattggcctattcttctcacaacccgactgcagccatgttggctactggtacgcccgatgtaacatatccttccgcacatcaggctcaagatgaccagcagagatacccacaacagcaggttcaaatgttctgatcaaaccaaatgcaacaaaatgagcaaacaaatgaccataaaaaccacagtcttccgcttgctcagatacaaaaaatagtgcaagctgatgaagatatacggatgatttctgcagaagctccagtcatatttgcaaaagcatgtgaaatgttcatattagagttgacgttgagatcttggatccacacagaagagaacaagaggagaactctacaaaagaatgatatagcagctgctatttcgagaaacgatgtttttgatttcttggttgatattatcccaagagatgagttgaaagaggaaggacttggaataaccaaggctactattccattggtgaattctccagctgatatgccatattactatgtccctccacagcatcctgttgtaggacctcctgggatgatcatgggcaagcccgttggtgctgagcaagcaacgctgtattctacacagcagcctcgacctcccatggcgttcatgccatggccccatacacaaccccagcaacagcagccaccccaacatcaacaaacagactcatgatgaccatgcaattcaattaggtcggaaagtagcatgcaccttatgattattacaaatttacttaatgcctttaagtcagctgtagtttagtgttttgcattgaaaaatgccaaagattgtttgaggtttcttgcactcatttatgattgtatgagctcttatgctgagttacttttggttgtgtttatttgaggtactggtgtggtagttaaattagtttgtagctgtccataagtaaacagcgtagctgcttaattaggaggtctgaaatgatgaaatagtttgtattgttattgcagaaggtaggttttattcagtatttcattttactgcaatggctgaatttattgctcatccgcttagtactagttgatgttttttcctgtcactcgttatgtgttgagtgtgaagaaaaattagtgtgccatttttcacctgtaaatgcacactacagccccggaagaacaaattgttccgatcattttcaattttttttcccggtaacatgaaaagtggttgatgttaaatgctgtccctgtaaaaaaaaaaaaaaaagaattgacagcaggaaaaaaaaaataacgagctgttctttttcttgattcaaaaccacataaatatatccagattagttttatagttaataattgattttattcggaag

SEQ ID NO: 27090 - DNA, 1275 bp, Glycine max
  Clone ID: TF_GmC1000_1
gcatgacggaagagctctctctctctcttgttcttatccatcgcattgaaaagcagcaccatcaccacccccacctcttaccccttctttcataaatatgcgtctctgcaacaacatgttcaccaccacctccttgttcttcacatcatcctcatcatcttcttcaatcagttgactcttcgttcctccctctattctttcggatggagcccatggacatcgttgggaaggccaaggaagacgcttctcttcctaaagcgacaatgacgaaaattattaaagagatgttgcccccggacgtgcgtgtcgccagagatgcacaggatttattgatcgagtgttgtgtcgagtttataaaccttgtctcgtcagagtccaatgaagtctgtaacaaagaagaaagaaggacgattgcaccggagcacgtgttaaaggctttaggggttcttggatttggcgagtacattgaggaagtttatgcagcatatgaacaacacaagttggaaacaatgcaagattctttaaaaggtgcaaagtggagcaacagagctgagatgactgaggaagaagcattggctgaacagcaaaggatgtttgcagaggcacgtgcaagaatgaatggaggagccattcaatccaaggagccagaggctgaccaaagtttagagagctaactttataggacacttttattttcttttgaagcataggcaagcagcatctcttactcttccctaatccttgtttatttaggctggattttgcacataatcccatattctagtttgcttgcctaccttaatggactctgctcgctatttgtgttctgttagtaattatatatgttaatgaatttatgagagaattaatctaaaatctcttcattattgtaatatgtattatatttcctttctgtagtatttaccttatgacaactttttgctcttactcttccctatgcgttgttaatttagctcgattttgcacatacccccattcactagtttgctggcctacgtgaatgtactcgccatttgtgttcttttagtaatccatatttgtaagttaatgtaattattggagttcatctaaaccctcgtctatttagaattttacatgtagattatttcatttacctgttgtatctcccacaccaacaacagctattgccttgattttgacaatagttgctatattagaatgtaacaatctattatattctgttatatagaaagtcgtgaaggttttacaccagcaaataaactattcttttat

SEQ ID NO: 27091 - DNA, 878 bp, Glycine max
  Clone ID: TF_GmC1000_2
cataaatatgcgtctctgcgacatgttcaccaccacctccttgttcacatcatcatcatcatcatcatcatcatcttcttcttcttcaatcagatggagcccatggacatcgttgggaaggccaaggaagacgcttctcttcctaaagcgacaatgacgaaaattattaaagagatgttgcccccggacgtgcgtgtcgccagagatgcacaggatttattgatcgagtgttgtgtcgagtttataaaccttgtctcgtcggagtccaacgaagtctgtaacaaagaagaaagaaggacgattgcaccggagcacgtgctgaaggctttaggggttcttggatttggcgagtacattgaggaagtttatgcagcatatgaacaacacaagttggagacaatggtgattatgttaatgaccaatgtgcatgatatatattacaacttaacagcataattgtttttgtcttgtataatattcatccatcaattgtttattgggtgattagttttataagaatccatgaattttttgggagcatggcctgtgtggtttgaccgagccagtctgggctcccatataatttgttgagggacccattaaaatggtattctgtaggaaaaagcactggaaaggccctaatgggctgataacctgaccatggtcccctcttctgttttcattaagtgttttaaatatatgatgtctgagagctcagcctataacttttctggctggtgaaattgaaattaccaatgatttatgaatctccacttatgtgtatggtccattctatagttgttgagtatcccatttgtaaattactgagtgctctgcaattgtgatttgtgattcataatgtaaggtttggtcatgca

SEQ ID NO: 27092 - DNA, 848 bp, Glycine max
  Clone ID: TF_GmC1000_3
atctatcgcattgaaaagcagcaccatcaccaccccctcgtcttccccccttctttcataaatatgcgtctctgcgacatgttcaccaccacctccttgttcacatcatcatcatcatcatcatcatcatcttcttcttcttcaatcagttgactcttcgttcctccctctattcatctgatggagcccatggacatcgttgggaaggccaaggaagacgcttctcttcctaaagcgacaatgacgaaaattattaaagagatgttgcccccggacgtgcgtgtcgccagagatgcacaggatttattgatcgagtgttgtgtcgagtttataaaccttgtctcgtcggagtccaacgaagtctgtaacaaagaagaaagaaggacgattgcaccggagcacgtgctgaaggctttaggggttcttggatttggcgagtacattgaggaagtttatgcagcatatgaacaacacaagttggagacaatgcaagactctttaaaaggtgccaagtggagcaacagagctgagatgactgaggaagaagcattggctgaacagcaaaggatgtttgcagaggcacgtgcaagaatgaatggaggagccattacttccaagcagccagacgctcaccaaagtttagagagctaactttaggacacctttattttcttttgaagcataggcaagcacatctcttctcttactcttccctatgcgatgttaatttagctcgattttgcacaaatccccattcactagtttgctggcctatgtgaatgtgctcgccatttgtgttcttttagtaatccatatttgtaagtaatgtaatttattggagttcttcc

SEQ ID NO: 27093 - DNA, 1553 bp, Glycine max
  Clone ID: TF_GmC1000_4
gcatgacggaagagctctctctctctcttgttcttatccatccccgtgaaaagcagcaccatcaccacccccacctcttaccccttctttcataaatatgcgtctctgcaacaacatgttcaccaccacctccttgttcttcacatcatcctcatcatcttcttcaatcagttgactcttcgttcctccctctattctttcggatggagcccatggacatcgttgggaaggccaaggaagacgcttctcttcctaaagcgacaatgacgaaaattattaaagagatgttgcccccggacgtgcgtgtcgccagagatgcacaggatttattgatcgagtgttgtgtcgagtttataaaccttgtctcgtcagagtccaatgaagtctgtaacaaagaagaaagaaggacgattgcaccggagcacgtgttaaaggctttaggggttcttggatttggcgagtacatcgaggaagtttatgcagcatatgaacaacacaagttggaaacaatgcaagattctttaaaaggtgcaaagtggagcaacagagctgagatgactgaggaagaagcattggctgaacagcaaaggatgtttgcagaggcacgtgcaagaatgaatggaggagccattcaatccaaggagccagaggctgaccaaagtttagagagctaactttataggacacttttattttcttttgaagcataggcaagcagcatctcttactcttccctatgcgttgttaatttagctcgattttgcacatacccccattcactagtttgctggcctacgtgaatgtactcgccatttgtgttcttttagtaatccatatttgtaagttaatgtaattattggagttcatctaaaccctcgtctatttagaattttacatgtagattatttcattaaactgatgaatctcccacaccaacaacagctattgccttgattttgacaatagttgctatattaaaaaggtgcaaagtggagcaacagagctgagatgactgaggaaaaagcattggctgaacagcaaaggatgtttgcagaggcacgtgcaagaatgaatggaggagccattcaatccaaggagccagaggctgaccaaagtttagagagctaactttataggacacttttattttcttttgaagcataggcaagcagcatctcttactcttccctatgcgttgttaatttagctcgattttgcacatacccccattcactagtttgctggcctacgtgaatgtactcgccatttgtgttcttttagtaatccatatttgtaagttaatgtaattattggagttcatctaaaccctcgtctatttagaattttacatgtagattatttcatttacctgttgtatctcccacaccaacaacagctattgccttgattttgacaatagttgctatattagaatgtaacaatctattatattctgttatatagaaagtcgtgaaggttttaccccagccaaaaaaaaaaaaaaaaaaaaaaaaaaaaaaaaaaaaaaaaaaaaaaaaaaaaaaaaaaaaaag

SEQ ID NO: 27094 - DNA, 364 bp, Glycine max
  unsure (1)..(364): unsure at all n locations
  Clone ID: TF_7924671
gaagcccatagacatcnttggaaaagccaaagaagacgcttctcttcctaaagcaacaataacgaaaattattaaagaaatattacccccaaacatacatatcaccagagatacacaggatttattaatcaagtattatatcaaatttataaaccttatctcgtcagaatccaataaagtctataacaaagaagaaaaaagaacgattacaccgaagcacatatgaagaactgttaaaattctgaaatttagcgagtacattagagaaggggatacagcatatgaacaacacaaagtgaaaacaatgcaacattctntaaaagatgcagagaagaacaacagacctgagatnactgaagaagag

SEQ ID NO: 27095 - DNA, 882 bp, Glycine max
  Clone ID: TF_GmC275948_1
atatcataataaaaatattatttatatatattatactatatgatatgatataatatataatggggaagggacatgaacttgttggtatgcatatcacatttaccattcaaccctataacgtaggatgggtggcatcattctattgccacttgcatcttgaatttgatcagcactgaccgcactttgagcaatggaactttctctataaccattgatccctcccatctcagtgaagctctttggagcagctacttgaggccccacagaatagaagccaccagcactgaaagtagtgttgttgaagtctgcagctttgttggttgctgccacagaatgatgcaacttgttgatttcaaccacccccatcaatattggtttgatgagttggagagtgttcttcttgttttgccatagaactcttttctccctcagtttccctgtagttgttcaggtagaacttcaagggtccaacatagttctcaaatcctagtgttgtcatggcccaaagaagatcatcaccattgattgtcttcctcttttccctctggcacttgtctgaggcctcaccagtgatgaagcttatgaactcagacacacactcttgaactgtttcttttgcttcctttgagattttggcattggctgggagtgcccttttcatgattcggctaacattggctatagggaggaacctgtcttgttcttttgaggaggagctgtctgagatgttaccagatgttggacttcccacaggacttgttgtaatttggtttctcttccctgtcatgttaatggaatagacaataatagagccactcacggaataagctaaacaattgagattctcaccttcaccctctctccctatgtgtgcaagttaag

SEQ ID NO: 27096 - DNA, 1085 bp, Glycine max
  Clone ID: TF_GmC720_1
cagccatgtctccacgcgtccgcccacgcctgcgagaagagacagaagggggtgaaaccgtcatcataaattcatatatcatcagcctcagccatgtcttcttcgctcttgcacctcctcttccttccacaactacgatcttcgatagtgctttctcagattcttccttcgtggtaaccggtcgaatcatggagcccatggacattgttggcaagtcaaaggaagacgcttcgcttcctaaagcaacaatgacaaaaattattaaagagatgttacccccagatgtacgtgttgcaagagatgcccaagatctattgattgagtgttgtgtagagtttataaaccttgtctcgtcagaatccaatgaagtttgtaacagagaggataaacggacaattgcacctgagcatgtattgaaggctctacaggttcttggatttggtgagtatgttgaagaagtttatgcagcatatgaacagcacaagctggagaccatgcaggactctttaaggggtggtggtaaatggagcaatggagctgagatgactgaggaagaagcattagcagagcagcaaaggatgtttgcagaggcgcgtgctaggatgaacggtggagccattgcttccaagcagccagatgctgaccaaagtttagatagctaactttaggatcttcattgaagcatagacaaagcaccaccctgactcctgtctgtgcttccaatgagctcgatggtgtacaaaaaccattcactagtttgctggcccatgtggatgtgctcatttgtattctttcgataaatccatatttgtaagtcaatgtaattagtgagagatcatgaaaaccctcccgtttagcatttacttgtaattatttaatttacgtttttgtatcttctacatactaacaactcctagcttgattctgacagtagctactatgttagattgtaacaaattattaaatatgtagaagcaatagtgctctgtttatttgttacaaaaaaagaaacaaaatgggcagatcatggaaggaacatatattccacaaatgactatatgtatggactagttgaaagatatagg

SEQ ID NO: 27097 - DNA, 693 bp, Glycine max
  Clone ID: TF_700872266_FLI
ctcctccgtttttcttatttatcatcgcctgcttttaatttataattccttgaattctgtagggcctctgataagtgtcagagagaaaagagaaagactattaacggcgatgatttgctctgggcgatggccactctcggtttcgaggattatatggatcctcttaaaatttacctcactagataccgagagatggagggtgatacgaagggctctgccaagggtggagactcatctgctaagagagatgttcagccaagtcctaatgctcagcttgctcatcaaggttctttctcacaaaatgttacttacccgaattctcagggtcgacatatgatggttccaatgcaaggcccggagtaggtatcaagtttattattgaccctcttgttgtaacgtatgttttctacgccagttaccaagtgctcacggcatattgaatgtctttttatgttatgtgaatactgacaggagatgttggttcttgtgtccgtttttttttttaaattaaggtttgtatattatctttggattcgaattattatttgaaagttattattatattgtaaatcctagagccctgttgtctgaatccatcaggcggcttggtaaagaccgagattttaggactgattgtaagcataaatccgaatattcttttcctaatttctttgcacaataatgtatgaagaa

SEQ ID NO: 27098 - DNA, 903 bp, Glycine max
  Clone ID: TF_GmC7912_1
ccacgcgtccggccgattcactactcgcacggcacatgcaccctcctctatctctctctgcagcataagcacagcatcatagaccctttctcaaaaaatagggttcctccgttagggttagaggtcacaccatcttacactatactaacccctagccagccagcgagtttgagtgcttgggggtgcaatggcgggagtgagggaacaggaccagtacatgccgatagcgaacgtgataaggatcatgcgtcggattctgccagcgcacgcgaagatctcagacgacgcgaaggagacgatccaggagtgcgtgtctgagtacatcagtttcatcacggcggaggcgaacgagcggtgccagcgggagcagcggaagacggtgaccgcagaggatgtgttgtgggcgatggagaagcttggctttgacaactacgctcaccctctctctctttaccttcaccgctaccgcgagagtgaaggagaacctgcttctgtcagacgcgcttcttctgcaatggggatcaataataatatggtgcaccccccttatattaattctcatggctttggaatgtttgattttgacccatcatcgcaagggttttacagggacgatcataacgctgcttctggatctggtggttttgttgcgccttttgatccttatgctaacatcaaacgtgatgccctgtgatcatgtaagaacaacaactagtgcatgctgctttttcccttggttagttatattcaagcccaagcccatgcaggtgcaggtgcaactatttagcttcatctacaaatcttttttcctctcttctaaacatgctttaattatttagagacaatacttgttattcattgttatgctcaattgctagcttctattcatcgtcgactgtctgt

SEQ ID NO: 27099 - DNA, 1217 bp, Glycine max
  Clone ID: TF_GmC1642_1
acgaggctcttataatcacacacacacctaccttaatagctatggaaactggaggctttcacggctaccgcaccacgcgtccgaagacgacagaagggggcctacttcatctctcttataatcacacacacctaccttatagctatggaaactggaggctttcatggctaccgcaagctccccaacacaacctctgggttgaagctgtcagtgtcagacatgaacatgaacatgaggcagcagcaggtagcatcatcagatcagaactgcagcaaccacagtgcagcaggagaggagaacgaatgcacggtgagggagcaagacaggttcatgccaatcgctaacgtgatacggatcatgcgcaagattctccctccacacgcaaaaatctccgatgatgcaaaggagacaatccaagagtgcgtgtcggagtacatcagcttcatcaccggggaggccaacgagcgttgccagagggagcagcgcaagaccataaccgcagaggacgtgctttgggcaatgagtaagcttggattcgacgactacatcgaaccgttaaccatgtaccttcaccgctaccgtgagctggagggtgaccgcacctctatgaggggtgaaccgctcgggaagaggactgtggaatatgccacgcttgctactgcttttgtgccgccaccctttcatcaccacaatggctactttggtgctgccatgcccatggggacttacgttagggaaacgccaccaaatgctgcgtcatctcatcaccatcatggaatctccaatgctcatgaaccaaatgctcgctccatataaaattaatgaagagtactgttcagtaggagaacaagacttcttggacttgattagcttaactctcagtgattggtgttagagtactgttgttgaggatggttaattttataattaagggctgggaattggggagttagtatatattcctaatcctaattatgtgcatctttaatttatggaataactttgttttttgttttaacttctgataatttggattttctgatgtcgaatgtggttttgtctatcccttattaacagtgccaagcttaaggttttacccatgctccaaaatggaaaacttgtactgtaatgttgtcctggtagtgatggtaattaaacctgcaagttatgtttatgtataaaccccctattgctcaaaattagagaaattatccttt

SEQ ID NO: 27100 - DNA, 1014 bp, Glycine max
  Clone ID: TF_GmC1642_3
acggctgcgagaagacgacagaagggggcctacttcatctctcttataatcacacacacacctaccttaatagctatggaaactggaggctttcacggctaccgcaagctccccaacaccaccgctgggttgaagctgtcagtgtcagacatgaacatgaggcagcaggtagcatcatcagatcacagtgcagccacaggagaggagaacgaatgcacggtgagggagcaagacaggttcatgccaatcgccaacgtgattaggatcatgcgcaagattctccctccacacgcaaaaatctcggacgatgcaaaagaaacaatccaagagtgcgtgtctgagtacatcagcttcatcacaggtgaggcgaacgagcgttgccagagggagcagcggaagaccataaccgcagaggacgtgctttgggccatgagcaagcttggattcgacgactacatcgaaccgttgaccatgtaccttcaccgctaccgtgaacttgagggtgaccgcacctctatgaggggtgaaccactcgggaagaggactgtggaatacgccacgcttggtgttgctactgcttttgtccctccaccctatcatcaccacaatgggtactttggtgctgccatgcccatggggacttacgttagggaagcgccaccaaatacagcctcctcccatcaccaccaccaccaccaccaccaccatgctcgtggaatctccaatgctcatgaaccaaatgctcgctccatataaaattatataattatgactaggattcagaacaagacttgatgatgattagcttaactctcagtaattggtgctagagtactactgttgttgaggatactttattttataattaagggctgggaagggagttagtatattcctaatcctaactatgtgcatctttaatttatgaaatcactttgttttaacctttgaaaaaaaaaaaaaaaaaaaaaaaaaagcggccgctttagaggatgttatgttgttctagtgggg

SEQ ID NO: 27101 - DNA, 795 bp, Glycine max
  Clone ID: TF_GmC885568_1
ctgtgtttgagaggactaaagttaacagatgggtgacaacaacataggcaaagtcttagagagagaaggctttaagtacaacttcacggcagctgcaagtgacacctctgcacaagatgaggtgattaaagagcaagatcggttgcttccaatagcaaatgtggggcgcatcatgaagcaaatccttcctcctaacgccaagatctcaaaggaagctaaagaaaccatgcaagaatgtgtgtccgagttcattagctttgtcactggggaagcttctgacaagtgtcacaaggagaagcgcaagaccgtgaatggcgacgatatttgctgggcccttgctaccctagggtttgatgactactctgagccacttaaaaggtacttgcataagtatagggagttcgaaggggagagagcaaatcaaaataagggtaacaacaacacttatgaaaacaacattgcaaacatataaattaattatgtggaaggtgaactctttctccaattcccatgatcaatgtgattgatagttgttaatctgatcttctagttttctcctgaatttgagatactcaaggggcttgtatccttatgtgatatatatatgacgtgagtcatgtatgcatactcacgtgttttagacctgatattttcatcaagggttgaaattaccctagatgaacacatggtagcttgagaatcatgtgagttacaactaatctttgtatttgtctatccaatgataagcttggatcctttccagaaaaaaaaaaaaaaaaaaaaaaaaaaaaaaaa

SEQ ID NO: 27102 - DNA, 1143 bp, Glycine max
  Clone ID: TF_GmC1633_3
cggatgcgagcccggacgcgtgggcggacgcgtgggcaaacttgtctttctcagggggtctctctcagggttttctgctcccccattgacccaccgaccatcgcatgggaacggcccgagctttctcaggttctctttcttagggttttctccaccgtccactgcaaagtcttgcgcccaatttccatggaactgtaaagagaggatagttagaagattaaatcttaaagcagtaagtcatcatggataaatcagagcagactcaacagcagcagcagcaacaacagcatgtgatgggagttgccgcaggggctagccaaatggcctattcttctcactacccgactgcttccatggtggcttctggcacgcccgctgtaactgctccttccccaactcaggctccagctgccttctctagttctgctcaccagcttgcataccagcaagcacagcatttccaccaccaacagcagcaacaccaacaacagcagcttcaaatgttctggtcaaaccaaatgcaagaaattgagcaaacaattgactttaaaaaccatagccttcctcttgctcggataaaaaagataatgaaagctgatgaagatgtccggatgatttcagcagaagctccggtcatatttgcaaaagcttgtgaaatgttcatattagagttgacgttgcgatcttggatccacacagaagagaacaagaggagaactctacaaaagaatgatatagcagctgctatttcgagaaacgatgtttttgatttcttggttgatattattccaagagatgagttgaaagaggaaggacttggaataaccaaggctactattccgttagtgggttctccagctgatatgccatattactatgtccctccacagcatcctgttgtaggaccacctgggatgatcatgggcaagcccattggcgctgagcaagcaacactatattctacacagcagcctcgacctcctgtggcgttcatgccatggcctcatacacaacccctgcaacagcagccaccccaacatcaacaaacagactcatgatgactatgcaattcaattaggttggaaagtagcctgcaccttttgattattacaaatttacttaatgcctttcagccagctgtag

SEQ ID NO: 27103 - DNA, 710 bp, Glycine max
  Clone ID: TF_GmC1633_5
cccactcgtccgaccaaacctatctttctcagtttctctgtcttagggttttctcctcccccattgacccaccgtccatcgcaaaggaagtcgcgcccaatttccatggtaagtcatcatggataaatcagagcagactcagcagcaacatcagcatgggatgggcgttgccacaggtgctagccaaatggcctattcttctcactacccgactgctcccatggtgttctggcacgcctgctgtagctgttccttccccaactcaggctccagctgccttctctagttctgctcaccagcttgcataccagcaagcacagcatttccaccaccaacagcagcaacaccaacaacagcagcttcaaatgttctggtcaaaccaaatgcaagaaattgagcaaacaattgactttaaaaaccacagtcttcctcttgctcggataaaaaagataatgaaagctgatgaagatgtccggatgatttctgcagaagctccagtcatatttgcaaaagcatgtgaaatgttcatattagagttgacgttgagatcttggatccacacagaagagaacaagaggagaactctacaaaagaatgatatagcagctgctatttcgagaaacgatgtttttgatttcttggttgatattatcccaagagatgagttgaaagaggaaggacttgggataaccaaggctactattgcattg

SEQ ID NO: 27104 - DNA, 1515 bp, Glycine max
  Clone ID: TF_GmC343_1
cttttgttctagcacttcgcagcttttgttctcgcacttcgctgtctgaggttctggattctcagtgtttgcgaacgctgcatcatcctttggggaagaatggatcatcaagggcatagccagaacccatctatgggggtggttggtagtggagctcaattagcatatggttctaacccatatcagccaggccaaataactgggccaccggggtctgttgtgacatcagttggtaccattcaaccgcttttgttctagcacttcgctgtctgaggttctggattctcagtgtttgcggagcgcagcatcatcttttagggaagaatggatcatcaagggcatagccagaacccatctatgggggttgttggtagtggagctcaattagcatatggttctaacccatatcagccaggccaaataactgggccaccggggtctgttgtgacatcagttgggaccattcaatccaccggtcaacctgctggagctcagcttggacagcatcaacttgcttatcagcatattcatcagcaacaacagcaccagcttcagcaacagctccaacaattttggtcaagccagtaccaagaaattgagaaggttactgattttaagaaccacagtcttcccctggcaaggatcaagaagattatgaaggctgacgaggatgttaggatgatatcagctgaagcaccagtcatttttgcaagggcatgtgaaatgttcatattagagttaaccctgcgctcttggaatcacactgaagagaacaaaaggcgaacacttcagaaaaatgatattgctgctgctatcacaaggactgacatctttgatttcttggttgacattgtgcctcgtgaggacttgaaagatgaagtgcttgcatcaatcccaagaggaacaatgcctgttgcagggcctgctgatgcccttccatactgctacatgccgcctcagcatccgtcccaagttggagctgctggtgtcataatgggtaagcctgtgatggacccaaacatgtatgctcagcagtctcacccttacatggcaccacaaatgtggccacagccaccagaccaacgacagtcatccccagaacattagctgatgtgtcgtggaaattaagataaccaggcaccggaatcagttgtgaatgtcaaactgaatggttgggaagatccatactacattgcgagcagaagctgtagctgatagtttacatgcaatgcagactataaacatatgtagataatgtgctagggaaaacttaaccttatctttgatttagctggaaaaaatggtatttttcattttaattcacaggtcatcagatgataatatttatttactggtgcatagcaggatttttacttgagtttaaacttgtcatgcgcccaaaatatatcccatctttttcattcatcatgcttccttgttatacctacctatctgtggttcgctttgtgggaaaattgagttatcacatgatttgcgcacaagttgtgcaagaac

SEQ ID NO: 27105 - DNA, 1012 bp, Glycine max
  Clone ID: TF_GmC343_2
cgtcaatcctcacgacagctctgctctgctctgcttcttttgttgtcgtatttttcttctgaaaccctaaattttgtctgctctaaactttgggatctttcacacttgaaaaaaactgcttcttgtgcccgacccagcacaattctcatactatagatctttgaatcaaatataatttctgatcattttttttgtttcgtccgcagcttttgttctcgcacttcgctgtctgaggttctggattctcagtgtttgcgaagcgctgcatcatcctttggggaagaatggatcatcaagggcatagccagaacccatctatgggggtggttggtagtggagctcaattagcatatggttctaacccatatcagccaggccaaataactgggccaccggggtctgttgtgacatcagttggtaccattcaatccacacctgctggagctcagctaggacagcatcaacttgcttatcagcatattcatcagcaacaacaacaccagcttcagcaacagctccaacaattttggtcaaaccagtaccaagaaattgagaaggttactgatttcaagaaccacagtcttcccctggcaaggatcaagaagattatgaaggctgacgaggatgttaggatgatatcagccgaagcaccagtcatctttgcaagggcatgtgaaatgttcatattagagttaaccctgcgttcttggaatcacactgaagagaacaaaaggcgaacacttcaaaaaaatgatattgctgctgcaatcacaaggactgacatctttgatttcttggttgacattgtgcctcgtgaggacttgaaagatgaagtgcttgcatcaatcccaagaggaacaatgcctgttgcagggcctgctgatgcccttccatattgctacatgccgcctcagcatgcgtcccaagttggagctgctggtgttataatgggtaagcctgtgatggacccaaacatgtatgctcagcagtctcacccctacatggcaccaca

SEQ ID NO: 27106 - DNA, 727 bp, Glycine max
  unsure (1)..(727): unsure at all n locations
  Clone ID: TF_LIB4199-001-Q1-K1-E11
cacgcgtccgcctctctttctagtttctctctcttagggttttctcctcccccattgacccaccgtccatcgcaaaggaagtcgcgcccaatttccatggactcagcagcaacatcagcatgggatgggcgttgccacaggtgctagccaaatggcctattcttctcactacccgactgctcccatggtggcttctggcacgcctgctgtagctgttccttccccaactcaggctccagctgccttctctagttctgctcaccagcttgcataccagcaagcacagcatttccaccaccaacagcagcaacaccaacaacagcagcttcaaatgttctggtcaaaccaaatgcaagaaattgagcaaacaattgactttaaaaaccacagtcttcctcttgctcggataaaaaagataatgaaagctgatgaagatgtccggatgatttctgcagaagctccagtcatatttgcaaaagcatgtgaaatgttcatattagagttgacgttgagatcttggatccacacagaagagaacaagaggagaactctacaaaagaatgatatagcagctgctatttcgagaaacgatgtttttgatttcttggttgatattatcccaagagatgagttgaaagaggaaggacttggaataaccaaggctactattccattggtgaattctncagctgatatgccatattactatgtccctncacagcatcct

SEQ ID NO: 27107 - DNA, 2957 bp, Glycine max
  Clone ID: TF_GmC89_1
ttatgctaaaggaacgtgaaagtaaaacggacggtggcgatagaagcgtctctcatctccatcgtctcctcactcctctcttctccagcgttcattttttctcgcgcccaaatacaaaatcacatcacaacagggttccgtgcgacccaatgtccgatagctctcggcgagtcctattgctggggcggctagcggaggcagcgaacgagagcggcgagcacagtccccgctccaatttccgccgagcaggagccgcttactcacccatcgccaacatcagccgcatcatgaagaaagcgcttcctcccaacgggaaaatcgccaaggacgccaaggaaaccgtgcaggaatgcgtctccgagttcatcagcttcgtcaccagcgaagcgagcgataagtgtcagagagagaagaggaagaccatcaacggcgacgatttgctttgggctatgaccactttaggtttcgaggagtatattgatccgctcaaggtttacctcgccgcttacagagagattaagggtgattcaaagggttcggccaagggtggagatgcatctgctaagagagatgtttatcagagtcctaatggccaggttgctcatcaaggttctttctcacaaggtgttaattatacgaattcttagccccaggctcaacatatgatagttccgatgcaaggccaagagtagatattgatcctctccttcagtgtttgacatgtgtgatctaaatgccagtggaacttttatgtcaatatgtgcccttggtatattgaatgcattttatgttatgtaaacactacatgcggggatgttggttcttgtgaccagatattatttattaagacttacatttatctttggaaaagaatcattattcataagttatattgtaaattctggaacaatgcttgtctgattccatcaatcgtcctggtaacgattttatgtacctgattggaagcataaattggtatattctttccttataccatcaacatattcttgagaaaggattactgctggaaggtctggttctggaaaatatcgataatcagcaagcccttcctttttcctcattgtaattgttctctgagagccttcttcccataaacgagtttcttgtactatctgatcttcccggccttgactatggagttgcacctgcctagaaatttcaaaatcaatagctctgctcactgatgaaaatgagttcaaattttttatttcaacctttgtcccaaactttgattgcccaataggtcgtattgatacatttacatcacaacgaagagaaccttcttgcatattgccattgctcactcccaaataccgcaccaacctctgtaattctgccgcatattctgctgcttcaataccatttctcatgtcaggctcagaaactatctcaagcaaaggtacccctgccctatttagatcaacctgtgagtaatttccattctctgcatgtaggagcttccctgcatcctcttccatgtgaacccttgtaatgccaaacctcttgtggcccccaccaaactcaacaggaatatccacatcaagaaaaccagcagtggcaattggcacatcaaactgagaaatctgatacccttcggaaggtcagggtagaaatactgcttcctgtcaaacttccctgctggggggagctaaagatacaggggaactggaattccttgggttattatccatgttgtcctctgatctctttctcttcctcacatcatctgctccaactgcaacagctttacctccttgaggcttttctgtttgaccatggccagaagcccttgatttggaactctgtttattctcggcagttacttttgatgggaaggtaggtcgcacaccaccaggaaatatgtagttaggaatgttactgcgtttcacatgggacacatggatattcattccaggtttccatagagtgtaagcattgacagaatgtttaaattcttcaacagttagccttatatcaaactgttcaccttcattcactggaactccttgcttacgctgcagacccataaagtaacagtggtgaaagggtctagaattgtctgagaattcaccaggatgtggatgacattgaagcataccataagtgtgcctctcaatcttcaatgtcaactggcggagacgagactcaacccaacctttccattgtctaaggtcatctgcattctctgctgttatatctatctgtagataattcttgtatgattcaaaaaaagggataaggctcaaaaagagtatcccaatcagccttgctagcctccatagcctcacatatttcacttccccttcgaaactcatctgacataacacgcaatgtacttgatgtcacattgtaagtggagttcatacagggataaacaggagtaattataggcattagatgatatctatccttgggatttcttctaggatcccaaactggtagtccaagagatccttcttcaatagcacaaagcatgactggatttggccatcgccattgagtatataccctaaagaatcgagacactaacatatcaggaagtgcattaggatataactggcatattcgagcaacaagcaatgctaggtttataccaccaagaaaacctgcaacatttgaatatacaccacgacgcttggcccaaaacctcatgcatctcaatgtcgtgcgaaaggtctgaatatttggaaccaatcgcaggacctgatcagttactctacaaccatttagactaagaacagtttgttcgtcaacactttgtaatattgattcctgtgatatatctaaatcttcaggaataacccacaacgctaatcttgcatacaggagatcaacagaaactccattaaacttgaatttcaccacagggacatgagcatcaggcacagggtgcaattctgttacttcttgcatctcagatagcatcttctgtagcc

SEQ ID NO: 27108 - DNA, 998 bp, Glycine max
  Clone ID: TF_GmC1427_1
gtgtgttctataataaggttgtatatggtttggtgggatttgtctagagtctttagaaaagatatccatggctgagtccgacaacgagtcaggaggtcacacggggaacgcgagcgggagcaacgagttgtccggttgcagggagcaagacaggttcctcccaatagcaaacgtgagcaggatcatgaagaaggcgttgccggcgaacgcgaagatatcgaaggaggcgaaggagacggtgcaggagtgcgtgtcggagttcatcagcttcataacaggagaggcttccgataagtgccagaaggagaagaggaagacgatcaacggcgacgatcttctctgggccatgactaccctgggcttcgaggactacgtggatcctctcaagatttacctgcacaagtatagggagatggagggggagaaaaccgctatgatgggaaggccacatgagagggatgagggttatggccatggccatggtcatgcaactcctatgatgacgatgatgatggggcatcagccccagcaccagcaccagcaccagcaccagggacacgtgtatggatctggatcagcatcttctgcaagaactagataacatgtgtcatctgtttaagcttaattgattttattatgaggatgatatgatataagatttatattcgtatatgtttggttttagaaatacaccagctccagcttgtaattgcttgaaacttccttgttgagagaatatagacattattgtggatggtgatgtggcatatgtggcatacacagaatttttgtattcttctttctctctatggatttttgtgtaagggcaggactatggctttgtttgctgatcgtatagctagtatggtgctatctaggttcggatttttttctttttcatgtataatgaaaaattaacggaggaaattactcttacgttactttgaaattaattaactaactgctgcttctgcctttttttttttctcctttctgag

SEQ ID NO: 27109 - DNA, 771 bp, Glycine max
  Clone ID: TF_GmC1427_5
ctttacacaacatattattgtaaggctagctagctagccatggctgagtcggacaacgagtccggaggtcacacggggaacgcaagcggaagcaacgaattctccggttgcagggagcaagacaggttccttccgatagcgaacgtgagcaggatcatgaagaaggcgttgccggcgaacgcgaagatctcgaaggaggcgaaggagacggtgcaggagtgcgtgtcggagttcatcagcttcataacaggagaagcgtccgataagtgccagaaggagaagaggaagacgatcaacggcgatgatctgctgtgggccatgaccacgctggggttcgaggagtacgtggagcctctcaaggtttatctgcataagtatagggagctggaaggggagaaaactgctatgatgggaaggccacatgagagggatgagggttatggtcatgcaactcctatgatgatcatgatggggcatcagcagcagcagcatcagggacacgtgtatggatctggaactactactggatcagcattttttgcaagaactagataacaggtttatgcatgtgttatctcatctgtttaagcttattaaggatggtgatatttgatttatattatgtttgattttagaaacaccccagctccagcttgtaattgttgcttgaaacttcgttgttgagagaatatagccattattgtggatggtgatgtgacatgcacagaatttttgtattcttctttcttccaatggatttatctcgggccc

SEQ ID NO: 27110 - DNA, 1984 bp, Glycine max
  Clone ID: TF_GmC1427_2
tgaagaagattcctggattgattgtgaagatggctgagtcggacaacgactcgggaggggcgcagaacgcgggaaacagtggaaacttgagcgagttgtcgcctcgggaacaaggaccggtatctccccatagcgatcgtgagcaggatcatgaagaaggccttgccggcgaacgcgaagatctcgaagggacgcgaaggagacggtgcaggaatgcgtgtcggagttcatcagcttcataacgggtgaatgcgtcggacaagtgccagagggagaagcgccaggccatcaacggcgacgatctcctacggggccatgacaaccctgggattcgaagagtacgttggagcctctgacgattcacctccagcggcttccgcgagatccagggaaaccccaccgttccgtttcacctttccccttcccgccggagccgccgtcaccggtcgctggccaccgtatccgaccctcccaatacaccctttccgagtcccacacaaaattgcacgattctgtgatttcaattttcaggtctcgaggatttcgtttcagaagcgcttccatttgacgcagaaccaccgactcaaaccgattcgcgccgagttcgtgactcgaattttcaacttctcattcatattccaaatcgaatttgaaactccgaagaaaaattcaccgaacactgaatctcagtttccaaggagcttcttctacgaagagcgcttcaattccacgcagaaccaccaagtcaagccggttcgtgactcggattctcaattcctcgttcattcccgaacgaattttaaattccgaagaaaaccgcaccgaacactgaatttcagattctgaacaagtttcttccgcgaaacagcacagcacttcaatttcacgtggaacagagacaaagggattcgtggttcgaattctcaatcgattttcaaattccgaacagcgaacagtacttcaatttcacgtcgaactagtcaaagcgattcaaatcgatttcgcgaactcgtccgatattttccctgcactgacttagtgattcgtttcatctttctcagcgcgtcttcgatttttccgttagtcgatggcggactccgacaacgactccggcggcgcgcacaacggcggcaaggggagcgagatgtcgccgcgggagcaggaccggtttctcccgatcgcgaacgtgagccgcatcatgaagaaggcgctgccggcgaacgcgaagatctcgaaggacgctaaggagacggtgcaagaggtgcgtgtcaaagtttcatcagctttcatcaccggcgagggtcgccgacaagtgccagcgcgagaagcgcaagacgatcaacggcgacgacctgctctgggcgatgaccactctgggcttcgaggactacgtggagcctctcaaaggctacctccagcgcttccgagaaatggaaggagagaagaccgtggcggcgcgtgacaaggacgcgcctcctcttacgaatgctaccaacagtgcctacgagagtgctaattatgctgctgctgctgctgttcctggtggaatcatgatgcatcagggacacgtgtacggttctgccggcttccatcaagtggctggcggggctataaagggtgggcctgcttatcctgggcctggatccaatgccggtaggcccagataaatgagcctattattattagtagtaagttaaaagaaaatgtgagattcaaagtggtgattaagtgaattagtatcaaaaaagtgcgactcatttgattaaaaatatatataaattattataagtcacctcttcatctctattcgattcttattgataaaaaaaaaattagagtgaactagtataataattctgagagagttggtttgtattctgatgatgatattattattgttgattgcgatatgtatagtatgacacacttctaggttcaaaggccaaccatctgttactgattaactgttgtatcatagaaaata

SEQ ID NO: 27111 - DNA, 1395 bp, Glycine max
  Clone ID: TF_GmC18981_1
ctcatctgatgtaacaccactatatgccctttgtgatgtccacattgaaagtatggaattctagtaaggtttataagaccttggctctccaacttatgtggtttggtgctctcaaggcgcttatcaattggtctgagaggctcccaccatgtttctgatctgtaaatcaatggtctggctggtaatgctggcattgcttgagattagtcagggggctagtgcacagccatcatgcatggtggccgttgcccagacctgctaagcatggtggaatgttagatccaattacacccacgcgtccgcttaaatttcccaatcaattccatccatcgggtctttactctcttacccaacccacacacactctttctctctctctctttccctgatcatcaaaatcagaaaaaattgggggaatggagaccaacaaccagcaacaacaacaacaaggagctcaagcccaatcgggaccctaccccgtcgccggcgccggcggcagtgcaggtgcaggtgcaggcgctcctccccctttccagcaccttctccagcagcagcagcagcagctccagatgttctggtcttaccagcgtcaagaaatcgagcacgtgaacgactttaagaatcaccagctccctcttgcccgcatcaagaagatcatgaaggccgacgaggatgtccgcatgatctccgccgaggcccccatcctcttcgccaaggcctgcgagctcttcatcctcgagctcaccatccgctcctggctccacgccgaggagaacaagcgccgcaccctccagaagaacgacatcgccgccgccatcacccgcaccgacattttcgacttcctcgttgatattgtcccccgcgacgagatcaaggacgacgctgctcttgtgggggccaccgccagtggggtgccttactactacccgcccattggacagcctgccgggatgatgattggccgccccgccgtcgatcccgccaccggggtttatgtccagccgccctcccaggcatggcagtccgtctggcagtccgctgccgaggacgcttcctatggcaccggcggggccggtgcccagcggagccttgatggccagagttgagtgacatcgatgccgatgatggacagtcaggagttatgaagattctgaacttgctgcaatttagaaatggttttgtttactaaatttttatgggatgacactgtgaacctgttaactcgatgaacagcatgatttaactacttttgtacaaaaatttaaaactaaacactgatccttctgtgtgaaacatgtatgatcatctgccaatactgtttatttcctcataaaaaaaaaaaaaaaaaaaaaaaaaaaaaaaaaaaaaaaaaaaaaaaaaaaaaaaaaaaaaaaa

SEQ ID NO: 27112 - DNA, 800 bp, Glycine max
  Clone ID: TF_GmC1163_1
cgccctattgaaagaaaagaaagagtttggcactgataatggcgggaaaggaaatctaactataaaaccctaaccctaaacccattcgaatcggaatcggaagaagataatgtcggaggcggaggagctaccccggtctattgtgcgccgcgtagtgaaggataagctgtcccgttgctccgaagacggagaaatttccgtcagcaaagacgctcttctcgcattctccgaaagcggtaggatcttcatccactacctttccgcaacggctaatgatatatgtaaggagtctaagaggcagattatcaatgttgaggatgttttcaaagctcttgaggaaactgagttccctgagtttcttcgtcctctgaaagcttcccttgaagagtttaggaagaagaatgctggaaagaaagctgcagtgtcaaagggaaaggatgatgagccgagaaagaaaaggaagttggaaggtgagtcacctgataagggtgagggttctgataaagctgagttatcggataaaggagaggatcctgataaaggtgagagtgataaaggtgagagtggtgacgagaccaatgatttaaaggaatgaaggcagttgtatttgttatgactgagccagcgcgtttatgttttgtgttatgttgggaatgtgcatgactccttgtttattggatgcagcttggtattaatgtcaaaaatgtagctttttgattgtttctcagtaaaacacatcccctaccctaccccctgatgtatggagcatttcaggaaataaatgatattccatcttatat

SEQ ID NO: 27113 - DNA, 867 bp, Glycine max
  Clone ID: TF_GmC18981_3
cacgcgtccgaggcgctcaagcccaatcgggaccgtaccccggcggcgccggtggaagtgcaggtgcaggtgcaggtgcaggtgcaggcgcggccccgttccagcacctgctccagcagcagcagcagcagctgcagatgttctggtcgtaccagcggcaagagatcgagcacgtgaacgacttcaagaaccaccagctccccttggcccgcatcaagaagatcatgaaggccgacgaggacgtccgcatgatctccgccgagggccccatcctcttcgccaaggcctgcgagctcttcatcctcgagctcaccattcgctcctggctccacgccgacgagaacaagcgccgcacccctcagaagaacgacattcggcgccgccattactcgcaccgacattttcgacttcctcgtcgacatcgtcccccgcgacgagaccaaggacccccccgcgctcgtcggggcaacggccagtggggtgccttactactacccgcccaatggccagcctgccgggatgatgattggccgccccgccgtcgatcccgccaccggagtttatgtccagccgccctcccaggcctggcagtccgtctggcagtccgccgccgaggacacgccctacggcaccggtgcccaggggaaccttgatggccagagctgagcgacaaccatgccgaaacggactgtcaggagttatgaagattctgaacttgcttggcattttgattgcttgcaatttggaaatggttttgttaactaaatttttatgggatgacactatgaacctgttaactcgatgaacagcatgatttaactacttctgtacaaaaatttaaaactaaaccagtgatccttctgtgtg

SEQ ID NO: 27114 - DNA, 372 bp, Glycine max
  Clone ID: TF_LIB4127-338-Q1-J1-B8
ggctcgaggcgcacaacatgtgaccaccaccccgcgggggggacaggagcctgagcagcctcacaatcaggggactcttcgttgctccctctactctttcgggtggagcccatggacatcgttgggaaggccaaggaagacgcttctcttcctaaagcgacaatgacaaaaattattaaagagatgttgccccggggggggcgtgtcgacagagatgcacaggatttatagaacgagtgatgtgtcgaggttataaaccttgactggtcagagggcaatgaagtctgtcgcaaagaagaaagacggacaattgctccagaacacctgttaaaggcttcacgggcactggaatttggcgagtacatcagggaa

SEQ ID NO: 27115 - DNA, 468 bp, Glycine max
  Clone ID: TF_LIB4281-017-R1-K1-D6
ttccggctcgaccccgcgtccgaatttttctcctcttctgtaaacttggtccatccatgtcaatgttttttggatctcagtcaccaccgttccctttccatcgccaattaatccccccctcaatttttacttccctctcatctgccatacatacacgtctctataaacatcatccagaaaaaggtgcattgcattgattgttttctttatcgaatatatatatatatatatatatatatatatatatatatatatttgcattgtaatttgtagggtttgtgagatgtcggatgcgccaccgagcccgactcatgagagtggtggcgagcagagcccgcgcggttcgtcttccgtcgcgaggcagcaggaccgtgacctaccgattgccaacatcaggcgcattatgaagaaggctctgcctcccaacggggggattggggaggatgccagagacaccgtgcaggaatg

SEQ ID NO: 27116 - DNA, 335 bp, Glycine max
  Clone ID: TF_LIB4127-338-Q1-N1-B8
ccccaccctcagatattccctgtgcgactactctgttaatctgcgacctggcggtccgccctctatggtgtcgagtggcgcccatggacatgcgctgggaaggccaatgtttgttctctagcggttcctaatgcgacgggtggcgggagatgatgctcctagatgcgtgcccccgcggcgggtcgtgtcgccagagatgcacaggatgtatggagcgagtgttgtcccaggcttgtaagccttgtggcgtcagagtccaatgaagtctgtgaccaagaacagcgaaggacgaattgcaccggtgcacgtgcttaaggctctatggggccttggat

SEQ ID NO: 27117 - DNA, 493 bp, Glycine max
  Clone ID: TF_GmC18981_4
cccacgcgtccgatcgggtctctctgtctctctcggatcatcaaaatcagaaagaattgggggaatggagaacaaccagcaacaaggcgctcaagcccaatcgggaccgtaccccggcggcgccggtggaagtgcaggtgcaggtgcaggtgcaggcgcggccccgttccagcacctgctccagcagcagcagcagcagctgcagatgttctggtcgtaccagcggcaagagatcgagcacgtgaacgacttcaagaaccaccagctccccttggcccgcatcaagaagatcatgaaggccgacgaggacgtccgcatgatctccgccgaggcccccatcctcttcgccaaggcctgcgagctcttcatcctcgagctcaccatccgctcctggctccacgccgacgagaacaagcgccgcaccctccagaagaacgacatcggcggcggcatcactcgggccgagattttgggcttggtggggggcgtgggg

SEQ ID NO: 27118 - DNA, 548 bp, Glycine max
  Clone ID: TF_GmC718702_1
aattaagaattcataatctccaattaatttattagagttccaattagacggctaaagcaggcttggccggccatgttattggagtgaaactatgaaagcttcaaaggaaatggcatatataacactcaaacttgacactgatgctacaactaagagactactaaagctgaagttaactcagaaacacataggagtgaagtagaacaaatatgagacaagctggtgcatattcagggttactgtgtggtggggtatcaggaaggacagggccccactcactgcccttggcaaggatcaagaagatcatgaagaattctggggaggatgttaagatgatatcaggtgaggctccaattattttctccaaggcttgtgagctcttcattgaggaacttactagaaggtcctggatcatggccatccaaggcaaaaggaggactttgcacaaagaggacttggcttctgctgttatagccactgatatatttgattttttgatcactttggtttccagttctgaaagccatgcagttggtggtgccacaaat

SEQ ID NO: 27119 - DNA, 513 bp, Glycine max
  Clone ID: TF_jC-gmXLIB3563P059cd04a1
cagtttctctctcttagggttttctcctcccccattgacccaccgtccatcgcaaaggaagtcgcgcccaatttccatggaactgtaaagagattatagtttgtagattaaatcttaaagcagtaagtcatcatggataaatcagagcagactcagcagcaacatcagcatgggatgggcgttgccacaggtgctagccaaatggcctattcttctcactacccgactgctcccatggtggcttctggcacgcctgctgtagctgttccttccccaactcaggctccagctgccttctctagttctgctcaccagcttgcataccagcaagcacagcatttccaccaccaacagcagcaacaccaacaacagcagcttcaaatgttctggtcaaaccaaatgcaagaaattgagcaaacaattgactttaaaaaccacagtcttcctcttgctcggataaaaaagataatgaaagctgatgaagatgtccggatgatttctgcagaagctcca

SEQ ID NO: 27120 - DNA, 1199 bp, Glycine max
  Clone ID: TF_GmC49_1
acctgtcattctattgttatcatatcctcgcacctagaactgtggaatttcttttttgctttctatgttactgtctggcttttggagcctggacaagacactcctcttggtttcctctcttgcattattcgcatacatttgtttttgtaaatcgataccaccaatcatcgctgtccttgtcgcgccaaatacaaaaaccaaatcctctacctctctcctactgactctctcagtcttaccgggtttgtgagatgtcggatgcgccaccgagcccgactcatgagagtgggggcgagcagagcccgcgcggttcgtcgtccggcgcgagggagcaggaccggtacctcccgattgccaacatcagccgcattatgaagaaggctctgcctcccaacggcaagattgcaaaggatgccaaagacaccatgcaggaatgcgtttctgagttcatcagcttcattaccagcgaggcgagtgagaaatgccagaaggagaagagaaagacaatcaatggagacgatttgctatgggccatggccactttaggatttgaagactacatagagccgcttaaggtgtacctggctaggtacagagaggcggagggtgacactaaaggatctgctagaagtggtgatggatctgctacaccagatcaagttggccttgcaggtcaaaattctcagcttgttcatcagggttcgctgaactatattggtttgcaggtgcaaccacaacatctggttatgccttcaatgcaaagccatgaatagtttagatgcttctacgcatcttatttatttccctttaatgcttgtacgcatggcatgggtggaaacaattgtctggtgatttaatatttaggttctcgtgtagaagggtgtcagaattttgttacggtactaatgtagatttttattaatacatgtcttatttagctttgtaatacctactcaagggagagatgtgtttagggttatgctagtgattcgccatgtagcttgtcagggtgagaagcacttgcttttagagttttctttagattattatataatatataatatttgcagacactgcatttgttagtttatttagtttaggccatacagtttgcttctctcttaatgatgtaaaaaatattcacttgtcattcatctagaaaattcgtaatagtgtaatagaatctttaaagacttgct

SEQ ID NO: 27121 - DNA, 754 bp, Glycine max
  Clone ID: TF_GmC49_2
cggccgctcgagccggctggcgggagatgctaagtaaaatagtgcggctcgagctctgctttctgtgttattgtctggcttttggagccgatccaaccaatcatcgctggcgccaaatacaaaatctcatcccttcccctttctcttactgactctctttgtcaccgggtttgtgagatgtcggatgcaccggcgagtccgagtcacgagagtggtggcgagcagagccctcgcggctcgttgtccggcgcggctagagagcaggaccggtaccttcccattgccaacatcagccgcatcatgaagaaggctctgcctcccaatggcaagattgcgaaggatgcaaaagacacaatgcaagaatgcgtttctgaattcatcagcttcattaccagcgaggcgagtgagaaatgccagaaggagaagagaaagacaatcaatggagacgatttactatgggccatggcaactttagggtttgaagactacattgagccgcttaaggtgtacctggctaggtacagagaggcggagggtgacactaaaggatctgctagaagtggtgatggatctgctagaccagatcaagttggccttgcaggtcaaaatgctcagcttgttcatcagggtccgctgatgcatattgtgttgcaggtgcaaccacaacatctggttatgccttcaatgcaaggccatgaataggttagatgcttctacgcatcttatttatttcccttggatgcttgtacgcatg

SEQ ID NO: 27122 - DNA, 343 bp, Glycine max
  Clone ID: TF_LIB3167-011-P1-K1-B5
atcagtttttctaaatccatttcactaattatttctgcccttgtctcaccaaaggcaggaaccaacacttctacctctctccttctgactctctcactctcacccaggaagtcagatgtcatatgcgccaccaagccctcctcatgagaatcttggccatcatagcccgcacggatcttcatccagctcgagttatcacgaccaaaaccttacgatttccaacatctgccgcattatgaagaatgctatgtctcccaacctcaagattgctaacgattccaaagacaccgtgcatgaattctgtactcatttcatctacttcattaccaacgaagccatttat

SEQ ID NO: 27123 - DNA, 1203 bp, Glycine max
  Clone ID: TF_GmC6781_1
ggataatccagagagaggagagagaagtaaaaaggtggaggaagaagcgaaaagcgagtgagggcagtgttgcttaataaaagaaaacgaacggtggtgataggctttagtcaagatctcaatcgtctccaccttgctttcttctccagcgtccgattctctcaccgatctcgcgccaaatacaaattcgtgtcaacccaacccagggttccggcgagcatggccgacggtccggctagcccaggcggcggcagccacgagagcggcgaccacagccctcgctctaacgtgcgcgagcaggacaggtacctccctatcgctaacataagccgcatcatgaagaaggcacttcctgccaacggtaaaatcgcaaaggacgccaaagagaccgttcaggaatgcgtctccgagttcatcagcttcatcaccagcgaggcctctgataagtgtcagagagaaaagagaaagactattaacggcgatgatttgctctgggcgatggccactctcggtttcgaggattatatggatcctcttaaaatttacctcactagataccgagagatggagggtgatacgaagggctctgccaagggtggagactcatctgctaagagagatgttcagccaagtcctaatgctcagcttgctcatcaaggttctttctcacaaaatgttacttacccgaattctcagggtcgacatatgatggttccaatgcaaggcccggagtaggtatcaagtttattattgaccctcttgttgtaacgtatgttttctacgccagttaccaagtgctcacggcatattgaatgtctttttatgttatgtgaatactgacaggagatgttggttcttgtgtccgtttttttttttaaattaaggtttgtatattatctttggattcgaattattatttgaaagttattattatattgtaaatcctagagccctgttgtctgaatccatcaggcggcttggcaaagaccgagattttaggactgattgtaagcataaacccgaatattcttttcctaatttctttgtgcaataatgtatgaaaaaggctcgagcttctttttaaaaaaaaaaaaaaaaaacacgcaagggacaacggccggcaaagccgggctcctatgcccgccccgaaactttggcccccttctgaagaaaggaagggtcccttagcgtgttcgtaccggg

SEQ ID NO: 27124 - DNA, 824 bp, Glycine max
  Clone ID: TF_GmC140739_1
gaaacagttaaaaccgagagtgatgcatcttccacaatttctagtgaatctggatccattggttgcgttaataatgctaatctggcaaagagaaagactactcaaaataatagttctggttcctcgcagtggactttgctagacttgtattctggttgtggagccatgtccacagggctttgtttgggtgcatccttggctggaataaaacttgtcacaatgtgggctgtggacattaatgcacatgcatgcaaaagtttgaagctgaaccaccctgaaactcatgttagaaatgaaccagctgaagacttcttaaacctaataaaagcttgggccaagctttgtgaagagtttgcattattaggatcagaacggtcagattccgatccagacatggatgaagatgagaatgaagctgtgagaaaagaagagtcaggaaatcaatctgattcagaggaatttgaagtagaaaaattacttgctgtgtgctatggtgatccaaacgacgtcaaaaaaccaggactatattttaaagttcgttggctgggttatgcttccagctatgacacgtgggagccaatagaaggattgagtgattgcaaggaagctatgaaagattttgtgacaaaaggctacaagaaaagattattgcctcttcctggtgatgctaactttatttgcggtggacccccatgccaaggagtaagcggtttcaaccgcttcaggaatgcagcagctccattagaggacacaaagaataagcaattgcttgtttacatggatattattgattttttgaagccaaaatatgtcctcatggagaa

SEQ ID NO: 27125 - DNA, 612 bp, Glycine max
  unsure (1)..(612): unsure at all n locations
  Clone ID: TF_LIB4281-035-R1-K1-H4
cgacccagcgtccggatctttttgccaagaaaatccgggacaactcagcaaaggtagagaggatagagagaagtgatgcgaaagagaatttatgtcaagcctgtggtgaaaatgaaaatcttgtgagctgtggaacgtgcacatatgcttaccatcctaggtgtttacttccaccccttaaaggtccccttccagacaattggaggtgccctgaatgtgttagcccacttaatgatattgataagatattagattgtgagatgcggcctactactgctgctgacaatgaagccacaaaattagggtcaaagcaaatttttgtcaaacaatacctcggtaagtggaagggcctatcctatttgcattgcacatgggtgcctgagaaagagtttctgaaagcatttaagactcatcctcgnctaaagaccaaggtgaacaacttccatcaaaaaatggcatctgtcaatacttctgacgaagactttgttgccattcgacccgaatggactacagntgatcgaatacttgcttgcaggggtgatgatgatgagagggaatatcttgtgaagtggaaggagcttccatatgatgaatgctattgggagtttgagt

SEQ ID NO: 27126 - DNA, 647 bp, Glycine max
  Clone ID: TF_8827924
cagtactttacaagtaagtctgttattagcttatagatatcattgtaaatcaaactatgtgctgttcaatgaaagaactggaccagaaacagaggaaaagattgtactgttatggtggtactttcaacacccaagaccgaatacaaaatgagttcgaggtctcaccaccctccacttctcaattttctctctaacccctaactaacttctctcaattctatttatagttataactaactacagttagttatcctagctgttataactaactaacaacactttagctcttccaaaaatatctcctaacatacacctttccccatctatcaataccccctcccctcaagatggaccttgttctcaaggtcaagttgaggaaaaacagcctgcatttcatcagcaagttcccaactatcttcatggtggggtaagcctcgccatttgatgagaacttcttttctgccatcttctcaagttatactctgcattactttctctggttggacttgcagttcccaattctcattcacggctgttggtaatagttgacgggagcaagtgggcttaaccgctttcttgagcagagatatatggaacaccaaatgcatcttgctaccctcttagagttccaatttataagcgacctc

SEQ ID NO: 27127 - DNA, 532 bp, Glycine max
  Clone ID: TF_15286908
attccttctcgccttgaagaagtcaataaactaataattgctcgggatggattattggctactctaagagaaaatttgttgaagtcttaagatatcatgtgagcaaataccaacaaacgtcgtcgggacatagaatatgtagtcggtgattaggtgttcttgaagatgcaaccttacaggagaagatccttggctaaaaggattaatgaaaaactctcccctcgattttatgctcctttccaggtgtttaataaggtgggtactattgcttataagttggatcttccatctcacattaaaattcatccggtctttcatgtctctctcctcaagaaagccagtcccaacctttaccacctatgttatctgaggattggaaattacaaacttattcagattctgttttagatagtcgtgaattacaaccgggcaacgtgaaagttttaattcagtggaaaaatctccctcccagtgaaaatagttgggaatctgtggctaaattacaagagattttttcgatttatcaccttga

SEQ ID NO: 27128 - DNA, 433 bp, Glycine max
  Clone ID: TF_13789341
ggaattcggcacgaggctcaaattacgaccccaccgtcaatcttcagcaaaagggccagagcccatcacaggcaaactatcaaagcgattctttggtccgtttcaagttgttgagcgcgtaggcaagggtgcttatcggctccaacttcctgtggacgctaaactgcaccctgtttttcactgctctttgctgaaacccttccaaggcaacccaccggatactgctgcacctttacctcctacgctcttcgatcatcagtcagtaatcgcacccttggtaatcttggcaactcgcacagtcaatgatgatgatatcgaggtcctcgttcaatggcagggcttgtctcctgatgatgcaacatgggagaagtggacggaattgtgtaaggaatttcaccttgaggacaaggtgcttccccatgggcccgtggaa

SEQ ID NO: 27129 - DNA, 752 bp, Glycine max
  unsure (1)..(752): unsure at all n locations
  Clone ID: TF_LIB4167-004-Q1-K1-G11
gggccggaattaccgcttcgacccacgcgtccgggtggtgctgctgttgctcaagggggacgacaaggttttcctgttcttggtgagaatttctttgaggttcaggctattcgtcgtaagagggtgcgcaagggtcaggtgcaatacttaatcaaatggaatgggtggcctgagacagccaacacatgggagcctccagaaaatctagagtctgttcctgatgttgttgaagcttttgaggagagcttgaagtcaggcaaacatcggaagcgcaaacgcaagcatgtagtgcatcatactcaacccaagaagcggctggagcgttctaccactccttacagccttcggcgtttttcgactggtacagctgagaaccatacacagtcagctcctcctcttattgatcctagccttcctaatattcccgccttccctcgtactgtgctgttttctgatgatgtgggaaatggtgctgaaggcagcagtcttagaaaagccacaccctctaatgctaacaggtctgcaaatggttcagaaccaaatattaaaaggactgaggaaaatgattatgatcctgtgcttagtgagcttaaaactatgactgccaatgggaatgatacagacaggcttgcaatacggattccagaagccaagggttctgggccttctggcagtaacgatcaaatggatgctaaatcaaagggggtttccatggaaaacaaatgcagtggccgctgccggngatccaaaag

SEQ ID NO: 27130 - DNA, 2115 bp, Glycine max
  Clone ID: TF_GmC149_1
ggctcgagtgttgttgttgttgttgttgttgttgctgctgctgctgcaatgaagggtggtggtgggaagagaaaggcttctacctcggaggctccgaacgatgttgttgttgttgttgctgctgcttctgctccttctgatgatgctgatttgggtgttggagatgtcgggggtgtgaaagttcaaaactttgagggaaacgagggtacccagttgcggaatactgaagaacaggaagaagaaccccaccacgtggagggtgatgaaggaggagaagacgaagaagattatgccgagggagaggaagaatatgaagaagaaaatggtggtgctgttgctgggggacaacaaggttttcctgctcttggtgaaaatttctttgaagttgaagccatacgtcgtaagaggttgcgcaagggtgaggtgcaatacttaatcaaatggaatgggtggcccgagacagccaacacttgggagcctctggaaaatctagagtctgttcctgatgttgttgaagcttttgaggagagcttgaagtccggaaaacatcgtaagcgcaaacgcaagcatgtagtgcatcatactcaacccaagaagcggctggagcgttcgacaactccttacagccttcggcgtttttcaactagtacagctgagaaccatacacagtctgctcctcctcttaatgatcctagccttccagatattcccgccttccctcacactgtgctgttttctgatgatgtgggaaatggtgctgaaggcagcagtcttagaaaagccacacccagtaatgctaacaggtctgcaaatggttcagaacaaaatattaaaaggaatgaggaaaatgattatgatcctgtgcttagtgagcttaaagctatgacttctaatgggaatgatgcagacaggcttgcaatacggattccagaagctaagggttctgggccttctggcagtaatggtcaaatggatgctaaatcaaagggggcttgcatggaaacaagtgaaagtgaccgctgccggggatccaaaaggagaaaatgtggttccgtaaagaggttcaagaaagaactatatgctaatgagcctgctaatgcggaaaatccagttagcatgcctgttggtacagctgagccagaacgaacaagagatgctggtagtggtggcaatactaatcatgccagacctgctagcaatattgtaaacattgtaaagccagtaggctattcagcttcagtagccagtggaatgcaggatgttttagtaacctttgtggcttcaaagtctgatggaacagaagtgatggttgacaacaagtatctaaaagcatttaatccacttcttgtagtaccctataccttcacattattacatttaattattgggtgtattatctttttggtccctcatcttttgaggatttctgtttttagtccttaaatttttttaatctgtttttagtccctcaatttttttcgttctgcttttggtccttgatgtaaattttatcaggaactaaacgaaaatccacaaagatgagggaccaaaaatttcgtaaactccttaattatttcctcaatgcctcattaaaatgttgctatggcctcttttcacctataccctaatatttttcatatgttgcagctgatcaatttctatgagcagcatcttcgctacagccctacattgtgaccaaacagagaatagaaggtgcttttgagtttgtagttaggttcacacgattgtgcttagttagtagttttgttgaagaatgtcttacttttatagatgcagaagatagtaaagggtaagaaatgcattgtttgttagttacacgtaggtatgattttaacaagtggttgtcagtgtggctatatactgactgatgcatgctgatggcataaataactatatatttgaatgcctcaaacacacgaggatagacaatagtttcttaggagttagtcaagaatgaaaaactattttggattattgtaaatttttatggaagttcttggctatttctgagcgatttgtttgcctattataatttgaatactgattggttgattgattgacatgattctaaaggaaaatccacaattaactgtt

SEQ ID NO: 27131 - DNA, 1300 bp, Glycine max
  Clone ID: TF_GmC69_1
ggatgaaagaaatataaatagaagcagcagcgggatttggtaaagctagaaattgcaatgaagaagaggagcagcagcagcagcagcagttcagtttttgaggcgaatggagtggaggaacctcaacaaccttcatcctgtgcagcagcagcacttgatgagttgcataaagagaaaaatgagaatggagaagaaaccctcgtgccttccaatccctatcccaatcttgacgatggcttctatgaaatcgaaaccatacgccgtaagaggctacgcaagggtcagctccagtacctaatcaaatggcgtggatggcctgagactgccaacacttgggaacctcttgaaaatctacagtccgttcctgatctcgttgatgcttttgaggacagcctcaagtctggaaaacatcagaagcgcaagcgcaagcatgtggatgtgcttcaactcaccctactcaagaagcgctccgaacgttctaccacttcttacagccttagacatttcccacctctaactcccactaatgcaaatgattatgatccaaagctcagtgaacttaaggcaccaacacacactggggttcagctagataaccttgcaatacatttccaacaaccaattccaagcagaggagcaaaaaggagaaaatctgcttcttctgtcaagaggttcaagagagacaccgatgcagctgcacttcaaccaatttctgctcctatcaacatgcctgatgctaatactgcctgcaatattgtcaagattatcaagccaataggctattcagcttctttatctgacaacatgcacgatgttttagtcacctttatggctatgaggtctgatggaacagaagtgatggtggacaacagatatctcaaggcatacaatcctcttctgctgatcaatttctatgagatgcatctccggtatactcctacaccgtgactgaacagggtaatgaaggggcttcctgtgtttgctgttggtgataacaatgtagttttgtagacgcagcggatcgtgaagggtaatacttttttggttagtgtatgacgatataaccattagaccaattgtttcaaatgcctgcctgcatgacttcatactaagacaaccaagaattagagccatgaacatgactaggaaattgtatttcaaatctttgcaaacctctttaatctaattattctacatcccgttctatcctctcattattatcgactaacatgtacaagagagagacacaaatattattatggcgagatttttcattatttgtgttggatttaccgtgtat

SEQ ID NO: 27132 - DNA, 607 bp, Glycine max
  Clone ID: TF_uC-gmroLIB3259P228e07b1
ggattgagatattttcaaacacaacagtcaggtggaaagagtaattgcagataggatcagcaaagataattctggcaatgttattccagaatacttggtcaagtggcaaggactatcttatgctgaagcgacttgggaaaaggacattgatattgcttttgctcaacatactattgatgagtataaggctcgtgaggctgctatggcagttcaaggaaagatggtagattctcagcgtaagaagagcaaaggttggtagactcctcggcttttttatgggcagtgctcttttttcaataaaacttggaacatttcgacagattctgtgtatgcacttgacatggttgctggtgtggtaaacttgtgttattattacttttatctactacaatatagtttctaagttcttggaattaaattacaaaaaaaaagaccaacagtatttggtacacctttaccaattatgttgtatcactataatttgtagtgtaccagaaatccacttctgttatgttcatatcacgaggacttctcagtcttgatttacttgattctagttcaaattaaggtcattgtcttaatagcatgtcttctctattaaacatag

SEQ ID NO: 27133 - DNA, 810 bp, Glycine max
  Clone ID: TF_GmC986_10
agggtttgtaagagaaagaaaaaagaggcgcaagatgagtggtagggtttctgggaaggtgaagtggttcaacgatcagaaggggtttggattcataacccctgacgatggcagcgaggaactcttcgttcaccaatctcagatcaaatctgacggtttccgaagcctagctgaaggagagtccgttgagttcgctattgaatctgaatctgacggacgcgccaaggctgttgatgtcactggccccgacggcgccagcgtccagggaaccagacgcggcggtgatggtggccgaagctatggcgggggacgaggaggtggctacggtggtggtgggcgaggcggtggtggcggggcttgctacaactgcggtgaatcgggacatctggctagggactgcagccaaggaggcggtggagacaggtacggcggaggcggtggtggtggtggcaggtatggaggcggcggtggcggcaggtacggtggtggtggaggaggtggtggcggcggaggaagctgctacagctgtggagagtctgggcatttcgccagagattgcccatcaagtgctcgttgaaattactgttatggtggtttatgttatgcggattgttttaagtttttactttaacatgttgtagggattttaatggtttctgtcaaagctgtggcttcttataagtagatgcgtgagatttttcttttttttggttatttaaatgaaagtttctgtgttatcgttacaatctgcaaacaaaatctgtttggacctacattttgctataatgaattggatgattgttatcggtt

SEQ ID NO: 27134 - DNA, 979 bp, Glycine max
  unsure (1)..(979): unsure at all n locations
  Clone ID: TF_GmC986_23
cccacgcgtccgaagggtttgtaagagaaagaaaaaagaggcgcaagatgagtggtagggtttctgggaaggtgaagtggttcaacgatcagaaggggtttggattcataacccctgacgatggcagcgaggaactcttcgttcaccaatctcagatcaaatctgacggtttccgaagcctagctgaaggagagtccgttgagttcgctattgaatctgaatctgacggacgcgccaaggctgttgatgtcactggccccgacggcgccagcgtccagggaaccagacgcggcggtgatggtggccgaagctatggcgggggacgaggaggtggtggaggtggatatggcggtggcggcggctacggtggtggcggtggatatggtggaggcggtggctacggtggtggtgggcgaggcggtggtggcggggcttgctacaactgcggtgaatcgggacatctggctagggactgcagccaaggaggcggtggagacaggtacggcggaggcggtggtggtggtggcaggtatggaggcggcggtggcgggaggtacggtggtggtggaggaggtggtggcggcggaggaagctgctacagctgtggagagtctgggcatttcgccagagattgcccatcaagtgctcgttgaaattactgttatggtggtttatgttatgcggattgttttaagtttttactttaacatgttgtagggattttaatggtttctgtcaaagctgtggcttcttataagtagatgcgtgagatttttcttttttttggttatttaaatgaaagtttctgtgttatcgttacaatctgcaaacaaaatctgtttggacctacattttgctataatgaattggatgattgttatcaaaaaaaaaaaaaaaaaaaaaaaaaaaaaaaaaaaaaaaaaaaaaaaaaaaaaaaaaaaaaaaaaaaaaaaaaaaaaaaaaannnnnnnaanaaaaa

SEQ ID NO: 27135 - DNA, 408 bp, Glycine max
  Clone ID: TF_uC-gmropic007f04b1
ttatcgcgttctttagggtttgtaagacaaagaaaaaagatgcgcatgatgagtggaagggtttctgggaaggtcacatggttcaacgatcagaaggggtttggattcataacccatgacaatggcactgaggaactgttcactcaccaatctgacatcaaatctgacggttttcgaagactagctgaaggagcttccgttaagttcactattgcttttaaatctgcctggacgctccatgatgttgatgtcactggccccgacggctcccgcgtgcaatggacctgacgcagcgtggatcgacctcgactatatggcagtggacgatgcggcgtgacacggggatattactaagaacatgatcactgggacattccacgctgactgtgctgcttttatcattgattc

SEQ ID NO: 27136 - DNA, 694 bp, Glycine max
  Clone ID: TF_GmC986_16
aagaaaaagaggcgcaagatgagtggtagggtttctgggaaggtgaagtggttcaatgatcagaaggggtttggattcataagccctgacgatggcagcgacgatctcttcgttcaccaatctcagatcaaatctgacggtttccgaagcctcgccgaaggagagtccgttgagttcgccattgaatctgaatctgacggacgcgcgaaggctgttgatgtcactggccccgacggcgccagcgtccagggaaccagacgaggcggtgatggtggccgaagctatggcgggggacgaggaggtggtggaggtggctacggtggaggcggtggctacggtggtggtggtggctacggtggaggcggtggttacggtggtggtggaagaggcggcggcggaggaagctgctacagctgtggagagtctgggcattttgccagagattgcccatcaagtgctcgttgaatttactgttagggttgtttatgttttgcggattgttttaagtttttactttaatatgtcttagggattttaatggtttctgtccaaactatgggttcttatgagtagatgtgtgggatttttcttttttggttatttaaatgaagggtttctgtgttatcgttacaatctgcaaactaaaatctgtttgaacttacattttgctataatgaatcgtatgattgctatc

SEQ ID NO: 27137 - DNA, 918 bp, Glycine max
  Clone ID: TF_GmC986_24
cctcgtgccgaattcggctcgaggagaacaagaaaaagaggcgcaagatgagtggtagggtttctgggaaggtgaagtggttcaatgatcagaaggggtttggattcataagccctgacgatggcagcgacgatctcttcgttcaccaatctcagatcaaatctgacggtttccgaagcctcgccgaaggagagtccgttgagttcgccattgaatctgaatctgacggacgcgcgaaggctgttgatgtcactggccccgacggcgccagcgtccagggaaccagacgaggcggtgatggtggccgaagctatggcgggggacgaggaggtggtggaggtggctacggtggaggcggtggctacggtggtggtggtggctacggtggaggcggtggttacggtggtggtggaagaggcggtggaggcggtgcttgctacaactgtggtgaatcgggacatctggctagggattgcagtggaggcggtggtggggacaggtacggaggaggtggtggtggtggcagatatggaggccggcggtggcgggaggtacggtggtggtggaggcggcggcggcggcggaggaagctgctacagctgtggagagtctgggcattttgccagagattgcccatcaagtgctcgttgaatttactgttagggttgtttatgttttgcggattgttttaagtttttactttaatatgtcttagggattttaatggtttctgtccaaactatgggttcttatgagtagatgtgtgggatttttcttttttggttatttaaatgaagggtttctgtgttatcgttacaatctgcaaactaaaatctgtttgaacttacattttgctataatgaatcgtatgattgctatcaattattgttgtgatttgctatgaagattgaattgtat

SEQ ID NO: 27138 - DNA, 860 bp, Glycine max
  Clone ID: TF_GmC986_15
ggctcgaggaaaaagaggcgcaagatgagtggtagggtttctgggaaggtgaagtggttcaatgatcagaaggggtttggattcataagccctgacgatggcagcgacgatctcttcgttcaccaatctcagatcaaatctgacggtttccgaagcctcgccgaaggagagtccgttgagttcgccattgaatctgaatctgacggacgcgctaaggctgttgatgtcactggccccgacggcgccagcgtccagggaaccagacgaggcggtgatggtggccgaagctatggcgggggacgaggaggtggtggaggtggctacggtggaggcggtggctacggtggtggtggtggctacggtggaggcggtggttacggtggtggtggaagaggcggtggaggcggtgcttgctacaactgtggtgaatcgggacatctggctagggattgcagtggaggcggtggtggggacaggtacggaggaggtggtggtggcagatatggaggcggcggtggcgggaggtacggtggtggtggaggcggcggcggcggcggcggaggaagctgctacagctgtggagagtctgggcattttgccagagattgcccatcaagtgctcgttgaatttactgttagggttgtttatgttttgcggattgttttaagttttcactttaatatgtcttagggattttaatggtttctgtccaaactatgggttcttatgagtagatgtgtgggatttttcttttttggttatttaaatgaagggtttctgtgttatcgttacaatctgcaaactaaaatctgtttgaacttacattttgctataatgaatcgtatgattgttatcaatt

SEQ ID NO: 27139 - DNA, 625 bp, Glycine max
  Clone ID: TF_GmC24172_2
ccacgcgtccgcaccgcttgaggctctctttctagtttctagggtttgttgggtctcaaaatcgaagcgatttcgatggcggaagagcgattcacgggcgtggtgcagtggtttaacaatggcaagggcttcggcttcatcaagcccgacgacggcggcgaggatctcttcgtccaccagtcctccatcagatccgacggctaccgcaccctcctcgagggcgaccgcgttgagttcgccatcgccaccggagacaacgacaagaccaaggccgtcgacgtcactggcgtcgacggcgcccctctccagccccgcgcctctgccgccaacaaccgcgccggaggatccggcttcggcgccaggcgcaatggtggcagcggcgccgcgtgctaccagtgtggtgatttcggccacctcgcaagggattgcaacaggagcagcaataccggcggcggtggaggcggcagtggcggtggttgtttcaattgcggcgggttcggccacctcgcgagggattgcgtgcgcggaggaggcggcaatgtgggtgtaggcggcggttgcgggagcggatcctgctttaggtgtggtggattttgacacatggcgagggattgtgccaccggga

SEQ ID NO: 27140 - DNA, 572 bp, Glycine max
  Clone ID: TF_GmC1564_1
ggaccttagaaagagaaggaaaaaaaaaacttgtgtttcttgggaagccatgagcaccaccgagagtcaaagatataagggcacagtgaaatggttcaacgaggagaagggtttcggtttcataactcccgaagatggtggctctgatctcttcgttcactacagtgcgatccaaaccgacggcggcttccgcaccttgtcggagggtcagtcagtagagttcctcgtcactcaggacgacagcgggcgagccgcggccgtcaacgtgacgaccaccacggttaaatctagtgacagcggtaacggggaaaactctggtggtgatgctgccaatgttgagaaataagtgagaatgaattattggagtttcctgaattgcgagtatgatatttatattgatagttggacaatatactagtccattggtattttatattttattatattatctctggttattggcatttggttccaaacttgtaatacatttatcatgtgtttaacgtggttatgtagtaagttgttggatgtgtcaaaaaaatgtcaaataaaaatatatttatattattttt

SEQ ID NO: 27141 - DNA, 1045 bp, Glycine max
  Clone ID: TF_GmC1314_1
aaagaggagaaggtatagactatagagagagagagagagagagatctgatccggagcgatgagtgagagtgagaagcagagagtaacggggaaggtgaagtggttcgatgaccagaagggttttggcttcataaccaccgacgacagcggcgaggaattcttcgtccaccagtcctccatccgatccgacggcttccgcagcctcgccctcggcgagtccgtcgagttccttattgactccgatcccgaaggccgcaccaaggccgtcgacgtcaccggccctgacgaatcgccagtccagggcacccgcggtggcggaggaggaggaagaggaagctatggtggaggtggcggaagaggtggctatggtggtggcggacgcggcggaagaggtggatatggaggaggcggcggaggctatgggggaggtggctatggcggaggcggtggttatggtggaggtggcggcggcggcggcggagggggatgctataagtgtggcgagactggtcacatagctagggactgcagcccaaggtgggggtggcggtggaaggtacggcggtggtgggggtggcggcggaagctgctacaactgtggggagtccgggcattttgccagggactgcccttccagtgctcgttgatacaatagtacgggggtgtggccttgcttttgtgttctgtggttcttttgttttcttttttctaaatctgaatattaccctttagaaatagggttagctagggtgtggcttctttgcgttttcttttttcttttttcgggtttacattataagcaattagcttatgattagctcttggatttattggtttgctttttgggcttagggaaatgagagttttggtgaggttctgaaaccatcgactaaatactctgtttcctgtcgtgaacgtaatatgctctgccttaccttattttgttgaaatctttgaatatatcatggtatcatggtcctgctgttcggatggatggttgtgtatattttgaatatattgtgcaggaaatattgatttgttgtcg

SEQ ID NO: 27142 - DNA, 492 bp, Glycine max
  Clone ID: TF_jC-gmXLIB3563P068bb10a1
gcggagagcggaccccagagagccctgagcagccccaccgccgccgccggcctagttaccatcacaccccgggaggagccgcagctgccgcagccggccccagtcaccatcaccgcaaccatgagcagcgaggccgagacccagcagccgcccgccgccccccccgtcgcccccgccctcagcgccgccgacaccaagcccggcactacgggcagcggcgcagggagcggtggcccgggcggcctcacatcggcggcgcctgccggcggggacaagaaggtcatcgcaacgaaggttttgggaacagtaaaatggttcaatgtaaggaacggatatggtttcatcaacaggaatgacaccaaggaagatgtatttgtacaccagactgccataaagaagaataaccccaggaagtaccttcgcagtgtaggagatggagagactgtggagtttgatgttgttgaaggagaaaagggtgcggaggcagcaaat

SEQ ID NO: 27143 - DNA, 323 bp, Glycine max
  Clone ID: TF_jC-gmst02400008a08a1
ggctcgaggaattggtataacgatcagaacgggtttggattcataacccatgacgatggcatggaggaactgttcgttcaccaatctcagatcaaatctgacggctttcgaatcctagctgaacgagagtacgttcagttctctattgaatctgaatctgactgacgcgccacggctgtagatgtcactggacccgaccgagccagagtccagggcaccagacactgcggcgatggtcgccgaagctatggcggtggacgaggaggtgctgtaagtggatatcgctgttgcatcgtctactgtgattgcgttggatctggtgg

SEQ ID NO: 27144 - DNA, 840 bp, Glycine max
  Clone ID: TF_GmC954_1
cctcaattcagcgtaactttcccaaacccaaataagaatcttccagaaacttcttttctttcaggagccaccatggccgagactcggagatccacgggcaccgttaagtggttcaacgcgcacaaaggtttcggattcataactccccaagatggaaccgatgatctcttcgtgcacttcacttccatccgatccgacggctaccgttctttgtccgacggtcagtccgttgagtttctcctcgattacggcgacgacggccgcaccatggccgtcgacgtcacctcagccgttagatctcgtcttcccggaggatttcgcggcggcggcggtgggaggggcagaggaggaggacgctacgggggcggggaaggccgtggcagagggttcggtcggagaggaggaggccctgagtgttataactgtggaagaataggtcacttggcaagggattgttaccatggacagggtggtggtggtggtgatgatggtaggaatcggagacgcggcggtggtggtggaggaggaggagggtgttttaactgtggggaggaagggcattttgcgagggaatgtccgaatgttggaaaaggaaatgagtgagaatgtgttatggtttcttctattgaattgagtctgttactgttagttggggttggttaaatggattctgttatttttgtttctagccattggcatttccttccttccttccaaatatgtttttccagggctttgctaattgttttatctaatgcgcttcttttcaacaaagtgtgattcattatgcttgttcctcctcttgaatatgaagattgaagcgcaacggacggcttaatt

SEQ ID NO: 27145 - DNA, 301 bp, Glycine max
  unsure (1)..(301): unsure at all n locations
  Clone ID: TF_6134224
acgagcgcttttccctcgaattcagcgtaagctttccccaaagccgaaaaagaatcttccagaaacttcttttctttgaggagccatggccgaaagtcggagatccacgggcacggttaagtggttcaactcgcagaagggtttcngattcataactgcccaagatggaaccgataatctcttcgtacacttcacttccatccgatccaacagctaccgttctttatccaaaggtcagtccattaaatttctcctcaattacagcaacaacagccacaccataaccatcaacatcacctcc

SEQ ID NO: 27146 - DNA, 236 bp, Glycine max
  Clone ID: TF_LIB3051-101-Q1-K1-H12
aaagactttactcgaagcgatttcgatcgcggaagtacgattcacgggcgtcttgcattgattcaacaatggcacgggcttcagcttcatcaagcccgacaacggcaattagaatctcttccatcaccagtactccatcagatccgacggataccgcacacttctcgagggctaccgcttcgagttcgccatcgtcaccgacaacaacgacaagaacaatgccgtctacttcaccg

SEQ ID NO: 27147 - DNA, 478 bp, Glycine max
  Clone ID: TF_15285323
cgggaccttgaggaatgtccccgtaggcggcggctgccggaggaacaagaggagcagaggaagctccagcagcaacaccaggtcgccggcaaactccgatcgccaaaccgcgagtgccggctccgcttcaaccaccagtggctcctcttctgctgacttggtggccagcctcggtggcggcaccggggtgccaccgtctcttaggttcatggctccattgcatcaacttggggaccaccaccaccttggtggtggtggaggagaaatagggttaagctatggcttgaactatggcgcaatttctggtccaatgggaggaataggagacttgaatttccatataggaggcactttgagtgggggtggttctatgttatctggtttggaccaatggagggttccacaaactcaccaatttcccttcttgtctggtttggaagctacttcatcacatgggttgtacccttttgaaggtgct

SEQ ID NO: 27148 - DNA, 1453 bp, Glycine max
  unsure (1)..(1453): unsure at all n locations
  Clone ID: TF_GmC735_1
gattctccaccatctccctaaagagccatcaaactttataaaaagaaaaaacataaaagcatttgaacgccatggttttctcctctattccagtctttgtagatcctcccaattggcagcagcaaccaaataaccatcctcaagcaaataataatggtggtgacaacactcagcttcttccacctttgccaccacatcaatctctcgtggcaagttgtagcagcacactaaaccatccttcaagcacagtaataatggtggtggtaactccaagcttctcccacctttgccaccacagcaacctcatgtgggccaccaacacgattcaatcaggccaggatccatggcagatcgagctaggctagctaagataccacccttgtaggcggtattgaacagtccacgttgcgctaccaaccgttcctgtgggtgcagggtcccgtaggaacaacactctccaagaggagtagtcgctctaagtctccagcatcatcggagaaacaacaaacactttctggttccacaagtgcaatagtcccctctggtggaaccactcatgaacagattggtcatcagttgccacagccacagaaccttcccttcttggcttctcttcagaaccttaatcgttatgctgttggaaacatgggtcttgggttgcgtgagattcacggacagaacgagaacatggggtttcagattggtaattcttctgctggtggaggaatggatcagtggcgcttgcatcagcaggttcctttctttaatggttttgaatcaacttcagctgggttcatacccttttcaaaatgaaggtattaacgaaacaccttctggttttggtggtgacataacaacgaattccagggtttctcagatgccatcggttaaaatggaggaaagtggggctttgaatttgtcaagatcaacactcaataatgtctcagaaaataaccagtactattcatggactgatatgtcaggacttgcttctttttctgctactcatctcttgtaactttgaacatataacgtgtatgtggtcaataaccacatcaccggaattgttatgtccttgatggatcagagaaattctcaaacgatttggatgtgttatactgaacaccctcgacttgacttcattccaagttctcactatcatcagttgacagaaattaacgcagacatggtagaattgatgtcttctcttcttgtaattgcaattccggacattgatttgtgtttatgtttttttttttttgtttttttttcatccagtcgagtattttatgtactatatacatgggcttgctttaattgtataactgtgtgtgcatgtaatgttttgtgtttctgctttcatccagttgagtattttgtgtgctatatacatgggcttgctttaattgtataactgcgtgtgcatgtaatgttttnnnngtccgcgtannga

SEQ ID NO: 27149 - DNA, 1363 bp, Glycine max
  Clone ID: TF_GmC61107_1
cctcgtgccgaattcggcacgagggcacagagaaaaccttcctccattaatggaggaggtggaggaggaggagttttactcccaattactacaccttctccttcttcttttccctcttccacgaccagtgatgttaccctcacatccacaacaacaactgctgctactactgctgctactgctgctactactactactgctgtcgaaaacctgagatgtcctcgatgtgattcatcgaacaccaagttttgttactacaacaactacaacctcactcagccgcggcacttctgcaagacgtgccgccgctactggaccaaaggtggggctctccggaacgtccccatcggaggcggatgccggaagaataagagcattggcgtggcgagctcggtggcggggaagacagcctcgaccaagatgaaaaccattgcatcggagtttggaaaatcgccgggctttggcggtgggttcgaggtggaacacgaacttccgccaccaccgggccaaatcctctggggatcgccccaaaacacccaccttctagccttgctgagagctacacaaactcaaaaccctaaccctaaccctagtcccatgtccctcaaggaagaaggaaccctattgggccacatggtgagcactgatcagcccttggtttcaaacactttgctgagctaccgaaccttaggctatgatgctgttgcgcaagttccttcttcgcttggtctgtttgggagaaacaatcaagatcaacaacaacaaaatggagggttcctagttggggaacatcacaacaacagtggaattcaagagctttaccagaagctaaggtcatcatcaactgttaataataattattgcagtgataataactcgtcacaaatgtttatggggaacatggcttctaactattcctcttctgtgtccaacaacattttggagacaacctcggttgctgggggtgaattcggatactggaatggtccaactttttctaattggtctgatcttccaaccactaatggcgctggtgcatatccgtaacaaaaataactgttttaattttcttcaccagttaaatcttcttgttttcctgttagatagtggcatagtgctcctaattaatcactttgtatcttaagggtttggttattttgtggtttcttttggttcgggtggtatatgaatatggatctagaactttttcttttctaattccctctctagccttctatctttttttttttttttggtgtaagtttggttgatggtgtgcttggctaagttatctatggtttatttcgagggtacaagagttcaaaactgaatggagaaatcagtgtatttttaatgcttcata

SEQ ID NO: 27150 - DNA, 445 bp, Glycine max
  Clone ID: TF_GmC161628_1
gtattggactgctggtggaacgatgagaaatgttccgataggtgctggtcgacggaagaataagcacctagcctctcaataccgacacattatagtaacctctgatggaattccaacctccaggctagaaaccacggactcgtctggtctccaacagcagcatatcgcaagtcttgaatcctcagttcctttcaggtcttcagcagataacggcaccgtgttgaaatttggtcccgatatccctctttgcgaatcgatggattcaatgcttaatcttagagaccagagaagatgtgttgatgcaagttctatcagctgtgtagagtatagaggggaaccatccttatatggatcttcagtgacaactaatggtgctcaaggaagtgaattatcagaacatagtccatcaaattggctgcaatgttaccctgttcctccatgggta

SEQ ID NO: 27151 - DNA, 697 bp, Glycine max
  Clone ID: TF_GmC68522_1
tcgcccctttctctctctctacactttctctctctctccaacaccaccttttatttttttttccccttgagacaaaaacaaaagtaaagaaagaggtttatttttatttgggtctttttttattagcgaaaaaaggaataaaagaaaaagataacggaaatgtcggaggcaaaagacccggcgatcaagctcttcgggaagacgatcccggtgccggagattctgccgggatccaacggagctccggcttcgtcttccggtgatgttgttgttgatgacagtgttgacgcttcttccaccaactcttcaagggagtctcataccaacacagatgcacaagagaaagattttgataaggacacattgggagaaaaaccaactgatgacaagaaggaagatggagcccccgcccaatcatcagaagaggtcaccaatcttgatactgcctctggaacctgtgaagaatccatcactctgtccaccgagagggaggctactacattgaaaactacaaagactgaagaagaacagggcgagacaagttattcacaagataagaacctaaaaaaaccagacaaaatactaccttggcctcgctgtaatagcatggacaccaagttctggtactacaataattataatgtcaaccaaccccgtcacttctgcaagaattgccagagatactggactgctgggg

SEQ ID NO: 27152 - DNA, 1866 bp, Glycine max
  Clone ID: TF_GmC1363_1
ggctcgagggtaacaagaaagaaaaataaaaaaaaaccaaagaaacagaaatgttggagtcaaaagactcgacgatgaagctcttcgggaagacgatccctgcgccggagatctccgccggagctccggcattgtcttctggtgatgctgatgctgttggtgttgttcagaaccatggttcttcaagtgtcaatggggatggtgaagagcacgagattgagcaggacataatgggagaggaaacaactgagagtgagaaggaagatgaagtgaccaatcttgatactgtctcaagaccaggggaagtgtctattaacccctctaccaagaaggaggatcttacattgaaaacttcaaaaaagaccgaacaagaacaaggtgaaaattcccaagataaaacactgagaaagccggacaaaatactgccttgcccccgctgcaatagcatggataccaagttctgctactacaataattacaatgtcaaccaaccccgccatttctgcaagaattgtcagagatactggactgccggtggagtgatgaggaatgttcctgtgggtgctggtcgcaggaagaacaagaattttacttctcagtatcgtcagataactgttcctgaagcagcactcttgagttctcagccggacttgccaaatggagtcagtcatccttccttgaactgtaatgccacactccttgcatttgggtctgatacacccttgtgtgaatcaatgacatctgttttgaaccttgctgaaaaagcagtgaacaattccacaacaaatggatttaatggctcagaagaactagaaattccttttgcttatgttgctggagaaaaagtgaatgatgattccaataaatcttctgacatgtcaacaaagccaatggaaggtgaaaccaccaataggtcccaagaacaagtcatagagaattgtcatcccttcccacctcatgctccctactttcctggtgccccttggcctttcccatggaatccagcactgtggaactccccggtaccatcaccacctgcttttttcccacaaggatttaccatgcctctctatcctgcagcagcttattggggtcttactataccgggtgcatggagcatcccatggctagcgcaaccatcattaccaaatagcacagtgtctaactctggtccagaccccattgcccgaaccatagccatgtcttgattgccacgtcccaaaaagttaacaggaggaagtggggtttcaacaagaggactcttattgctgttcaaccatattgcaatggaaagtgagggaaagtgagataaggcttctagacccaaccagttactgttgatgtctccttgatccattagccaacaaagaatagtgggtttcctcttgggggaatgtacagggcagtgggatatgcctaaggggaaaagcaaaagtggtgaggaaaagaaagtgctctatggatgtgttgaaagcaaaatgaaatgacaatgtccaagataattagcttgatgcagaagatgtgattcaaatgtgaaagctaatgaagatagggttttgcgtgactcttgtggtagtttcaaggaacaatcctaacaaaaagaaaagcgtgagccatatcagcaatactcacaagatattgtcaaacatatttcttttaacacactttatattatgagtttaatatcatattaacagtataaaataattttacattattatttaattataatttttgagggtatctcacaatagattgtggctcgacaattttactccccttttgtttcgatgcctttcttagttcttatttcttgtacataggtgattttatgtggcctagagagacacaatgtatttgttttcc

SEQ ID NO: 27153 - DNA, 1790 bp, Glycine max
  Clone ID: TF_GmC584_2
ctccactgtgtgtgttgttatcataccctagaacaacgccacttaaactggatctcccttaatttgtatattttattgtattaatttttcttaattaccctctaaatattttcatcatcaggtggatgatcacaaggtcttgatgggttccaatggtggaagtagtaacaataataaggtaatggaaaaaccaggtcaaaatcaacttgtgcagcagcagcaacatccagaaaccctcaagtgccctcgttgtgactcatcaaacaccaagttctgctactacaacaactacagtttgtctcagcctagacacttctgcaaagcctgcaagcgctattggacaagaggtggaaccctcagaaacgttcctgttggtggaggctgcagaagaaacaagcgtgtaaagcgtccaataacaagcccttgttctgccgccattgacactgcttctaattcttctaactcttcttctgctcccactgctgctgcttcactacaaccccagatcgacactgcttcaacctcaaatcacatcaaccctttgttctatggattaccaagtagctctagcgatgtgaatcttccattgttctctaggttcggttctagaatctccagttccgggtttgatcttcagttgaataatgcccttggattaggtttttcatccggggttttgtccaatgaagctagtgataataacggttacagaagcgggtttggttcaaacaatatgcttctttcaagttatacatccactactactactactccagctatgtcttctcttttgcttcaacagaagttcatcagtggtggattgaaaaatgatgctgatagcagcaacactttccagcatggcttaagcttaacctcactagagcagttgcaaatagcaagtgatcatagcagtgaggcagggatggtggcattaaaagatgtgaaagtagaattaggacaaaacaacaacaggttggagtggaatggtggtgctttccaaagccagatccagcatgtgggcttgtacgatcctttgctttattggaataattcagcaacagctttgggtgtttggaacgatcaagctgctaatattggttcatcagtcacttctctgatctagaaaaatacaatccaatcgaatgaagaagtatggttttcaagtttgtctcccccttctgtcttgttgctgctacttttttcttttgttttgtttttcttcttttttttgggccaaaatgggaaattaaagggaggaaattaaggtgatacttgtaagaaaatgggaaagcaaaaggtgagaggagtttggatcggagcgatcatgtcagctgaatcctgcaaatatatataaatttctcttacaagattgggaaaagaattgcatatattgctctgagaggaacctgggatcctcttctctcatcttctcacagttgctgcgcagtgttctctacggaaatcctttctgttgaattaaagttccccatagttaagtaagttggtctttcattttgttatgtacatatggatgacatttcttttctttttcttatcttgtaatgaaccagctgtggttagctaggtggggtaggggatttactgggtatgatgctgtccttgaataaaggaactaatattggtttcatttttgttaactttgtgatgatttttgttttggatagggagaatgggaatatattgggtataatggtatagaagagagggggattatttacttggttttagatgattaatgagttaatgtatgtcggtggtttaatttggtg

SEQ ID NO: 27154 - DNA, 464 bp, Glycine max
  Clone ID: TF_LIB3242-349-Q1-J1-C1
tccatctttgttgcttttgactgtcttttcttctccgaaatattcatgcatggctactaccgctcactgggcaaacatggtgttcgatttttttctcttgtcttttctttgatgcacaaattccgagctgttcattctgagctggtgagatccatggaagatataggtccgaattcatgcacaaggccagtgacagagaagaaagcaagacccctagaacaattgaattgtccaaggtgcagttcaaccaacacaaagttctgttattacaacaactacagcctcacacagccaagatacttctgcaagacttgtagaaggtattggacagaaggagggtctctgagaaacgttcccgttggaggtggctctaggaaaaacaagagggtcacctcatcaaaggttcctgacttgaatccaccaattagcctctcatcagtctcagccatttcttcccaaaaccc

SEQ ID NO: 27155 - DNA, 1995 bp, Glycine max
  Clone ID: TF_GmC108_1
cccagtgccgattcttcctcccaagaaaccttcccaactcctccacttccttagacttgcccacccttttcgctgcttcttgctatctcaccctcttgctaccattcacacttctctatctaccagataattttttaccagactacaactttatattttccagattgaactgtacttgcaaaaaaagatgctcacttatcttctctctcaactttcataggcctttcttattcttccttctaagaaaccacttcaaatcatcaacttccctagacttacacaccctttgggctgtaacaagcaatctgatcctcttgttatcattcagattgatttctcttctagcacctcgatcaaagggctaaaaaaatttgctacttattgcacttttcttttcatggtttgatacatcttattgattttagtgctatttcaaggggtgaatttgagacatgggtttgagttctaagcaggtttctagcagtggacttgattggaaacaaaccttgttggaggctcagaatttggaacttccaaagcctaatctgatgaggaaacaacagcagcagcagcagcaacaacaacaacaaactcagccgaattcagagtctttgaaatgtccaagatgtgactctaccaacaccaaattttgttactacaacaactacaacaagtctcagcctcgccatttctgcagggcttgcaagacgcactggtactaaagatgaaactctactccatgtaccagtagctagttggaggatcatcttggctgctataacatcaaaaacttaactatcacacaaagtcaccaccaccacaccaatttcacatcagcattctacttggacacaaacggtcacgtaccaacttgcactttgcgttgatccattcatcatcaattagaaggccaactctacattttcgaaacctcaagcagcttgattgataccaacaatgttttcgtagtgtcaactactcttctattctccactacttctaactatgctgaggaagaatttacagaaaaaaagaaaccaagcatcaatagatttatttaatcttctacgatataatgtagtccctacaacttcacatctgccattggagatagatgaaagccaaagcgttgttttccctttctcagccttaagcagaacttttgacacaatccctggttcagtagtgtcaacctctcttagatcctccaatgtttataactatggggaggatcagtttaaagcaatagaggaaccaaacatcaatagtactactgctactatagtgcctagcacaggtggcaccaacaacacacatcatccatgggagatagcagcagcaacaagtggtgttggcttgggaacttcttcaaattcaaactattggaattgggaggattttgattcattggtttcgactgatctaaaagatccttgggatgattcagatatcaaaccctgagaaccaaacaataagcaacaacacatcatggtagtgtccatagattagttatttaattcaattggggtgttatttgtgtttcatacaggttagtaaatgatcttgttttttttcaagatggggcatgagaagtatttggagctgtcatgttttagtttcagcttcagcttcaagcaaaagggtcccaaaattcctgacaattagttgcaacccactctgtttgcctctttgttcatctctcttatcatttcctctaatctctaataataaaatggtgtattaatgtatgcaaacattgcaaagtagtgtctagcattatttatcaatataggattttgttttttttattttttattttattttttggggagttttgtgagtgctttgtgatgggagtgatatagatatggggtctgctccagcactgctgaactgacagaatgtgattggaagattctttggacatgtatatatcttggaatgatattttatcatacagttttattgctcatgattcgttatcatctccaaaaa

SEQ ID NO: 27156 - DNA, 1637 bp, Glycine max
  Clone ID: TF_GmC66473_1
ccccatcctcattctctttccaatcctaccatcatttctctttctctttctttcataaacttcaccctttgaaaatcctttctttatcttcatccatccataggcacagctcaatggccacaggatttgttggtgaaagcaatagaagctattgtggtgccaaaaacatgtccaaaggatcagcaaagtaagtcaaggccacagaaggaactcgactttatctttccatggtgtcattcaattaacaccaagttcagctactacaacaactacagtggcactcagcctaattgtttatgcaatgcttgtagatagtattggactgaaggctgaactaccttcaacatccctgtaggcggtgcctccaagaaaaaaagctattcatcatccaaggtgtcctcacattatcacaatcaccttaaacatcattcactacattctcacatactttctgaatttgtccaagagttgtataaggtatggcacactcaaaaccctaatagcaataatgctattcatcaatgccaagatctcaatctggcttttccatcctccaccccagatttcagaaaaatctctgaattggtccaacaaaacaacaacaacaacaatagtagcaacaacagcatgtcagcttcagcttcttcttcttcaaccacaactacaacttccacttctcacctttctgcattggagcttcttactgggatcacttcaagttccagtgctggtttgacttctttcatgcctgtgccggttccatctgatccaaattctatctacacatgtgggtttcctctgcaagatttcaagccaaccttgaatttctctttggatgggatcggaaacgggtacacaagccttcagaatgttcaaagtgggaggctcttgtttccatctgatgacttaagacaggtttctagctccaccatcaccacaatggatcagaaacaacaaggagattcaactgggtattggactggaatgttaggcggaggatcatggtaattaatcatcaagagagtcataaagatatatatttatttacttaatttcttctcttgctttctactaagttaattttccttttgaacttttttcttttgggttttaatgagtttccgtcagatcatgtggggacttcacttgtttggatttcttcataactggctaacagctgataggatcgattcatacatgagtttcttttcctcttctgtcaattccttatatgtatatctggctccgcttatatctcttcatgaccaagtttattttgggatcttgaaatgaagcttattttaggcaggcttcagtagtacttggaaaattaaaacaagggttacattacatttgattatatgtaatgatagaagagatcaagattaactccatttttttagggttaacaagtagctagaaaggggggccgggtaaattaagtgttattgctgttatagtatttcatgtaatttcttctatcactgaagaagggcaacatcatcaattgatttgattgtctagcttaccggattcgaaaatgtataatgtccaagaatatattattattattattaaataaattattggtatgctttttttatgattaataaattggcgtgttatgtttccattgt

SEQ ID NO: 27157 - DNA, 404 bp, Glycine max
  Clone ID: TF_LIB3167-024-P1-K1-C9
ctcaggacaatattggacttataattgtgagagtagtcatggaggggatggctcccaattcatgtgcaaggccagttgtagagaagaaagcaaggccacaagagcaactgaattgtccaaggtgcaattcaaccaatacaaagttctgctactacaacaactacagcctcacacagccaagatacttctgcaagacttgtagaaggtattggacagaaggagggtctctgagaaacgttccagttggaggtggttcaagaaagaacaagaaggtctctgtgacagcttcatcatcaccaaaggttccagacctaaacccaccaaaccactcagctatctcatcacacaaccctaaaataatgcatggtggccaagatctcaatcttgctttccagccatggaaa

SEQ ID NO: 27158 - DNA, 1099 bp, Glycine max
  unsure (1)..(1099): unsure at all n locations
  Clone ID: TF_GmC55946_1
ccacgcgtccgcggacgcgtgggttatatgtcaatccccctccccccaaattcattcccatcgatcaaattcaacgtcctttggaacgcgtgtgattcgtataaaacaaacacacatatcacataatgttcccgcagagttttaacattagtggcggtggtgccgggcttgaacaactgttgcagcctcatcacttcccatctccaatggaacaacaacaacaacgttccaggtggaaacccagcgtcgaggtggcacccaattgccctcgctgcgcctccaccaacaccaaattctgttactacaacaactacagcttgtcccagccgaggtacttctgcaaaggctgcaggcgatactggaccaaaggcggctctctccgcaacgtccctgtcggcggtggctgccgcaagaaccgccgcggaaaatcgttgcagtcgtcgtcgtcgcggcaacaacgcgcttctagcttcgtttctggggacacagagtcatcatttagtgatgcccaacagattaacaacgggtctcgtgatatagacatggctctcgtgtttgcaaaattcttgaacccaaaaccaaccactggtgaggataacaatggctcatcttcgacttccaacaattttacaccggaaagtgtagaaattgagaatgatgcagtggttcagtctcagaataaggcttcatccgatcctgttattgtagagtctgagaatttgagtttgggtgagattgatgagttggagaggttattaggtgtgtgtggcgatgaagatggtctttggtctgatgctaccttgtcttcttcggttacttgggaaccaccattgaaggagttggaatactcgatgccgttgaatgaggatgatgatgatgctcaattgttacccatcatcacttctgcatccacaatgatcagcgactcttgctggagtaattggagttcttttgatctttcaaccatggaagccttctcatcaagtccttcttaatcaattggatctgattttaattacatttactttttatttataagtttatgattttcttcttattattgtaagagaagagaagaannaganatacanncnngggg

SEQ ID NO: 27159 - DNA, 1556 bp, Glycine max
  Clone ID: TF_GmC6535_1
ccctcgctaccgcccacgcgtccgctttctctgcgtgcaagctaacctcattcatagaccatattgtacgacaaaaaccatcattatcctctccttctctctctccctccctagggattgttttgcttgctttatatatatatatatatatatatccaaacaagtcttgtggtttctattaccaacctcacttcgcaatttgcatgactcctccctccctaagatatctccattctcaaccttaatttgcactctcacgctttccctttcttctttttttcatgtcaagtactaccacttagacactcagatagatacacccacatataaaagcacgcctttgagattctaataaccttagtgtgttgtgcttagtccgattctgattgtatgaatgaatccttctagtggacaaccccagcaaatgtctagccagtcagtggagaagaagccaaagcctcatccagaacaagctctgaaatgcccaagatgtgactccaccaacacaaaattttgctactacaacaattatagtctttctcagccaagatatttctgcaagtcttgtaggagatattggacaaaaggaggaacactgaggaatgttccagtgggaggaggatgcaggaagaagagatcatcatcattaaagagggctcaagatcaaacattgacacccaatcttaatccactcactacactccctcatttgtcttatgactccaatgacttcactctagcagtagctaggtttcaaaaacaatcaagtggacaattgggttacaatgatcgtgatctttcaactttggggaaccccaccacaggctcattttgtgacattcttggcaattcaggcatgaatccctcctcagcaaacccttcatttttggatgcaattcgaactggtttccttgagacacaaaaccatcttcagaatttgtattgtatgtatggaaacggggacttgggggaggtggataatggcaattctggtgtggttggggttagtggagagatgatgctcccttacgatcaagtgataatgagcaatgcaacaactcaatcagtgagtgtaatgaagcaagaaatgtgtagtcgcagagaacaaagtgaaaggagggtgttgggggggttcccatggcagattaatgcagacactaacattggcgaacttgactcaggaagaacaattgcaagttggaacagtttcacaaattcttggcacgggcttctccaaagtcctctaatgtagaccccccgccacaagaaaaatcagaaggcacttatttcctctaatttatgtttgactaatatgtcagtcttaattttaattaaagtactgtcaatcatcttgagtagttttgggttaatagggatttaattcacttgggtccactttctttacttgtattgttttccctccgtttttttaattagctcctcaaaaactgtcaaattttctgtactattaaattatcttcttaatgatgaatagactaatgaaatttcagatttgtagtttgccaaccaatgcagtgaaggtggagggaaatagt

SEQ ID NO: 27160 - DNA, 1627 bp, Glycine max
  Clone ID: TF_GmC476_1
gggcttacacttgtaaaaaaaattcacagcagcctaatcagcaagcaggaattggcactaataatccacagattccaccacctctgcagccgtcaccaccttcatcggtgacgacaggtatcggaggtagtgactatattcaaggctctatcagaccaggatcaatggctgatagagccaggatggccaagatacaccaacccgatgcagcactcaaatgtccacgatgtgaatccacaaacaccaagttttgctactacaacaactacagcctctcacagcctcgccacttttgcaagacttgtcgtcgttactggaccagaggaggtgcactcaggagcgtgccagttggaggtggctgcagaaggaacaaaagaaacaaagggaacagtgctagatcaaagtctcctatgaaaccttcagcaagtgctaattcttcttctagtggctgcacccctgatcatgtgatgatgactcatttgccaactccaataacaccaactcaattcccattcttggcctctttacatcattataatggcgactacgtttctgggggcattggatctcattttggggcgatcacaacacctttggtggctagaaataatggcaacaacactagtgatgttgagtttcaaattggtactagttcagcttcatcacttggtaatattagtggaggggctatgttgtcaaataatggccttggtgatcagcaatggaggtttaacaatctgcaacaagttcaacatcagttccctttcttgagtactaattttgagccacaaattggggtgtttcagtttggtggtggagaaaataacaatgctgaaccgccaagttatgcaaagggtcatggaggccggtttaataatattcgttctaaaatggattctattaattctagtgtaagtggaatagtgcctcagcttaatacaataaagctggaagagaatcaaggtttgagtttgtcaaaaaatctcttgatgactagttcgggaaatggtgtactttggaataatggaagtagtggcaatgcatggagtgaggttcctagtttcattccttcacctaaccacttgttgtgatcattggaattaaactactccaattctactgctttgctttatttcctactcgccacacagatttttatgatcatagaaatgatctaatgtataagagttattagaagaacctattatatcaccttgctaactttggaacggaattctactaccctctatgcatgagtcttgtcttttgaggataaatgggatggaaggataagaagatcagaacactttgtgtaacatcaatgtgacgataaaatggtacgcaactcttcaagtaatttcctttttccatcgttggatgtcgtcgttgatatttttttgttgtactccaagtatgaacaagttgagcaaaagtattggtgtgtaattgtttatatatatgcttgtgttgtgatgacatgagcggttaattagttgatattactaattgtgtgaagctatgtggactagcctagaaggctttttatatgatgtcatttttttttatatttgctcattgttaacgatttgcaccaggtataatgtaagtttaagaaactttacacatc

SEQ ID NO: 27161 - DNA, 1319 bp, Glycine max
  Clone ID: TF_GmC551_1
cttttcgcgattattttgtcttctttccatttccctcctcacttgttctgagatcttgaaaaaaaaaaaaaaaaaactgttcgtctccatcaacctctccaacggaatagatatctctttaccctattttctcgcctcttgtttgccccctcctgcccccgccggaacccttgccttgccagcccggtgcccccccctccccaacctctgtcactcctacccctcccacctctcgcagccacgccattttgtgtttgaaaactgaagacccttttaggaataggagaatgcaggatccaacgttgttccaacccatgaaaccccactttccggaacaggagcagcttaaatgcccgcgctgtgactccaccaacaccaagttctgctactacaacaactacaacctctcgcagccacgccatttttgcaagaactgcagaaggtattggaccaaaggtggtgccttgagaaacatccctgttggtggtggaagcagaaagaacacaaagcgatcatcttcatccaacaacaacaccaaacgcgcttccccatcacccccagtttcctctgcacccgctccagaacccgaccctacccggattggccccaccccggttgttggtggcgggagtttcagttcccttttggcatcaagtggccatttgggcctggggaacctcttggagggtctgaattcaagtgggtctaatctgaaaactgtgcaaatggaagagtttggggagaatgttagttcgggtccagtggcggatccggattcgggtcggaatcccgggttggagatgcaaagcaatgggaatgctgagagttttctgagtttgcaaaatggtgattcaggctgttgtaatggtactaatggctggtctaaccttgctattttcactcctgggtcaagctatcagtaatgacaaattaatgaatatgattaccctgatctgtatatttagacatgttgtgaaaatagttatatatataattatattactggcttaagtttaagcatatatgtcgtgctattatggaggattacaaaccagaaggccactgcaataggatcactaggtaaattaagtttcttttcttttggatttttatttttatgttttgtggttggtgttcttcacatatatcaatgatgcaagagaaatggaaagcaagtcattttttaggacagggtatggggagatatgaatgttattgtagtgagattgttttcagtctcatcacgtacaggaagtgttgccatggcttggagattctaatttatttaatctatctatatacgagtattttacacgcgc

SEQ ID NO: 27162 - DNA, 1411 bp, Glycine max
  Clone ID: TF_GmC551_2
gatcatttcatctccatcaacctctccaacaaaataaatatccctttaccctattttctcgaatcttgtttgctatctcctgactccggctgaatgcttgccttttcagccagttttcctccgtcttcccaacctcaatcacacttatccatcacaccccatgtaacaactttctgtctctagctttgagctttttctttttcttttttcttcaaacacaaaacaactttctggaattagttacttctactctcaataaagtttttttttttttttttttttatcatcagcttcatttattagtattttggtcggttctatatccttcctttttctttttgtcttctttccactttcccctcactttgttgtgagatcttgacaacaaagtgcgtgcttgaaaactgaagtcccttttaggaatacgagaatgcaggatccaacgttgttccaacccatgaaaccccactttccggaacaggagcagcttaaatgcccgcgctgtgactccaccaacaccaagttctgctactacaacaactacaacctctcgcagccacgccatttttgcaagaactgcagaaggtattggaccaaaggtggtgccttgagaaacatccctgttggtggtggaagcagaaagaacacaaagcgatcatcttcatccaacaacaacaccaaacgcgcttccccatcacccccagtttcctctgcacccgctccagaacccgaccctacccggattggccccaccccggttgttggtggcgggagtttcagttcccttttggcatcaagtggccatttgggcctggggaacctcttgaagggtctgaattcaagtgggtctaatctgaaaactgtgcaaatggaagagtttggggagaatgttagttcgggtccggttgcggatccggattcgggtcggaatcccgggttggagatgcaaagcaatgggaacgcagagaattttctgagtttgcaaaatggtgattcaagctgttggaatggtactagtggttggtctcaccttgctattttcactcctgggtcaagctttcagtaatgacaaattaatgaatatgattactctgatctgtatatttagacatatgtcgtactattatggaggatcacaaaccagaaggccactgctataggatcattaggtaaagtttctcctgttttggatttttatatttgtgaattgtggttggtgttcttcagttatatcaatgatggaagagaaatggaaagcaagtcatattttagggcagggtatggggggtatatgaatgttgttgtagtgagattgttttcagtctcatcacgtagaggaagtgttgccatggcttggagattctaatttatttaatctatatatgtgtattttacacgcgcagtttgtcaa
